United States Patent Application Publication US 2020/0163878 A1 - sequence listing, part 5

SEQ ID NO: 27048 - protein, 584 aa, Artificial Sequence
  derived and/or modified protein sequence (wt) from hemagglutinin__InfluenzaB__AGX16380
MKAIVVLLMVVTSNADRICTGITSSNSPHVVKTATQGEVNVTGVIPLTTTPTKSYFANLKGTRTRGKLCPDCLNCTDLDVALGRPMCVGATPSAKASILHEVRPVTSGCFPMMHDRTKIRQLPNLLRGYENIRLSTQNVIDAEKAPGGPYRLGTSGSCPNATSKSGFFATMAWAVPKDNNKNATNPLTVEVPYICTEGEDQITVWGFHSDNKTQMKNLYGDSNPQKFTSSANGVTTHYVSQIGSFPDQTEDGGLPQSGRIVVDYMMQKPGKTGTIVYQRGVLLPQKVWCASGRSKVIKGSLPLIGEADCLHEKYGGLNKSKPYYTGEHAKAIGNCPIWVKTPLKLANGTKYRPPAKLLKERGFFGAIAGFLEGGWEGMIAGWHGYTSHGAHGVAVAADLKSTQEAINKITKNLNSLSELEVKNLQRLSGAMDELHNEILELDEKVDDLRADTISSQIELAVLLSNEGIINSEDEHLLALERKLKKMLGPSAVEIGNGCFETKHKCNQTCLDRIAAGTFNAGEFSLPTFDSLNITAASLNDDGLDNHTILLYYSTAASSLAVTLMLAIFIVYMVSRDNVSCSICL

SEQ ID NO: 27049 - protein, 584 aa, Artificial Sequence; identical to SEQ ID NO: 26567
  derived and/or modified protein sequence (wt) from hemagglutinin__InfluenzaB__AGX16391

SEQ ID NO: 27050 - protein, 584 aa, Artificial Sequence
  derived and/or modified protein sequence (wt) from hemagglutinin__InfluenzaB__AGX16402
MKAIIVLLMVVTSNADRICTGITSSNSPHVVKTATQGEVNVTGVIPLTTTPTKSYFANLKGTRTRGKLCPDCLNCTDLDVALGRPMCVGTTPSAKASILHEVRPVTSGCFPIMHDRTKIRQLPNLLRGYENIRLSTQNVIDAEKAPGGPYRLGTSGSCPNATSKIGFFATMAWAVPKDNYKNATNPLTVEVPYICTEGEDQITVWGFHSDNKPQMKNLYGDSNPQKFTSSANGVTTHYVSQIGDFPDQTEDGGLPQSGRIVVDYMMQKPGKTGTIVYQRGVLLPQKVWCASGRSKVIKGSLPLIGEADCLHEKYGGLNKSKPYYTGEHAKAIGNCPIWVKTPLKLANGTKYRPPAKLLKERGFFGAIAGFLEGGWEGMIAGWHGYTSHGAHGVAVAADLKSTQEAINKITKNLNSLSELEVKNLQRLSGAMDELHNEILELDEKVDDLRADTISSQIELAVLLSNEGIINSEDEHLLALERKLKKMLGPSAVDIGNGCFETKHKCNQTCLDRIAAGTFNAGEFSLPTFDSLNITAASLNDDGLDNHTILLYYSTAASSLAVTLMLAIFIVYMVSRDNVSCSICL

SEQ ID NO: 27051 - protein, 584 aa, Artificial Sequence; identical to SEQ ID NO: 26820
  derived and/or modified protein sequence (wt) from hemagglutinin__InfluenzaB__AGX16413

SEQ ID NO: 27052 - protein, 584 aa, Artificial Sequence; identical to SEQ ID NO: 26820
  derived and/or modified protein sequence (wt) from hemagglutinin__InfluenzaB__AGX16423

SEQ ID NO: 27053 - protein, 584 aa, Artificial Sequence; identical to SEQ ID NO: 26820
  derived and/or modified protein sequence (wt) from hemagglutinin__InfluenzaB__AGX16434

SEQ ID NO: 27054 - protein, 584 aa, Artificial Sequence; identical to SEQ ID NO: 26820
  derived and/or modified protein sequence (wt) from hemagglutinin__InfluenzaB__AGX16445

SEQ ID NO: 27055 - protein, 584 aa, Artificial Sequence; identical to SEQ ID NO: 26820
  derived and/or modified protein sequence (wt) from hemagglutinin__InfluenzaB__AGX16456

SEQ ID NO: 27056 - protein, 584 aa, Artificial Sequence
  derived and/or modified protein sequence (wt) from hemagglutinin__InfluenzaB__AGX16467
MKAIIVLLMVVTSNADRICTGITSSNSPHVVKTATQGEVNVTGVIPLTTTPTKSYFANLKGTRTRGKLCPDCLNCTDLDVALGRPMCVGTTPSAKASILHEVRPVTSGCFPIMHDRTKIRQLPNLLRGYENIRLSTQNVIDAEKAPGGPYRLGTSGSCPNATSKSGFFATMAWAVPKDNNKNATNPLTVEVPYICTEGEDQITVWGFHSDNKTQMKNLYGDSNPQKFTSSANGVTTHYVSQIGSFPDQTEDGGLPQSGRIVVDYMMQKPGKTGTIVYQRGVLLPQRVWCASGRSKVIKGSLPLIGEADCLHEKYGGLNKSKPYYTGEHAKAIGNCPIWVKTPLKLANGTKYRPPAKLLKERGFFGAIAGFLEGGWEGMIAGWHGYTSHGAHGVAVAADLKSTQEAINKITKNLNSLSELEVKNLQRLSGAMDELHNEILELDEKVDDLRADTISSQIELAVLLSNEGIINSEDEHLLALERKLKKMLGPSAVEIGNGCFETKHKCNQTCLDRIAAGTFNAGEFSLPTFDSLNITAASLNDDGLDNHTILLYYSTAASSLAVTLMLAIFIVYMVSRDNVSCSICL

SEQ ID NO: 27057 - protein, 584 aa, Artificial Sequence; identical to SEQ ID NO: 26820
  derived and/or modified protein sequence (wt) from hemagglutinin__InfluenzaB__AGX16478

SEQ ID NO: 27058 - protein, 584 aa, Artificial Sequence; identical to SEQ ID NO: 26567
  derived and/or modified protein sequence (wt) from hemagglutinin__InfluenzaB__AGX16489

SEQ ID NO: 27059 - protein, 585 aa, Artificial Sequence; identical to SEQ ID NO: 26979
  derived and/or modified protein sequence (wt) from hemagglutinin__InfluenzaB__AGX16500

SEQ ID NO: 27060 - protein, 585 aa, Artificial Sequence; identical to SEQ ID NO: 26979
  derived and/or modified protein sequence (wt) from hemagglutinin__InfluenzaB__AGX16511

SEQ ID NO: 27061 - protein, 585 aa, Artificial Sequence; identical to SEQ ID NO: 26979
  derived and/or modified protein sequence (wt) from hemagglutinin__InfluenzaB__AGX16522

SEQ ID NO: 27062 - protein, 585 aa, Artificial Sequence
  derived and/or modified protein sequence (wt) from hemagglutinin__InfluenzaB__AGX16533
MKAIIVLLMVVTSNADRICTGITSSNSPHVVKTATQGEVNVTGVIPLTTTPTKSHFANLKGTKTRGKLCPKCLNCTDLDVALGRPKCTGNIPSAKVSILHEVRPVTSGCFPIMHDRTKIRQLPNLLRGYEHIRLSTHNVINAEKAPGGPYKIGTSGSCPNVTNGNGFFATMAWAVPKNDNNKTATNSLTIEVPYICTEGEDQITVWGFHSDKETQMAKLYGDSKPQKFTSSANGVTTHYVSQIGGFPNQTEDGGLPQSGRIVVDYMVQKSGKTGTITYQRGILLPQKVWCASGRSKVIKGSLPLIGEADCLHEKYGGLNKSKPYYTGEHAKAIGNCPIWVKTPLKLANGTKYRPPAKLLKERGFFGAIAGFLEGGWEGMIAGWHGYTSHGAHGVAVAADLKSTQEAINKITKNLNSLSELEVKNLQRLSGAMDELHNEILELDEKVDDLRADTISSQIELAVLLSNEGIINSEDEHLLALERKLKKMLGPSAVEIGNGCFETKHKCNQTCLDRIAAGTFDAGEFSLPTFDSLNITAASLNDDGLDNHTILLYYSTAASSLAVTLMIAIFVVYMVSRDNVSCSICL

SEQ ID NO: 27063 - protein, 585 aa, Artificial Sequence
  derived and/or modified protein sequence (wt) from hemagglutinin__InfluenzaB__AGX16555
MKAIIVLLMVVTSNADRICTGITSSNSPHVVKTATQGEVNVTGVIPLTTTPTKSHFANLKGTKTRGKLCPKCLNCTDLDVALGRPKCTGNIPSAKVSILHEVRPVTSGCFPIMHDRTKIRQLPNLLRGYEHIRLSTHNVINAEKAPGGPYKIGTSGSCPNVTNGNGFFATMAWAVPKNDNNKTATNSLTIEVPYICTEGEDQITVWGFHSDNEAQMAKLYGDSKPQKFTSSANGVTTHYVSQIGGFPNQTEDGGLPQSGRIVVDYMVQKSGKTGTITYQRGILLPQKVWCASGRSKVIKGSLPLIGEADCLHEKYGGLNKSKPYYTGEHAKAIGNCPIWVKTPLKLANGTKYRPPAKLLKERGFFGAIAGFLEGGWEGMIAGWHGYTSHGAHGVAVAADLKSTQEAINKITKNLNSLSELEVKNLQRLSGAMDELHNEILELDEKVDDLRADTISSQIELAVLLSNEGIINSEDEHLLALERKLKKMLGPSAVEIGNGCFETKHKCNQTCLDRIAAGTFDAGEFSLPTFDSLNITAASLNDDGLDNHTILLYYSTAASSLAVTLMIAIFVVYMVSRDNVSCSICL

SEQ ID NO: 27064 - protein, 585 aa, Artificial Sequence
  derived and/or modified protein sequence (wt) from hemagglutinin__InfluenzaB__AGX16566
MKAIIVLLMVVTSNADRICTGITSSNSPHVVKTATQGEVNVTGVIPLTTTPTKSHFANLKGTKTRGKLCPKCLNCTDLDVALGRPKCTGNIPSAKVSILHEVRPVTSGCFPIMHDRTKIRQLPNLLRGYEHIRLSTHNVINAEKAPGGPYKIGTSGSCPNVTNGNGFFATMAWAVPKNDNNKTATNSLTIEVPYICTEGEDQITVWGFHSDNEIQMAKLYGDSKPQKFTSSANGVTTHYVSQIGGFPNQTEDGGLPQSGRIVVDYMVQKSGKTGTITYQRGILLPQKVWCASGRSKVIKGSLPLIGEADCLHEKYGGLNKSKPYYTGEHAKAIGNCPIWVKTPLKLANGTKYRPPAKLLKERGFFGAIAGFLEGGWEGMIAGWHGYTSHGAHGVAVAADLKSTQEAINKITKNLNSLSELEVKNLQRLSGAMDELHNEILELDEKVDDLRADTISSQIELAVLLSNEGIINSEDEHLLALERKLKKMLGPSAVEIGNGCFETKHKCNQTCLDRIAAGTFDAGEFSLPTFDSLNITAASLNDDGLDNHTILLYYSTAASSLAVTLMIAIFVVYMVSRDNVSCSICL

SEQ ID NO: 27065 - protein, 585 aa, Artificial Sequence; identical to SEQ ID NO: 26979
  derived and/or modified protein sequence (wt) from hemagglutinin__InfluenzaB__AGX16577

SEQ ID NO: 27066 - protein, 585 aa, Artificial Sequence
  derived and/or modified protein sequence (wt) from hemagglutinin__InfluenzaB__AGX16588
MKAIIVLLMVVTSNADRICTGITSSNSPHVVKTATQGEVNVTGVIPLTTTPTKSHFANLKGTKTRGKLCPKCLNCTDLDVALGRPKCTGNIPSAKVSILHEVRPVTSGCFPIMHDRTKIRQLPNLLRGYEHIRLSTHNVINAEKAPGGPYKIGTSGSCPNVTNGNGFFATMAWAVPKNDNNKTATNSLTIEVPYICTEGEDQITVWGFHSDNEIQMAKLYGDSKPQKFTSSANGVTTHYVSQIGGFPNQTEDGGLPQSGRIVVDYMVQKSGKTGTITYQRGILLPQKVWCASGRSKVIKGSLPLIGEADCLHEKYGGLNKSKPYYTGEHAKAIGNCPIWVKTPLKLANGTKYRPPAKLLKERGFFGAIAGFLEGGWEGMIAGWHGYTSHGAHGVAVAADLKSTQEAINKITKNLNSLSELEVKNLQRLSGAMDELHNEILELDEKVDDLRADTISSQIELAVLLSNEGIINSEDEHLLALERKLKKMLGPSAIEIGNGCFETKHKCNQTCLDRIAAGTFDAGEFSLPTFDSLNITAASLNDDGLDNHTILLYYSTAASSLAVTLMIAIFVVYMVSRDNVSCSICL

SEQ ID NO: 27067 - protein, 585 aa, Artificial Sequence; identical to SEQ ID NO: 26979
  derived and/or modified protein sequence (wt) from hemagglutinin__InfluenzaB__AGX16599

SEQ ID NO: 27068 - protein, 585 aa, Artificial Sequence; identical to SEQ ID NO: 27062
  derived and/or modified protein sequence (wt) from hemagglutinin__InfluenzaB__AGX16610

SEQ ID NO: 27069 - protein, 585 aa, Artificial Sequence; identical to SEQ ID NO: 26979
  derived and/or modified protein sequence (wt) from hemagglutinin__InfluenzaB__AGX16621

SEQ ID NO: 27070 - protein, 585 aa, Artificial Sequence
  derived and/or modified protein sequence (wt) from hemagglutinin__InfluenzaB__AGX16654
MKAIIVLLMVVTSNADRICTGITSSNSPHVVKTATQGEVNVTGVIPLTTTPTKSHFANLKGTKTRGKLCPKCLNCTDLDVALGRPKCTGNIPSAKVSILHEVRPVTSGCFPIMHDRTKIRQLPNLLRGYEHIRLSTHNVINAEKAPGGPYKIGTSGSCPNVTNGNGFFATMAWAVPKNDNNKTAINSLTIEVPYICTEGEDQITVWGFHSDNETQMAKLYGDSKPQKFTSSANGVTTHYVSQIGGFPNQTEDGGLPQSGRIVVDYMVQKSGKTGTITYQRGILLPQKVWCASGRSKVIKGSLPLIGEADCLHEKYGGLNKSKPYYTGEHAKAIGNCPIWVKTPLKLANGTKYRPPAKLLKERGFFGAIAGFLEGGWEGMIAGWHGYTSHGAHGVAVAADLKSTQEAINKITKNLNSLSELEVKNLQRLSGAMDELHNEILELDEKVDDLRADTISSQIELAVLLSNEGIINSEDEHLLALERKLKKMLGPSAIEIGNGCFETKHKCNQTCLDRIAAGTFDAGEFSLPTFDSLNITAASLNDDGLDNHTILLYYSTAASSLAVTLMIAIFVVYMVSRDNVSCSICL

SEQ ID NO: 27071 - protein, 585 aa, Artificial Sequence; identical to SEQ ID NO: 26979
  derived and/or modified protein sequence (wt) from hemagglutinin__InfluenzaB__AGX16665

SEQ ID NO: 27072 - protein, 585 aa, Artificial Sequence; identical to SEQ ID NO: 26979
  derived and/or modified protein sequence (wt) from hemagglutinin__InfluenzaB__AGX16676

SEQ ID NO: 27073 - protein, 585 aa, Artificial Sequence; identical to SEQ ID NO: 26979
  derived and/or modified protein sequence (wt) from hemagglutinin__InfluenzaB__AGX16687

SEQ ID NO: 27074 - protein, 585 aa, Artificial Sequence; identical to SEQ ID NO: 26979
  derived and/or modified protein sequence (wt) from hemagglutinin__InfluenzaB__AGX16698

SEQ ID NO: 27075 - protein, 585 aa, Artificial Sequence
  derived and/or modified protein sequence (wt) from hemagglutinin__InfluenzaB__AGX16709
MKAIIVLLMVVTSNADRICTGITSSNSPHVVKTATQGEVNVTGVIPLTTTPTKSHFANLKGTKTRGKLCPKCLNCTDLDVALGRPKCTENIPSAKVSILHEVRPVTSGCFPIMHDRTKIRQLPNLLRGYEHIRLSTHNVINAEKAPGGPYKIGTSGSCPNVTNGNGFFATMAWAVPKNDNNKTATNSLTIEVPYICTEGEDQITVWGFHSDNETQMAKLYGDSKPQKFTSSANGVTTHYVSQIGGFPNQTEDGGLPQSGRIVVDYMVQKSGKTGTITYQRGILLPQKVWCASGRSKVIKGSLPLIGEADCLHEKYGGLNKSKPYYTGEHAKAIGNCPIWVKTPLKLANGTKYRPPAKLLKERGFFGAIAGFLEGGWEGMIAGWHGYTSHGAHGVAVAADLKSTQEAINKITKNLNSLSELEVKNLQRLSGAMDELHNEILELDEKVDDLRADTISSQIELAVLLSNEGIINSEDEHLLALERKLKKMLGPSAVEIGNGCFETKHKCNQTCLDRIAAGTFDAGEFSLPTFDSLNITAASLNDDGLDNHTILLYYSTAASSLAVTLMIAIFVVYMVSRDNVSCSICL

SEQ ID NO: 27076 - protein, 585 aa, Artificial Sequence; identical to SEQ ID NO: 26979
  derived and/or modified protein sequence (wt) from hemagglutinin__InfluenzaB__AGX16720

SEQ ID NO: 27077 - protein, 585 aa, Artificial Sequence; identical to SEQ ID NO: 26979
  derived and/or modified protein sequence (wt) from hemagglutinin__InfluenzaB__AGX16731

SEQ ID NO: 27078 - protein, 585 aa, Artificial Sequence
  derived and/or modified protein sequence (wt) from hemagglutinin__InfluenzaB__AGX16742
MKAIIVLLMVVTSNADRICTGITSSNSPHVVKTATQGEVNVTGVIPLTTTPTKSHFANLKGTKTRGKLCPKCLNCTDLDVALGRPKCTGNIPSAKVSIIHEVRPVTSGCFPIMHDRTKIRQLPNLLRGYEHIRLSTHNVINAEKAPGGPYKIGTSGSCPNVTNGNGFFATMAWAVPKNDNNKTATNSLTIEVPYICTEGEDQITVWGFHSDNETQMAKLYGDSKPQKFTSSANGVTTHYVSQIGGFPNQTEDGGLPQSGRIVVDYMVQKSGKTGTITYQRGILLPQKVWCASGRSKVIKGSLPLIGEADCLHEKYGGLNKSKPYYTGEHAKAIGNCPIWVKTPLKLANGTKYRPPAKLLKERGFFGAIAGFLEGGWEGMIAGWHGYTSHGAHGVAVAADLKSTQEAINKITKNLNSLSELEVKNLQRLSGAMDELHNEILELDEKVDDLRADTISSQIELAVLLSNEGIINSEDEHLLALERKLKKMLGPSAVEIGNGCFETKHKCNQTCLDRIAAGTFDAGEFSLPTFDSLNITAASLNDDGLDNHTILLYYSTAASSLAVTLMIAIFVVYMVSRDNVSCSICL

SEQ ID NO: 27079 - protein, 585 aa, Artificial Sequence; identical to SEQ ID NO: 26979
  derived and/or modified protein sequence (wt) from hemagglutinin__InfluenzaB__AGX16753

SEQ ID NO: 27080 - protein, 585 aa, Artificial Sequence; identical to SEQ ID NO: 26979
  derived and/or modified protein sequence (wt) from hemagglutinin__InfluenzaB__AGX16764

SEQ ID NO: 27081 - protein, 585 aa, Artificial Sequence; identical to SEQ ID NO: 26979
  derived and/or modified protein sequence (wt) from hemagglutinin__InfluenzaB__AGX16775

SEQ ID NO: 27082 - protein, 585 aa, Artificial Sequence
  derived and/or modified protein sequence (wt) from hemagglutinin__InfluenzaB__AGX16797
MKAIIVLLMVVTSNADRICTGITSSNSPHVVKTATQGEVNVTGVIPLTTTPTKSHFANLKGTKTRGKLCPKCLNCTDLDVALGRPKCTGNMPSAKVSILHEVRPVTSGCFPIMHDRTKIRQLPNLLRGYEHIRLSTHNVINAEKAPGGPYKIGTSGSCPNVTNGNGFFATMAWAVPKNDNNKTATNSLTIEVPYICTEGEDQITVWGFHSDNETQMAKLYGDSKPQKFTSSANGVTTHYVSQIGGFPNQTEDGGLPQSGRIVVDYMVQKSGKTGTITYQRGILLPQKVWCASGRSKVIKGSLPLIGEADCLHEKYGGLNKSKPYYTGEHAKAIGNCPIWVKTPLKLANGTKYRPPAKLLKERGFFGAIAGFLEGGWEGMIAGWHGYTSHGAHGVAVAADLKSTQEAINKITKNLNSLSELEVKNLQRLSGAMDELHNEILELDEKVDDLRADTISSQIELAVLLSNEGIINSEDEHLLALERKLKKMLGPSAVEIGNGCFETKHKCNQTCLDRIAAGTFDAGEFSLPTFDSLNITAASLNDDGLDNHTILLYYSTAASSLAVTLMIAIFVVYMVSRDNVSCSICL

SEQ ID NO: 27083 - protein, 585 aa, Artificial Sequence; identical to SEQ ID NO: 26979
  derived and/or modified protein sequence (wt) from hemagglutinin__InfluenzaB__AGX16808

SEQ ID NO: 27084 - protein, 585 aa, Artificial Sequence
  derived and/or modified protein sequence (wt) from hemagglutinin__InfluenzaB__AGX16819
MKAIIVLLMVVTSNADRICTGITSSNSPHVVKTATQGEVNVTGVIPLTTTPTKSHFANLKGTKTRGKLCPKCLNCTDLDVALGRPKCTGNIPSAKVSILHEVRPVTSGCFPIMHDRTKIRQLPNLLRGYEHIRLSTHNVINAEKAPGGPYKIGTSGSCPNVTNGNGFFATMAWAVPKNDNNKTATNSLTIEVPYICTEGEDQITVWGFHSDSETQMAKLYGDSKPQKFTSSANGVTTHYVSQIGGFPNQTEDGGLPQSGRIVVDYMVQKSGKTGTITYQRGILLPQKVWCASGRSKVIKGSLPLIGEADCLHEKYGGLNKSKPYYTGEHAKAIGNCPIWVKTPLKLANGTKYRPPAKLLKERGFFGAIAGFLEGGWEGMIAGWHGYTSHGAHGVAVAADLKSTQEAINKITKNLNSLSELEVKNLQRLSGAMDELHNEILELDEKVDDLRADTISSQIELAVLLSNEGIINSEDEHLLALERKLKKMLGPSAVEIGNGCFETKHKCNQTCLDRIAAGTFDAGEFSLPTFDSLNITAASLNDDGLDNHTILLYYSTAASSLAVTLMIAIFIVYMVSRDNVSCSICL

SEQ ID NO: 27085 - protein, 585 aa, Artificial Sequence; identical to SEQ ID NO: 26979
  derived and/or modified protein sequence (wt) from hemagglutinin__InfluenzaB__AGX16830

SEQ ID NO: 27086 - protein, 585 aa, Artificial Sequence
  derived and/or modified protein sequence (wt) from hemagglutinin__InfluenzaB__AGX16841
MKAIIVLLMVVTSNADRICTGITSSNSPHVVKTATQGEVNVTGVIPLTTTPTKSHFANLKGTKTRGKLCPKCLNCTDLDVALGRPKCTGNIPSAKVSILHEVRPVTSGCFPIMHDRTKIRQLPNLLRGYEHIRLSTHNVINAEKAPGGPYKIGTSGSCPNVTNGNGFFATMAWAVPKNDNNKTATNSLTIEVPYICTEGEDQITVWGFHSDNETQMAKLYGDSKPQKFTSSANGMTTHYVSQIGGFPNQTEDGGLPQSGRIVVDYMVQKSGKTGTITYQRGILLPQKVWCASGRSKVIKGSLPLIGEADCLHEKYGGLNKSKPYYTGEHAKAIGNCPIWVKTPLKLANGTKYRPPAKLLKERGFFGAIAGFLEGGWEGMIAGWHGYTSHGAHGVAVAADLKSTQEAINKITKNLNSLSELEVKNLQRLSGAMDELHNEILELDEKVDDLRADTISSQIELAVLLSNEGIINSEDEHLLALERKLKKMLGPSAVEIGNGCFETKHKCNQTCLDRIAAGTFDAGEFSLPTFDSLNITAASLNGDGLDNHTILLYYSTAASSLAVTLMIAIFVVYMVSRDNVSCSICL

SEQ ID NO: 27087 - protein, 585 aa, Artificial Sequence
  derived and/or modified protein sequence (wt) from hemagglutinin__InfluenzaB__AGX16852
MKAIIVLLMVVTSNADRICTGITSSNSPHVVKTATQGEVNVTGVIPLTTTPTKSHFANLKGTKTRGKLCPKCLNCTDLDVALGRPKCTGNIPSAKVSILHEVRPVTSGCFPIMHDRTKIRQLPNLLRGYEHIRLSTHNVINAEKAPGGPYKIGTSGSCPNVTNGNGFFATMAWAVPKNDNNKTATNSLTIEVPYICTEGEDQITVWGFHSDNETQMAKLYGDSKPQKFTSSANGVTTHYVSQIGGFPNQTEDGGLPQSGRIVVDYMVQKSGKTGTITYQRGILLPQKVWCASGRSKVIKGSLPLIGEADCLHEKYGGLNKSKPYYTGEHAKAIGNCPIWVKTPLKLANGTKYRPPAKLLKERGFFGAIAGFLEGGWEGMIAGWHGYTSHGAHGVAVAADLKSTQEAINKITKNLNSLSELEVKNLQRISGAMDELHNEILELDEKVDDLRADTISSQIELAVLLSNEGIINSEDEHLLALERKLKKMLGPSAVEIGNGCFETKHKCNQTCLDRIAAGTFDAGEFSLPTFDSLNITAASLNDDGLDNHTILLYYSTAASSLAVTLMIAIFVVYMVSRDNVSCSICL

SEQ ID NO: 27088 - protein, 585 aa, Artificial Sequence; identical to SEQ ID NO: 26979
  derived and/or modified protein sequence (wt) from hemagglutinin__InfluenzaB__AGX16863

SEQ ID NO: 27089 - protein, 585 aa, Artificial Sequence; identical to SEQ ID NO: 26979
  derived and/or modified protein sequence (wt) from hemagglutinin__InfluenzaB__AGX16874

SEQ ID NO: 27090 - protein, 585 aa, Artificial Sequence
  derived and/or modified protein sequence (wt) from hemagglutinin__InfluenzaB__AGX16885
MKAIIVLLMVVTSNADRICTGITSSNSPHVVKTATQGEVNVTGVIPLTTTPTKSHFANLKGTKTRGKLCPKCLNCTDLDVALGRPKCTGNIPSAKVSILHEVRPVTSGCFPIMHDRTKIRQLPNLLRGYEHIRLSTHNVINAEKAPGGPYKIGTSGSCPNVTNGNGFFATMAWAVPKNDNNKTATNSLTIEVPYICTEGEDQITVWGFHSDNETQMAKLYGDSKPQKFTSSANGVTTHYVSQIGGFPNQTEDGGLPQSGRIVVDYMVQKSGKTGTITYQRGILLPQKVWCASGRSKVIKGSLPLIGEADCLHEKYGGLNKSKPYYTGEHAKAIGNCPIWVKTPLKLANGTKYRPPAKLLKERGFFGAIAGFLEGGWEGMIAGWHGYTSHGAHGVAVAADLKSTQEAINKITKNLNSLSELEVKNLQRLSGAMDELHNEILELDEKVDDLRADTISSQIELAVLLSNEGIINSEDEHLLALERKLKKMLGPSAIEIGNGCFETKHKCNQTCLDRIAAGTFDAGEFSLPTFDSLNITAASLNDDGLDNHTILLYYSTAASSLAVTLMIAIFVVYMVSRDNVSCSICL

SEQ ID NO: 27091 - protein, 585 aa, Artificial Sequence; identical to SEQ ID NO: 27090
  derived and/or modified protein sequence (wt) from hemagglutinin__InfluenzaB__AGX16896

SEQ ID NO: 27092 - protein, 585 aa, Artificial Sequence; identical to SEQ ID NO: 26979
  derived and/or modified protein sequence (wt) from hemagglutinin__InfluenzaB__AGX16907

SEQ ID NO: 27093 - protein, 585 aa, Artificial Sequence; identical to SEQ ID NO: 27064
  derived and/or modified protein sequence (wt) from hemagglutinin__InfluenzaB__AGX16918

SEQ ID NO: 27094 - protein, 585 aa, Artificial Sequence; identical to SEQ ID NO: 26979
  derived and/or modified protein sequence (wt) from hemagglutinin__InfluenzaB__AGX16940

SEQ ID NO: 27095 - protein, 585 aa, Artificial Sequence; identical to SEQ ID NO: 27090
  derived and/or modified protein sequence (wt) from hemagglutinin__InfluenzaB__AGX16951

SEQ ID NO: 27096 - protein, 585 aa, Artificial Sequence
  derived and/or modified protein sequence (wt) from hemagglutinin__InfluenzaB__AGX16962
MKAIIVLLMVVTSNADRICTGITSSNSPHVVKTATQGEVNVTGVIPLTTTPTESHFANLKGTKTRGKLCPKCLNCTDLDVALGRPKCTGNIPSAKVSILHEVRPVTSGCFPIMHDRTKIRQLPNLLRGYEHIRLSTHNVINAEKAPGGPYKIGTSGSCPNVTNGNGFFATMAWAVPKNDNNKTATNSLTIEVPYICTEGEDQITVWGFHSDNETQMAKLYGDSKPQKFTSSANGVTTHYVSQIGGFPNQKEDGGLPQSGRIVVDYMVQKSGNTGTITYQRGILLPQKVWCASGRSKVIKGSLPLIGEADCLHEKYGGLNKSKPYYTGEHAKAIGNCPIWVKTPLKLANGTKYRPPAKLLKERGFFGAIAGFLEGGWEGMIAGWHGYTSHGAHGVAVAADLKSTQEAINKITKNLNSLSELEVKNLQRLSGAMDELHNEILELDEKVDDLRADTISSQIELAVLLSNEGIINSEDEHLLALERKLKKMLGPSAVEIGNGCFETKHKCNQTCLDRIAAGTFDAGEFSLPTFDSLNITAASLNDDGLDNHTILLYYSTAASSLAVTLMIAIFVVYMVSRDNVSCSICL

SEQ ID NO: 27097 - protein, 585 aa, Artificial Sequence; identical to SEQ ID NO: 26979
  derived and/or modified protein sequence (wt) from hemagglutinin__InfluenzaB__AGX16973

SEQ ID NO: 27098 - protein, 585 aa, Artificial Sequence
  derived and/or modified protein sequence (wt) from hemagglutinin__InfluenzaB__AGX16995
MKAIIVLLMVVTSNADRICTGITSSNSPHVVKTATQGEVNVTGVIPLTTTPTKSHFANLKGTKTRGKLCPKCLNCTDLDVALGRPKCTGNIPSAKVSILHEVRPVTSGCFPIMHDRTKIRQLPNLLRGYEHIRLSTHNVINAEKAPGGPYKIGTSGSCPNVTNGNGFFATMAWAVPKNDNNKTATNSLTVEVPYICTEGEDQITVWGFHSDNEIQMAKLYGDSKPQKFTSSANGVTTHYVSQIGGFPNQTEDGGLPQSGRIVVDYMVQKSGKTGTITYQRGILLPQKVWCASGRSKVIKGSLPLIGEADCLHEKYGGLNKSKPYYTGEHAKAIGNCPIWVKTPLKLANGTKYRPPAKLLKERGFFGAIAGFLEGGWEGMIAGWHGYTSHGAHGVAVAADLKSTQEAINKITKNLNSLSELEVKNLQRLSGAMDELHNEILELDEKVDDLRADTISSQIELAVLLSNEGIINSEDEHLLALERKLKKMLGPSAVEIGNGCFETKHKCNQTCLDRIAAGTFDAGEFSLPTFDSLNITAASLNDDGLDNHTILLYYSTAASSLAVTLMIAIFVVYMVSRDNVSCSICL

SEQ ID NO: 27099 - protein, 585 aa, Artificial Sequence
  derived and/or modified protein sequence (wt) from hemagglutinin__InfluenzaB__AGX17006
MKAIIVLLMVVTSNADRICTGITSSNSPHVVKTATQGEVNVTGVIPLTTTPTKSHFANLKGTKTRGKLCPKCLNCTDLDVALGRPKCTGNIPSAKVSILHEVRPVTSGCFPIMHDRTKIRQLPNLLRGYEHIRLSTHNVINAEKAPGGPYKIGTSGSCPNVTNGNGFFATMAWAVPKNDNNKTATNSLTIEVPYICTEGEDQITVWGFHSDNENQMAKLYGDSKPQKFTSSANGVTTHYVSQIGGFPNQTEDGGLPQSGRIVVDYMVQKSGKTGTITYQRGILLPQKVWCASGRSKVIKGSLPLIGEADCLHEKYGGLNKSKPYYTGEHAKAIGNCPIWVKTPLKLANGTKYRPPAKLLKERGFFGAIAGFLEGGWEGMIAGWHGYTSHGAHGVAVAADLKSTQEAINKITKNLNSLSELEVKNLQRLSGAMDELHNEILELDEKVDDLRADTISSQIELAVLLSNEGIINSEDEHLLALERKLKKMLGPSAVEIGNGCFETKHKCNQTCLDRIAAGTFDAGEFSLPTFDSLNITAASLNDDGLDNHTILLYYSTAASSLAVTLMIAIFVVYMVSRDNVSCSICL

SEQ ID NO: 27100 - protein, 585 aa, Artificial Sequence; identical to SEQ ID NO: 26979
  derived and/or modified protein sequence (wt) from hemagglutinin__InfluenzaB__AGX17017

SEQ ID NO: 27101 - protein, 585 aa, Artificial Sequence; identical to SEQ ID NO: 26979
  derived and/or modified protein sequence (wt) from hemagglutinin__InfluenzaB__AGX17028

SEQ ID NO: 27102 - protein, 585 aa, Artificial Sequence
  derived and/or modified protein sequence (wt) from hemagglutinin__InfluenzaB__AGX17039
MKAIIVLLMVVTSNADRICTGITSSNSPHVVKTATQGEVNVTGVIPLTTTPTESHFANLKGTKTRGKLCPKCLNCTDLDVALGRPKCTGNIPSAKVSILHEVRPVTSGCFPIMHDRTKIRQLPNLLRGYEHIRLSTHNVINAEKAPGGPYKIGTSGSCPNVTNGNGFFATMAWAVPKNDNNKTATNSLTIEVPYICTEGEDQITVWGFHSDNETQMAKLYGDSKPQKFTSSANGVTTHYVSQIGGFPNQTEDGGLPQSGRIVVDYMVQKSGNTGTITYQRGILLPQKVWCASGRSKVIKGSLPLIGEADCLHEKYGGLNKSKPYYTGEHAKAIGNCPIWVKTPLKLANGTKYRPPAKLLKERGFFGAIAGFLEGGWEGMIAGWHGYTSHGAHGVAVAADLKSTQEAINKITKNLNSLSELEVKNLQRLSGAMDELHNEILELDEKVDDLRADTISSQIELAVLLSNEGIINSEDEHLLALERKLKKMLGPSAVEIGNGCFETKHKCNQTCLDRIAAGTFDAGEFSLPTFDSLNITAASLNDDGLDNHTIMLYYSTAASSLAVTLMIAIFVVYMVSRDNVSCSICL

SEQ ID NO: 27103 - protein, 585 aa, Artificial Sequence; identical to SEQ ID NO: 26979
  derived and/or modified protein sequence (wt) from hemagglutinin__InfluenzaB__AGX17050

SEQ ID NO: 27104 - protein, 585 aa, Artificial Sequence
  derived and/or modified protein sequence (wt) from hemagglutinin__InfluenzaB__AGX17061
MKAIIVLLMVVTSNADRICTGITSSNSPHVVKTATQGEVNVTGVIPLTTTPTKSHFANLKGTKTRGKLCPKCLNCTDLDVALGRPKCTGNIPSAKVSILHEVRPVTSGCFPIMHDRTKIRQLPNLLRGYERIRLSNHNVINAEKAPGGPYKIGTSGSCPNVTNGNGFFATMAWAVPKNENNKTATNSLTIEVPYICTEGEDQITVWGFHSDNETQMAKLYGDSKPQKFTSSANGVTTHYVSQIGGFPNQTEDGGLPQSGRIVVDYMVQKSGKTGTITYQRGILLPQKVWCASGRSKVIKGSLPLIGEADCLHEKYGGLNKSKPYYTGEHAKAIGNCPIWVKTPLKLANGTKYRPPAKLLKERGFFGAIAGFLEGGWEGMIAGWHGYTSHGAHGVAVAADLKSTQEAINKITKNLNSLSELEVKNLQRLSGAMDELHNEILELDEKVDDLRADTISSQIELAVLLSNEGIINSEDEHLLALERKLKKMLGPSAVEIGNGCFETKHKCNQTCLDRIAAGTFNAGEFSLPTFDSLNITAASLNDDGLDNHTILLYYSTAASSLAVTLMIAIFVVYMVSRDNVSCSICL

SEQ ID NO: 27105 - protein, 585 aa, Artificial Sequence
  derived and/or modified protein sequence (wt) from hemagglutinin__InfluenzaB__AGX17072
MKAIIVLLMVVTSNADRICTGITSSNSPHVVKTATQGEVNVTGVIPLTTTPTESHFANLKGTKTRGKLCPKCLNCTDLDVALGRPKCTGNIPSAKVSILHEVRPVTSGCFPIMHDRTKIRQLPNLLRGYEHIRLSTHNVINAEKAPGGPYKIGTSGSCPNVTNGNGFFATMAWAVPKNDNNKTATNSLTIEVPYICTEGEDQITVWGFHSDNETQMAKLYGDSKPQKFTSSANGVTTHYVSQIGGFPNQTEDGGLPQSGRIVVDYMVQKSGNTGTITYQRGILLPQKVWCASGRSKVIKGSLPLIGEADCLHEKYGGLNKSKPYYTGEHAKAIGNCPIWVKTPLKLANGTKYRPPAKLLKERGFFGAIAGFLEGGWEGMIAGWHGYTSHGAHGVAVAADLKSTQEAINKITKNLNSLSELEVKNLQRLSGAMDELHNEILELDEKVDDLRADTISSQIELAVLLSNEGIINSEDEHLLALERKLKKMLGPSAVEIGNGCFETKHKCNQTCLDRIAAGTFDAGEFSLPTFDSLNITAASLNDDGLDNHTILLYYSTAASSLAVTLMIAIFVVYMVSRDNVSCSICL

SEQ ID NO: 27106 - protein, 585 aa, Artificial Sequence; identical to SEQ ID NO: 27090
  derived and/or modified protein sequence (wt) from hemagglutinin__InfluenzaB__AGX17083

SEQ ID NO: 27107 - protein, 585 aa, Artificial Sequence
  derived and/or modified protein sequence (wt) from hemagglutinin__InfluenzaB__AGX17094
MKAIIVLLMVVTSNADRICTGITSSNSPHVVKTATQGEVNVTGVIPLTTTPTKSHFANLKGTKTRGKLCPKCLNCTDLDVALGRPKCTGNIPSAKVSILHEVRPVTSGCFPIMHDRTKIRQLPNLLRGYEHIRLSTHNVINAEKAPGGPYKIGTSGSCPNVTNGNGFFATMAWAVPKNDNNKTATNSLTIEVPYICTEGEDQITVWGFHSDSETQMAKLYGDSKPQKFTSSANGVTTHYVSQIGGFPNQTEDGGLPQSGRIVVDYMVQKSGKTGTITYQRGILLPQKVWCASGRSKVIKGSLPLIGEADCLHEKYGGLNKSKPYYTGEHAKAIGNCPIWVKTPLKLANGTKYRPPAKLLKERGFFGAIAGFLEGGWEGMIAGWHGYTSHGAHGVAVAADLKSTQEAINKITKNLNSLSELEVKNLQRLSGAMDELHNEILELDEKVDDLRADTISSQIELAVLLSNEGIINSEDEHLLALERKLKKMLGPSAVEIGNGCFETKHKCNQTCLDRIAAGTFDAGEFSLPTFDSLNITAASLNDDGLDNHTILLYYSTAASSLAVTLMIAIFVVYMVSRDNVSCSICL

SEQ ID NO: 27108 - protein, 585 aa, Artificial Sequence
  derived and/or modified protein sequence (wt) from hemagglutinin__InfluenzaB__AGX17105
MKAIIVLLMVVTSNADRICTGITSSNSPHVVKTATQGEINVTGVIPLTTTPTKSHFANLKGTKTRGKLCPKCLNCTDLDVALGRPKCTGNIPSAKVSILHEVRPVTSGCFPIMHDRTKIRQLPNLLRGYEHIRLSTHNVINAEKAPGGPYKIGTSGSCPNVTNGNGFFATMAWAVPKNDNNKTATNSLTIEVPHICTEGEDQITVWGFHSDNEIQMAKLYGDSKPQKFTSSANGVTTHYISQIGGFPNQTEDGGLPQSGRIVVDYMVQKSGKTGTITYQRGILLPQKVWCASGRSKVIKGSLPLIGEADCLHEKYGGLNKSKPYYTGEHAKAIGNCPIWVKTPLKLANGTKYRPPAKLLKERGFFGAIAGFLEGGWEGMIAGWHGYTSHGAHGVAVAADLKSTQEAINKITKNLNSLSELEVKNLQRLSGAMDELHNEILELDEKVDDLRADTISSQIELAVLLSNEGIINSEDEHLLALERKLKKMLGPSAIEIGNGCFETKHKCNQTCLDRIAAGTFDAGEFSLPTFDSLNITAASLNDDGLDNHTILLYYSTAASSLAVTLMIAIFVVYMVSRDNVSCSICL

SEQ ID NO: 27109 - protein, 585 aa, Artificial Sequence; identical to SEQ ID NO: 27090
  derived and/or modified protein sequence (wt) from hemagglutinin__InfluenzaB__AGX17116

SEQ ID NO: 27110 - protein, 585 aa, Artificial Sequence
  derived and/or modified protein sequence (wt) from hemagglutinin__InfluenzaB__AGX17127
MKAIIVLLMVVTSNADRICTGITSSNSPHVVKTATQGEVNVTGVIPLTTTPTESHFANLKGTKTRGKLCPKCLNCTDLDVALGRPKCTGNIPSAKVSILHEVRPVTSGCFPIMHDRTKIRQLPNLLRGYEHIRLSTHNVINAEKAPGGPYKIGTSGSCPNVTNGNGFFATMAWAVPKNDNNKTATNSLTIEVPYICTEGEDQITVWGFHSDNENQMAKLYGDSKPQKFTSSANGVTTHYVSQIGGFPNQTEDGGLPQSGRIVVDYMVQKSGNTGTITYQRGILLPQKVWCASGRSKVIKGSLPLIGEADCLHEKYGGLNKSKPYYTGEHAKAIGNCPIWVKTPLKLANGTKYRPPAKLLKERGFFGAIAGFLEGGWEGMIAGWHGYTSHGAHGVAVAADLKSTQEAINKITKNLNSLSELEVKNLQRLSGAMDELHNEILELDEKVDDLRADTISSQIELAVLLSNEGIINSEDEHLLALERKLKKMLGPSAVEIGNGCFETKHKCNQTCLDRIAAGTFDAGEFSLPTFDSLNITAASLNDDGLDNHTILLYYSTAASSLAVTLMIAIFVVYMVSRDNVSCSICL

SEQ ID NO: 27111 - protein, 585 aa, Artificial Sequence; identical to SEQ ID NO: 27099
  derived and/or modified protein sequence (wt) from hemagglutinin__InfluenzaB__AGX17138

SEQ ID NO: 27112 - protein, 585 aa, Artificial Sequence; identical to SEQ ID NO: 27099
  derived and/or modified protein sequence (wt) from hemagglutinin__InfluenzaB__AGX17149

SEQ ID NO: 27113 - protein, 585 aa, Artificial Sequence
  derived and/or modified protein sequence (wt) from hemagglutinin__InfluenzaB__AGX17160
MKAIIVLLMVVTSNADRICTGITSSNSPHVVKTATQGEVNVTGMIPLTTTPTKSHFANLKGTKTRGKLCPKCLNCTDLDVALGRPKCTGNIPSAKVSILHEVRPVTSGCFPIMHDRTKIRQLPNLLRGYEHIRLSTHNVINAEKAPGGPYKIGTSGSCPNVTNGNGFFATMAWAVPKNDNNKTATNSLTIEVPYICTEGEDQITVWGFHSDNETQMAKLYGDSKPQKFTSSANGVTTHYVSQIGGFPNQTEDGGLPQSGRIVVDYMVQKSGKTGTITYQRGILLPQKVWCASGRSKVIKGSLPLIGEADCLHEKYGGLNKSKPYYTGEHAKAIGNCPIWVKTPLKLANGTKYRPPAKLLKERGFFGAIAGFLEGGWEGMIAGWHGYTSHGAHGVAVAADLKSTQEAINKITKNLNSLSELEVKNLQRLSGAMDELHNEILELDEKVDDLRADTISSQIELAVLLSNEGIINSEDEHLLALERKLKKMLGPSAVEIGNGCFETKHKCNQTCLDRIAAGTFDAGEFSLPTFDSLNITAASLNDDGLDNHTILLYYSTAASSLAVTLMIAIFVVYMVSRDNVSCSICL

SEQ ID NO: 27114 - protein, 585 aa, Artificial Sequence
  derived and/or modified protein sequence (wt) from hemagglutinin__InfluenzaB__AGX17171
MKAIIVLLMVVTSNADRICTGITSSNSPHVVKTATQGEVNVTGVIPLTTTPTESHFANLKGTKTRGKLCPKCLNCTDLDVALGRPKCTGNIPSAKVSILHEVRPVTSGCFPIMHNRTKIRQLPNLLRGYEHIRLSTHNVINAEKAPGGPYKIGTSGSCPNVTNGNGFFATMAWAVPKNDNNKTATNSLTIEVPYICTEGEDQITVWGFHSDNEAQMAKLYGDSKPQKFTSSANGVTTHYVSQIGGFPNQTEDGGLPQSGRIVVDYMVQKSGNTGTITYQRGILLPQKVWCASGRSKVIKGSLPLIGEADCLHEKYGGLNKSKPYYTGEHAKAIGNCPIWVKTPLKLANGTKYRPPAKLLKERGFFGAIAGFLEGGWEGMIAGWHGYTSHGAHGVAVAADLKSTQEAINKITKNLNSLSELEVKNLQRLSGAMDELHNEILELDEKVDDLRADTISSQIELAVLLSNEGIINSEDEHLLALERKLKKMLGPSAVEIGNGCFETKHKCNQTCLDRIAAGTFDAGEFSLPTFDSLNITAASLNDDGLDNHTILLYYSTAASSLAVTLMIAIFVVYMVSRDNVSCSICL

SEQ ID NO: 27115 - protein, 585 aa, Artificial Sequence; identical to SEQ ID NO: 26979
  derived and/or modified protein sequence (wt) from hemagglutinin__InfluenzaB__AGX17182

SEQ ID NO: 27116 - protein, 585 aa, Artificial Sequence; identical to SEQ ID NO: 26979
  derived and/or modified protein sequence (wt) from hemagglutinin__InfluenzaB__AGX17193

SEQ ID NO: 27117 - protein, 585 aa, Artificial Sequence; identical to SEQ ID NO: 26979
  derived and/or modified protein sequence (wt) from hemagglutinin__InfluenzaB__AGX17204

SEQ ID NO: 27118 - protein, 585 aa, Artificial Sequence
  derived and/or modified protein sequence (wt) from hemagglutinin__InfluenzaB__AGX17215
MKAIIVLLMVVTSNADRICTGITSSNSPHVVKTATQGEVNVTGVIPLTTTPTKSHFANLKGTKTRGKLCPKCLNCTDLDVALGRPKCTGNIPSAKVSILHEVRPVTSGCFPIMHDRTKIRQLPNLLRGYEHIRLSTHNVINAEKAPGGPYKIGTSGSCPNVTNGNGFFATMAWAVPKNDNNKTATNSLTIEVPYICTEGEDQITVWGFHSDNEAQMAKLYGDSKPQKFTSSANGVTTHYVSQIGGFPNQTEDGGLPQSGRIVVDYMVQKSGKTGTITYQRGILLPQKVWCASGRSKVIKGSLPLIGEADCLHEKYGGLNKSKPYYTGEHAKAIGNCPIWVKTPLKLANGTKYRPPAKLLKERGFFGAIAGFLEGGWEGMIAGWHGYTSHGAHGVAVAADLKSTQEAINKITKNLNSLSELEVKNLQRLSGAMDELHNEILELDEKVDDLRADTISSQIELAVLLSNEGIINSEDEHLLALERKLKKMLGPSAIEIGNGCFETKHKCNQTCLDRIAAGTFDAGEFSLPTFDSLNITAASLNDDGLDNHTILLYYSTAASSLAVTLMIAIFVVYMVSRDNVSCSICL

SEQ ID NO: 27119 - protein, 585 aa, Artificial Sequence; identical to SEQ ID NO: 26979
  derived and/or modified protein sequence (wt) from hemagglutinin__InfluenzaB__AGX17226

SEQ ID NO: 27120 - protein, 585 aa, Artificial Sequence
  derived and/or modified protein sequence (wt) from hemagglutinin__InfluenzaB__AGX17237
MKAIIVLLMVVTSNADRICTGITSSNSPHVVKTATQGEVNVTGVIPLTTTPTKSHFANLKGTKTRGKLCPKCLNCTDLDVALGRPKCTGNIPSAKVSILHEVRPVTSGCFPIMHDRTKIRQLPNLLRGYEHIRLSTHNVINAEKAPGGPYKIGTSGSCPNITNGNGFFATMAWAVPKNDNNKTATNSLTIEVPYICTEGEDQITVWGFHSDNEIQMAKLYGDSKPQKFTSSANGVTTHYVSQIGGFPNQTEDGGLPQSGRIVVDYMVQKSGKTGTITYQRGILLPQKVWCASGRSKVIKGSLPLIGEADCLHEKYGGLNKSKPYYTGEHAKAIGNCPIWVKTPLKLANGTKYRPPAKLLKERGFFGAIAGFLEGGWEGMIAGWHGYTSHGAHGVAVAADLKSTQEAINKITKNLNSLSELEVKNLQRLSGAMDELHNEILELDEKVDDLRADTISSQIELAVLLSNEGIINSEDEHLLALERKLKKMLGPSAVEIGNGCFETKHKCNQTCLDRIAAGTFDAGEFSLPTFDSLNITAASLNDDGLDNHTILLYYSTAASSLAVTLMIAIFVVYMVSRDNVSCSICL

SEQ ID NO: 27121 - protein, 585 aa, Artificial Sequence
  derived and/or modified protein sequence (wt) from hemagglutinin__InfluenzaB__AGX17248
MKAIIVLLMVVTSNADRICTGITSSNSPHVVKTATQGEVNVTGVIPLTTTPTKSHFANLKGTKTRGKLCPKCLNCTDLDVALGRPKCTGNIPSAKVSILHEVRPVTSGCFPIMHDRTKIRQLPNLLRGYEHIRLSTHNVINAEKAPGGPYKIGTSGSCPNVTNGNGFFATMAWAVPKNDNNKTATNSLTIEVPYICTEGEDQITVWGFHSDNETQMAKLYGDSKPQKFTSSANGVTTHYVSQIGGFPNQTEDGGLPQSGRIVVDYMVQKSGKTGTITYQRGILLPQKVWCTSGRSKVIKGSLPLIGEADCLHEKYGGLNKSKPYYTGEHAKAIGNCPIWVKTPLKLANGTKYRPPAKLLKERGFFGAIAGFLEGGWEGMIAGWHGYTSHGAHGVAVAADLKSTQEAINKITKNLNSLSELEVKNLQRLSGAMDELHNEILELDEKVDDLRADTISSQIELAVLLSNEGIINSEDEHLLALERKLKKMLGPSAVEIGNGCFETKHKCNQTCLDRIAAGTFDAGEFSLPTFDSLNITAASLNDDGLDNHTILLYYSTAASSLAVTLMIAIFVVYMVSRDNVSCSICL

SEQ ID NO: 27122 - protein, 585 aa, Artificial Sequence; identical to SEQ ID NO: 27063
  derived and/or modified protein sequence (wt) from hemagglutinin__InfluenzaB__AGX17270

SEQ ID NO: 27123 - protein, 585 aa, Artificial Sequence; identical to SEQ ID NO: 26979
  derived and/or modified protein sequence (wt) from hemagglutinin__InfluenzaB__AGX17281

SEQ ID NO: 27124 - protein, 585 aa, Artificial Sequence; identical to SEQ ID NO: 26979
  derived and/or modified protein sequence (wt) from hemagglutinin__InfluenzaB__AGX17292

SEQ ID NO: 27125 - protein, 585 aa, Artificial Sequence; identical to SEQ ID NO: 26979
  derived and/or modified protein sequence (wt) from hemagglutinin__InfluenzaB__AGX17303

SEQ ID NO: 27126 - protein, 585 aa, Artificial Sequence; identical to SEQ ID NO: 27105
  derived and/or modified protein sequence (wt) from hemagglutinin__InfluenzaB__AGX17314

SEQ ID NO: 27127 - protein, 585 aa, Artificial Sequence; identical to SEQ ID NO: 26979
  derived and/or modified protein sequence (wt) from hemagglutinin__InfluenzaB__AGX17325

SEQ ID NO: 27128 - protein, 585 aa, Artificial Sequence; identical to SEQ ID NO: 27090
  derived and/or modified protein sequence (wt) from hemagglutinin__InfluenzaB__AGX17336

SEQ ID NO: 27129 - protein, 585 aa, Artificial Sequence; identical to SEQ ID NO: 26979
  derived and/or modified protein sequence (wt) from hemagglutinin__InfluenzaB__AGX17347

SEQ ID NO: 27130 - protein, 585 aa, Artificial Sequence; identical to SEQ ID NO: 26979
  derived and/or modified protein sequence (wt) from hemagglutinin__InfluenzaB__AGX17358

SEQ ID NO: 27131 - protein, 585 aa, Artificial Sequence
  derived and/or modified protein sequence (wt) from hemagglutinin__InfluenzaB__AGX17369
MKAIIVLLMVVTSNADRICTGITSSNSPHVVKTATQGEVNVTGVIPLTTTPTKSHFANLKGTKTRGKLCPKCLNCTDLDVALGRPKCTGNIPSAKVSILHEVRPVTSGCFPIMHDRTKIRQLPNLLRGYEHIRLSTHNVINAEKAPGGPYKIGTSGSCPNVTNGNGFFATMAWAVPKNDNNKTATNSLTIEVPYICTEGEDQITVWGFHSDNETQMAKLYGDSKPQKFTSSANGVTTHYVSQIGGFPNQTEDGGLPQSGRIVADYMVQKSGKTGTITYQRGILLPQKVWCASGRSKVIKGSLPLIGEADCLHEKYGGLNKSKPYYTGEHAKAIGNCPIWVKTPLKLANGTKYRPPAKLLKERGFFGAIAGFLEGGWEGMIAGWHGYTSHGAHGVAVAADLKSTQEAINKITKNLNSLSELEVKNLQRLSGAMDELHNEILELDEKVDDLRADTISSQIELAVLLSNEGIINSEDEHLLALERKLKKMLGPSAVEIGNGCFETKHKCNQTCLDRIAAGTFDAGEFSLPTFDSLNITAASLNDDGLDNHTILLYYSTAASSLAVTLMIAIFVVYMVSRDNVSCSICL

SEQ ID NO: 27132 - protein, 585 aa, Artificial Sequence; identical to SEQ ID NO: 27105
  derived and/or modified protein sequence (wt) from hemagglutinin__InfluenzaB__AGX17380

SEQ ID NO: 27133 - protein, 585 aa, Artificial Sequence; identical to SEQ ID NO: 26979
  derived and/or modified protein sequence (wt) from hemagglutinin__InfluenzaB__AGX17391

SEQ ID NO: 27134 - protein, 585 aa, Artificial Sequence
  derived and/or modified protein sequence (wt) from hemagglutinin__InfluenzaB__AGX17400
MKAIIVLLMVVTSNADRICTGITSSNSPHMVKTATQGEVNVTGVIPLTTTPTKSHFANLKGTKTRGKLCPKCLNCTDLDVALGRPKCTGNIPSAKVSILHEVRPVTSGCFPIMHDRTKIRQLPNLLRGYEHIRLSTHNVINAEKAPGGPYKIGTSGSCPNVTNGNGFFATMAWAVPKNDNNKTATNSLTIEVPYICTEGEDQITVWGFHSDNETQMAKLYGDSKPQKFTSSANGVTTHYVSQIGGFPNQTEDGGLPQSGRIVVDYMVQKSGKTGTITYQRGILLPQKVWCASGRSKVIKGSLPLIGEADCLHEKYGGLNKSKPYYTGEHAKAIGNCPIWVKTPLKLANGTKYRPPAKLLKERGFFGAIAGFLEGGWEGMIAGWHGYTSHGAHGVAVAADLKSTQEAINKITKNLNSLSELEVKNLQRLSGAMDELHNEILELDEKVDDLRADTISSQIELAVLLSNEGIINSEDEHLLALERKLKKMLGPSAVEIGNGCFETKHKCNQTCLDRIAAGTFDAGEFSLPTFDSLNITAASLNDDGLDNHTILLYYSTAASSLAVTLMIAIFVVYMVSRDNVSCSICL

SEQ ID NO: 27135 - protein, 585 aa, Artificial Sequence; identical to SEQ ID NO: 26979
  derived and/or modified protein sequence (wt) from hemagglutinin__InfluenzaB__AGX17411

SEQ ID NO: 27136 - protein, 585 aa, Artificial Sequence; identical to SEQ ID NO: 26979
  derived and/or modified protein sequence (wt) from hemagglutinin__InfluenzaB__AGX17422

SEQ ID NO: 27137 - protein, 585 aa, Artificial Sequence; identical to SEQ ID NO: 27062
  derived and/or modified protein sequence (wt) from hemagglutinin__InfluenzaB__AGX17433

SEQ ID NO: 27138 - protein, 585 aa, Artificial Sequence; identical to SEQ ID NO: 26979
  derived and/or modified protein sequence (wt) from hemagglutinin__InfluenzaB__AGX17444

SEQ ID NO: 27139 - protein, 585 aa, Artificial Sequence; identical to SEQ ID NO: 27062
  derived and/or modified protein sequence (wt) from hemagglutinin__InfluenzaB__AGX17455

SEQ ID NO: 27140 - protein, 585 aa, Artificial Sequence; identical to SEQ ID NO: 27105
  derived and/or modified protein sequence (wt) from hemagglutinin__InfluenzaB__AGX17466

SEQ ID NO: 27141 - protein, 585 aa, Artificial Sequence; identical to SEQ ID NO: 26979
  derived and/or modified protein sequence (wt) from hemagglutinin__InfluenzaB__AGX17477

SEQ ID NO: 27142 - protein, 585 aa, Artificial Sequence; identical to SEQ ID NO: 27064
  derived and/or modified protein sequence (wt) from hemagglutinin__InfluenzaB__AGX17488

SEQ ID NO: 27143 - protein, 585 aa, Artificial Sequence; identical to SEQ ID NO: 26979
  derived and/or modified protein sequence (wt) from hemagglutinin__InfluenzaB__AGX17499

SEQ ID NO: 27144 - protein, 585 aa, Artificial Sequence; identical to SEQ ID NO: 27105
  derived and/or modified protein sequence (wt) from hemagglutinin__InfluenzaB__AGX17510

SEQ ID NO: 27145 - protein, 585 aa, Artificial Sequence; identical to SEQ ID NO: 27105
  derived and/or modified protein sequence (wt) from hemagglutinin__InfluenzaB__AGX17521

SEQ ID NO: 27146 - protein, 585 aa, Artificial Sequence; identical to SEQ ID NO: 27107
  derived and/or modified protein sequence (wt) from hemagglutinin__InfluenzaB__AGX17532

SEQ ID NO: 27147 - protein, 585 aa, Artificial Sequence
  derived and/or modified protein sequence (wt) from hemagglutinin__InfluenzaB__AGX17543
MKAIIVLLMVVTSNADRICTGITSSNSPHVVKTATQGEVNVTGVIPLTTTPTKSHFASLKGTKTRGKLCPKCLNCTDLDVALGRPKCTGNIPSAKVSILHEVRPVTSGCFPIMHDRTKIRQLPNLLRGYEHIRLSTHNVINAEKAPGGPYKIGTSGSCPNVTNGNGFFATMAWAVPKNDNNKTATNSLTIEVPYICTEGEDQITVWGFHSDNETQMAKLYGDSKPQKFTSSANGVTTHYVSQIGGFPNQTEDGGLPQSGRIVVDYMVQKSGKTGTITYQRGILLPQKVWCASGRSKVIKGSLPLIGEADCLHEKYGGLNKSKPYYTGEHAKAIGNCPIWVKTPLKLANGTKYRPPAKLLKERGFFGAIAGFLEGGWEGMIAGWHGYTSHGAHGVAVAADLKSTQEAINKITKNLNSLSELEVKNLQRLSGAMNELHNEILELDEKVDDLRADTISSQIELAVLLSNEGIINSEDEHLLALERKLKKMLGPSAVEIGNGCFETKHKCNQTCLDRIAAGTFDAGEFSLPTFDSLNITAASLNDDGLDNHTILLYYSTAASSLAVTLMIAIFVVYMVSRDNVSCSICL

SEQ ID NO: 27148 - protein, 585 aa, Artificial Sequence
  derived and/or modified protein sequence (wt) from hemagglutinin__InfluenzaB__AGX17554
MKAIIVLLLVVTSNADRICTGITSSNSPHVVKTATQGEVNVTGVIPLTTTPTKSHFANLKGTKTRGKLCPKCLNCTDLDVALGRPKCTGNIPSAKVSILHEVRPVTSGCFPIMHDRTKIRQLPNLLRGYEHIRLSTHNVINAEKAPGGPYKIGTSGSCPNVTNGNGFFATMAWAVPKNDNNKTATNSLTIEVPYICTEGEDQITVWGFHSDNETQMAKLYGDSKPQKFTSSANGVTTHYVSQIGGFPNQTEDGGLPQSGRIVVDYMVQKSGKTGTITYQRGILLPQKVWCASGRSKVIKGSLPLIGEADCLHEKYGGLNKSKPYYTGEHAKAIGNCPIWVKTPLKLANGTKYRPPAKLLKERGFFGAIAGFLEGGWEGMIAGWHGYTSHGAHGVAVAADLKSTQEAINKITKNLNSLSELEVKNLQRLSGAMDELHNEILELDEKVDDLRADTISSQIELAVLLSNEGIINSEDEHLLALERKLKKMLGPSAVEIGNGCFETKHKCNQTCLDRIAAGTFDAGEFSLPTFDSLNITAASLNDDGLDNHTILLYYSTAASSLAVTLMIAIFVVYMVSRDNVSCSICL

SEQ ID NO: 27149 - protein, 584 aa, Artificial Sequence; identical to SEQ ID NO: 27023
  derived and/or modified protein sequence (wt) from hemagglutinin__InfluenzaB__AGX17565

SEQ ID NO: 27150 - protein, 585 aa, Artificial Sequence
  derived and/or modified protein sequence (wt) from hemagglutinin__InfluenzaB__AGX17576
MKAIIVLLMVVTSNADRICTGITSSNSPHVVKTATQGEVNVTGVIPLTTTPTKSHFANLKGTKTRGKLCPKCLNCTDLDVALGRPKCTGNIPSAEVSILHEVRPVTSGCFPIMHDRTKIRQLPNLLRGYEHIRLSTHNVINAEKAPGGPYKIGTSGSCPNVTNGNGFFATMAWAVPKNDNNKTATNSLTIEVPYICTEGEDQITIWGFHSDNETQMAKLYGDSKPQKFTSSANGVTTHYVSQIGGFPNQTEDGGLPQSGRIVVDYMVQKSGKTGTITYQRGILLPQKVWCASGRSKVIKGSLPLIGEADCLHEKYGGLNKSKPYYTGEHAKAIGNCPIWVKTPLKLANGTKYRPPAKLLKERGFFGAIAGFLEGGWEGMIAGWHGYTSHGAHGVAVAADLKSTQEAINKITKNLNSLSELEVKNLQRLSGAMDELHNEILELDEKVDDLRADTISSQIELAVLLSNEGIINSEDEHLLALERKLKKMLGPSAVEIGNGCFETKHKCNQTCLDRIAAGTFDAGEFSLPTFDSLNITAASLNDDGLDNHTILLYYSTAASSLAVTLMMAIFVVYMVSRDNVSCSICL

SEQ ID NO: 27151 - protein, 585 aa, Artificial Sequence; identical to SEQ ID NO: 26514
  derived and/or modified protein sequence (wt) from hemagglutinin__InfluenzaB__AGX17598

SEQ ID NO: 27152 - protein, 585 aa, Artificial Sequence
  derived and/or modified protein sequence (wt) from hemagglutinin__InfluenzaB__AGX17609
MKAIIVLLMVVTSNADRICTGITSSNSPHVVKTATQGEVNVTGVIPLTTTPTKSHFANLKGTETRGKLCPKCLNCTDLDVALGRPKCTGKIPSARVSILHEVRPVTSGCFPIMHDRTKIRQLPNLLRGYEHIRLSTHNVINAENAPGGPYKIGTSGSCPNVTNGNGFFATMAWAVPKNDNNKTATNSLTIEVPYICTEGEDQITVWGFHSDNETQMAKLYGDSKPQKFTSSANGVTTHYVSQIGGFPNQTEDGGLPQSGRIVVDYMVQKSGKTGTITYQRGILLPQKVWCASGRSKVIKGSLPLIGEADCLHEKYGGLNKSKPYYTGEHAKAIGNCPIWVKTPLKLANGTKYRPPAKLLKERGFFGAIAGFLEGGWEGMIAGWHGYTSHGAHGVAVAADLKSTQEAINKITKNLNSLSELEVKNLQRLSGAMDELHNEILELDEKVDDLRADTISSQIELAVLLSNEGIINSEDEHLLALERKLKKMLGPSAVEIGNGCFETKHKCNQTCLDRIAAGTFDAGEFSLPTFDSLNITAASLNDDGLDNHTILLYYSTAASSLAVTLMIAIFVVYMVSRDNVSCSICL

SEQ ID NO: 27153 - protein, 585 aa, Artificial Sequence; identical to SEQ ID NO: 26981
  derived and/or modified protein sequence (wt) from hemagglutinin__InfluenzaB__AGX17620

SEQ ID NO: 27154 - protein, 585 aa, Artificial Sequence; identical to SEQ ID NO: 26514
  derived and/or modified protein sequence (wt) from hemagglutinin__InfluenzaB__AGX17631

SEQ ID NO: 27155 - protein, 585 aa, Artificial Sequence; identical to SEQ ID NO: 26638
  derived and/or modified protein sequence (wt) from hemagglutinin__InfluenzaB__AGX17642

SEQ ID NO: 27156 - protein, 585 aa, Artificial Sequence; identical to SEQ ID NO: 26981
  derived and/or modified protein sequence (wt) from hemagglutinin__InfluenzaB__AGX17653

SEQ ID NO: 27157 - protein, 585 aa, Artificial Sequence; identical to SEQ ID NO: 26514
  derived and/or modified protein sequence (wt) from hemagglutinin__InfluenzaB__AGX17664

SEQ ID NO: 27158 - protein, 585 aa, Artificial Sequence; identical to SEQ ID NO: 26638
  derived and/or modified protein sequence (wt) from hemagglutinin__InfluenzaB__AGX17675

SEQ ID NO: 27159 - protein, 585 aa, Artificial Sequence; identical to SEQ ID NO: 26981
  derived and/or modified protein sequence (wt) from hemagglutinin__InfluenzaB__AGX17686

SEQ ID NO: 27160 - protein, 585 aa, Artificial Sequence
  derived and/or modified protein sequence (wt) from hemagglutinin__InfluenzaB__AGX17697
MKAIIVLLMVVTSNADRICTGITSSNSPHVVKTATQGEVNVTGVIPLTTTPTKSHFANLKGTETRGKLCPKCLNCTDLDVALGRPKCTGEIPSARVSILHEVRPVTSGCFPIMHDRTKIRQLPNLLRGYEHIRLSTHNAINAENAPGGPYKIGTSGSCPNVTNGNGFFATMAWAVPKNDNNKTATNSLTIEVPYICTEGEDQITVWGFHSDNETQMAKLYGDSKPQKFTSSANGVTTHYVSQIGGFPNQTEDGGLPQSGRIVVDYMVQKSGKTGTITYQRGILLPQKVWCASGRSKVIKGSLPLIGEADCLHEKYGGLNKSKPYYTGEHAKAIGNCPIWVKTPLKLANGTKYRPPAKLLKERGFFGAIAGFLEGGWEGMIAGWHGYTSHGAHGVAVAADLKSTQEAINKITKNLNSLSELEVKNLQRLSGAMDELHNEILELDEKVDDLRADTISSQIELAVLLSNEGIINSEDEHLLALERKLKKMLGPSAVEIGNGCFETKHKCNQTCLDRIAAGTFDAGEFSLPTFDSLNITAASLNDDGLDNHTILLYYSTAASSLAVTLMIAIFVVYMVSRDNVSCSICL

SEQ ID NO: 27161 - protein, 585 aa, Artificial Sequence; identical to SEQ ID NO: 26638
  derived and/or modified protein sequence (wt) from hemagglutinin__InfluenzaB__AGX17708

SEQ ID NO: 27162 - protein, 585 aa, Artificial Sequence; identical to SEQ ID NO: 26981
  derived and/or modified protein sequence (wt) from hemagglutinin__InfluenzaB__AGX17719

SEQ ID NO: 27163 - protein, 585 aa, Artificial Sequence; identical to SEQ ID NO: 26638
  derived and/or modified protein sequence (wt) from hemagglutinin__InfluenzaB__AGX17730

SEQ ID NO: 27164 - protein, 585 aa, Artificial Sequence; identical to SEQ ID NO: 26514
  derived and/or modified protein sequence (wt) from hemagglutinin__InfluenzaB__AGX17741

SEQ ID NO: 27165 - protein, 585 aa, Artificial Sequence; identical to SEQ ID NO: 26981
  derived and/or modified protein sequence (wt) from hemagglutinin__InfluenzaB__AGX17752

SEQ ID NO: 27166 - protein, 585 aa, Artificial Sequence; identical to SEQ ID NO: 26981
  derived and/or modified protein sequence (wt) from hemagglutinin__InfluenzaB__AGX17774

SEQ ID NO: 27167 - protein, 585 aa, Artificial Sequence
  derived and/or modified protein sequence (wt) from hemagglutinin__InfluenzaB__AGX17785
MKAIIVLLMVVTSNADRICTGITSSNSPHVVKTATQGEVNVTGVIPLTTTPTKSHFANLKGTKTRGKLCPKCLNCTDLDVALGRPKCTGNIPSAEVSILHEVRPVTSGCFPIMHDRTKIRQLPNLLRGYEHVRLSTHNVINAEKAPGGPYKIGTSGSCPNVTNGNGFFATMAWAVPKNDNNKTATNSLTIEVPYICTEGEDQITIWGFHSDNETQMAKLYGDSKPQKFTSSANGVTTHYVSQIGGFPNQTEDGGLPQSGRIVVDYMVQKSGKTGTITYQRGILLPQKVWCASGRSKVIKGSLPLIGEADCLHEKYGGLNKSKPYYTGEHAKAIGNCPIWVKTPLKLANGTKYRPPAKLLKERGFFGAIAGFLEGGWEGMIAGWHGYTSHGAHGVAVAADLKSTQEAINKITKNLNSLSELEVKNLQRLSGAMDELHNEILELDEKVDDLRADTISSQIELAVLLSNEGIINSEDEHLLALERKLKKMLGPSAVEIGNGCFETKHKCNQTCLDRIAAGTFDAGEFSLPTFDSLNITAASLNDDGLDNHTILLYYSTAASSLAVTLMIAIFVVYMVSRDNVSCSICL

SEQ ID NO: 27168 - protein, 585 aa, Artificial Sequence; identical to SEQ ID NO: 26981
  derived and/or modified protein sequence (wt) from hemagglutinin__InfluenzaB__AGX17796

SEQ ID NO: 27169 - protein, 585 aa, Artificial Sequence; identical to SEQ ID NO: 26565
  derived and/or modified protein sequence (wt) from hemagglutinin__InfluenzaB__AGX17807

SEQ ID NO: 27170 - protein, 585 aa, Artificial Sequence; identical to SEQ ID NO: 27152
  derived and/or modified protein sequence (wt) from hemagglutinin__InfluenzaB__AGX17818

SEQ ID NO: 27171 - protein, 585 aa, Artificial Sequence
  derived and/or modified protein sequence (wt) from hemagglutinin__InfluenzaB__AGX17829
MKAIIVLLMVVTSNADRICTGITSSNSPHVVKTATQGEVNVTGVIPLTTTPTKSHFANLKGTETRGKLCPKCLNCTDLDVALGRPKCTGKIPSARVSILHEVRPVTSGCFPIMHDRTKIRQLPNLLRGYEHIRLSTHNVINAENAPGGPYKIGTSGSCPNVTNGNGFFATMAWAVPKNDNNKTATNSLTIEVPYICTEGEDQITVWGFHSDNETQMAKLYGDSKPQKFTSSANGVTTHYVSQIGGFPNQTEDGGLPQSGRIVVDYMVQKSGKTGTITYQRGILLPQKVWCASGRSKVIKGSLPLIGEADCLHEKYGGLNKSKPYYTGEHAKAIGNCPIWVKTPLKLANGTKYRPPAKLLKERGFFGAIAGFLEGGWEGMIAGWHGYTSHGAHGVAVAADLKSTQEAVNKITKNLNSLSELEVKNLQRLSGAMDELHNEILELDEKVDDLRADTISSQIELAVLLSNEGIINSEDEHLLALERKLKKMLGPSAVEIGNGCFETKHKCNQTCLDRIAAGTFDAGEFSLPTFDSLNITAASLNDDGLDNHTILLYYSTAASSLAVTLMIAIFVVYMVSRDNVSCSICL

SEQ ID NO: 27172 - protein, 585 aa, Artificial Sequence; identical to SEQ ID NO: 26638
  derived and/or modified protein sequence (wt) from hemagglutinin__InfluenzaB__AGX17840

SEQ ID NO: 27173 - protein, 585 aa, Artificial Sequence; identical to SEQ ID NO: 26981
  derived and/or modified protein sequence (wt) from hemagglutinin__InfluenzaB__AGX17851

SEQ ID NO: 27174 - protein, 585 aa, Artificial Sequence
  derived and/or modified protein sequence (wt) from hemagglutinin__InfluenzaB__AGX17862
MKAIIVLLMVVTSNADRICTGITSSNSPHVVKTATQGEVNVTGVIPLTTTPTKSHFANLKGTKTRGKLCPKCLNCTDLDVALGRPKCTGNIPSAEVSILHEVRPVTSGCFPIMHDRTKIRQLPNLLRGYEHIRLSTHNVINAEKAPGGPYKIGTSGSCPNVTNGNGFFATMAWAVPKNDNNKTATNSLTIEVPYICTEGEDQITIWGFHSDNETQMAKLYGDSKPQKFTSSANGVTTHYVSQIGGFPNQTEDGGLPQSGRIVVDYMVQKSGKTGTITYQRGILLPQKVWCASGRSKVIKGTLPLIGEADCLHEKYGGLNKSKPYYTGEHAKAIGNCPIWVKTPLKLANGTKYRPPAKLLKERGFFGAIAGFLEGGWEGMIAGWHGYTSHGAHGVAVAADLKSTQEAINKITKNLNSLSELEVKNLQRLSGAMDELHNEILELDEKVDDLRADTISSQIELAVLLSNEGIINSEDEHLLALERKLKKMLGPSAVEIGNGCFETKHKCNQTCLDRIAAGTFDAGEFSLPTFDSLNITAASLNDDGLDNHTILLYYSTAASSLAVTLMIAIFVVYMVSRDNVSCSICL

SEQ ID NO: 27175 - protein, 585 aa, Artificial Sequence
  derived and/or modified protein sequence (wt) from hemagglutinin__InfluenzaB__AGX17873
MKAIIVLLMVVTSNADRICTGITSSNSPHVVKTATQGEVNVTGVIPLTTTPTKSHFANLKGTETRGKLCPKCLDCTDLDVALGRPKCTGNIPSARVSILHEVRPVTSGCFPIMHDRTKIRQLPNLLRGYEHIRLSTHNVINAENAPGGPYKIGTSGSCPNVTNGNGFFATMAWAVPKNDNNKTATNSLTIEVPYICTEGEDQITVWGFHSDNETQMAKLYGDSKPQKFTSSANGVTTHYVSQIGGFPNQTEDGGLPQSGRIVVDYMVQKSGKTGTITYQRGILLPQKVWCASGRSKVIKGSLPLIGEADCLHEKYGGLNKSKPYYTGEHAKAIGNCPIWVKTPLKLANGTKYRPPAKLLKERGFFGAIAGFLEGGWEGMIAGWHGYTSHGAHGVAVAADLKSTQEAINKITKNLNSLSELEVKNLQRLSGAMDELHNEILELDEKVDDLRADTISSQIELAVLLSNEGIINSEDEHLLALERKLKKMLGPSAVEIGNGCFETKHKCNQTCLDRIAAGTFDAGEFSLPTFDSLNITAASLNDDGLDNHTILLYYSTAASSLAVTLMIAIFVVYMVSRDNVSCSICL

SEQ ID NO: 27176 - protein, 585 aa, Artificial Sequence; identical to SEQ ID NO: 26638
  derived and/or modified protein sequence (wt) from hemagglutinin__InfluenzaB__AGX17884

SEQ ID NO: 27177 - protein, 585 aa, Artificial Sequence
  derived and/or modified protein sequence (wt) from hemagglutinin__InfluenzaB__AGX17895
MKAIIVLLMVVTSNADRICTGITSSNSPHVVKTATQGEVNVTGVIPLTTTPTKSHFANLKGTETRGKLCPKCLNCTDLDVALGRPKCTGNIPSARVSILHEVRPVTSGCFPIMHDRTKIRQLPNLLRGYEHIRLSTHNVINAENAPGGPYKIGTSGSCPNVTNGNGFFATMAWAVPKNDNNKTATNSLTIEVPYICTEGEDQITVWGFHSDNENQMAKLYGDSKPQKFTSSANGVTTHYVSQIGGFPNQTEDGGLPQSGRIVVDYMVQKSGKTGTITYQRGILLPQKVWCASGRSKVIKGSLPLIGEADCLHEKYGGLNKSKPYYTGEHAKAIGNCPIWVKTPLKLANGTKYRPPAKLLKERGFFGAIAGFLEGGWEGMIAGWHGYTSHGAHGVAVAADLKSTQEAINKITKNLNSLSELEVKNLQRLSGAMDELHNEILELDEKVDDLRADTISSQIELAVLLSNEGIINSEDEHLLALERKLKKMLGPSAVEIGNGCFETKHKCNQTCLDRIAAGTFDAGEFSLPTFDSLNITAASLNDDGLDNHTILLYYSTAASSLAVTLMIAIFVVYMVSRDNVSCSICL

SEQ ID NO: 27178 - protein, 585 aa, Artificial Sequence; identical to SEQ ID NO: 26638
  derived and/or modified protein sequence (wt) from hemagglutinin__InfluenzaB__AGX17906

SEQ ID NO: 27179 - protein, 585 aa, Artificial Sequence; identical to SEQ ID NO: 26638
  derived and/or modified protein sequence (wt) from hemagglutinin__InfluenzaB__AGX17917

SEQ ID NO: 27180 - protein, 585 aa, Artificial Sequence
  derived and/or modified protein sequence (wt) from hemagglutinin__InfluenzaB__AGX17928
MKTIIVLLMVVTSNADRICTGITSSNSPHVVKTATQGEVNVTGVIPLTTTPTKSHFANLKGTKTRGKLCPKCLNCTDLDVALGRPKCTGNIPSAEVSILHEVRPVTSGCFPIMHDRTKIRQLPNLLRGYEHIRLSTHNVINAEKAPGGPYKIGTSGSCPNVTNGNGFFATMAWAVPKNDNNKTATNSLTIEVPYICTEGEDQITIWGFHSDNETQMAKLYGDSKPQKFTSSANGVTTHYVSQIGGFPNQTEDGGLPQSGRIVVDYMVQKSGKTGTITYQRGILLPQKVWCASGRSKVIKGTLPLIGEADCLHEKYGGLNKSKPYYTGEHAKAIGNCPIWVKTPLKLANGTKYRPPAKLLKERGFFGAIAGFLEGGWEGMIAGWHGYTSHGAHGVAVAADLKSTQEAINKITKNLNSLSELEVKNLQRLSGAMDELHNEILELDEKVDDLRADTISSQIELAVLLSNEGIINSEDEHLLALERKLKKMLGPSAVEIGNGCFETKHKCNQTCLDRIAAGTFDAGEFSLPTFDSLNITAASLNDDGLDNHTILLYYSTAASSLAVTLMIAIFVVYMVSRDNVSCSICL

SEQ ID NO: 27181 - protein, 585 aa, Artificial Sequence; identical to SEQ ID NO: 26514
  derived and/or modified protein sequence (wt) from hemagglutinin__InfluenzaB__AGX17939

SEQ ID NO: 27182 - protein, 585 aa, Artificial Sequence; identical to SEQ ID NO: 26514
  derived and/or modified protein sequence (wt) from hemagglutinin__InfluenzaB__AGX17950

SEQ ID NO: 27183 - protein, 585 aa, Artificial Sequence; identical to SEQ ID NO: 26514
  derived and/or modified protein sequence (wt) from hemagglutinin__InfluenzaB__AGX17961

SEQ ID NO: 27184 - protein, 585 aa, Artificial Sequence; identical to SEQ ID NO: 26981
  derived and/or modified protein sequence (wt) from hemagglutinin__InfluenzaB__AGX17972

SEQ ID NO: 27185 - protein, 585 aa, Artificial Sequence; identical to SEQ ID NO: 26514
  derived and/or modified protein sequence (wt) from hemagglutinin__InfluenzaB__AGX17983

SEQ ID NO: 27186 - protein, 585 aa, Artificial Sequence; identical to SEQ ID NO: 26638
  derived and/or modified protein sequence (wt) from hemagglutinin__InfluenzaB__AGX17994

SEQ ID NO: 27187 - protein, 585 aa, Artificial Sequence
  derived and/or modified protein sequence (wt) from hemagglutinin__InfluenzaB__AGX18005
MKAIIVLLMVVTSNADRICTGITSSNSPHVVKTATQGEVNVTGVIPLTTTPTKSHFANLKGTETRGKLCPKCLNCTDLDVALGRPKCTGNIPSARVSILHEVRPVTSGCFPIMHDRTKIRQLPNLLRGYEHIRLSTHNVINAENAPGGPYKIGTSGSCPNVTNGNGFFATMAWAVPKNDNNKTATNSLTIEVPYICTEGEDQITVWGFHSDNETQMAKLYGDSKPQKFTSSANGVTTHYVSQIGGFPNQTEDGGLPQSGRIVVDYMVQKSGKTGTITYQRGILLPQKVWCASGRSKVIKGSLPLIGEADCLHEKYGGLNKSKPYYTGEHAKAIGNCPIWVKTPLKLANGTKYRPPAKLLKERGFFGAIAGFLEGGWEGMIAGWHGYTSHGAHGVAVAADIKSTQEAINKITKNLNSLSELEVKNLQRLSGAMDELHNEILELDEKVDDLRADTISSQIELAVLLSNEGIINSEDEHLLALERKLKKMLGPSAVEIGNGCFETKHKCNQTCLDRIAAGTFDAGEFSLPTFDSLNITAASLNDDGLDNHTILLYYSTAASSLAVTLMIAIFVVYMVSRDNVSCSICL

SEQ ID NO: 27188 - protein, 585 aa, Artificial Sequence
  derived and/or modified protein sequence (wt) from hemagglutinin__InfluenzaB__AGX18016
MKAIIVLLMVVTSNADRICTGITSSNSPHVVKTATQGEVNVTGVIPLTTTPTKSHFANLKGTETRGKLCPKCLNCTDLDVALGRPKCTGNIPSARVSILHEVRPVTSGCFPIMHDRTKIRQLPNLLRGYEHIRLSTHNVINAENAPGGPYKIGTSGSCPNVTNGNGFFATMAWAVPKNDNNKTATNSLTIEVPYICIEGEDQITVWGFHSDNETQMAKLYGDSKPQKFTSSANGVTTHYVSQIGGFPNQTEDGGLPQSGRIVVDYMVQKSGKTGTITYQRGILLPQKVWCASGRSKVIKGSLPLIGEADCLHEKYGGLNKSKPYYTGEHAKAIGNCPIWVKTPLKLANGTKYRPPAKLLKERGFFGAIAGFLEGGWEGMIAGWHGYTSHGAHGVAVAADLKSTQEAINKITKNLNSLSELEVKNLQRLSGAMDELHNEILELDEKVDDLRADTISSQIELAVLLSNEGIINSEDEHLLALERKLKKMLGPSAVEIGNGCFETKHKCNQTCLDRIAAGTFDAGEFSLPTFDSLNITAASLNDDGLDNHTILLYYSTAASSLAVTLMIAIFVVYMVSRDNVSCSICL

SEQ ID NO: 27189 - protein, 585 aa, Artificial Sequence; identical to SEQ ID NO: 27152
  derived and/or modified protein sequence (wt) from hemagglutinin__InfluenzaB__AGX18027

SEQ ID NO: 27190 - protein, 585 aa, Artificial Sequence; identical to SEQ ID NO: 26638
  derived and/or modified protein sequence (wt) from hemagglutinin__InfluenzaB__AGX18038

SEQ ID NO: 27191 - protein, 585 aa, Artificial Sequence; identical to SEQ ID NO: 26638
  derived and/or modified protein sequence (wt) from hemagglutinin__InfluenzaB__AGX18049

SEQ ID NO: 27192 - protein, 585 aa, Artificial Sequence; identical to SEQ ID NO: 26638
  derived and/or modified protein sequence (wt) from hemagglutinin__InfluenzaB__AGX18060

SEQ ID NO: 27193 - protein, 585 aa, Artificial Sequence; identical to SEQ ID NO: 26514
  derived and/or modified protein sequence (wt) from hemagglutinin__InfluenzaB__AGX18071

SEQ ID NO: 27194 - protein, 585 aa, Artificial Sequence; identical to SEQ ID NO: 27174
  derived and/or modified protein sequence (wt) from hemagglutinin__InfluenzaB__AGX18082

SEQ ID NO: 27195 - protein, 585 aa, Artificial Sequence; identical to SEQ ID NO: 27174
  derived and/or modified protein sequence (wt) from hemagglutinin__InfluenzaB__AGX18093

SEQ ID NO: 27196 - protein, 585 aa, Artificial Sequence; identical to SEQ ID NO: 26981
  derived and/or modified protein sequence (wt) from hemagglutinin__InfluenzaB__AGX18104

SEQ ID NO: 27197 - protein, 585 aa, Artificial Sequence; identical to SEQ ID NO: 26638
  derived and/or modified protein sequence (wt) from hemagglutinin__InfluenzaB__AGX18115

SEQ ID NO: 27198 - protein, 585 aa, Artificial Sequence; identical to SEQ ID NO: 26638
  derived and/or modified protein sequence (wt) from hemagglutinin__InfluenzaB__AGX18126

SEQ ID NO: 27199 - protein, 585 aa, Artificial Sequence; identical to SEQ ID NO: 26514
  derived and/or modified protein sequence (wt) from hemagglutinin__InfluenzaB__AGX18137

SEQ ID NO: 27200 - protein, 585 aa, Artificial Sequence; identical to SEQ ID NO: 27174
  derived and/or modified protein sequence (wt) from hemagglutinin__InfluenzaB__AGX18148

SEQ ID NO: 27201 - protein, 585 aa, Artificial Sequence; identical to SEQ ID NO: 26514
  derived and/or modified protein sequence (wt) from hemagglutinin__InfluenzaB__AGX18159

SEQ ID NO: 27202 - protein, 585 aa, Artificial Sequence; identical to SEQ ID NO: 26514
  derived and/or modified protein sequence (wt) from hemagglutinin__InfluenzaB__AGX18170

SEQ ID NO: 27203 - protein, 585 aa, Artificial Sequence; identical to SEQ ID NO: 27174
  derived and/or modified protein sequence (wt) from hemagglutinin__InfluenzaB__AGX18181

SEQ ID NO: 27204 - protein, 585 aa, Artificial Sequence
  derived and/or modified protein sequence (wt) from hemagglutinin__InfluenzaB__AGX18192
MKAIIVLLMVVTSNADRICTGITSSNSPHVVKTATQGEVNVTGVIPLTTTPTKSHFANLKGTKTRGKLCPKCLNCTDLDVALGRPKCTGNIPSAEVSILHEVRPVTSGCFPIMHDRTKIRQLPNLLRGYEHIRLSTHNVINAEKAPGGPYKIGTSGSCPNVTNGNGFFATMAWAVPKNDNNKTATNSLTIEVPYICTEGEDQITIWGFHSDNETQMAKLYGDSKPQKFTSSTNGVTTHYVSQIGGFPNQTEDGGLPQSGRIVVDYMVQKPGKTGTITYQRGILLPQKVWCASGRSKVIKGSLPLIGEADCLHEKYGGLNKSKPYYTGEHAKAIGNCPIWVKTPLKLANGTKYRPPAKLLKERGFFGAIAGFLEGGWEGMIAGWHGYTSHGAHGVAVAADLKSTQEAINKITKNLNSLSELEVKNLQRLSSAMDELHNEILELDEKVDDLRADTISSQIELAVLLSNEGIINSEDEHLLALERKLKKMLGPSAVEIGNGCFETKHKCNQTCLDRIAAGTFDAGEFSLPTFDSLNITAASLNDDGLDNHTILLYYSTAASSLAVTLMIAIFVVYMVSRDNVSCSICL

SEQ ID NO: 27205 - protein, 585 aa, Artificial Sequence; identical to SEQ ID NO: 27152
  derived and/or modified protein sequence (wt) from hemagglutinin__InfluenzaB__AGX18203

SEQ ID NO: 27206 - protein, 585 aa, Artificial Sequence
  derived and/or modified protein sequence (wt) from hemagglutinin__InfluenzaB__AGX18214
MKAIIVLLMVVTSNADRICTGITSSNSPHVVKTATQGEVNVTGVIPLTTTPTKSHFANLKGTKTRGKLCPKCLNCTDLDVALGRPKCTGNIPSAEVSILHEVRPVTSGCFPIMHDRTKIRQLPNLLRGYEHIRLSTHNVINAEKAPGGPYKTGTSGSCPNVTNGNGFFATMAWAVPKNDNNKTATNSLTIEVPYICTEGEDQITIWGFHSDNETQMAKLYGDSKPQKFTSSANGVTTHYVSQIGGFPNQTEDGGLPQSGRIVVDYMVQKSGKTGTITYQRGILLPQKVWCASGRSKVIKGSLPLIGEADCLHEKYGGLNKSKPYYTGEHAKAIGNCPIWVKTPLKLANGTKYRPPAKLLKERGFFGAIAGFLEGGWEGMIAGWHGYTSHGAHGVAVAADLKSTQEAINKITKNLNSLSELEVKNLQRLSGAMDELHNEILELDEKVDDLRADTISSQIELAVLLSNEGIINSEDEHLLALERKLKKMLGPSAVEIGNGCFETKHKCNQTCLDRIAAGTFDAGEFSLPTFDSLNITAASLNDDGLDNHIILLYYSTAASSLAVTLMIAIFVVYMVSRDNVSCSICL

SEQ ID NO: 27207 - protein, 585 aa, Artificial Sequence
  derived and/or modified protein sequence (wt) from hemagglutinin__InfluenzaB__AGX18225
MKAIIVLLMVVTSNADRICTGITSSNSPHVVKTATQGEVNVTGVIPLTTTPTKSHFANLKGTKTRGKLCPKCLNCTDLDVALGRPKCTGNIPSAEVSILHEVRPVTSGCFPIMHDRTKIRQLPNLLRGYEHIRLSTHNVINAEKAPGGPYKIGTSGSCPNVTNGNGFFATMAWAVPKNDNNKTATNSLTIEVPYICTEGEDQITIWGFHSDNETQMAKLYGDSKPQKFTSSANGVTTHYVSQIGGFPNQTEDGGLPQSGRIVVDYMVQKSGKTGTITYQRGILLPQKVWCASGRSKVIKGSLPLIGEADCLHEKYGGLNKSKPYYTGEHAKAIGNCPIWVKTPLKLANGTKYRPPAKLLKERGFFGAIAGFLEGGWEGMIAGWHGYTSHGAHGVAVAADLKSTQEAINRITKNLNSLSELEVKNLQRLSGAMDELHNEILELDEKVDDLRADTISSQIELAVLLSNEGIINSEDEHLLALERKLKKMLGPSAVEIGNGCFETKHKCNQTCLDRIAAGTFDAGEFSLPTFDSLNITAASLNDDGLDNHTILLYYSTAASSLAVTLMIAIFVVYMVSRDNVSCSICL

SEQ ID NO: 27208 - protein, 585 aa, Artificial Sequence
  derived and/or modified protein sequence (wt) from hemagglutinin__InfluenzaB__AGX18236
MKAIIVLLMVVTSNADRICTGITSSNSPHVVKTATQGEVNVTGVIPLTTTPTKSHFANLKGTKTRGKLCPKCLNCTDLDVALGRPKCTGNIPSAEVSILHEVRPVTSGCFPIMHDRTKIRQLPNLLRGYEHIRLSTHNVINAEKAPGGPYKIGTSGSCPNVTNGNGFFATMAWAVPKNDNNKTATNSLTIEVPYICTEGEDQITIWGFHSDNETQMAKLYGDSKPQKFTSSANGVTTHYVSQIGGFPNQTEDGGLPQSGRIVVDYMMQKSGKTGTITYQRGILLPQKVWCASGRSKVIKGSLPLIGEADCLHEKYGGLNKSKPYYTGEHAKAIGNCPIWVKTPLKLANGTKYRPPAKLLKERGFFGAIAGFLEGGWEGMIAGWHGYTSHGAHGVAVAADLKSTQEAINKITKNLNSLSELEVKNLQRLSGAMDELHNEILELDEKVDDLRADTISSQIELAVLLSNEGIINSEDEHLLALERKLKKMLGPSAVEIGNGCFETKHKCNQTCLDRIAAGTFDAGEFSLPTFDSLNITAASLNDDGLDNHTILLYYSTAASSLAVTLMIAIFVVYMVSRDNVSCSICL

SEQ ID NO: 27209 - protein, 585 aa, Artificial Sequence; identical to SEQ ID NO: 26565
  derived and/or modified protein sequence (wt) from hemagglutinin__InfluenzaB__AGX18247

SEQ ID NO: 27210 - protein, 585 aa, Artificial Sequence
  derived and/or modified protein sequence (wt) from hemagglutinin__InfluenzaB__AGX18258
MKAIIVLLMVVTSNADRICTGITSSNSPHVVKTATQGEVNVTGVIPLTTTPTKSHFANLKGTKTRGKLCPKCLNCTDLDVALGRPKCTGNIPSAEVSILHEVRPVTSGCFPIMHDRTKIRQLPNLLRGYEHIRLSTHNVINAEKAPGGPYKIGTSGSCPNVTNGNGFFATMAWAVPKNDKNKTATNSLTIEVPYICTEGEDQITIWGFHSDNETQMAKLYGDSKPQKFTSSANGVTTHYVSQIGGFPNQTEDGGLPQSGRIVVDYMVQKSGKTGTITYQRGILLPQKVWCASGRSKVIKGTLPLIGEADCLHEKYGGLNKSKPYYTGEHAKAIGNCPIWVKTPLKLANGTKYRPPAKLLKERGFFGAIAGFLEGGWEGMIAGWHGYTSHGAHGVAVAADLKSTQEAINKITKNLNSLSELEVKNLQRLSGAMDELHNEILELDEKVDDLRADTISSQIELAVLLSNEGIINSEDEHLLALERKLKKMLGPSAVEIGNGCFETKHKCNQTCLDRIAAGTFDAGEFSLPTFDSLNITAASLNDDGLDNHTILLYYSTAASSLAVTLMIAIFVVYMVSRDNVSCSICL

SEQ ID NO: 27211 - protein, 585 aa, Artificial Sequence; identical to SEQ ID NO: 26514
  derived and/or modified protein sequence (wt) from hemagglutinin__InfluenzaB__AGX18280

SEQ ID NO: 27212 - protein, 585 aa, Artificial Sequence
  derived and/or modified protein sequence (wt) from hemagglutinin__InfluenzaB__AGX18291
MKAIIVLLMVVTSNADRICTGITSSNSPHVVKTATQGEVNVTGVIPLTTTPTKSHFANLKGTKTRGKLCPKCLNCTDLDVALGRPKCTGNIPSAEVSILHEVRPVTSGCFPIMHDRTKIRQLPNLLRGYEHIRLSTHNVINAEKAPGGPYKIGTSGSCPNVTNGNGFFATMAWAVPKNDNNKTATNSLTIEVPYICTEGEDQITIWGFHSDNETQMAKLYGDSKPQKFTSSANGVTTHYVSQIGGFPNQTEDGGLPQSGRIVVDYMVQKSGKTGTITYQRGILLPQKVWCVSGRSKVIKGSLPLIGEADCLHEKYGGLNKSKPYYTGEHAKAIGNCPIWVKTPLKLANGTKYRPPAKLLKERGFFGAIAGFLEGGWEGMIAGWHGYTSHGAHGVAVAADLKSTQEAINKITKNLNSLSELEVKNLQRLSGAMDELHNEILELDEKVDDLRADTISSQIELAVLLSNEGIINSEDEHLLALERKLKKMLGPSAVEIGNGCFETKHKCNQTCLDRIAAGTFDAGEFSLPTFDSLNITAASLNDDGLDNHTILLYYSTAASSLAVTLMIAIFVVYMVSRDNVSCSICL

SEQ ID NO: 27213 - protein, 585 aa, Artificial Sequence
  derived and/or modified protein sequence (wt) from hemagglutinin__InfluenzaB__AGX18302
MKAIIVLLMVVTSNADRICTGITSSNSPHVVKTATQGEVNVTGVIPLTTTPTKSHFANLKGTKTRGKLCPKCLNCTDLDVALGRPKCTGNIPSAEVSILHEVRPVTSGCFPIMHDRTKIRQLPNLLRGYKHIRLSTHNVINAEKAPGGPYKIGTSGSCPNVTNGNGFFATMAWAVPKNDNNKTATNSLTIEVPYICTEGEDQITIWGFHSDNETQMAKLYGDSKPQKFTSSANGVTTHYVSQIGGFPNQTEDGGLPQSGRIVVDYMVQKSGKTGTITYQRGILLPQKVWCASGRSKVIKGTLPLIGEADCLHEKYGGLNKSKPYYTGEHAKAIGNCPIWVKTPLKLANGTKYRPPAKLLKERGFFGAIAGFLEGGWEGMIAGWHGYTSHGAHGVAVAADLKSTQEAINKITKNLNSLSELEVKNLQRLSGAMDELHNEILELDEKVDDLRADTISSQIELAVLLSNEGIINSEDEHLLALERKLKKMLGPSAVEIGNGCFETKHKCNQTCLDRIAAGTFDAGEFSLPTFDSLNITAASLNDDGLDNHTILLYYSTAASSLAVTLMIAIFVVYMVSRDNVSCSICL

SEQ ID NO: 27214 - protein, 585 aa, Artificial Sequence; identical to SEQ ID NO: 26514
  derived and/or modified protein sequence (wt) from hemagglutinin__InfluenzaB__AGX18313

SEQ ID NO: 27215 - protein, 585 aa, Artificial Sequence
  derived and/or modified protein sequence (wt) from hemagglutinin__InfluenzaB__AGX18324
MKAIIVLLMVVTSNADRICTGITSSNSPHVVKTATQGEVNVTGVIPLTTTPTKSHFANLKGTKTRGKLCPKCLNCTDLDVALGRPKCTGNIPSAEVSILHEVRPVTSGCFPIMHDRTKIRQLPNLLRGYEHIRLSTHNVINAEKAPGGPYKIGTSGSCPNVTNGNGFFATMAWAVPKNDNNKTATNSLTIEVPYICTEGEDQITIWGFHSDNEAQMAKLYGDSKPQKFTSSANGVTTHYVSQIGGFPNQTEDGGLPQSGRIVVDYMVQKSGKTGTITYQRGILLPQKVWCASGRSKVIKGSLPLIGEADCLHEKYGGLNKSKPYYTGEHAKAIGNCPIWVKTPLKLANGTKYRPPAKLLKERGFFGAIAGFLEGGWEGMIAGWHGYTSHGAHGVAVAADLKSTQEAINKITKNLNSLSELEVKNLQRLSGAMDELHNEILELDEKVDDLRADTISSQIELAVLLSNEGIINSEDEHLLALERKLKKMLGPSAVEIGNGCFETKHKCNQTCLDRIAAGTFDAGEFSLPTFDSLNITAASLNDDGLDNHTILLYYSTAASSLAVTLMIAIFVVYMVSRDNVSCSICL

SEQ ID NO: 27216 - protein, 585 aa, Artificial Sequence; identical to SEQ ID NO: 27174
  derived and/or modified protein sequence (wt) from hemagglutinin__InfluenzaB__AGX18335

SEQ ID NO: 27217 - protein, 585 aa, Artificial Sequence
  derived and/or modified protein sequence (wt) from hemagglutinin__InfluenzaB__AGX18346
MKAIIVLLMVVTSNADRICTGITSSNSPHVVKTATQGEVNVTGVIPLTTTPTKSHFANLKGTKTRGKLCPKCLNCTDLDVALGRPKCTGNIPSAEVSILHEVRPVTSGCFPIMHDRTKIRQLPNLLRGYEHIRLSTHNVINAEKAPGGPYKIGTSGSCPNVTNGNGFFATMAWAVPKNDNNKTATNSLTIEVPYICTEGEDQITIWGFHSDNETQMAKLYGDSKPQKFTSSANGVTTHYVSQIGGFPNQTEDGGLPQSGRIVVDYMVQKSGKTGTITYQRGILLPQKVWCASGRSKVIKGSLPLIGEADCLHEKYGGLNKSKPYYTGEHAKAIGNCPIWVKTPLKLANGTKYRPPAKLLKERGFFGAIAGFLEGGWEGMIAGWHGYTSHGAHGVAVAADLKSTQEAINKITKNLNSLSELEVKNLQRLSGAMDELHNEILELDEKVDDLRADTISSQIELAVLLSNEGIINSEDEHLLALERKLKKMLGPSAVEIGNGCFETKHKCNQTCLDRIAAGTFDAGEFSLPTFDSLNITAASLNEDGLDNHTILLYYSTAASSLAVTLMIAIFVVYMVSRDNVSCSICL

SEQ ID NO: 27218 - protein, 585 aa, Artificial Sequence
  derived and/or modified protein sequence (wt) from hemagglutinin__InfluenzaB__AGX18357
MKAIIVLLMVVTSNADRICTGITSSNSPHVVKTATQGEVNVTGVIPLTTAPTKSHFANLKGTKTRGKLCPKCLNCTDLDVALGRPKCTGNIPSAEVSILHEVRPVTSGCFPIMHDRTKIRQLPNLLRGYEHIRLSTHNVINAEKAPGGPYKIGTSGSCPNVTNGNGFFATMAWAVPKNDNNKTATNSLTIEVPYICTEGEDQITIWGFHSDKETQMAKLYGDSKPQKFTSSANGVTTHYVSQIGGFPNQTEDGGLPQSGRIVVDYMVQKPGKTGTITYQRGILLPQKVWCASGRSKVIKGSLPLIGEADCLHEKYGGLNKSKPYYTGEHAKAIGNCPIWVKTPLKLANGTKYRPPAKLLKERGFFGAIAGFLEGGWEGMIAGWHGYTSHGAHGVAVAADLKSTQEAINKITKNLNSLSELEVKNLQRLSSAMDELHNEILELDEKVDDLRADTISSQIELAVLLSNEGIINSEDEHLLALERKLKKMLGPSAVEIGNGCFETKHKCNQTCLDRIAAGTFDAGEFSLPTFDSLNITAASLNDDGLDNHTILLYYSTAASSLAVTLMIAIFVVYMVSRDNVSCSICL

SEQ ID NO: 27219 - protein, 585 aa, Artificial Sequence
  derived and/or modified protein sequence (wt) from hemagglutinin__InfluenzaB__AGX18368
MKAIIVLLMVVTSNADRICTGITSSNSPHVVKTATQGEVNVTGVIPLTTAPTKSHFANLKGTKTRGKLCPKCLNCTDLDVALGRPKCTGNTPSAEVSILHEVRPVTSGCFPIMHDRTKIRQLPNLLRGYEHIRLSNHNVINAEKAPGGPYKIGTSGSCPNVTNGNGFFATMAWAVPKNDNNKTATNSLTIEVPYICTEGEDQITIWGFHSDNETQMAKLYGDSKPQKFTSSANGVTTHYVSQIGGFPNQTEDGGLPQSGRIVVDYMVQKPGKTGTITYQRGILLPQKVWCASGRSKVIKGSLPLIGEADCLHEKYGGLNKSKPYYTGEHAKAIGNCPIWVKTPLKLANGTKYRPPAKLLKERGFFGAIAGFLEGGWEGMIAGWHGYTSHGAHGVAVAADLKSTQEAINKITKNLNSLSELEVKNLQRLSSAMDELHNEILELDEKVDDLRADTISSQIELAVLLSNEGIINSEDEHLLALERKLKKMLGPSAVEIGNGCFETKHKCNQTCLDRIAAGTFDAGEFSLPTFDSLNITAASLNDDGLDNHTILLYYSTAASSLAVTLMIAIFVVYMVSRDNVSCSICL

SEQ ID NO: 27220 - protein, 585 aa, Artificial Sequence; identical to SEQ ID NO: 26638
  derived and/or modified protein sequence (wt) from hemagglutinin__InfluenzaB__AGX18379

SEQ ID NO: 27221 - protein, 585 aa, Artificial Sequence; identical to SEQ ID NO: 27174
  derived and/or modified protein sequence (wt) from hemagglutinin__InfluenzaB__AGX18390

SEQ ID NO: 27222 - protein, 585 aa, Artificial Sequence
  derived and/or modified protein sequence (wt) from hemagglutinin__InfluenzaB__AGX18401
MKAIIVLLMVVTSNADRICTGITSSNSPHVVKTATQGEVNVTGVIPLTTAPTKSHFANLKGTKTRGKLCPKCLNCTDLDVALGRPKCTGNIPSAEVSILHEVRPVTSGCFPIMHDRTKIRQLPNLLRGYEHIRLSTHNVINAEKAPGGPYKIGTSGSCPNVTNGNGFFATMAWAVPKNDNNKTATNSLTIEVPYICTEGEDQITIWGFHSDNEIQMAKLYGDSKPQKFTSSANGVTTHYVSQIGGFPNQTEDGGLPQSGRIVVDYMVQKPGKTGTITYQRGILLPQKVWCASGRSKVIKGSLPLIGEADCLHEKYGGLNKSKPYYTGEHAKAIGNCPIWVKTPLKLANGTKYRPPAKLLKERGFFGAIAGFLEGGWEGMIAGWHGYTSHGAHGVAVAADLKSTQEAINKITKNLNSLSELEVKNLQRLSSAMDELHNEILELDEKVDDLRADTISSQIELAVLLSNEGIINSEDEHLLALERKLKKMLGPSAVEIGNGCFETKHKCNQTCLDRIAAGTFDAGEFSLPTFDSLNITAASLNDDGLDNHTILLYYSTAASSLAVTLMIAIFVVYMVSRDNVSCSICL

SEQ ID NO: 27223 - protein, 585 aa, Artificial Sequence
  derived and/or modified protein sequence (wt) from hemagglutinin__InfluenzaB__AGX18412
MKAIIVLLMVVTSNADRICTGITSSNSPHVVKTATQGEVNVTGVIPLTTTPTKSHFANLKGTKTRGKLCPKCLNCTDLDVALGRPKCTGNIPSAEVSILHEVRPVTSGCFPIMHDRTKIRQLPNLLRGYEHIRLSNHNVINAEKAPGGPYKIGTSGSCPNVTNGNGFFATMAWAVPKNDNNKTATNSLTIEVPYICTEGEDQITIWGFHSDNEAQMAKLYGDSKPQKFTSSANGVTTHYVSQIGGFPNQTEDGGLPQSGRIVVDYMVQKSGKTGTITYQRGILLPQKVWCASGRSKVIKGSLPLIGEADCLHEKYGGLNKSKPYYTGEHAKAIGNCPIWVKTPLKLANGTKYRPPAKLLKERGFFGAIAGFLEGGWEGMIAGWHGYTSHGAHGVAVAADLKSTQEAINKITKNLNSLSELEVKNLQRLSGAMDELHNEILELDEKVDDLRADTISSQIELAVLLSNEGIINSEDEHLLALERKLKKMLGPSAVEIGNGCFETKHKCNQTCLDRIAAGTFDAGEFSLPTFDSLNITAASLNDDGLDNHTILLYYSTAASSLAVTLMIAIFVVYMVSRDNVSCSICL

SEQ ID NO: 27224 - protein, 585 aa, Artificial Sequence; identical to SEQ ID NO: 26981
  derived and/or modified protein sequence (wt) from hemagglutinin__InfluenzaB__AGX18423

SEQ ID NO: 27225 - protein, 584 aa, Artificial Sequence
  derived and/or modified protein sequence (wt) from hemagglutinin__InfluenzaB__AGX18424
MKAIIVLLMVVTSNADRICTGITSSNSPHVVKTATQGEVNVTGVIPLTTTPIKSHFANLKGTRTRGKLCPDCLNCTDLDVALGRPMCVGTTPSAKASILHEVRPVTSGCFPIMHDRTKIRQLPNLLRGYENIRLSTQNVIDAEKALGGPYRLGTSGSCPNATSKSGFFATMAWAVPKDNNKNATNPLTVEVPYICTEGEDQITVWGFHSDDKTQMKNLYGDSNPQKFTSSANGVTTHYVSQIGGFPDQTEDGGLPQSGRIVVDYMVQKPGKTGTIVYQRGVLLPQKVWCASGRSKVIKGSLPLIGEADCLHEKYGGLNKSKPYYTGEHAKAIGNCPIWVKTPLKLANGTKYRPPAKLLKERGFFGAIAGFLEGGWEGMIAGWHGYTSHGAHGVAVAADLKSTQEAINKITKNLNSLSELEVKNLQRLSGAMDELHNEILELDEKVDDLRADTISSQIELAVLLSNEGIINSEDEHLLALERKLKKMLGPSAVDIGNGCFETKHKCNQTCLDRIAAGTFNAGEFSLPTFDSLNITAASLNDDGLDNHTILLYYSTAASSLAVTLMLAIFIVYMVSRDNVSCSICL

SEQ ID NO: 27226 - protein, 585 aa, Artificial Sequence
  derived and/or modified protein sequence (wt) from hemagglutinin__InfluenzaB__AGX18435
MKAIIVLLMVVTSNADRICTGITSSNSPHVVKTATQGEVNVTGVIPLTTTPTKSHFANLKGTKTRGKLCPKCLNCTDLDVALGRPKCTGNIPSAEVSILHEVRPVTSGCFPIMHDRTKIRQLPNLLRGYEHIRLSTHNVINAEKAPGGPYKIGTSGSCPNVTNGNGFFATMAWAVPKNDNNKTATNSLTIEVPYICTEGEDQITIWGFHSDNEIQMAKLYGDSKPQKFTSSANGVTTHYVSQIGGFPNQTEDGGLPQSGRIVVDYMVQKSGKTGTITYQRGILLPQKVWCASGRSKVIKGSLPLIGEADCLHEKYGGLNKSKPYYTGEHAKAIGNCPIWVKTPLKLANGTKYRPPAKLLKERGFFGAIAGFLEGGWEGMIAGWHGYTSHGAHGVAVAADLKSTQEAINKITKNLNSLSELEVKNLQRLSGAMDELHNEILELDEKVDDLRADTISSQIELAVLLSNEGIINSEDEHLLALERKLKKMLGPSAVEIGNGCFETKHKCNQTCLDRIAAGTFDAGEFSLPTFDSLNITAASLNDDGLDNHTILLYYSTAASSLAVTLMIAIFVVYMVSRDNVSCSICL

SEQ ID NO: 27227 - protein, 585 aa, Artificial Sequence; identical to SEQ ID NO: 26638
  derived and/or modified protein sequence (wt) from hemagglutinin__InfluenzaB__AGX18446

SEQ ID NO: 27228 - protein, 585 aa, Artificial Sequence; identical to SEQ ID NO: 27174
  derived and/or modified protein sequence (wt) from hemagglutinin__InfluenzaB__AGX18457

SEQ ID NO: 27229 - protein, 585 aa, Artificial Sequence; identical to SEQ ID NO: 26981
  derived and/or modified protein sequence (wt) from hemagglutinin__InfluenzaB__AGX18468

SEQ ID NO: 27230 - protein, 585 aa, Artificial Sequence; identical to SEQ ID NO: 27174
  derived and/or modified protein sequence (wt) from hemagglutinin__InfluenzaB__AGX18479

SEQ ID NO: 27231 - protein, 585 aa, Artificial Sequence; identical to SEQ ID NO: 26514
  derived and/or modified protein sequence (wt) from hemagglutinin__InfluenzaB__AGX18490

SEQ ID NO: 27232 - protein, 585 aa, Artificial Sequence
  derived and/or modified protein sequence (wt) from hemagglutinin__InfluenzaB__AGX18512
MKAIIVLLMVVTSNADRICTGITSSNSPHVVKTATQGEVNVTGVIPLTTTPTKSHFANLKGTETRGRLCPKCLNCTDLDVALGRPKCTGNIPSARVSILHEVRPVTSGCFPIMHDRTKIRQLPNLLRGYEHIRLSTHNVINAENAPGGPYKIGTSGSCPNVTNGNGFFATMAWAVPKNDNNKTATNSLTIEVPYICTEGEDQITVWGFHSDNETQMAKLYGDSKPQKFTSSANGVTTHYVSQIGGFPNQTEDGGLPQSGRIVVDYMVQKSGKTGTITYQRGILLPQKVWCASGRSKVIKGSLPLIGEADCLHEKYGGLNKSKPYYTGEHAKAIGNCPIWVKTPLKLANGTKYRPPAKLLKERGFFGAIAGFLEGGWEGMIAGWHGYTSHGAHGVAVAADLKSTQEAINKITKNLNSLSELEVKNLQRLSGAMDELHNEILELDEKVDDLRADTISSQIELAVLLSNEGIINSEDEHLLALERKLKKMLGPSAVEIGNGCFETKHKCNQTCLDRIAAGTFDAGEFSLPTFDSLNITAASLNDDGLDNHTILLYYSTAASSLAVTLMIAIFVVYMVSRDNVSCSICL

SEQ ID NO: 27233 - protein, 585 aa, Artificial Sequence; identical to SEQ ID NO: 26514
  derived and/or modified protein sequence (wt) from hemagglutinin__InfluenzaB__AGX18523

SEQ ID NO: 27234 - protein, 585 aa, Artificial Sequence; identical to SEQ ID NO: 26514
  derived and/or modified protein sequence (wt) from hemagglutinin__InfluenzaB__AGX18534

SEQ ID NO: 27235 - protein, 585 aa, Artificial Sequence; identical to SEQ ID NO: 26575
  derived and/or modified protein sequence (wt) from hemagglutinin__InfluenzaB__AGX18545

SEQ ID NO: 27236 - protein, 585 aa, Artificial Sequence; identical to SEQ ID NO: 26514
  derived and/or modified protein sequence (wt) from hemagglutinin__InfluenzaB__AGX18556

SEQ ID NO: 27237 - protein, 585 aa, Artificial Sequence; identical to SEQ ID NO: 26514
  derived and/or modified protein sequence (wt) from hemagglutinin__InfluenzaB__AGX18567

SEQ ID NO: 27238 - protein, 585 aa, Artificial Sequence
  derived and/or modified protein sequence (wt) from hemagglutinin__InfluenzaB__AGX18578
MKAIIVLLMVVTSNADRICTGITSSNSPHVVKTATQGEVNVTGVIPLTTTPTKSHFANLKGTETRGKLCPKCLNCTDLDVALGRPKCTGNIPSARVSILHEVRPVTSGCFPIMHDRTKIRQLPNLLRGYEHIRLSTHNVINAENAPGGPYKIGTSGSCPNVTNGNGFFATMAWAVPKNDKNKTATNSLTIEVPYICTEGEDQITVWGFHSDNETQMAKLYGDSKPQKFTSSANGVTTHYVSQIGGFPNQTEDGGLPQSGRIVVDYMVQKSGKTGTITYQRGILLPQKVWCASGRSKVIKGSLPLIGEADCLHEKYGGLNKSKPYYTGEHAKAIGNCPIWVKTPLKLANGTKYRPPAKLLKERGFFGAIAGFLEGGWEGMIAGWHGYTSHGAHGVAVAADLKSTQEAINKITKNLNSLSELEVKNLQRLSGAMDELHKEILELDEKVDDLRADTISSQIELAVLLSNEGIINSEDEHLLALERKLKKMLGPSAVEIGNGCFETKHKCNQTCLDRIAAGTFDAGEFSLPTFDSLNITAASLNDDGLDNHTILLYYSTAASSLAVTLMIAIFVVYMVSRDNVSCSICL

SEQ ID NO: 27239 - protein, 585 aa, Artificial Sequence
  derived and/or modified protein sequence (wt) from hemagglutinin__InfluenzaB__AGX18589
MKAIIVLLMVVTSNADRICTGITSSNSPHVVKTATQGEVNVTGVIPLTTTPTKSHFANLKGTETRGKLCPKCLNCTDLDVALGRPKCTGNIPSARVSILHEVRPVTSGCFPIMHDRTKIRQLPNLLRGYEHIRLSTHNVINAENAPGGPYKIGTSGSCPNVTNGNGFFATMAWAVPKNDNNKTATNSLTIEVPYICTEGEDQITVWGFHSDTETQMAKLYGDSKPQKFTSSANGVTTHYVSQIGDFPNQTEDGGLPQSGRIVVDYMVQKSGKTGTITYQRGILLPQKVWCASGRSKVIKGSLPLIGEADCLHEKYGGLNKSKPYYTGEHAKAIGNCPIWVKTPLKLANGTKYRPPAKLLKERGFFGAIAGFLEGGWEGMIAGWHGYTSHGAHGVAVAADLKSTQEAINKITKNLNSLSELEVKNLQRLSGAMDELHNEILELDEKVDDLRADTISSQIELAVLLSNEGIINSEDEHLLALERKLKKMLGPSAVEIGNGCFETKHKCNQTCLDRIAAGTFDAGEFSLPTFDSLNITAASLNDDGLDNHTILLYYSTAASSLAVTLMIAIFVVYMVSRDNVSCSICL

SEQ ID NO: 27240 - protein, 585 aa, Artificial Sequence; identical to SEQ ID NO: 26514
  derived and/or modified protein sequence (wt) from hemagglutinin__InfluenzaB__AGX18600

SEQ ID NO: 27241 - protein, 585 aa, Artificial Sequence; identical to SEQ ID NO: 26514
  derived and/or modified protein sequence (wt) from hemagglutinin__InfluenzaB__AGX18611

SEQ ID NO: 27242 - protein, 585 aa, Artificial Sequence; identical to SEQ ID NO: 26514
  derived and/or modified protein sequence (wt) from hemagglutinin__InfluenzaB__AGX18622

SEQ ID NO: 27243 - protein, 585 aa, Artificial Sequence; identical to SEQ ID NO: 26514
  derived and/or modified protein sequence (wt) from hemagglutinin__InfluenzaB__AGX18633

SEQ ID NO: 27244 - protein, 585 aa, Artificial Sequence; identical to SEQ ID NO: 26514
  derived and/or modified protein sequence (wt) from hemagglutinin__InfluenzaB__AGX18644

SEQ ID NO: 27245 - protein, 585 aa, Artificial Sequence; identical to SEQ ID NO: 26514
  derived and/or modified protein sequence (wt) from hemagglutinin__InfluenzaB__AGX18655

SEQ ID NO: 27246 - protein, 585 aa, Artificial Sequence; identical to SEQ ID NO: 26514
  derived and/or modified protein sequence (wt) from hemagglutinin__InfluenzaB__AGX18666

SEQ ID NO: 27247 - protein, 585 aa, Artificial Sequence; identical to SEQ ID NO: 26514
  derived and/or modified protein sequence (wt) from hemagglutinin__InfluenzaB__AGX18677

SEQ ID NO: 27248 - protein, 585 aa, Artificial Sequence; identical to SEQ ID NO: 26514
  derived and/or modified protein sequence (wt) from hemagglutinin__InfluenzaB__AGX18688

SEQ ID NO: 27249 - protein, 585 aa, Artificial Sequence; identical to SEQ ID NO: 26514
  derived and/or modified protein sequence (wt) from hemagglutinin__InfluenzaB__AGX18699

SEQ ID NO: 27250 - protein, 585 aa, Artificial Sequence; identical to SEQ ID NO: 26514
  derived and/or modified protein sequence (wt) from hemagglutinin__InfluenzaB__AGX18710

SEQ ID NO: 27251 - protein, 585 aa, Artificial Sequence; identical to SEQ ID NO: 26514
  derived and/or modified protein sequence (wt) from hemagglutinin__InfluenzaB__AGX18721

SEQ ID NO: 27252 - protein, 585 aa, Artificial Sequence; identical to SEQ ID NO: 26514
  derived and/or modified protein sequence (wt) from hemagglutinin__InfluenzaB__AGX18732

SEQ ID NO: 27253 - protein, 585 aa, Artificial Sequence
  derived and/or modified protein sequence (wt) from hemagglutinin__InfluenzaB__AGX18743
MKAIIVLLMVVTSNADRICTGITSSNSPHVVKTATQGEVNVTGVIPLTTTPTKSHFANLKGTETRGKLCPKCLNCTDLDVALGRPKCTGNIPSARVSILHEVRPVTSGCFPIMHDRTKIRQLPNLLRGYEHIRLSNHNVINAENAPGGPYKIGTSGSCPNVTNGNGFFATMAWAVPKNDNNKTATNSLTIEVPYICTEGEDQITVWGFHSDNETQMAKLYGDSKPQKFTSSANGVTTHYVSQIGGFPNQTEDGGLPQSGRIVVDYMVQKSGKTGTITYQRGILLPQKVWCASGRSKVIKGSLPLIGEADCLHEKYGGLNKSKPYYTGEHAKAIGNCPIWVKTPLKLANGTKYRPPAKLLKERGFFGAIAGFLEGGWEGMIAGWHGYTSHGAHGVAVAADLKSTQEAINKITKNLNSLSELEVKNLQRLSGAMDELHNEILELDEKVDDLRADTISSQIELAVLLSNEGIINSEDEHLLALERKLKKMLGPSAVEIGNGCFETKHKCNQTCLDRIAAGTFDAGEFSLPTFDSLNITAASLNDDGLDNHTILLYYSTAASSLAVTLMIAIFVVYMVSRDNVSCSICL

SEQ ID NO: 27254 - protein, 585 aa, Artificial Sequence; identical to SEQ ID NO: 26514
  derived and/or modified protein sequence (wt) from hemagglutinin__InfluenzaB__AGX18754

SEQ ID NO: 27255 - protein, 585 aa, Artificial Sequence; identical to SEQ ID NO: 26514
  derived and/or modified protein sequence (wt) from hemagglutinin__InfluenzaB__AGX18765

SEQ ID NO: 27256 - protein, 585 aa, Artificial Sequence; identical to SEQ ID NO: 26565
  derived and/or modified protein sequence (wt) from hemagglutinin__InfluenzaB__AGX18776

SEQ ID NO: 27257 - protein, 585 aa, Artificial Sequence; identical to SEQ ID NO: 26514
  derived and/or modified protein sequence (wt) from hemagglutinin__InfluenzaB__AGX18787

SEQ ID NO: 27258 - protein, 585 aa, Artificial Sequence; identical to SEQ ID NO: 26514
  derived and/or modified protein sequence (wt) from hemagglutinin__InfluenzaB__AGX18798

SEQ ID NO: 27259 - protein, 585 aa, Artificial Sequence
  derived and/or modified protein sequence (wt) from hemagglutinin__InfluenzaB__AGX18809
MKAIIVLLMVVTSNADRICTGITSSNSPHVVKTATQGEVNVTGVIPLTTTPTKSHFANLKGTETRGKLCPKCLNCTDLDVALGRPKCTGNIPSARVSILHEVRPVTSGCFPIMHDRTKIRQLPNLLRGYEHIRLSTHNVINAENAPGGPYKIGTSGSCPNVTNGNGFFATMAWAVPKNDNNKTATNSLTIEVPYICTEGEDQITVWGFHSDSETQMAKLYGDSKPQKFTSSANGVTTHYVSQIGGFPNQTEDGGLPQSGRIVVDYMMQKSGKTGTITYQRGILLPQKVWCASGRSKVIKGSLPLIGEADCLHEKYGGLNKSKPYYTGEHAKAIGNCPIWVKTPLKLANGTKYRPPAKLLKERGFFGAIAGFLEGGWEGMIAGWHGYTSHGAHGVAVAADLKSTQEAINKITKNLNSLSELEVKNLQRLSGAMDELHNEILELDEKVDDLRADTISSQIELAVLLSNEGIINSEDEHLLALERKLKKMLGPSAVEIGNGCFETKHKCNQTCLDRIAAGTFDAGEFSLPTFDSLNITAASLNDDGLDNHTILLYYSTAASSLAVTLMIAIFVVYMVSRDNVSCSICL

SEQ ID NO: 27260 - protein, 585 aa, Artificial Sequence; identical to SEQ ID NO: 27177
  derived and/or modified protein sequence (wt) from hemagglutinin__InfluenzaB__AGX18820

SEQ ID NO: 27261 - protein, 585 aa, Artificial Sequence; identical to SEQ ID NO: 26514
  derived and/or modified protein sequence (wt) from hemagglutinin__InfluenzaB__AGX18831

SEQ ID NO: 27262 - protein, 585 aa, Artificial Sequence; identical to SEQ ID NO: 26514
  derived and/or modified protein sequence (wt) from hemagglutinin__InfluenzaB__AGX18842

SEQ ID NO: 27263 - protein, 585 aa, Artificial Sequence; identical to SEQ ID NO: 26582
  derived and/or modified protein sequence (wt) from hemagglutinin__InfluenzaB__AGX18853

SEQ ID NO: 27264 - protein, 585 aa, Artificial Sequence
  derived and/or modified protein sequence (wt) from hemagglutinin__InfluenzaB__AGX18864
MKAIIVLLMVVTSNADRICTGITSSNSPHVVKTATQGEVNVTGVIPLTTTPTKSYFANLKGTETRGKLCPKCLNCTDLDVALGRPKCTGNIPSARVSILHEVRPVTSGCFPIMHDRTKIRQLPNLLRGYEHIRLSNHNVINAENAPGGPYKIGTSGSCPNVTNGNGFFATMAWAVPKNDNNKTATNSLTIEVPYICTEGEDQITVWGFHSDNEAQMAKLYGDSKPQKFTSSANGVTTHYVSQIGGFPNQTEDGGLPQSGRIVVDYMVQKSGKTGTITYQRGILLPQKVWCASGRSKVIKGSLPLIGEADCLHEKYGGLNKSKPYYTGEHAKAIGNCPIWVKTPLKLANGTKYRPPAKLLKERGFFGAIAGFLEGGWEGMIAGWHGYTSHGAHGVAVAADLKSTQEAINKITKNLNSLSELEVKNLQRLSGAMDELHNEILELDEKVDDLRADTISSQIELAVLLSNEGIINSEDEHLLALERKLKKMLGPSAVEIGNGCFETKHKCNQTCLDRIAAGTFDAGEFSLPTFDSLNITAASLNDDGLDNHTILLYYSTAASSLAVTLMIAIFVVYMVSRDNVSCSICL

SEQ ID NO: 27265 - protein, 585 aa, Artificial Sequence
  derived and/or modified protein sequence (wt) from hemagglutinin__InfluenzaB__AGX18875
MKAIIVLLMVVTSNADRICTGITSSNSPHVVKTATQGEVNVTGVIPLTTTPTKSHFANLKGTETRGKLCPKCLNCTDLDVALGRPKCTGNIPSARVSILHEVRPVTSGCFPIMHDRTKIRQLPNLLRGYEHIRLSTHNVINAENAPGGPYKIGTSGSCPNVTNRNGFFATMAWAVPKNDNNKTATNSLTIEVPYICTEGEDQITVWGFHSDNEIQMAKLYGDSKPQKFTSSANGVTTHYVSQIGGFPNQTEDGGLPQSGRIVVDYMVQKSGKTGTITYQRGILLPQKVWCASGRSKVIKGSLPLIGEADCLHEKYGGLNKSKPYYTGEHAKAIGNCPIWVKTPLKLANGTKYRPPAKLLKERGFFGAIAGFLEGGWEGMIAGWHGYTSHGAHGVAVAADLKSTQEAINKITKNLNSLSELEVKNLQRLSGAIDELHNEILELDEKVDDLRADTISSQIELAVLLSNEGIINSEDEHLLALERKLKKMLGPSAVEIGNGCFETKHKCNQTCLDRIAAGTFDAGEFSLPTFDSLNITAASLNDDGLDNHTILLYYSTAASSLAVTLMIAIFVVYMVSRDNVSCSICL

SEQ ID NO: 27266 - protein, 585 aa, Artificial Sequence
  derived and/or modified protein sequence (wt) from hemagglutinin__InfluenzaB__AGX18886
MKAIIVLLMVVTSNADRICTGITSSNSPHVVKTATQGEVNVTGVIPLTTTPTKSHFANLKGTETRGKLCPKCLNCTDLDVALGRPKCTGNIPSARVSILHEVRPVTSGCFPIMHDRTKIRQLPNLLRGYEHIRLSTHNVINAENAPGGPYKIGTSGSCPNVTNGNGFFATMAWAVPKNDNNKTATNSLTIEVPYICTEGEDQITVWGFHSDNEIQMAKLYGDSKPQKFTSSANGVTTHYVSQIGGFPNQTEDGGLPQSGRIVVDYMVQKSGKTGTITYQRGILLPQKVWCASGRSKVIKGSLPLIGEADCLHEKYGGLNKSKPYYTGEHAKAIGNCPIWVKTPLKLANGTKYRPPAKLLKERGFFGAIAGFLEGGWEGMIAGWHGYTSHGAHGVAVAADLKSTQEAINKITKNLNSLSELEVKNLQRLSGAMDELHNEILELDEKVDDLRADTISSQIELAVLLSNEGIINSEDEHLLALERKLKKMLGPSAVEIGNGCFETKHKCNQTCLDRIAAGTFDAGEFSLPTFDSLNITAASLNDNGLDNHTILLYYSTAASSLAVTLIIAIFVVYMVSRDNVSCSICL

SEQ ID NO: 27267 - protein, 585 aa, Artificial Sequence; identical to SEQ ID NO: 26987
  derived and/or modified protein sequence (wt) from hemagglutinin__InfluenzaB__AGX18897

SEQ ID NO: 27268 - protein, 585 aa, Artificial Sequence; identical to SEQ ID NO: 26514
  derived and/or modified protein sequence (wt) from hemagglutinin__InfluenzaB__AGX18908

SEQ ID NO: 27269 - protein, 585 aa, Artificial Sequence; identical to SEQ ID NO: 26514
  derived and/or modified protein sequence (wt) from hemagglutinin__InfluenzaB__AGX18919

SEQ ID NO: 27270 - protein, 585 aa, Artificial Sequence
  derived and/or modified protein sequence (wt) from hemagglutinin__InfluenzaB__AGX18930
MKAIIVLLMVVTSNADRICTGITSSNSPHVVKTATQGEVNVTGVIPLTTTPTKSHFANLKGTETRGKLCPKCLNCTDLDVALGRPKCTGNIPSARVSILHEVRPVTSGCFPIMHDRTKIRQLPNLLRGYEHIRLSTHNVINAENAPGGPYKIGTSGSCPNVTNGNGFFATMAWAVPKNDNNKTATNSLTIEVPYICTEGEDQITVWGFHSDNETQMAKLYGDSKPQKFTSSANGVTTHYVSQIGGFPNQTEDGGLPQSGRIVVDYMVQKSGKTGTITYQRGILLPQKVWCASGRSKVIKGSLPLIGEADCLHEKYGGLNKSKPYYTGEHAKAIGNCPIWVKTPLKLANGTKYRPPAKLLKERGFFGAIAGFLEGGWEGMIAGWHGYTSHGAHGVAVAADLKSTQEAINKITKNLNSLSELEVKNLQRLSGAMDELHNEILELDEKVDDLRADTISSQIELAVLLSNEGIINSEDEHLLALERKLKKMLGPSAVEIGNGCFETKHKCNQTCIDRIAAGTFDAGEFSLPTFDSLNITAASLNDDGLDNHTILLYYSTAASSLAVTLMIAIFVVYMVSRDNVSCSICL

SEQ ID NO: 27271 - protein, 585 aa, Artificial Sequence; identical to SEQ ID NO: 26514
  derived and/or modified protein sequence (wt) from hemagglutinin__InfluenzaB__AGX18941

SEQ ID NO: 27272 - protein, 585 aa, Artificial Sequence; identical to SEQ ID NO: 26514
  derived and/or modified protein sequence (wt) from hemagglutinin__InfluenzaB__AGX18952

SEQ ID NO: 27273 - protein, 585 aa, Artificial Sequence; identical to SEQ ID NO: 26514
  derived and/or modified protein sequence (wt) from hemagglutinin__InfluenzaB__AGX18963

SEQ ID NO: 27274 - protein, 585 aa, Artificial Sequence
  derived and/or modified protein sequence (wt) from hemagglutinin__InfluenzaB__AGX18974
MKAIIVLLMVVTSNADRICTGITSSNSPHVVKTATQGEVNVTGVIPLTTTPTKSHFANLKGTETRGKLCPKCLNCTDLDVALGRPKCTGNIPSARVSILHEVRPVTSGCFPIMHDRTKIRQLPNLLRGYEHIRLSTHNVINAENAPGGPYKIGTSGSCPNVTNGNGFFATMAWAVPKNDNNKTATNSLTIEVPYICTEGEDQITVWGFHSDNETQMAKLYGDSKPQKFTSSANGVTTHYVSQIGGFPNQTEDGGLPQSGRIVVDYMVQKSGKTGTITYQRGILLPQKVWCASGRSKVIKGSLPLIGEADCLHEKYGGLNKSKPYYTGEHAKAIGNCPIWVKTPLKLANGTKYRPPAKLLKERGFFGAIAGFLEGGWEGMIAGWHGYTSHGAHGVAVAADLKSTQEAINKITKNLNSLSELEVKNLQRLSGAMDELHNEILELDEKVDDLRADTISSQIELAVLLSNEGIINSEDEHLLALEKKLKKMLGPSAVEIGNGCFETKHKCNQTCLDRIAAGTFDAGEFSLPTFDSLNITAASLNDDGLDNHTILLYYSTAASSLAVTLMIAIFVVYMVSRDNVSCSICL

SEQ ID NO: 27275 - protein, 585 aa, Artificial Sequence; identical to SEQ ID NO: 26514
  derived and/or modified protein sequence (wt) from hemagglutinin__InfluenzaB__AGX18985

SEQ ID NO: 27276 - protein, 585 aa, Artificial Sequence
  derived and/or modified protein sequence (wt) from hemagglutinin__InfluenzaB__AGX18996
MKAIIVLLMVVTSNADRICTGITSSNSPHVVKTATQGEVNVTGVIPLTTTPTKSHFANLKGTETRGKLCPKCLNCTDLDVALGRPKCTGNTPSARVSILHEVRPVTSGCFPIMHDRTKIRQLPNLLRGYEHIRLSTHNVINAENAPGGPYKIGTSGSCPNVTNGNGFFATMAWAVPKNDNNKTATNSLTIEVPYICTEGEDQITVWGFHSDNGTQMAKLYGDSKPQKFTSSANGVTTHYVSQIGGFPNQTEDGGLPQSGRIVVDYMVQKSGKTGTITYQRGILLPQKVWCASGRSKVIKGSLPLIGEADCLHEKYGGLNKSKPYYTGEHAKAIGNCPIWVKTPLKLANGTKYRPPAKLLKERGFFGAIAGFLEGGWEGMIAGWHGYTSHGAHGVAVAADLKSTQEAINKITKNLNSLSELEVKNLQRLSGAMDELHNEILELDEKVDDLRADTISSQIELAVLLSNEGIINSEDEHLLALERKLKKMLGPSAVEIGNGCFETKHKCNQTCLDRIAAGTFDAGEFSLPTFDSLNITAASLNDDGLDNHTILLYYSTAASSLAVTLMIAIFVVYMVSRDNVSCSICL

SEQ ID NO: 27277 - protein, 585 aa, Artificial Sequence; identical to SEQ ID NO: 26514
  derived and/or modified protein sequence (wt) from hemagglutinin__InfluenzaB__AGX19007

SEQ ID NO: 27278 - protein, 585 aa, Artificial Sequence
  derived and/or modified protein sequence (wt) from hemagglutinin__InfluenzaB__AGX19018
MKAIIVLLMVVTSNADRICTGITSSNSPHVVKTATQGEVNVTGVIPLTTTPTKSHFANLKGTETRGKLCPKCLNCTDLDVALGRPKCTGNIPSARVSILHEVRPVTSGCFPIMHDRTKIRQLPNFLRGYEHIRLSTHNVINAENAPGGPYKIGTSGSCPNVTNGNGFFATMAWAVPKNDNNKTATNSLTIEVPYICTEGEDQITVWGFHSDSETQMAKLYGDSKPQKFTSSANGVTTHYVSQIGGFPNQTEDGGLPQSGRIVVDYMVQKSGKTGTITYQRGILLPQKVWCASGRSKVIKGSLPLIGEADCLHEKYGGLNKSKPYYTGEHAKAIGNCPIWVKTPLKLANGTKYRPPAKLLKERGFFGAIAGFLEGGWEGMIAGWHGYTSHGAHGVAVAADLKSTQEAINKITKNLNSLSELEVKNLQRLSGAMDELHNEILELDEKVDDLRADTISSQIELAVLLSNEGIINSEDEHLLALERKLKKMLGPSAVEIGNGCFETKHKCNQTCLDRIAAGTFDAGEFSLPTFDSLNITAASLNDDGLDNHTILLYYSTAASSLAVTLMIAIFVVYMVSRDNVSCSICL

SEQ ID NO: 27279 - protein, 585 aa, Artificial Sequence; identical to SEQ ID NO: 27177
  derived and/or modified protein sequence (wt) from hemagglutinin__InfluenzaB__AGX19029

SEQ ID NO: 27280 - protein, 585 aa, Artificial Sequence; identical to SEQ ID NO: 26514
  derived and/or modified protein sequence (wt) from hemagglutinin__InfluenzaB__AGX19040

SEQ ID NO: 27281 - protein, 585 aa, Artificial Sequence
  derived and/or modified protein sequence (wt) from hemagglutinin__InfluenzaB__AGX19051
MKAIIVLLMVVTSNADRICTGITSSNSPHVVKTATQGEVNVTGVIPLTTTPTKSHFANLKGTETRGKLCPKCLNCTDLDVALGRPKCTGNIPSARVSILHEVRPVTSGCFPIMHDRTKIRQLPNLLRGYEHIRLSTHNVINTENAPGGPYKIGTSGSCPNVTNGNGFFATMAWAVPKNDNNKTATNSLTIEVPYICTEGEDQITVWGFHSDSETQMAKLYGDSKPQKFTSSANGVTTHYVSQIGGFPNQTEDGGLPQSGRIVVDYMVQKSGKTGTITYQRGILLPQKVWCASGRSKVIKGSLPLIGEADCLHEKYGGLNKSKPYYTGEHAKAIGNCPIWVKTPLKLANGTKYRPPAKLLKERGFFGAIAGFLEGGWEGMIAGWHGYTSHGAHGVAVAADLKSTQEAINKITKNLNSLSELEVKNLQRLSGAMDELHNEILELDEKVDDLRADTISSQIELAVLLSNEGIINSEDEHLLALERKLKKMLGPSAVEIGNGCFETKHKCNQTCLDRIAAGTFDAGEFSLPTFDSLNITAASLNDDGLDNHTILLYYSTAASSLAVTLMIAIFVVYMVSRDNVSCSICL

SEQ ID NO: 27282 - protein, 585 aa, Artificial Sequence
  derived and/or modified protein sequence (wt) from hemagglutinin__InfluenzaB__AGX19062
MKAIIVLLMVVTSNADRICTGITSSNSPHVVKTATQGEVNVTGVIPLTTTPTKSHFANLKGTETRGKLCPKCLNCTDLDVALGRPKCTGNIPSARVSILHEVRPVTSGCFPIMHDRTKIRQLPNLLRGYEHIRLSTHNVINAENAPGGPYKIGTSGSCPNVTNGNGFFATMAWAVPKNDNNKTATNSLTIEVPYICTEGEDQITVWGFHSDNETQMAKLYGDSKPQKFTSSANGVTTHYVSQIGGFPNQTEDGGLPQSGRIVVDYMVQKSGKTGTITYQRGILLPQKVWCASGRSKVIKGSLPLIGEADCLHEKYGGLNKSKPYYTGEHAKAIGNCPIWVKTPLKLANGTKYRPPAKLLKERGFFGAIAGFLEGGWEGMIAGWHGYTSHGAHGVAVAADLKSTQEAINKITKNFNSLSELEVKNLQRLSGAMDELHNEILELDEKVDDLRADTISSQIELAVLLSNEGIINSEDEHLLALERKLKKMLGPSAVEIGNGCFETKHKCNQTCLDRIAAGTFDAGEFSLPTFDSLNITAASLNDDGLDNHTILLYYSTAASSLAVTLMIAIFVVYMVSRDNVSCSICL

SEQ ID NO: 27283 - protein, 585 aa, Artificial Sequence; identical to SEQ ID NO: 26514
  derived and/or modified protein sequence (wt) from hemagglutinin__InfluenzaB__AGX19073

SEQ ID NO: 27284 - protein, 585 aa, Artificial Sequence
  derived and/or modified protein sequence (wt) from hemagglutinin__InfluenzaB__AGX19084
MKAIIVLLMVVTSNADRICTGITSSNSPHVVKTATQGEVNVTGVIPLTTTPTKSHFANLKGTETRGKLCPKCLNCTDLDVALGRPKCTGNIPSARVSILHEVRPVTSGCFPIMHDRTKIRQLPNLLRGYEHIKLSTHNVINAENAPGGPYKIGTSGSCPNVTNGNGFFATMAWAVPKNDNNKTATNSLTIEVPYICTEGEDQITVWGFHSDNENQMAKLYGDSKPQKFTSSANGVTTHYVSQIGGFPNQTEDGGLPQSGRIVVDYMVQKSGKTGTITYQRGILLPQKVWCASGRSKVIKGSLPLIGEADCLHEKYGGLNKSKPYYTGEHAKAIGNCPIWVKTPLKLANGTKYRPPAKLLKERGFFGAIAGFLEGGWEGMIAGWHGYTSHGAHGVAVAADLKSTQEAINKITKNLNSLSELEVKNLQRLSGAMDELHNEILELDEKVDDLRADTISSQIELAVLLSNEGIINSEDEHLLALERKLKKMLGPSAVEIGNGCFETKHKCNQTCLDRIAAGTFDAGEFSLPTFDSLNITAASLNDDGLDNHTILLYYSTAASSLAVTLMIAIFVVYMVSRDNVSCSICL

SEQ ID NO: 27285 - protein, 585 aa, Artificial Sequence; identical to SEQ ID NO: 26514
  derived and/or modified protein sequence (wt) from hemagglutinin__InfluenzaB__AGX19095

SEQ ID NO: 27286 - protein, 585 aa, Artificial Sequence; identical to SEQ ID NO: 27177
  derived and/or modified protein sequence (wt) from hemagglutinin__InfluenzaB__AGX19106

SEQ ID NO: 27287 - protein, 585 aa, Artificial Sequence; identical to SEQ ID NO: 26514
  derived and/or modified protein sequence (wt) from hemagglutinin__InfluenzaB__AGX19117

SEQ ID NO: 27288 - protein, 585 aa, Artificial Sequence
  derived and/or modified protein sequence (wt) from hemagglutinin__InfluenzaB__AGX19128
MKAIIVLLMVVTSNADRICTGITSSNSPHVVKTATQGEVNVTGVIPLTTTPTKSHFANLKGTETRGKLCPKCLNCTDLDVALGRPKCTGNTPSARVSILHEVRPVTSGCFPIMHDRTKIRQLPNLLRGYEHIRLSTHNVINAENAPGGPYKIGTSGSCPNVTNGNGFFATMAWAVPKNDNNKTATNSLTIEVPYICTEGEDQITVWGFHSDSETQMAKLYGDSKPQKFTSSANGVTTHYVSQIGGFPNQTEDGGLPQSGRIVVDYMVQKSGKTGTITYQRGILLPQKVWCASGRSKVIKGSLPLIGEADCLHEKYGGLNKSKPYYTGEHAKAIGNCPIWVKTPLKLANGTKYRPPAKLLKERGFFGAIAGFLEGGWEGMIAGWHGYTSHGAHGVAVAADLKSTQEAINKITKNLNSLSELEVKNLQRLSGAMDELHNEILELDEKVDDLRADTISSQIELAVLLSNEGIINSEDEHLLALERKLKKMLGPSAVEIGNGCFETKHKCNQTCLDRIAAGTFDAGEFSLPTFDSLNITAASLNDDGLDNHTILLYYSTAASSLAVTLMIAIFVVYMVSRDNVSCSICL

SEQ ID NO: 27289 - protein, 585 aa, Artificial Sequence; identical to SEQ ID NO: 26514
  derived and/or modified protein sequence (wt) from hemagglutinin__InfluenzaB__AGX19139

SEQ ID NO: 27290 - protein, 585 aa, Artificial Sequence; identical to SEQ ID NO: 26987
  derived and/or modified protein sequence (wt) from hemagglutinin__InfluenzaB__AGX19150

SEQ ID NO: 27291 - protein, 585 aa, Artificial Sequence; identical to SEQ ID NO: 26514
  derived and/or modified protein sequence (wt) from hemagglutinin__InfluenzaB__AGX19161

SEQ ID NO: 27292 - protein, 585 aa, Artificial Sequence; identical to SEQ ID NO: 26987
  derived and/or modified protein sequence (wt) from hemagglutinin__InfluenzaB__AGX19172

SEQ ID NO: 27293 - protein, 585 aa, Artificial Sequence
  derived and/or modified protein sequence (wt) from hemagglutinin__InfluenzaB__AGX19183
MKAIIVLLMVVTSNADRICTGITSSNSPHVVKTATQGEVNVTGVIPLTTTPTKSHFANLKGTETRGKLCPKCLNCTDLDVALGRPKCTGNIPSARVSILHEVRPVTSGCFPIMHDRTKIRQLPNLLRGYEHIRLSTHNVINAENAPGGPYKIGTSGSCPNVTNGNGFFATMAWAVPKNDNNKTATNSLTIEVPYICTEGEDQITVWGFHSDTETQMAKLYGDSKPQKFTSSANGVTTHYVSQIGGFPNQTEDGGLPQSGRIVVDYMVQKSGKTGTITYQRGILLPQKVWCASGRSKVIKGSLPLIGEADCLHEKYGGLNKSKPYYTGEHAKAIGNCPIWVKTPLKLANGTKYRPPAKLLKERGFFGAIAGFLEGGWEGMIAGWHGYTSHGAHGVAVAADLKSTQEAINKITKNLNSLSELEVKNLQRLSGAMDELHNEILELDEKVDDLRADTISSQIELAVLLSNEGIINSEDEHLLALERKLKKMLGPSAVEIGNGCFETKHKCNQTCLDRIAAGTFDAGEFSLPTFDSLNITAASLNDDGLDNHTILLYYSTAASSLAVTLMIAIFVVYMVSRDNVSCSICL

SEQ ID NO: 27294 - protein, 585 aa, Artificial Sequence; identical to SEQ ID NO: 26514
  derived and/or modified protein sequence (wt) from hemagglutinin__InfluenzaB__AGX19194

SEQ ID NO: 27295 - protein, 585 aa, Artificial Sequence
  derived and/or modified protein sequence (wt) from hemagglutinin__InfluenzaB__AGX19205
MKAIIVLLMVVTSNADRVCTGITSSNSPHVVKTATQGEVNVTGVIPLTTTPTKSHFANLKGTETRGKLCPKCLNCTDLDVALGRPKCTGNIPSARVSILHEVRPVTSGCFPIMHDRTKIRQLPNLLRGYEHIRLSTHNVINAENAPGGPYKIGTSGSCPNVTNGNGFFATMAWAVPKNDNNKTATNSLTIEVPYICTEGEDQITVWGFHSDNETQMAKLYGDSKPQKFTSSANGVTTHYVSQIGGFPNQTEDGGLPQSGRIVVDYMVQKSGKTGTITYQRGILLPQKVWCASGRSKVIKGSLPLIGEADCLHEKYGGLNKSKPYYTGEHAKAIGNCPIWVKTPLKLANGTKYRPPAKLLKERGFFGAIAGFLEGGWEGMIAGWHGYTSHGAHGVAVAADLKSTQEAINKITKNLNSLSELEVKNLQRLSGAMDELHNEILELDEKVDDLRADTISSQIELAVLLSNEGIINSEDEHLLALERKLKKMLGPSAVEIGNGCFETKHKCNQTCLDRIAAGTFDAGEFSLPTFDSLNITAASLNDDGLDNHTILLYYSTAASSLAVTLMIAIFVVYMVSRDNVSCSICL

SEQ ID NO: 27296 - protein, 585 aa, Artificial Sequence
  derived and/or modified protein sequence (wt) from hemagglutinin__InfluenzaB__AGX19216
MKAIIVLLMVVTSNADRICTGITSSNSPHVVKTATQGEVNVTGVIPLTTTPTKSHFANLKGTETRGKLCPKCLNCTDLDVALGRPKCTGNIPSARVSILHEVRPVTSGCFPIMHDRTKIRQLPNLLRGYEHIRLSTHNVINAENAPGGPYKIGTSGSCPNVTNGNGFFATMAWAVPKNDNNKTATNSLTIEVPYICTEGEDQITVWGFHSDNETQMAKLYGDSKPQKFTSSANGVTTHYVSQIGGFPNQTEDGGLPQSGRIVVDYMVQKSGKPGTITYQRGILLPQKVWCASGRSKVIKGSLPLIGEADCLHEKYGGLNKSKPYYTGEHAKAIGNCPIWVKTPLKLANGTKYRPPAKLLKERGFFGAIAGFLEGGWEGMIAGWHGYTSHGAHGVAVAADLKSTQEAINKITKNLNSLSELEVKNLQRLSGAMDELHNEILELDEKVDDLRADTISSQIELAVLLSNEGIINSEDEHLLALERKLKKMLGPSAVEIGNGCFETKHKCNQTCLDRIAAGTFDAGEFSLPTFDSLNITAASLNDDGLDNHTILLYYSTAASSLAVTLMIAIFVVYMVSRDNVSCSICL

SEQ ID NO: 27297 - protein, 585 aa, Artificial Sequence
  derived and/or modified protein sequence (wt) from hemagglutinin__InfluenzaB__AGX19227
MKAIIVLLMVVTSNADRICTGITSSNSPHVVKTATQGEVNVTGVIPLTTTPTKSHFANLKGTETRGKLCPQCLNCTDLDVALGRPKCTGNIPSARVSILHEVRPVTSGCFPIMHDRTKIRQLPNLLRGYEHIRLSTHNVINAENAPGGPYKIGTSGSCPNVTNGNGFFATMAWAVPKSDNNKTATNSLTIEVPYICTEGEDQITVWGFHSDNETQMAKLYGDSKPQKFTSSANGVTTHYVSQIGGFPNQTEDGGLPQSGRIVVDYMVQKSGKTGTITYQRGILLPQKVWCASGRSKVIKGSLPLIGEADCLHEKYGGLNKSKPYYTGEHAKAIGNCPIWVKTPLKLANGTKYRPPAKLLKERGFFGAIAGFLEGGWEGMIAGWHGYTSHGAHGVAVAADLKSTQEAINKITKNLNSLSELEVKNLQRLSGAMDELHNEILELDEKVDDLRADTISSQIELAVLLSNEGIINSEDEHLLALERKLKKMLGPSAVEIGNGCFETKHKCNQTCLDRIAAGTFDAGEFSLPTFDSLNITAASLNDDGLDNHTILLYYSTAASSLAVTLMIAIFVVYMVSRDNVSCSICL

SEQ ID NO: 27298 - protein, 585 aa, Artificial Sequence
  derived and/or modified protein sequence (wt) from hemagglutinin__InfluenzaB__AGX19238
MKAIIVLLMVVTSNADRICTGITSSNSPHVVKTATQGEVNVTGVIPLTTTPTKSHFANLKGTETRGKLCPKCLNCTDLDVALGRPKCTGNIPSARVSILHEVRPVTSGCFPIMHDRTKIRQLPNLLRGYEHIRLSTHNVINAENAPGGPYKIGTSGSCPNVTNGNGFFATMAWAVPKNDKNKTATNSLTIEVPYICTEGEDQITVWGFHSDNETQMAKLYGDSKPQKFTSSANGVTTHYVSQIGGFPNQTEDGGLPQSGRIVVDYMVQKSGKTGTITYQRGILLPQKVWCASGRSKVIKGSLPLIGEADCLHEKYGGLNKSKPYYTGEHAKAIGNCPIWVKTPLKLANGTKYRPPAKLLKERGFFGAIAGFLEGGWEGMIAGWHGYTSHGAHGVAVAADLKSTQEAINKITKNLNSLSELEVKNLQRLSGAMDELHNEILELDEKVDDLRADTISSQIELAVLLSNEGIINSEDEHLLALERKLKKMLGPSAVEIGNGCFETKHKCNQTCLDRIAAGTFDAGEFSLPTFDSLNITAASLNDDGLDNHTILLYYSTAASSLAVTLMIAIFVVYMVSRDNVSCSICL

SEQ ID NO: 27299 - protein, 585 aa, Artificial Sequence; identical to SEQ ID NO: 27298
  derived and/or modified protein sequence (wt) from hemagglutinin__InfluenzaB__AGX19249

SEQ ID NO: 27300 - protein, 585 aa, Artificial Sequence; identical to SEQ ID NO: 26514
  derived and/or modified protein sequence (wt) from hemagglutinin__InfluenzaB__AGX19260

SEQ ID NO: 27301 - protein, 585 aa, Artificial Sequence; identical to SEQ ID NO: 26514
  derived and/or modified protein sequence (wt) from hemagglutinin__InfluenzaB__AGX19271

SEQ ID NO: 27302 - protein, 585 aa, Artificial Sequence
  derived and/or modified protein sequence (wt) from hemagglutinin__InfluenzaB__AGX19282
MKAIIVLLMVVTSNADRICTGITSSNSPHVVKTATQGEVNVTGVIPLTTTPTKSHFANLKGTETRGKLCPKCLNCTDLDVALGRPKCTGNIPSARVSILHEVRPVTSGCFPIMHDRTKIRQLPNLLRGYEHIRLSTHNVINAENAPGGPYKIGTSGSCPNVTNGNGFFATMAWAVPKNDNNKTATNSLTIEVPYICTEGEDQITVWGFHSDNETQMAKLYGDSKPQKFTSSANGVTTHYVSQIGGFPNQTEDGGLPQSGRIVVDYMVQKSGKTGTITYQRGILLPQKVWCTSGRSKVIKGSLPLIGEADCLHEKYGGLNKSKPYYTGEHAKAIGNCPIWVKTPLKLANGTKYRPPAKLLKERGFFGAIAGFLEGGWEGMIAGWHGYTSHGAHGVAVAADLKSTQEAINKITKNLNSLSELEVKNLQRLSGAMDELHNEILELDEKVDDLRADTISSQIELAVLLSNEGIINSEDEHLLALERKLKKMLGPSAVEIGNGCFETKHKCNQTCLDRIAAGTFDAGEFSLPTFDSLNITAASLNDDGLDNHTILLYYSTAASSLAVTLMIAIFVVYMVSRDNVSCSICL

SEQ ID NO: 27303 - protein, 585 aa, Artificial Sequence
  derived and/or modified protein sequence (wt) from hemagglutinin__InfluenzaB__AGX19304
MKAIIVLLMVVTSNADRICTGITSSNSPHVVKTATQGEVNVTGVIPLTTTPTKSHFANLKGTETRGKLCPKCLNCTDLDVALGRPKCTGNIPSARVSILHEVRPVTSGCFPIMHDRTKIRQLPNLLRGYEHIRLSTHNVINAENAPGGPYKIGTSGSCPNVTNGNGFFATMAWAVPKNDNNKTAINSLTIEVPYICTEGEDQITVWGFHSDNETQMAKLYGDSKPQKFTSSANGVTTHYVSQIGGFPNQTEDGGLPQSGRIVVDYMVQKSGKTGTITYQRGILLPQKVWCASGRSKVIKGSLPLIGEADCLHEKYGGLNKSKPYYTGEHAKAIGNCPIWVKTPLKLANGTKYRPPAKLLKERGFFGAIAGFLEGGWEGMIAGWHGYTSHGAHGVAVAADLKSTQEAINKITKNLNSLSELEVKNLQRLSGAMDELHNEILELDEKVDDLRADTISSQIELAVLLSNEGIINSEDEHLLALERKLKKMLGPSAVEIGNGCFETKHKCNQTCLDRIAAGTFDAGEFSLPTFDSLNITAASLNDDGLDNHTILLYYSTAASSLAVTLMIAIFVVYMVSRDNVSCSICL

SEQ ID NO: 27304 - protein, 585 aa, Artificial Sequence; identical to SEQ ID NO: 27303
  derived and/or modified protein sequence (wt) from hemagglutinin__InfluenzaB__AGX19315

SEQ ID NO: 27305 - protein, 585 aa, Artificial Sequence; identical to SEQ ID NO: 27302
  derived and/or modified protein sequence (wt) from hemagglutinin__InfluenzaB__AGX19326

SEQ ID NO: 27306 - protein, 585 aa, Artificial Sequence; identical to SEQ ID NO: 27302
  derived and/or modified protein sequence (wt) from hemagglutinin__InfluenzaB__AGX19337

SEQ ID NO: 27307 - protein, 585 aa, Artificial Sequence
  derived and/or modified protein sequence (wt) from hemagglutinin__InfluenzaB__AGX19348
MKAIIVLLMVVTSNADRICTGITSSNSPHVVKTATQGEVNVTGVIPLTTTPTKSHFANLKGTETRGKLCPKCLNCTDLDVALGRPKCTGNIPSARVSILHEVRPVTSGCFPIMHDRTKIRQLPNLLRGYEHIRLSTHNVINAENAPGGPYKIGTSGSCPNVTNGNGFFATMAWAVPKNDNNKTATNSLTIEVPYICTEGEDQITVWGFHSDNEAQMAKLYGDSKPQKFTSSANGVTTHYVSQIGGFPNQTEDGGLPQSGRIVVDYMVQKSGKTGTITYQRGILLPQKVWCTSGRSKVIKGSLPLIGEADCLHEKYGGLNKSKPYYTGEHAKAIGNCPIWVKTPLKLANGTKYRPPAKLLKERGFFGAIAGFLEGGWEGMIAGWHGYTSHGAHGVAVAADLKSTQEAINKITKNLNSLSELEVKNLQRLSGAMDELHNEILELDEKVDDLRADTISSQIELAVLLSNEGIINSEDEHLLALERKLKKMLGPSAVEIGNGCFETKHKCNQTCLDRIAAGTFDAGEFSLPTFDSLNITAASLNDDGLDNHTILLYYSTAASSLAVTLMIAIFVVYMVSRDNVSCSICL

SEQ ID NO: 27308 - protein, 585 aa, Artificial Sequence; identical to SEQ ID NO: 27302
  derived and/or modified protein sequence (wt) from hemagglutinin__InfluenzaB__AGX19359

SEQ ID NO: 27309 - protein, 584 aa, Artificial Sequence; identical to SEQ ID NO: 26731
  derived and/or modified protein sequence (wt) from hemagglutinin__InfluenzaB__AGX19370

SEQ ID NO: 27310 - protein, 585 aa, Artificial Sequence; identical to SEQ ID NO: 26565
  derived and/or modified protein sequence (wt) from hemagglutinin__InfluenzaB__AGX19381

SEQ ID NO: 27311 - protein, 585 aa, Artificial Sequence; identical to SEQ ID NO: 27302
  derived and/or modified protein sequence (wt) from hemagglutinin__InfluenzaB__AGX19392

SEQ ID NO: 27312 - protein, 585 aa, Artificial Sequence; identical to SEQ ID NO: 27302
  derived and/or modified protein sequence (wt) from hemagglutinin__InfluenzaB__AGX19403

SEQ ID NO: 27313 - protein, 585 aa, Artificial Sequence; identical to SEQ ID NO: 26989
  derived and/or modified protein sequence (wt) from hemagglutinin__InfluenzaB__AGX19414

SEQ ID NO: 27314 - protein, 584 aa, Artificial Sequence
  derived and/or modified protein sequence (wt) from hemagglutinin__InfluenzaB__AGX19425
MKTIIVLLMVVTSNADRICTGITSSNSPHVVKTATQGEVNVTGVIPLTTTPTKSYFANLKGTRTRGKLCPDCLNCTDLDVALGRPMCVGTTPSAKASILHEVRPVTSGCFPIMHDRTKIRQLPNLLRGYENIRLSTQNVIDAEKAPGGPYRLGTSGSCPNATSKSGFFATMAWAVPKDNNKNATNPLTVEVPYICTEGEDQITVWGFHSDNKTQMRNLYGDSNPQKFTSSANGVTTHYVSQIGSFPDQTEDGGLPQSGRIVVDYMMQKPGKTGTIVYQRGVLLPQRVWCASGRSKVIKGALPLIGEADCLHEKYGGLNKSKPYYTGEHAKAIGNCPIWVKTPLKLANGTKYRPPAKLLKERGFFGAIAGFLEGGWEGMIAGWHGYTSHGAHGVAVAADLKSTQEAINKITKNLNSLSELEVKNLQRLSGAMDELHNEILELDEKVDDLRADTISSQIELAVLLSNEGIINSEDEHLLALERKLKKMLGPSAVEIGNGCFETKHKCNQTCLDRIAAGTFNAGEFSLPTFDSLNITAASLNDDGLDNHTILLYYSTAASSLAVTLMLAIFIVYMVSRDNVSCSICL

SEQ ID NO: 27315 - protein, 585 aa, Artificial Sequence; identical to SEQ ID NO: 26514
  derived and/or modified protein sequence (wt) from hemagglutinin__InfluenzaB__AGX19436

SEQ ID NO: 27316 - protein, 585 aa, Artificial Sequence; identical to SEQ ID NO: 27177
  derived and/or modified protein sequence (wt) from hemagglutinin__InfluenzaB__AGX19447

SEQ ID NO: 27317 - protein, 584 aa, Artificial Sequence; identical to SEQ ID NO: 27056
  derived and/or modified protein sequence (wt) from hemagglutinin__InfluenzaB__AGX19458

SEQ ID NO: 27318 - protein, 584 aa, Artificial Sequence; identical to SEQ ID NO: 27056
  derived and/or modified protein sequence (wt) from hemagglutinin__InfluenzaB__AGX19469

SEQ ID NO: 27319 - protein, 585 aa, Artificial Sequence; identical to SEQ ID NO: 26989
  derived and/or modified protein sequence (wt) from hemagglutinin__InfluenzaB__AGX19480

SEQ ID NO: 27320 - protein, 585 aa, Artificial Sequence; identical to SEQ ID NO: 26582
  derived and/or modified protein sequence (wt) from hemagglutinin__InfluenzaB__AGX19491

SEQ ID NO: 27321 - protein, 585 aa, Artificial Sequence
  derived and/or modified protein sequence (wt) from hemagglutinin__InfluenzaB__AGX19502
MKAIIVLLMVVTSNADRICTGITSSNSPHVVKTATQGEVNVTGVIPLTTTPTKSHFANLKGTETRGKLCPKCLNCTDLDVALGRPKCTGKIPSARVSILHEVRPVTSGCFPIMHDRTKIRQLPNLLRGYEHIRLSTHNVINAENAPGGPYKIGTSGSCPNITNGNGFFATMAWAVPKNDKNKTATNPLTIEVPYICTEGEDQITVWGFHSDSETQMAKLYGDSKPQKFTSSANGVTTHYVSQIGGFPNQTEDGGLPQSGRIVVDYMVQKSGKTGTITYQRGILLPQKVWCASGRSKVIKGSLPLIGEADCLHEKYGGLNKSKPYYTGEHAKAIGNCPIWVKTPLKLANGTKYRPPAKLLKERGFFGAIAGFLEGGWEGMIAGWHGYTSHGAHGVAVAADLKSTQEAINKITKNLNSLSELEVKNLQRLSGAMDELHNEILELDEKVDDLRADTISSQIELAVLLSNEGIINSEDEHLLALERKLKKMLGPSAVEIGNGCFETKHKCNQTCLDRIAAGTFDAGEFSLPTFDSLNITAASLNDDGLDNHTILLYYSTAASSLAVTLMIAIFVVYMVSRDNVSCSICL

SEQ ID NO: 27322 - protein, 585 aa, Artificial Sequence
  derived and/or modified protein sequence (wt) from hemagglutinin__InfluenzaB__AGX19513
MKAIIVLLMVVTSNADRICTGITSSNSPHVVKTATQGEVNVTGVIPLTTTPTKSHFANLKGTETRGKLCPKCLNCTDLDVALGRPKCTGKIPSARVSILHEVRPVTSGCFPIMHDRTKIRQLPNLLRGYEHIRLSTHNVINAENAPGGPYKIGTSGSCPNITNGNGFFATMAWAVPKNDKNKTATNPLTIEVPYICTEGEDQITVWGFHSDNETQMAKLYGDSKPQKFTSSANGVTTHYISQIGGFPNQTEDGGLPQSGRIVVDYMVQKSGKTGTITYQRGILLPQKVWCASGRSKVIKGSLPLIGEADCLHEKYGGLNKSKPYYTGEHAKAIGNCPIWVKTPLKLANGTKYRPPAKLLKERGFFGAIAGFLEGGWEGMIAGWHGYTSHGAHGVAVAADLKSTQEAINKITKNLNSLSELEVKNLQRLSGAMDELHNEILELDEKVDDLRADTISSQIELAVLLSNEGIINSEDEHLLALERKLKKMLGPSAVEIGNGCFETKHKCNQTCLDRIAAGTFDAGEFSLPTFDSLNITAASLNDDGLDNHTILLYYSTAASSLAVTLMIAIFVVYMVSRDNVSCSICL

SEQ ID NO: 27323 - protein, 585 aa, Artificial Sequence; identical to SEQ ID NO: 27322
  derived and/or modified protein sequence (wt) from hemagglutinin__InfluenzaB__AGX19524

SEQ ID NO: 27324 - protein, 585 aa, Artificial Sequence
  derived and/or modified protein sequence (wt) from hemagglutinin__InfluenzaB__AGX19535
MKAIIVLLMVVTSNADRICTGITSSNSPHVVKTATQGEVNVTGVIPLTTTPTKSHFANLKGTETRGKLCPKCLNCTDLDVALGRPKCTGNIPSARVSILHEVRPVTSGCFPIMHDRTKIRQLPNLLRGYEHIRLSTHNVINAENAPGGPYKIGTSGSCPNVTNGNGFFATMAWAVPKNDNNKTATNSLTIEVPYICTEGEDQITVWGFHSDDETQMAKLYGDSKPQKFTSSANGVTTHYVSQIGGFPNQTEDGGLPQSGRIVVDYMVQKSGKTGTITYQRGILLPQKVWCASGRSKVIKGSLPLIGEADCLHEKYGGLNKSKPYYTGEHAKAIGNCPIWVKTPLKLANGTKYRPPAKLLKERGFFGAIAGFLEGGWEGMIAGWHGYTSHGAHGVAVAADLKSTQEAINKITKNLNSLSELEVKNLQRLSGAMDELHNEILELDEKVDDLRADTISSQIELAVLLSNEGIINSEDEHLLALERKLKKMLGPSAVEIGNGCFETKHKCNQTCLDRIAAGTFDAGEFSLPTFDSLNITAASLNDDGLDNHTILLYYSTAASSLAVTLMIAIFVVYMVSRDNVSCSICL

SEQ ID NO: 27325 - protein, 585 aa, Artificial Sequence
  derived and/or modified protein sequence (wt) from hemagglutinin__InfluenzaB__AGX19546
MKAIIVLLMVVTSNADRICTGITSSNSPHVVKTATQGEVNVTGVIPLTTTPTKSHFANLKGTETRGKLCPKCLNCTDLDVALGRPKCTGNIPSARVSILHEVRPVTSGCFPIMHDRTKIRQLPNLLRGYEHIRLSTHNVINAENAPGGPYKIGTSGSCPNVTNGNGFFATMAWAVPKNDNNKTATNSLTIEVPYICTEGEDQITVWGFHSDKETQMAKLYGDSKPQKFTSSANGVTTHYVSQIGGFPNQTEDGGLPQSGRIVVDYMVQKSGKTGTITYQRGILLPQKVWCASGRSKVIKGSLPLIGEADCLHEKYGGLNKSKPYYTGEHAKAIGNCPIWVKTPLKLANGTKYRPPAKLLKERGFFGAIAGFLEGGWEGMIAGWHGYTSHGAHGVAVAADLKSTQEAINKITKNLNSLSELEVKNLQRLSGAMDELHNEILELDEKVDDLRADTISSQIELAVLLSNEGIINSEDEHLLALERKLKKMLGPSAVEIGNGCFETKHKCNQTCLDRIAAGTFDAGEFSLPTFDSLNITAASLNDDGLDNHTILLYYSTAASSLAVTLMIAIFVVYMVSRDNVSCSICL

SEQ ID NO: 27326 - protein, 585 aa, Artificial Sequence
  derived and/or modified protein sequence (wt) from hemagglutinin__InfluenzaB__AGX19557
MKAIIVLLMVVTSNADRICTGITSSNSPHVVKTATQGEVNVTGVIPLTTTPTKSHFANLKGTETRGKLCPKCLNCTDLDVALGRPKCTGNIPSARVSILHEVRPVTSGCFPIMHDRTKIRQLPNLLRGYEHIRLSTHNVINAENAPGGPYKIGTSGSCPNVTNGNGFFATMAWAVPKNDNNKTATNSLTIEVPYICTGGEDQITVWGFHSDNETQMAKLYGDSKPQKFTSSANGVTTHYVSQIGGFPNQTEDGGLPQSGRIVVDYMVQKSGKTGTITYQRGILLPQKVWCASGRSKVIKGSLPLIGEADCLHEKYGGLNKSKPYYTGEHAKAIGNCPIWVKTPLKLANGTKYRPPAKLLKERGFFGAIAGFLEGGWEGMIAGWHGYTSHGAHGVAVAADLKSTQEAINKITKNLNSLSELEVKNLQRLSGAMDELHNEILELDEKVDDLRADTISSQIELAVLLSNEGIINSEDEHLLALERKLKKMLGPSAVEIGNGCFETKHKCNQTCLDRIAAGTFDAGEFSLPTFDSLNITAASLNDDGLDNHTILLYYSTAASSLAVTLMIAIFVVYMVSRDNVSCSICL

SEQ ID NO: 27327 - protein, 585 aa, Artificial Sequence; identical to SEQ ID NO: 26989
  derived and/or modified protein sequence (wt) from hemagglutinin__InfluenzaB__AGX19568

SEQ ID NO: 27328 - protein, 585 aa, Artificial Sequence; identical to SEQ ID NO: 27322
  derived and/or modified protein sequence (wt) from hemagglutinin__InfluenzaB__AGX19579

SEQ ID NO: 27329 - protein, 585 aa, Artificial Sequence; identical to SEQ ID NO: 26989
  derived and/or modified protein sequence (wt) from hemagglutinin__InfluenzaB__AGX19590

SEQ ID NO: 27330 - protein, 585 aa, Artificial Sequence; identical to SEQ ID NO: 26989
  derived and/or modified protein sequence (wt) from hemagglutinin__InfluenzaB__AGX19601

SEQ ID NO: 27331 - protein, 585 aa, Artificial Sequence; identical to SEQ ID NO: 26989
  derived and/or modified protein sequence (wt) from hemagglutinin__InfluenzaB__AGX19612

SEQ ID NO: 27332 - protein, 585 aa, Artificial Sequence
  derived and/or modified protein sequence (wt) from hemagglutinin__InfluenzaB__AGX19623
MKAIIVLLMVVTSNADRICTGITSSNSPHVVKTATQGEVNVTGVIPLTTTPTKSHFANLKGTETRGKLCPKCLNCTDLDVALGRPKCTGNIPSARVSILHEVRPVTSGCFPIMHDRTKIRQLPNLLRGYEHIRLSTHNVINAENAPGGPYKIGTSGSCPNVTNGNGFFATMAWAVPKNDNNKTATNSLTIEVPYICTEGEDQITVWGFHSDNETQMAKLYGDSKPQKFTSSANGVTTHYVSQIGGFPNQTEDGGLPQSGRIVVDYMVQKSGKTGTITYQRGILLPQKVWCASGRSKVIKGSLPLIGEADCLHEKYGGLNKSKPYYTGEHAKAIGNCPIWVKTPLKLANGTKYRPPAKLLKERGFFGAIAGFLEGGWEGMIAGWHGYTSHGAHGVAVAADLKSTQEAINKITKNLNSLSELEVKNLQRLSGAMDELHNEILELDEKVDDLRADTISSQIELAVLLSNEGIINSEDEHLLALERKLKKMLGPSAVEIGNGCFETKHKCNQTCLDRIAAGTFDAGEFSLPTFDSLNITAASLNDDGLDNHTILLYYSTAASSLAVALMIAIFVVYMVSRDNVSCSICL

SEQ ID NO: 27333 - protein, 585 aa, Artificial Sequence; identical to SEQ ID NO: 26989
  derived and/or modified protein sequence (wt) from hemagglutinin__InfluenzaB__AGX19634

SEQ ID NO: 27334 - protein, 585 aa, Artificial Sequence; identical to SEQ ID NO: 26514
  derived and/or modified protein sequence (wt) from hemagglutinin__InfluenzaB__AGX19645

SEQ ID NO: 27335 - protein, 585 aa, Artificial Sequence; identical to SEQ ID NO: 26565
  derived and/or modified protein sequence (wt) from hemagglutinin__InfluenzaB__AGX19656

SEQ ID NO: 27336 - protein, 585 aa, Artificial Sequence
  derived and/or modified protein sequence (wt) from hemagglutinin__InfluenzaB__AGX19667
MKAIIVLLMVVTSNADRICTGITSSNSPHVVKTATQGEVNVTGVIPLTTTPTKSHFANLKGTETRGKLCPKCLNCTDLDVALGRPKCTGKIPSARVSILHEVRPVTSGCFPIMHDRTKIRQLPNLLRGYEHIRLSTHNVINAENAPGGPYKIGTSGSCPNITNGNGFFATMAWAVPKNDKNKTATNPLTIEVPYICTEGEDQITVWGFHSDNETQMAKLYGDSKPQKFTSSANGVTTHYVSQIGGFPNQTEDGGLPQSGRIVVDYMVQKSGKTGTITYQRGILLPQKVWCASGRSKVIKGSLPLIGEADCLHEKYGGLNKSKPYYTGEHAKAIGNCPIWVKTPLKLANGTKYRPPAKLLKERGFFGAIAGFLEGGWEGMIAGWHGYTSHGAHGVAVAADLKSTQEAINKITKNLNSLSELEVKDLQRLSGAMDELHNEILELDEKVDDLRADTISSQIELAVLLSNEGIINSEDEHLLALERKLKKMLGPSAVEIGNGCFETKHKCNQTCLDRIAAGTFDAGEFSLPTFDSLNITAASLNDDGLDNHTILLYYSTAASSLAVTLMIAIFVVYMVSRDNVSCSICL

SEQ ID NO: 27337 - protein, 585 aa, Artificial Sequence; identical to SEQ ID NO: 26989
  derived and/or modified protein sequence (wt) from hemagglutinin__InfluenzaB__AGX19678

SEQ ID NO: 27338 - protein, 585 aa, Artificial Sequence; identical to SEQ ID NO: 26514
  derived and/or modified protein sequence (wt) from hemagglutinin__InfluenzaB__AGX19700

SEQ ID NO: 27339 - protein, 585 aa, Artificial Sequence
  derived and/or modified protein sequence (wt) from hemagglutinin__InfluenzaB__AGX19711
MKAIIVLLMVVTSNADRICTGITSSNSPHVVKTATQGEVNVTGVIPLTTTPTKSHFANLKGTETRGKLCPKCLNCTDLDVALGRPKCTGNIPSARVSILHEVRPVTSGCFPIMHDRTKIRQLPNLLRGYEHIRLSTHNVINAENAPGGPYKIGTSGSCPNVTNGNGFFATMAWAVPKNDKNKTATNSLTIEVPYICKEGEDQITVWGFHSDNETQMAKLYGDSKPQKFTSSANGVTTHYVSQIGGFPNQTEDGGLPQSGRIVVDYMVQKSGKTGTITYQRGILLPQKVWCASGRSKVIKGSLPLIGEADCLHEKYGGLNKSKPYYTGEHAKAIGNCPIWVKTPLKLANGTKYRPPAKLLKERGFFGAIAGFLEGGWEGMIAGWHGYTSHGAHGVAVAADLKSTQEAINKITKNLNSLSELEVKNLQRLSGAMDELHNEILELDEKVDDLRADTISSQIELAVLLSNEGIINSEDEHLLALERKLKKMLGPSAVEIGNGCFETKHKCNQTCLDRIAAGTFDAGEFSLPTFDSLNITAASLNDDGLDNHTILLYYSTAASSLAVTLMIAIFVVYMVSRDNVSCSICL

SEQ ID NO: 27340 - protein, 585 aa, Artificial Sequence; identical to SEQ ID NO: 26989
  derived and/or modified protein sequence (wt) from hemagglutinin__InfluenzaB__AGX19722

SEQ ID NO: 27341 - protein, 585 aa, Artificial Sequence; identical to SEQ ID NO: 26989
  derived and/or modified protein sequence (wt) from hemagglutinin__InfluenzaB__AGX19733

SEQ ID NO: 27342 - protein, 585 aa, Artificial Sequence; identical to SEQ ID NO: 26989
  derived and/or modified protein sequence (wt) from hemagglutinin__InfluenzaB__AGX19744

SEQ ID NO: 27343 - protein, 585 aa, Artificial Sequence; identical to SEQ ID NO: 26514
  derived and/or modified protein sequence (wt) from hemagglutinin__InfluenzaB__AGX19755

SEQ ID NO: 27344 - protein, 585 aa, Artificial Sequence; identical to SEQ ID NO: 26989
  derived and/or modified protein sequence (wt) from hemagglutinin__InfluenzaB__AGX19766

SEQ ID NO: 27345 - protein, 585 aa, Artificial Sequence; identical to SEQ ID NO: 27322
  derived and/or modified protein sequence (wt) from hemagglutinin__InfluenzaB__AGX19788

SEQ ID NO: 27346 - protein, 585 aa, Artificial Sequence; identical to SEQ ID NO: 26989
  derived and/or modified protein sequence (wt) from hemagglutinin__InfluenzaB__AGX19799

SEQ ID NO: 27347 - protein, 585 aa, Artificial Sequence; identical to SEQ ID NO: 26989
  derived and/or modified protein sequence (wt) from hemagglutinin__InfluenzaB__AGX19810

SEQ ID NO: 27348 - protein, 585 aa, Artificial Sequence
  derived and/or modified protein sequence (wt) from hemagglutinin__InfluenzaB__AGX19821
MKAIIVLLMVVTSNADRICTGITSSNSPHVVKTATQGEVNVTGVIPLTTTPTKSHFANLKGTETRGKLCPKCLNCTDLDVALGRPKCTGNIPSARVSILHEVRPVTSGCFPIMHDRTKIRQLPNLLRGYEHIRLSTHNVINAENAPGGPYKIGTSGSCPNVTNGNGFFATMAWAVPKNDNNKTATNSLTIEVPYICTEGEDQITVWGFHSDNETQMAKLYGDSKPQKFTSSANGVTTHYVSQIGGFPNQTEDGGLPQSGRIVVDYMVQKSGKTGTITYQRGILLPQKVWCASGRSKVIKGSLPLIGEADCLHEKYGGLNKSKPYYTGEHAKAIGNCPIWVKTPLKLANGTKYRPPAKLLKERGFFGAIAGFLEGGWEGMIAGWHGYTSHGAHGVAVAADLKSTQEAINKITKNLNSLSELEVKNLQRLSGSMDELHNEILELDEKVDDLRADTISSQIELAVLLSNEGIINSEDEHLLALERKLKKMLGPSAVEIGNGCFETKHKCNQTCLDRIAAGTFDAGEFSLPTFDSLNITAASLNDDGLDNHTILLYYSTAASSLAVTLMIAIFVVYMVSRDNVSCSICL

SEQ ID NO: 27349 - protein, 585 aa, Artificial Sequence; identical to SEQ ID NO: 27322
  derived and/or modified protein sequence (wt) from hemagglutinin__InfluenzaB__AGX19832

SEQ ID NO: 27350 - protein, 585 aa, Artificial Sequence; identical to SEQ ID NO: 26989
  derived and/or modified protein sequence (wt) from hemagglutinin__InfluenzaB__AGX19843

SEQ ID NO: 27351 - protein, 585 aa, Artificial Sequence; identical to SEQ ID NO: 26989
  derived and/or modified protein sequence (wt) from hemagglutinin__InfluenzaB__AGX19854

SEQ ID NO: 27352 - protein, 585 aa, Artificial Sequence; identical to SEQ ID NO: 26989
  derived and/or modified protein sequence (wt) from hemagglutinin__InfluenzaB__AGX19865

SEQ ID NO: 27353 - protein, 585 aa, Artificial Sequence; identical to SEQ ID NO: 27322
  derived and/or modified protein sequence (wt) from hemagglutinin__InfluenzaB__AGX19876

SEQ ID NO: 27354 - protein, 585 aa, Artificial Sequence; identical to SEQ ID NO: 26989
  derived and/or modified protein sequence (wt) from hemagglutinin__InfluenzaB__AGX19887

SEQ ID NO: 27355 - protein, 585 aa, Artificial Sequence
  derived and/or modified protein sequence (wt) from hemagglutinin__InfluenzaB__AGX19898
MKAIIVLLMVVTSNADRICTGITSSNSPHVVKTATQGEVNVTGVIPLTTTPTKSHFANLKGTETRGKLCPKCLNCTDLDVALGRPKCTGKIPSARVSILHEVRPVTSGCFPIMHDRTKIRQLPNLLRGYEHIRLSTHNVINAENAPGGPYKIGTSGSCPNITNENGFFATMAWAVPKNDKNKTATNPLTIEVPYICTEGEDQITVWGFHSDNETQMAKLYGDSKPQKFTSSANGVTTHYVSQIGGFPNQTEDGGLPQSGRIVVDYMVQKSGKTGTITYQRGILLPQKVWCASGRSKVIKGSLPLIGEADCLHEKYGGLNKSKPYYTGEHAKAIGNCPIWVKTPLKLANGTKYRPPAKLLKERGFFGAIAGFLEGGWEGMIAGWHGYTSHGAHGVAVAADLKSTQEAINKITKNLNSLSELEVKNLQRLSGAMDELHNEILELDEKVDDLRADTISSQIELAVLLSNEGIINSEDEHLLALERKLKKMLGPSAVEIGNGCFETKHKCNQTCLDRIAAGTFDAGEFSLPTFDSLNITAASLNDDGLDNHTILLYYSTAASSLAVTLMIAIFVVYMVSRDNVSCSICL

SEQ ID NO: 27356 - protein, 585 aa, Artificial Sequence; identical to SEQ ID NO: 26514
  derived and/or modified protein sequence (wt) from hemagglutinin__InfluenzaB__AGX19909

SEQ ID NO: 27357 - protein, 585 aa, Artificial Sequence; identical to SEQ ID NO: 26989
  derived and/or modified protein sequence (wt) from hemagglutinin__InfluenzaB__AGX19920

SEQ ID NO: 27358 - protein, 585 aa, Artificial Sequence; identical to SEQ ID NO: 27355
  derived and/or modified protein sequence (wt) from hemagglutinin__InfluenzaB__AGX19931

SEQ ID NO: 27359 - protein, 585 aa, Artificial Sequence; identical to SEQ ID NO: 27322
  derived and/or modified protein sequence (wt) from hemagglutinin__InfluenzaB__AGX19942

SEQ ID NO: 27360 - protein, 585 aa, Artificial Sequence; identical to SEQ ID NO: 26989
  derived and/or modified protein sequence (wt) from hemagglutinin__InfluenzaB__AGX19953

SEQ ID NO: 27361 - protein, 585 aa, Artificial Sequence; identical to SEQ ID NO: 26747
  derived and/or modified protein sequence (wt) from hemagglutinin__InfluenzaB__AGX19964

SEQ ID NO: 27362 - protein, 585 aa, Artificial Sequence; identical to SEQ ID NO: 26514
  derived and/or modified protein sequence (wt) from hemagglutinin__InfluenzaB__AGX19975

SEQ ID NO: 27363 - protein, 585 aa, Artificial Sequence
  derived and/or modified protein sequence (wt) from hemagglutinin__InfluenzaB__AGX19986
MKAIIVLLMVVTSNADRICTGITSSNSPHVVKTATQGEVNVTGVIPLTTTPTKSHFANLKGTETRGKLCPKCLNCTDLDVALGRPKCTGKIPSARVSILHEVRPVTSGCFPIMHDRTKIRQLPNLLRGYEHIRLSTHNVINAENAPGGPYKIGTSGSCPNITNGNGFFATMAWAVPKNDKNKTATNPLTIEVPYICTEGEDQITVWGFHSDNETQMAKLYGDSKPQKFTSSANGVTTHYVSQIGGFPNQTEDGGLPQSGRIVVDYMVQKSGKTGTITYQRGILLPQKVWCVSGRSKVIKGSLPLIGEADCLHEKYGGLNKSKPYYTGEHAKAIGNCPIWVKTPLKLANGTKYRPPAKLLKERGFFGAIAGFLEGGWEGMIAGWHGYTSHGAHGVAVAADLKSTQEAINKITKNLNSLSELEVKNLQRLSGAMDELHNEILELDEKVDDLRADTISSQIELAVLLSNEGIINSEDEHLLALERKLKKMLGPSAVEIGNGCFETKHKCNQTCLDRIAAGTFDAGEFSLPTFDSLNITAASLNDDGLDNHTILLYYSTAASSLAVTLMIAIFVVYMVSRDNVSCSICL

SEQ ID NO: 27364 - protein, 585 aa, Artificial Sequence
  derived and/or modified protein sequence (wt) from hemagglutinin__InfluenzaB__AGX19997
MKAIIVLLMVVTSNADRICTGITSSNSPHVVKTATQGEVNVTGVIPLTTTPTKSHFANLKGTETRGKLCPKCLNCTDLDVALGRPKCTGKIPSARVSILHEVRPVTSGCFPIMHDRTKIRQLPNLLRGYEHIRLSTHNVINAENAPGGPYKIGTSGSCPNITNGNGFFATMAWAVPKNDKNKTATNPLTIEVPYICTEGEDQITVWGFHSDNETQMAKLYGDSKPQKFTSSANGVTTHYVSQIGGFPNQIEDGGLPQSGRIVVDYMVQKSGKTGTITYQRGILLPQKVWCASGRSKVIKGSLPLIGEADCLHEKYGGLNKSKPYYTGEHAKAIGNCPIWVKTPLKLANGTKYRPPAKLLKERGFFGAIAGFLEGGWEGMIAGWHGYTSHGAHGVAVAADLKSTQEAINKITKNLNSLSELEVKNLQRLSGAMDELHNEILELDEKVDDLRADTISSQIELAVLLSNEGIINSEDEHLLALERKLKKMLGPSAVEIGNGCFETKHKCNQTCLDRIAAGTFDAGEFSLPTFDSLNITAASLNDDGLDNHTILLYYSTAASSLAVTLMIAIFVVYMVSRDNVSCSICL

SEQ ID NO: 27365 - protein, 585 aa, Artificial Sequence; identical to SEQ ID NO: 26989
  derived and/or modified protein sequence (wt) from hemagglutinin__InfluenzaB__AGX20008

SEQ ID NO: 27366 - protein, 585 aa, Artificial Sequence; identical to SEQ ID NO: 26989
  derived and/or modified protein sequence (wt) from hemagglutinin__InfluenzaB__AGX20019

SEQ ID NO: 27367 - protein, 585 aa, Artificial Sequence; identical to SEQ ID NO: 26989
  derived and/or modified protein sequence (wt) from hemagglutinin__InfluenzaB__AGX20030

SEQ ID NO: 27368 - protein, 585 aa, Artificial Sequence
  derived and/or modified protein sequence (wt) from hemagglutinin__InfluenzaB__AGX20041
MKAIIVLLMVVTSDADRICTGITSSNSPHVVKTATQGEVNVTGVIPLTTTPTKSHFANLKGKETRGKLCPKCLNCTDLDVALGRPKCTGKIPSARVSILHEVRPVTSGCFPIMHDRTKIRQLPNLLRGYEHIRLSTHNVINAENAPGGPYKIGTSGSCPNITNGNGFFATMAWAVPKNDKNKTATNPLTIEVPYICTEGEDQITVWGFHSDNETQMAKLYGDSKPQKFTSSANGVTTHYVSQIGGFPNQTEDGGLPQSGRIVVDYMVQKSGKTGTITYQRGILLPQKVWCASGRSKVIKGSLPLIGEADCLHEKYGGLNKSKPYYTGEHAKAIGNCPIWVKTPLKLANGTKYRPPAKLLKERGFFGAIAGFLEGGWEGMIAGWHGYTSHGAHGVAVAADLKSTQEAINKITKNLNSLSELEVKNLQRLSGAMDELHNEILELDEKVDDLRADTISSQIELAVLLSNEGIINSEDEHLLALERKLKKMLGPSAVEIGNGCFETKHKCNQTCLDRIAAGTFDAGEFSLPTFDSLNITAASLNDDGLDNHTILLYYSTAASSLAVTLMIAIFVVYMVSRDNVSCSICL

SEQ ID NO: 27369 - protein, 585 aa, Artificial Sequence; identical to SEQ ID NO: 26989
  derived and/or modified protein sequence (wt) from hemagglutinin__InfluenzaB__AGX20052

SEQ ID NO: 27370 - protein, 585 aa, Artificial Sequence; identical to SEQ ID NO: 26989
  derived and/or modified protein sequence (wt) from hemagglutinin__InfluenzaB__AGX20063

SEQ ID NO: 27371 - protein, 585 aa, Artificial Sequence
  derived and/or modified protein sequence (wt) from hemagglutinin__InfluenzaB__AGX20074
MKAIIALLMVVTSNADRICTGITSSNSPHVVKTATQGEVNVTGVIPLTTTPTKSHFANLKGTETRGKLCPKCLNCTDLDVALGRPKCTGKIPSARVSILHEVRPVTSGCFPIMHDRTKIRQLPNLLRGYEHIRLSTHNVINAENAPGGPYKIGTSGSCPNITNGNGFFATMAWAVPKNDKNKTATNPLTIEVPYICTEGEDQITVWGFHSDNETQMAKLYGDSKPQKFTSSANGVTTHYVSQIGGFPNQTEDGGLPQSGRIVVDYMVQKSGKTGTITYQRGILLPQKVWCASGRSKVIKGSLPLIGEADCLHEKYGGLNKSKPYYTGEHAKAIGNCPIWVKTPLKLANGTKYRPPAKLLKERGFFGAIAGFLEGGWEGMIAGWHGYTSHGAHGVAVAADLKSTQEAINKITKNLNSLSELEVKNLQRLSGAMDELHNEILELDEKVDDLRADTISSQIELAVLLSNEGIINSEDEHLLALERKLKKMLGPSAVEIGNGCFETKHKCNQTCLDRIAAGTFDAGEFSLPTFDSLNITAASLNDDGLDNHTILLYYSTAASSLAVTLMIAIFVVYMVSRDNVSCSICL

SEQ ID NO: 27372 - protein, 585 aa, Artificial Sequence
  derived and/or modified protein sequence (wt) from hemagglutinin__InfluenzaB__AGX20085
MKAIIVLLMVVTSNADRICTGITSSNSPHVVKTATQGEVNVTGVIPLTTTPTKSHFANLKGTETRGKLCPKCLNCTDLDVALGRPKCTGKIPSARVSILHEVRPVTSGCFPIMHDRTKIRQLPNLLRGYEHIRLSTHNVINAENAPGGPYKIGTSGSCPNITNGNGFFATMAWAVPKNDKNKTATNPLTIEVPYICTEGEDQITIWGFHSDNETQMAKLYGDSKPQKFTSSANGVTTHYVSQIGGFPNQTEDGGLPQSGRIVVDYMVQKSGKTGTITYQRGILLPQKVWCASGRSKVIKGSLPLIGEADCLHEKYGGLNKSKPYYTGEHAKAIGNCPIWVKTPLKLANGTKYRPPAKLLKERGFFGAIAGFLEGGWEGMIAGWHGYTSHGAHGVAVAADLKSTQEAINKITKNLNSLSELEVKNLQRLSGAMDELHNEILELDEKVDDLRADTISSQIELAVLLSNEGIINSEDEHLLALERKLKKMLGPSAVEIGNGCFETKHKCNQTCLDRIAAGTFDAGEFSLPTFDSLNITAASLNDDGLDNHTILLYYSTAASSLAVTLMIAIFVVYMVSRDNVSCSICL

SEQ ID NO: 27373 - protein, 585 aa, Artificial Sequence
  derived and/or modified protein sequence (wt) from hemagglutinin__InfluenzaB__AGX20096
MKAIIVLLMVVTSNADRICTGVTSSNSPHVVKTATQGEVNVTGVIPLTTTPTKSHFANLKGTETRGKLCPKCLNCTDLDVALGRPKCTGNIPSARVSILHEVRPVTSGCFPIMHDRTKIRQLPNLLRGYEHIRLSTHNVINAENAPGGPYKIGTSGSCPNVTNGNGFFATMAWAVPKNDNNKTATNSLTIEVPYICTEGEDQITVWGFHSDNETQMAKLYGDSKPQKFTSSANGVTTHYVSQIGGFPNQTEDGGLPQSGRIVVDYMVQKSGKTGTITYQRGILLPQKVWCASGRSKVIKGSLPLIGEADCLHEKYGGLNKSKPYYTGEHAKAIGNCPIWVKTPLKLANGTKYRPPAKLLKERGFFGAIAGFLEGGWEGMIAGWHGYTSHGAHGVAVAADLKSTQEAINKITKNLNSLSELEVKNLQRLSGAMDELHNEILELDEKVDDLRADTISSQIELAVLLSNEGIINSEDEHLLALERKLKKMLGPSAVEIGNGCFETKHKCNQTCLDRIAAGTFDAGEFSLPTFDSLNITAASLNDDGLDNHTILLYYSTAASSLAVTLMIAIFVVYMVSRDNVSCSICL

SEQ ID NO: 27374 - protein, 585 aa, Artificial Sequence; identical to SEQ ID NO: 26608
  derived and/or modified protein sequence (wt) from hemagglutinin__InfluenzaB__AGX20107

SEQ ID NO: 27375 - protein, 585 aa, Artificial Sequence; identical to SEQ ID NO: 26608
  derived and/or modified protein sequence (wt) from hemagglutinin__InfluenzaB__AGX20118

SEQ ID NO: 27376 - protein, 585 aa, Artificial Sequence; identical to SEQ ID NO: 26608
  derived and/or modified protein sequence (wt) from hemagglutinin__InfluenzaB__AGX20129

SEQ ID NO: 27377 - protein, 585 aa, Artificial Sequence; identical to SEQ ID NO: 26608
  derived and/or modified protein sequence (wt) from hemagglutinin__InfluenzaB__AGX20140

SEQ ID NO: 27378 - protein, 585 aa, Artificial Sequence; identical to SEQ ID NO: 26608
  derived and/or modified protein sequence (wt) from hemagglutinin__InfluenzaB__AGX20151

SEQ ID NO: 27379 - protein, 585 aa, Artificial Sequence; identical to SEQ ID NO: 26608
  derived and/or modified protein sequence (wt) from hemagglutinin__InfluenzaB__AGX20162

SEQ ID NO: 27380 - protein, 585 aa, Artificial Sequence; identical to SEQ ID NO: 26608
  derived and/or modified protein sequence (wt) from hemagglutinin__InfluenzaB__AGX20173

SEQ ID NO: 27381 - protein, 585 aa, Artificial Sequence; identical to SEQ ID NO: 26608
  derived and/or modified protein sequence (wt) from hemagglutinin__InfluenzaB__AGX20184

SEQ ID NO: 27382 - protein, 585 aa, Artificial Sequence; identical to SEQ ID NO: 26608
  derived and/or modified protein sequence (wt) from hemagglutinin__InfluenzaB__AGX20195

SEQ ID NO: 27383 - protein, 585 aa, Artificial Sequence; identical to SEQ ID NO: 26608
  derived and/or modified protein sequence (wt) from hemagglutinin__InfluenzaB__AGX20206

SEQ ID NO: 27384 - protein, 585 aa, Artificial Sequence; identical to SEQ ID NO: 26608
  derived and/or modified protein sequence (wt) from hemagglutinin__InfluenzaB__AGX20217

SEQ ID NO: 27385 - protein, 585 aa, Artificial Sequence; identical to SEQ ID NO: 26645
  derived and/or modified protein sequence (wt) from hemagglutinin__InfluenzaB__AGX20228

SEQ ID NO: 27386 - protein, 585 aa, Artificial Sequence
  derived and/or modified protein sequence (wt) from hemagglutinin__InfluenzaB__AGX20239
MKAIIVLLMVVTSNADRICTGITSSNSPHVVKTATQGEVNVTGVIPLTTTPTKSHFANLKGTETRGKLCPKCPNCTDLDVALGRPKCTGKIPSARVSILHEVRPVTSGCFPIMHDRTKIRQLPNLLRGYEHIRLSTHNVINAENAPGGPYKIGTSGSCPNVTNGNGFFATMAWAVPKNDKNKTATNPLTIEVPYICTEGEDQIIVWGFHSDNETQMAKLYGDSKPQKFTSSANGVTTHYVSQIGGFPNQTEDGGLPQSGRIVVDYMVQKSGKTGTITYQRGILLPQKVWCASGRSKVIKGSLPLIGEADCLHEKYGGLNKSKPYYTGEHAKAIGNCPIWVKTPLKLANGTKYRPPAKLLKERGFFGAIAGFLEGGWEGMIAGWHGYTSHGAHGVAVAADLKSTQEAINKITKNLNSLSELEVKNLQRLSGAMDELHNEILELDEKVDDLRADTISSQIELAVLLSNEGIINSEDEHLLALERKLKKMLGPSAVEIGNGCFETKHKCNQTCLDRIAAGTFDAGEFSLPTFDSLNITAASLNDDGLDNHTILLYYSTAASSLAVTLMIAIFVVYMVSRDNVSCSICL

SEQ ID NO: 27387 - protein, 585 aa, Artificial Sequence; identical to SEQ ID NO: 26608
  derived and/or modified protein sequence (wt) from hemagglutinin__InfluenzaB__AGX20250

SEQ ID NO: 27388 - protein, 585 aa, Artificial Sequence; identical to SEQ ID NO: 26608
  derived and/or modified protein sequence (wt) from hemagglutinin__InfluenzaB__AGX20261

SEQ ID NO: 27389 - protein, 585 aa, Artificial Sequence; identical to SEQ ID NO: 26608
  derived and/or modified protein sequence (wt) from hemagglutinin__InfluenzaB__AGX20272

SEQ ID NO: 27390 - protein, 585 aa, Artificial Sequence; identical to SEQ ID NO: 26608
  derived and/or modified protein sequence (wt) from hemagglutinin__InfluenzaB__AGX20283

SEQ ID NO: 27391 - protein, 585 aa, Artificial Sequence; identical to SEQ ID NO: 26608
  derived and/or modified protein sequence (wt) from hemagglutinin__InfluenzaB__AGX20294

SEQ ID NO: 27392 - protein, 585 aa, Artificial Sequence
  derived and/or modified protein sequence (wt) from hemagglutinin__InfluenzaB__AGX20305
MKAIIVLLMVVTSNADRICTGITSSNSPHVVKTATQGEVNVTGVIPLTTTPTKSHFANLKGTETRGKLCPKCPNCTDLDVALGRPKCTGKIPSARVSILHEVRPVTSGCFPIMHDRTKIRQLPNLLRGYEHIRLSTHNVINAENAPGGPYKIGTSGSCPNVTNGNGFFATMAWAVPKNDKNKTATNQLTIEVPYICTEGEDQITVWGFHSDNETQMAKLYGDSKPQKFTSSANGVTTHYVSQIGGFPNQTEDGGLPQSGRIVVDYMVQKSGKTGTITYQRGILLPQKVWCASGRSKVIKGSLPLIGEADCLHEKYGGLNKSKPYYTGEHAKAIGNCPIWVKTPLKLANGTKYRPPAKLLKERGFFGAIAGFLEGGWEGMIAGWHGYTSHGAHGVAVAADLKSTQEAINKITKNLNSLSELEVKNLQRLSGAMDELHNEILELDEKVDDLRADTISSQIELAVLLSNEGIINSEDEHLLALERKLKKMLGPSAVEIGNGCFETKHKCNQTCLDRIAAGTFDAGEFSLPTFDSLNITAASLNDDGLDNHTILLYYSTAASSLAVTLMIAIFVVYMVSRDNVSCSICL

SEQ ID NO: 27393 - protein, 585 aa, Artificial Sequence; identical to SEQ ID NO: 26608
  derived and/or modified protein sequence (wt) from hemagglutinin__InfluenzaB__AGX20316

SEQ ID NO: 27394 - protein, 585 aa, Artificial Sequence; identical to SEQ ID NO: 26608
  derived and/or modified protein sequence (wt) from hemagglutinin__InfluenzaB__AGX20327

SEQ ID NO: 27395 - protein, 585 aa, Artificial Sequence
  derived and/or modified protein sequence (wt) from hemagglutinin__InfluenzaB__AGX20338
MKAIIVLLMVVTSNADRICTGITSSNSPHVVKTATQGEVNVTGVIPLTTTPTKSHFANLKGTETRGKLCPKCPNCTDLDVALGRPKCTGKIPSARVSILHEVRPVTSGCFPIMHDRTKIRQLPNLLRGYEHIRLSTHNVINAENAPGGPYKIGTSGSCPNVTNGNGFFATMAWAVPKNDKNKTATNPLTIEVPYICTEGEDQITVWGFHSDNETQMANLYGDSKPQKFTSSANGVTTHYVSQIGGFPNQTEDGGLPQSGRIVVDYMVQKSGKTGTITYQRGILLPQKVWCASGRSKVIKGSLPLIGEADCLHEKYGGLNKSKPYYTGEHAKAIGNCPIWVKTPLKLANGTKYRPPAKLLKERGFFGAIAGFLEGGWEGMIAGWHGYTSHGAHGVAVAADLKSTQEAINKITKNLNSLSELEVKNLQRLSGAMDELHNEILELDEKVDDLRADTISSQIELAVLLSNEGIINSEDEHLLALERKLKKMLGPSAVEIGNGCFETKHKCNQTCLDRIAAGTFDAGEFSLPTFDSLNITAASLNDDGLDNHTILLYYSTAASSLAVTLMIAIFVVYMVSRDNVSCSICL

SEQ ID NO: 27396 - protein, 585 aa, Artificial Sequence; identical to SEQ ID NO: 26608
  derived and/or modified protein sequence (wt) from hemagglutinin__InfluenzaB__AGX20349

SEQ ID NO: 27397 - protein, 585 aa, Artificial Sequence; identical to SEQ ID NO: 26608
  derived and/or modified protein sequence (wt) from hemagglutinin__InfluenzaB__AGX20360

SEQ ID NO: 27398 - protein, 585 aa, Artificial Sequence; identical to SEQ ID NO: 26645
  derived and/or modified protein sequence (wt) from hemagglutinin__InfluenzaB__AGX20371

SEQ ID NO: 27399 - protein, 585 aa, Artificial Sequence
  derived and/or modified protein sequence (wt) from hemagglutinin__InfluenzaB__AGX20382
MKAIIVLLMVVTSNADRICTGITSSNSPHVVKTATQGEVNVTGVIPLTTTPTKSHFANLKGTETRGKLCPKCPNCTDLDVALGRPKCTGKIPSARVSILHEVRPVTSGCFPIMHDRTKIRQLPNLLRGYEHIRLSTHNVINAENAPGGPYKIGTSGSCPNVTNGNGFFATMAWAVPKNDKNKTATNPLTIEVPYICTEGEDQITVWGFHSDNETQMAKLYGDSKPQKFTSSANGVTTHYVSQIGGFPNQTEDGGLPQSGRIVVDYMVQKSGKTGTITYQRGILLPQKVWCASGRSKVIKGSLPLIGEADCLHEKYGGLNKSKPYYTGEHAKAIGNCPIWVKTPLKLANGTKYRPPAKLLKERGFFGAIAGFLEGGWEGMIAGWHGYTSHGAHGVAVAADLKSTQEAINKITKNLNSLSELEVKNLQRLSGAMNELHNEILELDEKVDDLRADTISSQIELAVLLSNEGIINSEDEHLLALERKLKKMLGPSAVEIGNGCFETKHKCNQTCLDRIAAGTFDAGEFSLPTFDSLNITAASLNDDGLDNHTILLYYSTAASSLAVTLMIAIFVVYMVSRDNVSCSICL

SEQ ID NO: 27400 - protein, 585 aa, Artificial Sequence; identical to SEQ ID NO: 26608
  derived and/or modified protein sequence (wt) from hemagglutinin__InfluenzaB__AGX20393

SEQ ID NO: 27401 - protein, 585 aa, Artificial Sequence; identical to SEQ ID NO: 26645
  derived and/or modified protein sequence (wt) from hemagglutinin__InfluenzaB__AGX20404

SEQ ID NO: 27402 - protein, 585 aa, Artificial Sequence; identical to SEQ ID NO: 26608
  derived and/or modified protein sequence (wt) from hemagglutinin__InfluenzaB__AGX20415

SEQ ID NO: 27403 - protein, 585 aa, Artificial Sequence; identical to SEQ ID NO: 26608
  derived and/or modified protein sequence (wt) from hemagglutinin__InfluenzaB__AGX20426

SEQ ID NO: 27404 - protein, 585 aa, Artificial Sequence; identical to SEQ ID NO: 26608
  derived and/or modified protein sequence (wt) from hemagglutinin__InfluenzaB__AGX20437

SEQ ID NO: 27405 - protein, 585 aa, Artificial Sequence; identical to SEQ ID NO: 26608
  derived and/or modified protein sequence (wt) from hemagglutinin__InfluenzaB__AGX20448

SEQ ID NO: 27406 - protein, 585 aa, Artificial Sequence; identical to SEQ ID NO: 26608
  derived and/or modified protein sequence (wt) from hemagglutinin__InfluenzaB__AGX20459

SEQ ID NO: 27407 - protein, 585 aa, Artificial Sequence; identical to SEQ ID NO: 26608
  derived and/or modified protein sequence (wt) from hemagglutinin__InfluenzaB__AGX20470

SEQ ID NO: 27408 - protein, 585 aa, Artificial Sequence; identical to SEQ ID NO: 26608
  derived and/or modified protein sequence (wt) from hemagglutinin__InfluenzaB__AGX20481

SEQ ID NO: 27409 - protein, 585 aa, Artificial Sequence; identical to SEQ ID NO: 26608
  derived and/or modified protein sequence (wt) from hemagglutinin__InfluenzaB__AGX20492

SEQ ID NO: 27410 - protein, 585 aa, Artificial Sequence; identical to SEQ ID NO: 26608
  derived and/or modified protein sequence (wt) from hemagglutinin__InfluenzaB__AGX20503

SEQ ID NO: 27411 - protein, 585 aa, Artificial Sequence; identical to SEQ ID NO: 26608
  derived and/or modified protein sequence (wt) from hemagglutinin__InfluenzaB__AGX20514

SEQ ID NO: 27412 - protein, 585 aa, Artificial Sequence
  derived and/or modified protein sequence (wt) from hemagglutinin__InfluenzaB__AGX20525
MKAIIVLLMVVTSNADRICTGITSSNSPHVVKTATQGEVNVTGVIPLTTTPTKSHFSNLKGTETRGKLCPKCPNCTDLDVALGRPKCTGKIPSARVSILHEVRPVTSGCFPIMHDRTKIRQLPNLLRGYEHIRLSTHNVINAENAPGGPYKIGTSGSCPNVTNGNGFFATMAWAVPKNDKNKTATNPLTIEVPYICTEGEDQITVWGFHSDNETQMAKLYGDSKPQKFTSSANGVTTHYVSQIGGFPNQTEDGGLPQSGRIVVDYMVQKSGKTGTITYQRGILLPQKVWCASGRSKVIKGSLPLIGEADCLHEKYGGLNKSKPYYTGEHAKAIGNCPIWVKTPLKLANGTKYRPPAKLLKERGFFGAIAGFLEGGWEGMIAGWHGYTSHGAHGVAVAADLKSTQEAINKITKNLNSLSELEVKNLQRLSGAMDELHNEILELDEKVDDLRADTISSQIELAVLLSNEGIINSEDEHLLALERKLKKMLGPSAVEIGNGCFETKHKCNQTCLDRIAAGTFDAGEFSLPTFDSLNITAASLNDDGLDNHTILLYYSTAASSLAVTLMIAIFVVYMVSRDNVSCSICL

SEQ ID NO: 27413 - protein, 585 aa, Artificial Sequence; identical to SEQ ID NO: 26608
  derived and/or modified protein sequence (wt) from hemagglutinin__InfluenzaB__AGX20536

SEQ ID NO: 27414 - protein, 585 aa, Artificial Sequence
  derived and/or modified protein sequence (wt) from hemagglutinin__InfluenzaB__AGX20547
MKAIIVLLMVVTSNADRICTGITSSNSPHVVKTATQGEVNVTGVIPLTTTPTKSHFANLKGTETRGKLCPKCLNCTDLDVALGRPKCTGKIPSARVSILHEVRPVTSGCFPIMHDRTKIRQLPNLLRGYEHIRLSTHNVINAENAPGGPYKIGTSGSCPNVTNGNGFFATMAWAVPKNDKNKTATNPLTIEVPYICTEGEDQITVWGFHSDNETQMAKLYGDSKPQKFTSSANGVTTHHVSQIGGFPNQTEDGGLPQSGRIVVDYMVQKSGKTGTITYQRGILLPQKVWCASGRSKVIKGSLPLIGEADCLHEKYGGLNKSKPYYTGEHAKAIGNCPIWVKTPLKLANGTKYRPPAKLLKERGFFGAIAGFLEGGWEGMIAGWHGYTSHGAHGVAVAADLKSTQEAINKITKNLNSLSELEIKNLQRLSGAMDELHNEILELDEKVDDLRADTISSQIELAVLLSNEGIINSEDEHLLALERKLKKMLGPSAVEIGNGCFETKHKCNQTCLDRIAAGTFDAGEFSLPTFDSLNITAASLNDDGLDNHTILLYYSTAASSLAVTLMIAIFVVYMVSRDNVSCSICL

SEQ ID NO: 27415 - protein, 585 aa, Artificial Sequence; identical to SEQ ID NO: 26662
  derived and/or modified protein sequence (wt) from hemagglutinin__InfluenzaB__AGX20558

SEQ ID NO: 27416 - protein, 585 aa, Artificial Sequence; identical to SEQ ID NO: 26608
  derived and/or modified protein sequence (wt) from hemagglutinin__InfluenzaB__AGX20569

SEQ ID NO: 27417 - protein, 585 aa, Artificial Sequence; identical to SEQ ID NO: 26645
  derived and/or modified protein sequence (wt) from hemagglutinin__InfluenzaB__AGX20580

SEQ ID NO: 27418 - protein, 585 aa, Artificial Sequence; identical to SEQ ID NO: 26608
  derived and/or modified protein sequence (wt) from hemagglutinin__InfluenzaB__AGX20591

SEQ ID NO: 27419 - protein, 585 aa, Artificial Sequence; identical to SEQ ID NO: 26608
  derived and/or modified protein sequence (wt) from hemagglutinin__InfluenzaB__AGX20602

SEQ ID NO: 27420 - protein, 585 aa, Artificial Sequence; identical to SEQ ID NO: 26608
  derived and/or modified protein sequence (wt) from hemagglutinin__InfluenzaB__AGX20613

SEQ ID NO: 27421 - protein, 585 aa, Artificial Sequence; identical to SEQ ID NO: 26608
  derived and/or modified protein sequence (wt) from hemagglutinin__InfluenzaB__AGX20624

SEQ ID NO: 27422 - protein, 585 aa, Artificial Sequence
  derived and/or modified protein sequence (wt) from hemagglutinin__InfluenzaB__AGX20635
MKAIIVLLMVVTSNADRICTGITSSNSPHVVKTATQGEVNVTGVIPLTTTPTKSHFANLKGTETRGKLCPKCLNCTDLDVALGRPKCTGKIPSARVSILHEVRPVTSGCFPIMHDRTKIRQLPNLLRGYEHIRLSTHNVINAENAPGGPYKIGTSGSCPNVTNGNGFFATMAWAVPKNDKNKTATNPLTIEVPYICTEGEDQITVWGFHSDNETLMAKLYGDSKPQKFTSSANGVTTHYVSQIGGFPNQTEDGGLPQSGRIVVDYMVQKSGKTGTITYQRGILLPQKVWCASGRSKVIKGSLPLIGEADCLHEKYGGLNKSKPYYTGEHAKAIGNCPIWVKTPLKLANGTKYRPPAKLLKERGFFGAIAGFLEGGWEGMIAGWHGYTSHGAHGVAVAADLKSTQEAINKITKNLNSLSELEVKNLQRLSGAMDELHNEILELDEKVDDLRADTISSQIELAVLLSNEGIINSEDEHLLALERKLKKMLGPSAVEIGNGCFETKHKCNQTCLDRIAAGTFDAGEFSLPTFDSLNITAASLNDDGLDNHTILLYYSTAASSLAVTLMIAIFVVYMVSRDNVSCSICL

SEQ ID NO: 27423 - protein, 585 aa, Artificial Sequence; identical to SEQ ID NO: 26608
  derived and/or modified protein sequence (wt) from hemagglutinin__InfluenzaB__AGX20646

SEQ ID NO: 27424 - protein, 585 aa, Artificial Sequence
  derived and/or modified protein sequence (wt) from hemagglutinin__InfluenzaB__AGX20668
MKAIIVLLMVVTSNADRICTGITSSNSPHVVKTATQGEVNVTGVIPLTTTPTKSHFANLKGTETRGKLCPKCPNCTDLDVALGRPKCTGKIPSARVSILHEVRPVTSGCFPIMHDRTKIRQLPNLLRGYEHIRLSTHNVINAENAPGGPYKIGTSGSCPNVTNGNGFFATMAWAVPKNDKTKTATNPLTIEVPYICTEGEDQITVWGFHSDNETQMAKLYGDSKPQKFTSSANGVTTHYVSQIGGFPNQTEDGGLPQSGRIVVDYMVQKSGKTGTITYQRGILLPQKVWCASGRSKVIKGSLPLIGEADCLHEKYGGLNKSKPYYTGEHAKAIGNCPIWVKTPLKLANGTKYRPPAKLLKERGFFGAIAGFLEGGWEGMIAGWHGYTSHGAHGVAVAADLKSTQEAINKITKNLNSLSELEVKNLQRLSGAMDELHNEILELDEKVDDLRADTISSQIELAVLLSNEGIINSEDEHLLALERKLKKMLGPSAVEIGNGCFETKHKCNQTCLDRIAAGTFDAGEFSLPTFDSLNITAASLNDDGLDNHTILLYYSTAASSLAVTLMIAIFVVYMVSRDNVSCSICL

SEQ ID NO: 27425 - protein, 585 aa, Artificial Sequence; identical to SEQ ID NO: 26683
  derived and/or modified protein sequence (wt) from hemagglutinin__InfluenzaB__AGX20679

SEQ ID NO: 27426 - protein, 585 aa, Artificial Sequence; identical to SEQ ID NO: 26645
  derived and/or modified protein sequence (wt) from hemagglutinin__InfluenzaB__AGX20690

SEQ ID NO: 27427 - protein, 585 aa, Artificial Sequence; identical to SEQ ID NO: 26645
  derived and/or modified protein sequence (wt) from hemagglutinin__InfluenzaB__AGX20701

SEQ ID NO: 27428 - protein, 585 aa, Artificial Sequence; identical to SEQ ID NO: 26989
  derived and/or modified protein sequence (wt) from hemagglutinin__InfluenzaB__AGX20712

SEQ ID NO: 27429 - protein, 585 aa, Artificial Sequence; identical to SEQ ID NO: 26608
  derived and/or modified protein sequence (wt) from hemagglutinin__InfluenzaB__AGX20723

SEQ ID NO: 27430 - protein, 585 aa, Artificial Sequence
  derived and/or modified protein sequence (wt) from hemagglutinin__InfluenzaB__AGX20734
MKAIIVLLMVVTSNADRICTGITSSNSPHVVKTATQGEVNVTGVIPLTTTPTKSHFANLKGTETRGKLCPKCLNCTDLDVALGRPKCTGKIPSARVSILHEVRPVTSGCFPIMHDRTKIRQLPNLLRGYEHIRLSTNNVINAENAPGGPYKIGTSGSCPNVTNGNGFFATMAWAVPKNDKNKTATNPLTIEVPYICTEGEDQITVWGFHSDNETQMAKLYGDSKPQKFTSSANGVTTHYVSQIGGFPNQTEDGGLPQSGRIVVDYMVQKSGKTGTITYQRGILLPQKVWCASGRSKVIKGSLPLIGEADCLHEKYGGLNKSKPYYTGEHAKAIGNCPIWVKTPLKLANGTKYRPPAKLLKERGFFGAIAGFLEGGWEGMIAGWHGYTSHGAHGVAVAADLKSTQEAINKITKNLNSLSELEVKNLQRLSGAMDELHNEILELDEKVDDLRADTISSQIELAVLLSNEGIINSEDEHLLALERKLKKMLGPSAVEIGNGCFETKHKCNQTCLDRIAAGTFDAGEFSLPTFDSLNITAASLNDDGLDNHTILLYYSTAASSLAVTLMIAIFVVYMVSRDNVSCSICL

SEQ ID NO: 27431 - protein, 585 aa, Artificial Sequence
  derived and/or modified protein sequence (wt) from hemagglutinin__InfluenzaB__AGX20745
MKAIIVLLMVVTSNADRICTGITSSNSPHVVKTATQGEVNVTGVIPLTTTPTKSHFANLKGTETRGKLCPKCPNCTDLDVALGRPKCTGKIPSARVSILHEVRPVTSGCFPIMHDRTKIRQLPNLLRGYEHIRLSTHNVINAENAPGGPYKIGTSGSCPNVTNGNGFFATMAWAVPKNDKNKTATNPLTIEVPYICTEGEDQITIWGFHSDNETQMAKLYGDSKPQKFTSSANGVTTHYVSQIGGFPNQTEDGGLPQSGRIVVDYMVQKSGKTGTITYQRGILLPQKVWCASGRSKVIKGSLPLIGEADCLHEKYGGLNKSKPYYTGEHAKAIGNCPIWVKTPLKLANGTKYRPPAKLLKERGFFGAIAGFLEGGWEGMIAGWHGYTSHGAHGVAVAADLKSTQEAINKITKNLNSLSELEVKNLQRLSGAMDELHNEILELDEKVDDLRADTISSQIELAVLLSNEGIINSEDEHLLALERKLKKMLGPSAVEIGNGCFETKHKCNQTCLDRIAAGTFDAGEFSLPTFDSLNITAASLNDDGLDNHTILLYYSTAASSLAVTLMIAIFVVYMVSRDNVSCSICL

SEQ ID NO: 27432 - protein, 585 aa, Artificial Sequence; identical to SEQ ID NO: 26989
  derived and/or modified protein sequence (wt) from hemagglutinin__InfluenzaB__AGX20756

SEQ ID NO: 27433 - protein, 585 aa, Artificial Sequence; identical to SEQ ID NO: 26608
  derived and/or modified protein sequence (wt) from hemagglutinin__InfluenzaB__AGX20767

SEQ ID NO: 27434 - protein, 585 aa, Artificial Sequence; identical to SEQ ID NO: 26645
  derived and/or modified protein sequence (wt) from hemagglutinin__InfluenzaB__AGX20778

SEQ ID NO: 27435 - protein, 585 aa, Artificial Sequence
  derived and/or modified protein sequence (wt) from hemagglutinin__InfluenzaB__AGX20789
MKAIIVLLMVVTSNADRICTGITSSNSPHVVKTATQGEVNVTGVIPLTTTPTKSHFANLKGTETRGKLCPKCPNCTDLDVALGRPKCTGKIPSARVSILHEVRPVTSGCFPIMHDRTKIRQLPNLLRGYEHIRLSTHNVINAENAPGGPYKIGTSGSCPNVTNGNGFFATMAWAVPKNDKNKTATNPLTIEVPYICTEGEDQITVWGFHSDNETQMAKLYGDSKPQKFTSSANGVTTHYVSQIGGFPNQTEDGGLPQSGRIVVDYMVQKSGKTGTITYQRGILLPQKVWCASGRSKVIKGSLPLIGEADCLHEKYGGLNKSKPYYTGEHAKAIGNCPIWVKTPLKLANGTKYRPPAKLLKERGFFGAIAGFLEGGWEGMIAGWHGYTSHGAHGVAVAADLKSTQEAINKITKNLNSLSELEVKNLQRLSGAMDELHGEILELDEKVDDLRADTISSQIELAVLLSNEGIINSEDEHLLALERKLKKMLGPSAVEIGNGCFETKHKCNQTCLDRIAAGTFDAGEFSLPTFDSLNITAASLNDDGLDNHTILLYYSTAASSLAVTLMIAIFVVYMVSRDNVSCSICL

SEQ ID NO: 27436 - protein, 585 aa, Artificial Sequence
  derived and/or modified protein sequence (wt) from hemagglutinin__InfluenzaB__AGX20800
MKAIIVLLMVVTSNADRICTGITSSNSPHVVKTATQGEVNVTGVIPLTTTPTKSHFANLKGTETRGKLCPKCPNCTDLDVALGRPKCTGKIPSARVSILHEVRPVTSGCFPIMHDRTKIRQLPNLLRGYEHIRLSTHNVINAENAPGGPYKIGTSGSCPNVTNGNGFFATMAWAVPKNDKNKTATNPLTIEVPYICTEGEDQITVWGFHSDNETQMAKLYGDSKPQKFTSSANGVTTHYVSQIGGFPNQTEDGGLPQSGRIVVDYMVQKSGKTGTITYQRGILLPQKVWCASGRSKVIKGSLPLIGEADCLHEKYGGLNKSKPYYTGEHAKAIGNCPIWVKTPLKLANGTKYRPPAKLLKERGFFGAIAGFLEGGWEGMIAGWHGYTSHGAHGVAVAADLKSTQEAINKITKNLNSLSELEVKNLQRLSGAMDELHNEILELDEKVDDLRADTISSQIELAVLLSNEGIINSEDEHLLALERKLKKMLGPSAVEIGNGCFETKHKCNQTCLDRIAAGTFDAGEFSLPTFDSLNITAASLNDDELDNHTILLYYSTAASSLAVTLMIAIFVVYMVSRDNVSCSICL

SEQ ID NO: 27437 - protein, 585 aa, Artificial Sequence; identical to SEQ ID NO: 26683
  derived and/or modified protein sequence (wt) from hemagglutinin__InfluenzaB__AGX20811

SEQ ID NO: 27438 - protein, 585 aa, Artificial Sequence; identical to SEQ ID NO: 26683
  derived and/or modified protein sequence (wt) from hemagglutinin__InfluenzaB__AGX20822

SEQ ID NO: 27439 - protein, 585 aa, Artificial Sequence; identical to SEQ ID NO: 26683
  derived and/or modified protein sequence (wt) from hemagglutinin__InfluenzaB__AGX20833

SEQ ID NO: 27440 - protein, 585 aa, Artificial Sequence
  derived and/or modified protein sequence (wt) from hemagglutinin__InfluenzaB__AGX20844
MKAIIVLLMVVTSNADRICTGITSSNSPHIVKTATQGEVNVTGVIPLTTTPTKSHFANLKGTETRGKLCPKCLNCTDLDVALGRPKCMGKIPSARVSILHEVRPVTSGCFPIMHDRTKIRQLPNLLRGYEHIRLSTHNVINAENAPGGPYKIGTSGSCPNITNGNGFFATMAWAVPKNDKNKTATNPLTIEVPYICTEGEDQITVWGFHSDNETQMAKLYGDSKPQKFTSSANGVTTHYVSQIGGFPNQTEDGGLPQSGRIVVDYMVQKSGKTGTITYQRGILLPQKVWCASGRSKVIKGSLPLIGEADCLHEKYGGLNKSKPYYTGEHAKAIGNCPIWVKTPLKLANGTKYRPPAKLLKERGFFGAIAGFLEGGWEGMIAGWHGYTSHGAHGVAVAADLKSTQEAINKITKNLNSLSELEVKNLQRLSGAMDELHNEILELDEKVDDLRADTISSQIELAVLLSNEGIINSEDEHLLALERKLKKMLGPSAVEIGNGCFETKHKCNQTCLDRIAAGTFDAGEFSLPTFDSLNITAASLNDDGLDNHTILLYYSTAASSLAVTLMIAIFVVYMVSRDNVSCSICL

SEQ ID NO: 27441 - protein, 585 aa, Artificial Sequence; identical to SEQ ID NO: 26608
  derived and/or modified protein sequence (wt) from hemagglutinin__InfluenzaB__AGX20855

SEQ ID NO: 27442 - protein, 585 aa, Artificial Sequence; identical to SEQ ID NO: 26683
  derived and/or modified protein sequence (wt) from hemagglutinin__InfluenzaB__AGX20866

SEQ ID NO: 27443 - protein, 585 aa, Artificial Sequence; identical to SEQ ID NO: 26683
  derived and/or modified protein sequence (wt) from hemagglutinin__InfluenzaB__AGX20877

SEQ ID NO: 27444 - protein, 585 aa, Artificial Sequence
  derived and/or modified protein sequence (wt) from hemagglutinin__InfluenzaB__AGX20888
MKAIIVLLMVVTSNADRICTGITSSNSPHVVKTATQGEVNVTGVIPLTTTPTKSHFANLKGTETRGKLCPKCPNCTDLDVALGRPKCTGKIPSARVSILHEVRPVTSGCFPIMHDRTKIRQLPNLLRGYEHIRLSTHNVINAENAPGGPYKIGTSGSCPNVTNGNGFFATMAWAVPKNDKNKTATNPLTIEVPYICTEGEDQITVWGFHSDSETQMAKLYGDSKPQKFTSSANGVTTHYVSQIGGFPNQTEDGGLPQSGRIVVDYMVQKSGKTGTITYQRGILLPQKVWCASGRSKVIKGSLPLIGEADCLHEKYGGLNKSKPYYTGEHAKAIGNCPIWVKTPLKLANGTKYRPPAKLLKERGFFGAIAGFLEGGWEGMIAGWHGYTSHGAHGVAVAADLKSTQEAINKITKNLNSLSELEVKNLQRLSGAMDELHNEILELDEKVDDLRADTISSQIELAVLLSNEGIINSEDEHLLALERKLKKMLGPSAVEIGNGCFETKHKCNQTCLDRIAAGTFDAGEFSLPTFDSLNITAASLNDDGLDNHTILLYYSTAASSLAVTLMIAIFVVYMVSRDNVSCSICL

SEQ ID NO: 27445 - protein, 585 aa, Artificial Sequence; identical to SEQ ID NO: 26683
  derived and/or modified protein sequence (wt) from hemagglutinin__InfluenzaB__AGX20899

SEQ ID NO: 27446 - protein, 585 aa, Artificial Sequence; identical to SEQ ID NO: 26683
  derived and/or modified protein sequence (wt) from hemagglutinin__InfluenzaB__AGX20910

SEQ ID NO: 27447 - protein, 585 aa, Artificial Sequence; identical to SEQ ID NO: 26608
  derived and/or modified protein sequence (wt) from hemagglutinin__InfluenzaB__AGX20921

SEQ ID NO: 27448 - protein, 585 aa, Artificial Sequence
  derived and/or modified protein sequence (wt) from hemagglutinin__InfluenzaB__AGX20932
MKAIIVLLMVVTSNADRICTGITSSNSPHVVKTATQGEVNVTGVIPLTTTPTKSHFANLKGTETRGKLCPKCPNCTDLDVALGRPKCTGKIPSARVSILHEVRPVTSGCFPIMHDRTKIRQLPNLLRGYEHIRLSTHNVINAENAPGGPYKIGTSGSCPNVTNGNGFFATMAWAVPKNDKNKTATNPLTIEVPYICTEGEDQITVWGFHSDNETQMAKLYGDPKPQKFTSSANGVTTHYVSQIGGFPNQTEDGGLPQSGRIVVDYMVQKSGKTGTITYQRGILLPQKVWCASGRSKVIKGSLPLIGEADCLHEKYGGLNKSKPYYTGEHAKAIGNCPIWVKTPLKLANGTKYRPPAKLLKERGFFGAIAGFLEGGWEGMIAGWHGYTSHGAHGVAVAADLKSTQEAINKITKNLNSLSELEVKNLQRLSGAMDELHNEILELDEKVDDLRADTISSQIELAVLLSNEGIINSEDEHLLALERKLKKMLGPSAVEIGNGCFETKHKCNQTCLDRIAAGTFDAGEFSLPTFDSLNITAASLNDDGLDNHTILLYYSTAASSLAVTLMIAIFVVYMVSRDNVSCSICL

SEQ ID NO: 27449 - protein, 585 aa, Artificial Sequence; identical to SEQ ID NO: 26608
  derived and/or modified protein sequence (wt) from hemagglutinin__InfluenzaB__AGX20943

SEQ ID NO: 27450 - protein, 585 aa, Artificial Sequence; identical to SEQ ID NO: 26608
  derived and/or modified protein sequence (wt) from hemagglutinin__InfluenzaB__AGX20954

SEQ ID NO: 27451 - protein, 585 aa, Artificial Sequence; identical to SEQ ID NO: 26608
  derived and/or modified protein sequence (wt) from hemagglutinin__InfluenzaB__AGX20965

SEQ ID NO: 27452 - protein, 585 aa, Artificial Sequence
  derived and/or modified protein sequence (wt) from hemagglutinin__InfluenzaB__AGX20976
MKAIIVLLMVVTSNADRICTGITSSNSPHVVKTATQGEVNVTGVIPLTTTPTKSHFANLKGTETRGKLCPKCLNCTDLDVALGRPKCTGKIPSARVSILHEVRPVTSGCFPIMHDRTKIRQLPNLLRGYEHIRLSTHNVINAENAPGGPYKIGTSGSCPNVTNGNGFFATMAWAVPKNDKNKTATNPLTIEVPYICTEGEDQITVWGFHSDNETQMAKLYGDSKPQKFTSSANGVTTHYVSQIGGFPNQTEDGGLPQSGRIVVDYMVQKSGKTGTITYQRGILLPQKVWCASGRSKVIKGSLPLIGEADCLHEKYGGLNKSKPYYTGEHAKAIGNCPIWVKTPLKLANGTKYRPPAKLLKERGFFGAIAGFLEGGWEGMIAGWHGYTSHGAHGVAVAADLKSTQEAINKITKNLNSLSELEVKNLQRLSGAMDELHGEILELDEKVDDLRADTISSQIELAVLLSNEGIINSEDEHLLALERKLKKMLGPSAVEIGNGCFETKHKCNQTCLDRIAAGTFDAGEFSLPTFDSLNITAASLNDDGLDNHTILLYYSTAASSLAVTLMIAIFVVYMVSRDNVSCSICL

SEQ ID NO: 27453 - protein, 585 aa, Artificial Sequence; identical to SEQ ID NO: 26608
  derived and/or modified protein sequence (wt) from hemagglutinin__InfluenzaB__AGX20987

SEQ ID NO: 27454 - protein, 585 aa, Artificial Sequence; identical to SEQ ID NO: 26683
  derived and/or modified protein sequence (wt) from hemagglutinin__InfluenzaB__AGX20998

SEQ ID NO: 27455 - protein, 585 aa, Artificial Sequence
  derived and/or modified protein sequence (wt) from hemagglutinin__InfluenzaB__AGX21009
MKAIIVLLMVVTSNADRICTGITSSNSPHVVKTATQGEVNVTGVIPLTTTPTKSHFANLKGTETRGKLCPKCPNCTDLDVALGRPKCTGKIPSARVSILHEVRPVTSGCFPIMHDRTKIRQLPNLLRGYEHIRLSTHNVINAENAPGGPYKIGTSGSCPNVTNGNGFFATMAWAVPKNDKNKTATNPLTIEVPYICTEGEDQITVWGFHSDNETQMAKLYGDSKPQKFTSSANGVTTHYVSQIGGFPNQTEDGGLPQSGRIVVDYMVQKSGKTGTITYQRGILLPQKVWCASGRSKVIKGSLPLIGEADCLHEKYGGLNKSKPYYTGEHAKAIGNCPIWVKTPLKLANGTKYRPPAKLLKERGFFGAIAGFLEGGWEGMIAGWHGYTSHGAHGVAVAADLKSTQEAINKITKNLNSLSELEVKNLQRLSGAMDELHNEILELDEKVDDLRADTISSQIELAVLLSNEGIINSEDEHLLALERKLKKMLGPSAVEIGNGCFETKHKCNQTCLDRIAAGTFDAGEFSLPTFDSLNITAASLNDDGLDNHTILLYYSTAASSLAVTLMIAIFVVYMISRDNVSCSICL

SEQ ID NO: 27456 - protein, 585 aa, Artificial Sequence
  derived and/or modified protein sequence (wt) from hemagglutinin__InfluenzaB__AGX21020
MKAIIVLLMVVTSNADRICTGITSSNSPHVVKTATQGEVNVTGVIPLTTTPTKSHFANLKGTETRGKLCPKCLNCTDLDVALGRPKCTGKIPSARVSILHEVRPVTSGCFPIMHDRTKIRQLPNLLRGYEHIRLSTHNVINAENAPGGPYKIGTSGSCPNVTNGNGFFATMAWAVPKNDKNKTATNPLTIEVPYICTEGEDQITVWGFHSDNETQMAKLYGDSEPQKFTSSANGVTTHYVSQIGGFPNQTEDGGLPQSGRIVVDYMVQKSGKTGTITYQRGILLPQKVWCASGRSKVIKGSLPLIGEADCLHEKYGGLNKSKPYYTGEHAKAIGNCPIWVKTPLKLANGTKYRPPAKLLKERGFFGAIAGFLEGGWEGMIAGWHGYTSHGAHGVAVAADLKSTQEAINKITKNLNSLSELEVKNLQRLSGAMDELHNEILELDEKVDDLRADTISSQIELAVLLSNEGIINSEDEHLLALERKLKKMLGPSAVEIGNGCFETKHKCNQTCLDRIAAGTFDAGEFSLPTFDSLNITAASLNDDGLDNHTILLYYSTAASSLAVTLMIAIFVVYMVSRDNVSCSICL

SEQ ID NO: 27457 - protein, 585 aa, Artificial Sequence; identical to SEQ ID NO: 26683
  derived and/or modified protein sequence (wt) from hemagglutinin__InfluenzaB__AGX21031

SEQ ID NO: 27458 - protein, 585 aa, Artificial Sequence
  derived and/or modified protein sequence (wt) from hemagglutinin__InfluenzaB__AGX21042
MKAIIVLLMVVTSNADRICTGITSSNSPHVVKTATQGEVNVTGVIPLTTTPTKSHFANLKGTETRGKLCPKCLNCTDLDVALGRPKCTGKIPSARVSILHEVRPVTSGCFPIMHDRTKIRQLPNLLRGYEHIRLSTHNVINTENAPGGPYKIGTSGSCPNVTNGNGFFATMAWAVPKNDKNKTATNPLTIEVPYICTEGEDQITVWGFHSDNETQMAKLYGDSKPQKFTSSANGVTTHYVSQIGGFPNQTEDGGLPQSGRIVVDYMVQKSGKTGTITYQRGILLPQKVWCASGRSKVIKGSLPLIGEADCLHEKYGGLNKSKPYYTGEHAKAIGNCPIWVKTPLKLANGTKYRPPAKLLKERGFFGAIAGFLEGGWEGMIAGWHGYTSHGAHGVAVAADLKSTQEAINKITKNLNSLSELEVKNLQRLSGAMDELHNEILELDEKVDDLRADTISSQIELAVLLSNEGIINSEDEHLLALERKLKKMLGPSAVEIGNGCFETKHKCNQTCLDRIAAGTFDAGEFSLPTFDSLNITAASLNDDGLDNHTILLYYSTAASSLAVTLMIAIFVVYMVSRDNVSCSICL

SEQ ID NO: 27459 - protein, 585 aa, Artificial Sequence; identical to SEQ ID NO: 26645
  derived and/or modified protein sequence (wt) from hemagglutinin__InfluenzaB__AGX21053

SEQ ID NO: 27460 - protein, 585 aa, Artificial Sequence; identical to SEQ ID NO: 26608
  derived and/or modified protein sequence (wt) from hemagglutinin__InfluenzaB__AGX21064

SEQ ID NO: 27461 - protein, 585 aa, Artificial Sequence; identical to SEQ ID NO: 26645
  derived and/or modified protein sequence (wt) from hemagglutinin__InfluenzaB__AGX21075

SEQ ID NO: 27462 - protein, 585 aa, Artificial Sequence; identical to SEQ ID NO: 26645
  derived and/or modified protein sequence (wt) from hemagglutinin__InfluenzaB__AGX21084

SEQ ID NO: 27463 - protein, 585 aa, Artificial Sequence; identical to SEQ ID NO: 26645
  derived and/or modified protein sequence (wt) from hemagglutinin__InfluenzaB__AGX21095

SEQ ID NO: 27464 - protein, 585 aa, Artificial Sequence
  derived and/or modified protein sequence (wt) from hemagglutinin__InfluenzaB__AGX21106
MKAIIVLLMVVTSNADRICTGITSSNSPHVVKTATQGEVNVTGVIPLTTTPTKSHFANLKGTETRGKLCPKCPNCTDLDVALGRPKCTGKIPSARVSILHEVRPVTSGCFPIMHDRTKIRQLPNLLRGYEHIRLSTHNVINAENAPGGPYKIGTSGSCPNVTNGNGFFATMAWAVPKNDKNKTATNPLTIEVPYICTEGEDQITVWGFHSDNEAQMAKLYGDSKPQKFTSSANGVTTHYVSQIGGFPNQTEDGGLPQSGRIVVDYMVQKSGKTGTITYQRGILLPQKVWCASGRSKVIKGSLPLIGEADCLHEKYGGLNKSKPYYTGEHAKAIGNCPIWVKTPLKLANGTKYRPPAKLLKERGFFGAIAGFLEGGWEGMIAGWHGYTSHGAHGVAVAADLKSTQEAINKITKNLNSLSELEVKNLQRLSGAMDELHNEILELDEKVDDLRADTISSQIELAVLLSNEGIINSEDEHLLALERKLKKMLGPSAVEIGNGCFETKHKCNQTCLDRIAAGTFDAGEFSLPTFDSLNITAASLNDDGLDNHTILLYYSTAASSLAVTLMIAIFVVYMVSRDNVSCSICL

SEQ ID NO: 27465 - protein, 585 aa, Artificial Sequence; identical to SEQ ID NO: 26608
  derived and/or modified protein sequence (wt) from hemagglutinin__InfluenzaB__AGX21117

SEQ ID NO: 27466 - protein, 585 aa, Artificial Sequence; identical to SEQ ID NO: 27458
  derived and/or modified protein sequence (wt) from hemagglutinin__InfluenzaB__AGX21128

SEQ ID NO: 27467 - protein, 585 aa, Artificial Sequence
  derived and/or modified protein sequence (wt) from hemagglutinin__InfluenzaB__AGX21139
MKAIIVLLMVVTSNADRICTGITSSNSPHVVKTATQGEVNVTGVIPLTTTPTKSHFANLKGTETRGKLCPKCPNCTDLDVALGRPKCTGKIPSARVSILHEVRPVTSGCFPIMHDRTKIRQLPNLLRGYEHIRLSTHNVINAENAPGGPYKIGTSGSCPNVTNGNGFFATMAWAVPKNDKNKTATNPLTIEVPYICTEGEDQITVWGFHSDNETQMAKLYGDSKPQKFTSSANGVTTHYVSQIGDFPNQTEDGGLPQSGRIVVDYMVQKSGKTGTITYQRGILLPQKVWCASGRSKVIKGSLPLIGEADCLHEKYGGLNKSKPYYTGEHAKAIGNCPIWVKTPLKLANGTKYRPPAKLLKERGFFGAIAGFLEGGWEGMIAGWHGYTSHGAHGVAVAADLKSTQEAINKITKNLNSLSELEVKNLQRLSGAMDELHNEILELDEKVDDLRADTISSQIELAVLLSNEGIINSEDEHLLALERKLKKMLGPSAVEIGNGCFETKHKCNQTCLDRIAAGTFDAGEFSLPTFDSLNITAASLNDDGLDNHTILLYYSTAASSLAVTLMIAIFVVYMVSRDNVSCSICL

SEQ ID NO: 27468 - protein, 585 aa, Artificial Sequence; identical to SEQ ID NO: 26683
  derived and/or modified protein sequence (wt) from hemagglutinin__InfluenzaB__AGX21150

SEQ ID NO: 27469 - protein, 585 aa, Artificial Sequence; identical to SEQ ID NO: 26608
  derived and/or modified protein sequence (wt) from hemagglutinin__InfluenzaB__AGX21161

SEQ ID NO: 27470 - protein, 585 aa, Artificial Sequence; identical to SEQ ID NO: 26683
  derived and/or modified protein sequence (wt) from hemagglutinin__InfluenzaB__AGX21172

SEQ ID NO: 27471 - protein, 585 aa, Artificial Sequence; identical to SEQ ID NO: 26645
  derived and/or modified protein sequence (wt) from hemagglutinin__InfluenzaB__AGX21183

SEQ ID NO: 27472 - protein, 585 aa, Artificial Sequence; identical to SEQ ID NO: 26683
  derived and/or modified protein sequence (wt) from hemagglutinin__InfluenzaB__AGX21194

SEQ ID NO: 27473 - protein, 585 aa, Artificial Sequence
  derived and/or modified protein sequence (wt) from hemagglutinin__InfluenzaB__AGX21205
MKAIIVLLMVVTSNADRICTGITSSNSPHIVKTATQGEVNVTGVIPLTTTPTKSHFANLKGTETRGKLCPKCLNCTDLDVALGRPKCTGKIPSARVSILHEVRPVTSGCFPIMHDRTKIRQLPNLLRGYEHIRLSTHNVINAKNAPGGPYKIGTSGSCPNITNGNGFFATMAWAVPKNDKNKTATNPLTIEVPYICTEGEDQITVWGFHSDNETQMAKLYGDSKPQKFTSSANGVTTHYVSQIGGFPNQTEDGGLPQSGRIVVDYMVQKSGKTGTITYQRGILLPQKVWCASGRSKVIKGSLPLIGEADCLHEKYGGLNKSKPYYTGEHAKAIGNCPIWVKTPLKLANGTKYRPPAKLLKERGFFGAIAGFLEGGWEGMIAGWHGYTSHGAHGVAVAADLKSTQEAINKITKNLNSLSELEVKNLQRLSGAMDELHNEILELDEKVDDLRADTISSQIELAVLLSNEGIINSEDEHLLALERKLKKMLGPSAVEIGNGCFETKHKCNQTCLDRIAAGTFDAGEFSLPTFDSLNITAASLNDDGLDNHTILLYYSTAASSLAVTLMIAIFVVYMVSRDNVSCSICL

SEQ ID NO: 27474 - protein, 585 aa, Artificial Sequence; identical to SEQ ID NO: 26645
  derived and/or modified protein sequence (wt) from hemagglutinin__InfluenzaB__AGX21216

SEQ ID NO: 27475 - protein, 585 aa, Artificial Sequence; identical to SEQ ID NO: 26608
  derived and/or modified protein sequence (wt) from hemagglutinin__InfluenzaB__AGX21227

SEQ ID NO: 27476 - protein, 585 aa, Artificial Sequence
  derived and/or modified protein sequence (wt) from hemagglutinin__InfluenzaB__AGX21238
MKAIIVLLMVVTSNADRICTGITSSNSPHVVKTATQGEVNVTGVIPLTTTPTKSHFANLKGTETRGKLCPKCLNCTDLDVALGRPKCTGKIPSARVSILHEVRPVTSGCFPIMHDRTKIRQLPNLLRGYEHIRLSTHNVINAENAPGGPYKIGTSGSCPNVTNGNGFFATMAWAVPKNDKNKTATNPLTIEVPYICTEGEDQITVWGFHSDNETQMAKLYGDSKPQKFTSSANGVTTHYVSQIGGFPNQTEDGGLPQSGRIVVDYMVQKSGKTGTITYQRGILLPQKVWCANGRSKVIKGSLPLIGEADCLHEKYGGLNKSKPYYTGEHAKAIGNCPIWVKTPLKLANGTKYRPPAKLLKERGFFGAIAGFLEGGWEGMIAGWHGYTSHGAHGVAVAADLKSTQEAINKITKNLNSLSELEVKNLQRLSGAMDELHNEILELDEKVDDLRADTISSQIELAVLLSNEGIINSEDEHLLALERKLKKMLGPSAVEIGNGCFETKHKCNQTCLDRIAAGTFDAGEFSLPTFDSLNITAASLNDDGLDNHTILLYYSTAASSLAVTLMIAIFVVYMISRDNVSCSICL

SEQ ID NO: 27477 - protein, 585 aa, Artificial Sequence; identical to SEQ ID NO: 26683
  derived and/or modified protein sequence (wt) from hemagglutinin__InfluenzaB__AGX21249

SEQ ID NO: 27478 - protein, 585 aa, Artificial Sequence
  derived and/or modified protein sequence (wt) from hemagglutinin__InfluenzaB__AGX21260
MKAIIVLLMVVTSNADRICTGITSSNSPHVVKTATQGEVNVTGVIPLTTTPTKSHFANLKGTETRGKLCPKCLNCTDLDVALGRPKCTGKIPSARVSILHEVRPVTSGCFPIMHDRTKIRQLPNLLRGYEHIRLSTHNVINAENAPGGPYKIGTSGSCPNVTNGNGFFATMAWAVPKNDKNKTATNPLTIEVPYICTEGEDQITVWGFHSDNETQMAKLYGDSKPQKFTSSANGVTTHYVSQIGGFPNQTEDGGLPQSGRIVVDYMVQKSGKTGTITYQRGILLPQRVWCASGRSKVIKGSLPLIGEADCLHEKYGGLNKSKPYYTGEHAKAIGNCPIWVKTPLKLANGTKYRPPAKLLKERGFFGAIAGFLEGGWEGMIAGWHGYTSHGAHGVAVAADLKSTQEAINKITKNLNSLSELEVKNLQRLSGAMDELHNEILELDEKVDDLRADTISSQIELAVLLSNEGIINSEDEHLLALERKLKKMLGPSAVEIGNGCFETKHKCNQTCLDRIAAGTFDAGEFSLPTFDSLNITAASLNDDGLDNHTILLYYSTAASSLAVTLMIAIFVVYMVSRDNVSCSICL

SEQ ID NO: 27479 - protein, 585 aa, Artificial Sequence; identical to SEQ ID NO: 26608
  derived and/or modified protein sequence (wt) from hemagglutinin__InfluenzaB__AGX21271

SEQ ID NO: 27480 - protein, 585 aa, Artificial Sequence
  derived and/or modified protein sequence (wt) from hemagglutinin__InfluenzaB__AGX21282
MKAIIVLLMVVTSNADRICTGITSSNSPHIVKTATQGEVNVTGVIPLTTSPTKSHFANLKGTETRGKLCPKCLNCTDLDVALGRPKCTGKIPSARVSILHEVRPVTSGCFPIMHDRTKIRQLPNLLRGYEHIRLSTHNVINAKNAPGGPYKIGTSGSCPNITNGNGFFATMAWAVPKNDKNKTATNPLTIEVPYICTEGEDQITVWGFHSDNETQMAKLYGDSKPQKFTSSANGVTTHYVSQIGGFPNQTEDGGLPQSGRIVVDYMVQKSGKTGTITYQRGILLPQKVWCASGRSKVIKGSLPLIGEADCLHEKYGGLNKSKPYYTGEHAKAIGNCPIWVKTPLKLANGTKYRPPAKLLKERGFFGAIAGFLEGGWEGMIAGWHGYTSHGAHGVAVAADLKSTQEAINKITKNLNSLSELEVKNLQRLSGAMDELHNEILELDEKVDDLRADTISSQIELAVLLSNEGIINSEDEHLLALERKLKKMLGPSAVEIGNGCFETKHKCNQTCLDRIAAGTFDAGEFSLPTFDSLNITAASLNDDGLDNHTILLYYSTAASSLAVTLMIAIFVVYMVSRDNVSCSICL

SEQ ID NO: 27481 - protein, 585 aa, Artificial Sequence; identical to SEQ ID NO: 26645
  derived and/or modified protein sequence (wt) from hemagglutinin__InfluenzaB__AGX21293

SEQ ID NO: 27482 - protein, 585 aa, Artificial Sequence; identical to SEQ ID NO: 26683
  derived and/or modified protein sequence (wt) from hemagglutinin__InfluenzaB__AGX21304

SEQ ID NO: 27483 - protein, 585 aa, Artificial Sequence; identical to SEQ ID NO: 26645
  derived and/or modified protein sequence (wt) from hemagglutinin__InfluenzaB__AGX21315

SEQ ID NO: 27484 - protein, 585 aa, Artificial Sequence; identical to SEQ ID NO: 26608
  derived and/or modified protein sequence (wt) from hemagglutinin__InfluenzaB__AGX21326

SEQ ID NO: 27485 - protein, 585 aa, Artificial Sequence
  derived and/or modified protein sequence (wt) from hemagglutinin__InfluenzaB__AGX21337
MKAIIVLLMVVTSNADRICTGITSSNSPHVVKTATQGEVNVTGVIPLTTTPTKSHFANLKGTETRGKLCPKCPNCTDLDVALGRPKCTGKIPSARVSILHEVRPVTSGCFPIMHDRTKIRQLPNLLRGYEHIRLSTHNVINAENAPGGPYKIGTSGSCPNVTNGNGFFATMAWAVPKNDKNKTATNPLTIEVPYICTEGEDQITVWGFHSDKETQMAKLYGDSKPQKFTSSANGVTTHYVSQIGGFPNQTEDGGLPQSGRIVVDYMVQKSGKTGTITYQRGILLPQKVWCASGRSKVIKGSLPLIGEADCLHEKYGGLNKSKPYYTGEHAKAIGNCPIWVKTPLKLANGTKYRPPAKLLKERGFFGAIAGFLEGGWEGMIAGWHGYTSHGAHGVAVAADLKSTQEAINKITKNLNSLSELEVKNLQRLSGAMDELHNEILELDEKVDDLRADTISSQIELAVLLSNEGIINSEDEHLLALERKLKKMLGPSAVEIGNGCFETKHKCNQTCLDRIAAGTFDAGEFSLPTFDSLNITAASLNDDGLDNHTILLYYSTAASSLAVTLMIAIFVVYMVSRDNVSCSICL

SEQ ID NO: 27486 - protein, 585 aa, Artificial Sequence; identical to SEQ ID NO: 26645
  derived and/or modified protein sequence (wt) from hemagglutinin__InfluenzaB__AGX21348

SEQ ID NO: 27487 - protein, 585 aa, Artificial Sequence; identical to SEQ ID NO: 26645
  derived and/or modified protein sequence (wt) from hemagglutinin__InfluenzaB__AGX21359

SEQ ID NO: 27488 - protein, 585 aa, Artificial Sequence
  derived and/or modified protein sequence (wt) from hemagglutinin__InfluenzaB__AGX21370
MKAIIVLLMVVTSNADRICTGITSSNSPHVVKTATQGEVNVTGVIPLTTTPTKSHFANLKGTETRGKLCPKCPNCTDLDVALGRPKCMGKIPSARVSILHEVRPVTSGCFPIMHDRTKIRQLPNLLRGYEHIRLSTHNVINAENAPGGPYKIGTSGSCPNVTNGNGFFATMAWAVPKNDKNKTATNPLTIEVPYICTEGEDQITVWGFHSDNETQMAKLYGDSKPQKFTSSANGVTTHYVSQIGGFPNQTEDGGLPQSGRIVVDYMVQKSGKTGTITYQRGILLPQKVWCASGRSKVIKGSLPLIGEADCLHEKYGGLNKSKPYYTGEHAKAIGNCPIWVKTPLKLANGTKYRPPAKLLKERGFFGAIAGFLEGGWEGMIAGWHGYTSHGAHGVAVAADLKSTQEAINKITKNLNSLSELEVKNLQRLSGAMDELHNEILELDEKVDDLRADTISSQIELAVLLSNEGIINSEDEHLLALERKLKKMLGPSAVEIGNGCFETKHKCNQTCLDRIAAGTFDAGEFSLPTFDSLNITAASLNDDGLDNHTILLYYSTAASSLAVTLMIAIFVVYMVSRDNVSCSICL

SEQ ID NO: 27489 - protein, 585 aa, Artificial Sequence
  derived and/or modified protein sequence (wt) from hemagglutinin__InfluenzaB__AGX21381
MKAIIVLLMVVTSNADRICTGITSSNSPHIVKTATQGEVNVTGVIPLTTTPTKSHFANLKGTETRGKLCPKCLNCTDLDVALGRPKCTGKIPSARVSILHEVRPVTSGCFPIMHDRTKIRQLPNLLRGYEHIRLSTHNVINAENAPGGPYKIGTSGSCPNITNGNGFFATMAWAVPKNDKNKTATNPLTIEVPYICTEGEDQITVWGFHSDNETQMAKLYGDSKPQKFTSSANGVTTHYISQIGGFPNQTEDGGLPQSGRIVVDYMVQKSGKTGTITYQRGILLPQKVWCASGRSKVIKGSLPLIGEADCLHEKYGGLNKSKPYYTGEHAKAIGNCPIWVKTPLKLANGTKYRPPAKLLKERGFFGAIAGFLEGGWEGMIAGWHGYTSHGAHGVAVAADLKSTQEAINKITKNLNSLSELEVKNLQRLSGAMDELHNEILELDEKVDDLRADTISSQIELAVLLSNEGIINSEDEHLLALERKLKKMLGPSAVEIGNGCFETKHKCNQTCLDRIAAGTFDAGEFSLPTFDSLNITAASLNDDGLDNHTILLYYSTAASSLAVTLMIAIFVVYMVSRDNVSCSICL

SEQ ID NO: 27490 - protein, 585 aa, Artificial Sequence
  derived and/or modified protein sequence (wt) from hemagglutinin__InfluenzaB__AGX21392
MKAIIVLLMVVTSNADRICTGITSSNSPHIVKTATQGEVNVTGVIPLTTTPTKSHFANLKGTETRGKLCPKCLNCTDLDVALGRPKCTGKIPSARVSILHEVRPVTSGCFPIMHDRTKIRQLPNLLRGYEHIRLSTHNVINAENAPGGPYKIGTSGSCPNITNGNGFFATMAWAVPKNDKNKTATNPLTIEVPYICTEGEDQITVWGFHSDNEAQMAKLYGDSKPQKFTSSANGVTTHYVSQIGGFPNQTEDGGLPQSGRIVVDYMVQKSGKTGTITYQRGILLPQKVWCASGRSKVIKGSLPLIGEADCLHEKYGGLNKSKPYYTGEHAKAIGNCPIWVKTPLKLANGTKYRPPAKLLKERGFFGAIAGFLEGGWEGMIAGWHGYTSHGAHGVAVAADLKSTQEAINKITKNLNSLSELEVKNLQRLSGAMDELHNEILELDEKVDDLRADTISSQIELAVLLSNEGIINSEDEHLLALERKLKKMLGPSAVEIGNGCFETKHKCNQTCLDRIAAGTFDAGEFSLPTFDSLNITAASLNDDGLDNHTILLYYSTAASSLAVTLMIAIFVVYMVSRDNVSCSICL

SEQ ID NO: 27491 - protein, 585 aa, Artificial Sequence
  derived and/or modified protein sequence (wt) from hemagglutinin__InfluenzaB__AGX21403
MKAIIVLLMVVTSNADRICTGITSSNSPHVVKTATQGEVNVTGVIPLTTTPTKSHFANLKGTETRGKLCPKCPNCTDLDVALGRPKCTGKIPSARVSILHEVRPVTSGCFPIMHDRTKIRQLPNLLRGYEHIRLSTHNVINAENAPGGPYKIGTSGSCPNVTNGNGFFATMAWAVPKNDKNKTATNPLTIEVPYICTEGEDQITVWGFHSDNETQMAKLYGDSKPQKFTSSANGVTTHYVSQIGGFPNQTEDGGLPQSGRIVVDYMVQKSGKTGTITYQRGILLPQKVWCASGRSKVIKGSLPLIGEADCLHEKYGGLNKSKPYYTGEHAKAIGNCPIWVKTPLKLANGTKYRPPAKLLKERGFFGAIAGFLEGGWEGMIAGWHGYTSHGAHGVAVAADLKSTQEAINKITKNLNSLSELEVKNLQRLSGAMDELHNEILELDEKVDDLRADTISSQIELAVLLSNEGIINSEDEHLLALERKLKKMLGPSAVEIGNGCFETKHKCNQTCLNRIAAGTFDAGEFSLPTFDSLNITAASLNDDGLDNHTILLYYSTAASSLAVTLMIAIFVVYMVSRDNVSCSICL

SEQ ID NO: 27492 - protein, 585 aa, Artificial Sequence
  derived and/or modified protein sequence (wt) from hemagglutinin__InfluenzaB__AGX21414
MKAIIVLLMVVTSNADRICTGITSSNSPHVVKTATQGEVNVTGVIPLTTTPTKSHFANLKGTETRGKLCPKCPNCTDLDVALGRPKCTGKIPSARVSILHEVRPVTSGCFPIMHDRTKIRQLPNLLRGYEHIRLSTHNVINAENAPGGPYKIGTSGSCPNVTNGNGFFATMAWAVPKNDKNKTATDPLTIEVPYICTEGEDQITVWGFHSDNETQMAKLYGDSKPQKFTSSSNGVTTHYVSQIGGFPNQTEDGGLPQSGRIVVDYMVQKSGKTGTITYQRGILLPQKVWCASGRSKVIKGSLPLIGEADCLHEKYGGLNKSKPYYTGEHAKAIGNCPIWVKTPLKLANGTKYRPPAKLLKERGFFGAIAGFLEGGWEGMIAGWHGYTSHGAHGVAVAADLKSTQEAINKITKNLNSLSELEVKNLQRLSGAMDELHNEILELDEKVDDLRADTISSQIELAVLLSNEGIINSEDEHLLALERKLKKMLGPSAVEIGNGCFETKHKCNQTCLDRIAAGTFDAGEFSLPTFDSLNITAASLNDDGLDNHTILLYYSTAASSLAVTLMIAIFVVYMVSRDNVSCSICL

SEQ ID NO: 27493 - protein, 585 aa, Artificial Sequence; identical to SEQ ID NO: 26608
  derived and/or modified protein sequence (wt) from hemagglutinin__InfluenzaB__AGX21425

SEQ ID NO: 27494 - protein, 585 aa, Artificial Sequence
  derived and/or modified protein sequence (wt) from hemagglutinin__InfluenzaB__AGX21436
MKAIIVLLMVVTSNADRICTGITSSNSPHIVKTATQGEVNVTGVIPLTTTPTKSHFANLKGTETRGKLCPKCLNCTDLDVALGRPKCTGKIPSARVSILHEVRPVTSGCFPIMHDRTKIRQLPNLLRGYEHIRLSTHNVINAENAPGGPYKIGTSGSCPNITNGNGFFATMAWAVPKNDKNKTATNPLTIEVPYICTEGEDQITVWGFHSDNETQMAKLYGDSKPQKFTSSANGVTTHYVSQIGGFPNQTEDGGLPQSGRIVVDYMVQKSGKTGTITYQRGILLPQKVWCASGRSKVIKGSLPLIGEADCLHEKYGGLNKSKPYYTGEHAKAIGNCPIWVKTPLKLANGTKYRPPAKLLKERGFFGAIAGFLEGGWEGMIAGWHGYTSHGAHGVAVAADLKSTQEAINKITKNLNSLSELEVKNLQRLSGAMDELHNEILELDEKVDDLRADTISSQIELAVLLSNEGIINSEDEHLLALERKLKKMLGPSAVEIGNGCFETKHKCNQTCLDRIAAGTFDAGEFSLPTFDSLNITAASLNDDGLDNHTILLYYSTVASSLAVTLMIAIFVVYMVSRDNVSCSICL

SEQ ID NO: 27495 - protein, 585 aa, Artificial Sequence; identical to SEQ ID NO: 26683
  derived and/or modified protein sequence (wt) from hemagglutinin__InfluenzaB__AGX21447

SEQ ID NO: 27496 - protein, 585 aa, Artificial Sequence; identical to SEQ ID NO: 26608
  derived and/or modified protein sequence (wt) from hemagglutinin__InfluenzaB__AGX21458

SEQ ID NO: 27497 - protein, 585 aa, Artificial Sequence; identical to SEQ ID NO: 26608
  derived and/or modified protein sequence (wt) from hemagglutinin__InfluenzaB__AGX21469

SEQ ID NO: 27498 - protein, 585 aa, Artificial Sequence
  derived and/or modified protein sequence (wt) from hemagglutinin__InfluenzaB__AGX21480
MKAIIVLLMVVTSNADRICTGITSSNSPHVVKTATQGEVNVTGVIPLTTTPTKSHFANLKGTETRGKLCPKCLNCTDLDVALGRPKCTGKIPSARVSILHEVRPVTSGCFPIMHDRTKIRQLPNLLRGYEHIRLSTHNVINAENAPGGPYKIGTSGSCPNVTNGNGFFATMAWAVPKNDKNKTATNPLTIEVPYICTEGEDQITVWGFHSDNETQMAKLYGDSKPQKFTSSANGVTTHYVSQIGGFPNQTEDGGLPQSGRIVVDYMVQKSGKTGTITYQRGILLPQKVWCASGRSKVIKGSLPLIGEADCLHEKYGGLNKSKPYYTGEHAKAIGNCPIWVKTPLKLANGTKYRPPAKLLKERGFFGAIAGFLEGGWEGMIAGWHGYTSHGAHGVAVAADLKSTQEAINKITKNLNSLSELEVKNLQRLSGAMDELHNEILELDEKVDDLRADTISSQIELAVLLSNEGIINSEDEHLLALERKLKKMLGPSAVEIGNGCFETKHKCNQTCLDRIAAGTFDAGEFSLPTFDSLNITAASLNEDGLDNHTILLYYSTAASSLAVTLMIAIFVVYMVSRDNVSCSICL

SEQ ID NO: 27499 - protein, 585 aa, Artificial Sequence; identical to SEQ ID NO: 26683
  derived and/or modified protein sequence (wt) from hemagglutinin__InfluenzaB__AGX21491

SEQ ID NO: 27500 - protein, 585 aa, Artificial Sequence; identical to SEQ ID NO: 26683
  derived and/or modified protein sequence (wt) from hemagglutinin__InfluenzaB__AGX21502

SEQ ID NO: 27501 - protein, 585 aa, Artificial Sequence; identical to SEQ ID NO: 26608
  derived and/or modified protein sequence (wt) from hemagglutinin__InfluenzaB__AGX21513

SEQ ID NO: 27502 - protein, 585 aa, Artificial Sequence; identical to SEQ ID NO: 26645
  derived and/or modified protein sequence (wt) from hemagglutinin__InfluenzaB__AGX21524

SEQ ID NO: 27503 - protein, 585 aa, Artificial Sequence
  derived and/or modified protein sequence (wt) from hemagglutinin__InfluenzaB__AGX21535
MKAIIVLLMVVTSNADRICTGITSSNSPHIVKTATQGEVNVTGVIPLTTTPTKSHFANLKGTETRGKLCPKCLNCTDLDVALGRPKCTGKIPSARVSILHEVRPVTSGCFPIMHDRTKIRQLPNLLRGYEHIRLSTHNVINAENAPGGPYKIGTSGSCPNITNGNGFFATMAWAVPKNDKNKTATNPLTIEVPYICTEGEDQITVWGFHSDSETQMAKLYGDSKPQKFTSSANGVTTHYVSQIGGFPNQTEDGGLPQSGRIVVDYMVQKSGKTGTITYQRGILLPQKVWCASGRSKVIKGSLPLIGEADCLHEKYGGLNKSKPYYTGEHAKAIGNCPIWVKTPLKLANGTKYRPPAKLLKERGFFGAIAGFLEGGWEGMIAGWHGYTSHGAHGVAVAADLKSTQEAINKITKNLNSLSELEVKNLQRLSGAMDELHNEILELDEKVDDLRADTISSQIELAVLLSNEGIINSEDEHLLALERKLKKMLGPSAVEIGNGCFETKHKCNQTCLDRIAAGTFDAGEFSLPTFDSLNITAASLNDDGLDNHTILLYYSTAASSLAVTLMIAIFVVYMVSRDNVSCSICL

SEQ ID NO: 27504 - protein, 585 aa, Artificial Sequence; identical to SEQ ID NO: 26645
  derived and/or modified protein sequence (wt) from hemagglutinin__InfluenzaB__AGX21546

SEQ ID NO: 27505 - protein, 585 aa, Artificial Sequence
  derived and/or modified protein sequence (wt) from hemagglutinin__InfluenzaB__AGX21557
MKAIIVLLMVVTSNADRICTGITSSNSPHVVKTATQGEVNVTGVITLTTTPTKSHFANLKGTETRGKLCPKCLNCTDLDVALGRPKCTGKIPSARVSILHEVRPVTSGCFPIMHDRTKIRQLPNLLRGYEHIRLSTHNVINAENAPGGPYKIGTSGSCPNVTNGNGFFATMAWAVPKNDKNKTATNPLTIEVPYICTEGEDQITVWGFHSDNETQMAKLYGDSKPQKFTSSANGVTTHYVSQIGGFPNQTEDGGLPQSGRIVVDYMVQKSGKTGTITYQRGILLPQKVWCASGRSKVIKGSLPLIGEADCLHEKYGGLNKSKPYYTGEHAKAIGNCPIWVKTPLKLANGTKYRPPAKLLKERGFFGAIAGFLEGGWEGMIAGWHGYTSHGAHGVAVAADLKSTQEAINKITKNLNSLSELEVKNLQRLSGAMDELHNEILELDEKVDDLRADTISSQIELAVLLSNEGIINSEDEHLLALERKLKKMLGPSAVEIGNGCFETKHKCNQTCLDRIAAGTFDAGEFSLPTFDSLNITAASLNDDGLDNHTILLYYSTAASSLAVTLMIAIFVVYMVSRDNVSCSICL

SEQ ID NO: 27506 - protein, 585 aa, Artificial Sequence
  derived and/or modified protein sequence (wt) from hemagglutinin__InfluenzaB__AGX21568
MKAIIVLLMVVTSNADRICTGITSSNSPHVVKTATQGEVNVTGVIPLTTTPTKSHFANLKGTETRGKLCPKCLNCTDLDVALGRPKCTGKIPSARVSILHEVRPVTSGCFPMMHDRTKIRQLPNLLRGYEHIRLSTHNVINAENAPGGPYKIGTSGSCPNVTNGNGFFATMAWAVPKNDKNKTATNPLTIEVPYICTEGEDQITVWGFHSDNETQMAKLYGDSKPQKFTSSANGVTTHYVSQIGGFPNQTEDGGLPQSGRIVVDYMVQKSGKTGTITYQRGILLPQKVWCASGRSKVIKGSLPLIGEADCLHEKYGGLNKSKPYYTGEHAKAIGNCPIWVKTPLKLANGTKYRPPAKLLKERGFFGAIAGFLEGGWEGMIAGWHGYTSHGAHGVAVAADLKSTQEAINKITKNLNSLSELEVKNLQRLSGAMDELHNEILELDEKVDDLRADTISSQIELAVLLSNEGIINSEDEHLLALERKLKKMLGPSAVEIGNGCFETKHKCNQTCLDRIAAGTFDAGEFSLPTFDSLNITAASLNDDGLDNHTILLYYSTAASSLAVTLMIAIFVVYMVSRDNVSCSICL

SEQ ID NO: 27507 - protein, 585 aa, Artificial Sequence; identical to SEQ ID NO: 26608
  derived and/or modified protein sequence (wt) from hemagglutinin__InfluenzaB__AGX21579

SEQ ID NO: 27508 - protein, 585 aa, Artificial Sequence; identical to SEQ ID NO: 26645
  derived and/or modified protein sequence (wt) from hemagglutinin__InfluenzaB__AGX21590

SEQ ID NO: 27509 - protein, 585 aa, Artificial Sequence; identical to SEQ ID NO: 27458
  derived and/or modified protein sequence (wt) from hemagglutinin__InfluenzaB__AGX21601

SEQ ID NO: 27510 - protein, 585 aa, Artificial Sequence; identical to SEQ ID NO: 26645
  derived and/or modified protein sequence (wt) from hemagglutinin__InfluenzaB__AGX21611

SEQ ID NO: 27511 - protein, 585 aa, Artificial Sequence; identical to SEQ ID NO: 26989
  derived and/or modified protein sequence (wt) from hemagglutinin__InfluenzaB__AGX21622

SEQ ID NO: 27512 - protein, 585 aa, Artificial Sequence
  derived and/or modified protein sequence (wt) from hemagglutinin__InfluenzaB__AGX21633
MKAIIVLLMVVTSNADRICTGITSSNSPHIVKTATQGEVNVTGVIPLTTTPTKSHFANLKGTETRGKLCPKCLNCTDLDVALGRPKCTGKIPSARVSILHEVRPVTSGCFPIMHDRTKIRQLPNLLRGYEHIRLSTHNVINAENAPGGPYKIGTSGSCPNITNGNGFFATMAWAVPKNDKNKTATNPLTIEVPYICTEGEDQITVWGFHSDNETQMAKLYGDSKPQKFTSSANGVTTHYVSQIGGFPNQTEDGGLPQSGRIVVDYMVQKSGKTGTITYQRGILLPQKVWCASGRSKVIKGSLPLIGEADCLHEKYGGLNKSKPYYTGEHAKAIGNCPIWVKTPLKLANGTKYRPPARLLKERGFFGAIAGFLEGGWEGMIAGWHGYTSHGAHGVAVAADLKSTQEAINKITKNLNSLSELEVKNLQRLSGAMDELHNEILELDEKVDDLRADTISSQIELAVLLSNEGIINSEDEHLLALERKLKKMLGPSAVEIGNGCFETKHKCNQTCLDRIAAGTFDAGEFSLPTFDSLNITAASLNDDGLDNHTILLYYSTAASSLAVTLMIAIFVVYMVSRDNVSCSICL

SEQ ID NO: 27513 - protein, 585 aa, Artificial Sequence; identical to SEQ ID NO: 26683
  derived and/or modified protein sequence (wt) from hemagglutinin__InfluenzaB__AGX21644

SEQ ID NO: 27514 - protein, 585 aa, Artificial Sequence; identical to SEQ ID NO: 26608
  derived and/or modified protein sequence (wt) from hemagglutinin__InfluenzaB__AGX21655

SEQ ID NO: 27515 - protein, 585 aa, Artificial Sequence
  derived and/or modified protein sequence (wt) from hemagglutinin__InfluenzaB__AGX21666
MKAIIVLLMVVTSNADRICTGITSSNSPHVVKTATQGEVNVTGVIPLTTTPTKSHFANLKGTETRGKLCPKCPNCTDLDVALGRPKCTGKIPSARVSILHEVRPVTSGCFPIMHDRTKIRQLPNLLRGYEHIRLSTHNVINAENAPGGPYKIGTSGSCPNVTNGNGFFATMAWAVPKNDKNKTATNPLTIEVPYICTEGEDQITVWGFHSDNETQMAKLYGDSKPQKFTSSANGVTTHYVSQIGGFPNQTEDGGLPQSGRIVVDYMVQKSGKTGTITYQRGILLPQKVWCASGRSKVIKGSLPLIGEADCLHEKYGGLNKSKPYYTGEHAKAIGNCPIWVKTPLKLANGTKYRPPAKLLKERGFFGAIAGFLEGGWEGMIAGWHGYTSHGAHGVAVAADLKSTQEAINKITKNLNSLSELEVKNLQRLSGAMDELHNEILELDEKVDDLRADTISSQIELAVLLSNEGIINSEDEHLLALERKLKKMLGPSAVEIGNGCFETKHKCNQTCLDKIAAGTFDAGEFSLPTFDSLNITAASLNDDGLDNHTILLYYSTAASSLAVTLMIAIFVVYMVSRDNVSCSICL

SEQ ID NO: 27516 - protein, 585 aa, Artificial Sequence; identical to SEQ ID NO: 26683
  derived and/or modified protein sequence (wt) from hemagglutinin__InfluenzaB__AGX21677

SEQ ID NO: 27517 - protein, 585 aa, Artificial Sequence; identical to SEQ ID NO: 26608
  derived and/or modified protein sequence (wt) from hemagglutinin__InfluenzaB__AGX21688

SEQ ID NO: 27518 - protein, 585 aa, Artificial Sequence
  derived and/or modified protein sequence (wt) from hemagglutinin__InfluenzaB__AGX21699
MKAIIVLLMVVTSNADRICTGITSSNSPHVVKTATQGEVNVTGVIPLTTTPTKSHFANLKGTETRGKLCPKCLNCTDLDVALGRPKCTGKIPSARVSILHEVRPVTSGCFPIMHDRTKIRQLPNLLRGYEHIRLSTHNVINAENAPGGPYKIGTSGSCPNVTNGNGFFATMAWAVPKNDKNKTATNPLTIEVPYICTEGEDQITVWGFHSDNETQMAKLYGDSKPQKFTSSANGVTTHYVSQIGGFPNQTEDGGLPQSGRIVVDYMVQKSGKTGTITYQRGILLPQKVWCASGRSKVIKGSLPLIGEADCLHEKYGGLNKSKPYYTGEHAKAIGNCPIWVKTPLNLANGTKYRPPAKLLKERGFFGAIAGFLEGGWEGMIAGWHGYTSHGAHGVAVAADLKSTQEAINKITKNLNSLSELEVKNLQRLSGAMDELHNEILELDEKVDDLRADTISSQIELAVLLSNEGIINSEDEHLLALERKLKKMLGPSAVEIGNGCFETKHKCNQTCLDRIAAGTFDAGEFSLPTFDSLNITAASLSDDGLDNHTILLYYSTAASSLAVTLMIAIFVVYMVSRDNVSCSICL

SEQ ID NO: 27519 - protein, 585 aa, Artificial Sequence; identical to SEQ ID NO: 27458
  derived and/or modified protein sequence (wt) from hemagglutinin__InfluenzaB__AGX21710

SEQ ID NO: 27520 - protein, 585 aa, Artificial Sequence; identical to SEQ ID NO: 26683
  derived and/or modified protein sequence (wt) from hemagglutinin__InfluenzaB__AGX21721

SEQ ID NO: 27521 - protein, 584 aa, Artificial Sequence
  derived and/or modified protein sequence (wt) from hemagglutinin__InfluenzaB__AGX21732
MKAIIVLLMVVTSNADRICTGITSSNSPHVVKTATQGEVNVTGAIPLTTTPTKSHFANLKGTKTRGKLCPTCLNCTDLDVALGGPMCVGITPSAKASILHEVRPVTSGCFPIMHDRTKIRQLPNLLRGYEKIRLSAQNVINAEKAPGGPYKLGTSGSCPNATSKSGFFATMAWAVPRDDNKTATNPLTVEVPHICANEEDQITVWGFHSDNKTQMKNLYGDSNPQKFTSSANGITTHYVSQIGGFPDQTEDGGLPQSGRIVVDYMVQKPGKTGTIVYQRGILLPQKVWCASGRSKVIKGSLPLIGEADCLHEKYGGLNKSKPYYTGEHAKAIGNCPIWVKTPLKLANGTKYRPPAKLLKERGFFGAIAGFLEGGWEGMIAGWHGYTSHGAHGVAVAADLKSTQEAINKITKNLNSLSELEVKNLQRLSGAMDELHNEILELDEKVDDLRADTISSQIELAVLLSNEGIINSEDEHLLALERKLKKMLGPSAVDIGNGCFETKHKCNQTCLDRIAAGTFNAGEFSLPTFDSLNITAASLNDDGLDNHTILLYYSTAASSLAVTLMIAIFIVYMISRDNVSCSICL

SEQ ID NO: 27522 - protein, 584 aa, Artificial Sequence
  derived and/or modified protein sequence (wt) from hemagglutinin__InfluenzaB__AGX21743
MKAIIVLLMVVTSNADRICTGITSSNSPHVVKTATQGEVNVTGVIPLTTTPTKSHFANLKGTRTRGKLCPDCLNCTDLDVALGRPMCVGTTPSAKASILHEVRPVTSGCFPIMHDRTKIRQLPNLLRGYENIRLSTQNVIDAEKALGGPYRLGTSGSCPNATSKSGFFATMAWAVPKDNNKNATNPLTVEVPYICTEGEDQITVWGFHSDNKTQMKNLYGDSNPQKFTSSANGVTTHYVSQIGGFPDQTEDGGLPQSGRIVVDYMVQKPGKTGTIVYQRGVLLPQKVWCASGKSKVIKGSLPLIGEADCLHEKYGGLNKSKPYYTGEHAKAIGNCPIWVKTPLKLANGTKYRPPAKLLKERGFFGAIAGFLEGGWEGMIAGWHGYTSHGAHGVAVAADLKSTQEAINKITKNLNSLSELEVKNLQRLSGAMDELHNEILELDEKVDDLRADTISSQIELAVLLSNEGIINSEDEHLLALERKLKKMLGPSAVDIGNGCFETKHKCNQTCLDRIAAGTFNAGEFSLPTFDSLNITAASLNDDGLDNHTILLYYSTAASSLAVTLMLAIFIVYMVSRDNVSCSICL

SEQ ID NO: 27523 - protein, 584 aa, Artificial Sequence
  derived and/or modified protein sequence (wt) from hemagglutinin__InfluenzaB__AGX21754
MKAIIVLLMVVTSNADRICTGITSSNSPHVVKTATQGEVNVTGAIPLTTTPAKSHFANLKGTKTRGKLCPTCLNCTDLDVALGGPMCVGITPSAKASILHEVRPVTSGCFPIMHDRTKIRQLPNLLRGYEKIRLSAQNVINAEKAPGGPYKLGTSGSCPNATSKSGFFATMAWAVPRDDNKTATNPLTVEVPHICANEEDQITVWGFHSDNKTQMKNLYGDSNPQKFTSSANGITTHYVSQIGGFPDQTEDGGLPQSGRIVVDYMVQKPGKTGTIVYQRGILLPQKVWCASGRSKVIKGSLPLIGEADCLHEKYGGLNKSKPYYTGEHAKAIGNCPIWVKTPLKLANGTKYRPPAKLLKERGFFGAIAGFLEGGWEGMIAGWHGYTSHGAHGVAVAADLKSTQEAINKITKNLNSLSELEVKNLQRLSGAMDELHNEILELDEKVDDLRADTISSQIELAVLLSNEGIINSEDEHLLALERKLKKMLGPSAVDIGNGCFETKHKCNQTCLDRIAAGTFNAGEFSLPTFDSLNITAASLNDDGLDNHTILLYYSTAASSLAVTLMIAIFIVYMISRDNVSCSICL

SEQ ID NO: 27524 - protein, 584 aa, Artificial Sequence
  derived and/or modified protein sequence (wt) from hemagglutinin__InfluenzaB__AGX21776
MKAIIVLLMVVTSNADRICTGITSSNSPHVVKTATQGEVNVTGVIPLTTTPTKSYFANLKGTRTRGKLCPDCLNCTDLDVALGRPMCVGITPSAKASILHEVRPVTSGCFPIMHDRTKIRQLPNLLRGYENIRLSTQNVIDAEKAPGGPYRLGTSGSCPNATSKSGFFATMAWAVPKDNNKNATNPLTVEVPYVCTEGEDQITVWGFHSDNKTQMKNLYGDSNPQKFTSSANGVTTHYVSQIGGFPDQTEDGGLPQSGRIVVDYMVQKPGKTGTIVYQRGVLLPQKVWCASGRSKVIKGSLPLIGEADCLHEKYGGLNKSKPYYTGEHAKAIGNCPIWVKTPLKLANGTKYRPPAKLLKERGFFGAIAGFLEGGWEGMIAGWHGYTSHGAHGVAVAADLKSTQEAINKITKNLNSLSELEVKNLQRLSGAMDELHNEILELDEKVDDLRADTISSQIELAVLLSNEGIINSEDEHLLALERKLKKMLGPSAVDIGNGCFETKHKCNQTCLDRIAAGTFNAGEFSLPTFDSLNITAASLNDDGLDNHTILLYYSTAASSLAVTLMLAIFIVYMVSRDNVSCSICL

SEQ ID NO: 27525 - protein, 585 aa, Artificial Sequence; identical to SEQ ID NO: 26979
  derived and/or modified protein sequence (wt) from hemagglutinin__InfluenzaB__AGX21787

SEQ ID NO: 27526 - protein, 584 aa, Artificial Sequence
  derived and/or modified protein sequence (wt) from hemagglutinin__InfluenzaB__AGX21798
MKAIIVLLMVVTSNADRICTGITSSNSPHVVKTATQGEVNVTGVIPLTTTPTKSYFANLKGTRTRGKLCPDCLNCTDLDVALGRPMCVGTTPSAKASILHEVRPVTSGCFPIMHDRTKIRQLPNLLRGYENIRLSTQNVIDAEKAPGGPYRLGTSGSCPNATSKSGFFATMAWAVPKDNNKNATNPLTVEVPYVCTEGEDQITVWGFHSDNKTQMKNLYGDSNPQKFTSSANGVTTHYVSQIGGFPDQTEDGGLPQSGRIVVDYMVQKPGKTGTIVYQRGVLLPQKVWCASGRSKVIKGSLPLIGEADCLHEKYGGLNKSKPYYTGEHAKAIGNCPIWVKTPLKLANGTKYRPPAKLLKERGFFGAIAGFLEGGWEGMIAGWHGYTSHGAHGVAVAADLKSTQEAINKITKNLNSLSELEVKNLQRLSGAMDELHNEILELDEKVDDLRADTISSQIELAVLLSNEGIINSEDEHLLALERKLKKMLGPSAVDIGNGCFETKHKCNQTCLDRIAAGTFNAGEFSLPTFDSLNITAASLNDDGLDNHTILLYYSTAASSLAVTLMLAIFIVYMVSRDNVSCSICL

SEQ ID NO: 27527 - protein, 584 aa, Artificial Sequence
  derived and/or modified protein sequence (wt) from hemagglutinin__InfluenzaB__AGX21809
MKAIIVLLMVVTSNADRICTGITSSNSPHVVKTATQGEVNVTGVIPLTTTPTKSYFANLKGTRTRGKLCPDCLNCTDLDVALGRPMCVGTTPSAKASILHEVRPVTSGCFPIMHDRTKIRQLPNLLRGYENIRLSTQNVIDAEKAPGGPYRLGTSGSCPNATSKSGFFATMAWAVPKDNNKNATNPLTVEVPYVCTEGEDQITVWGFHSDNKTQMKNLYGDSNPQKFTSSANGVTTHYVSQIGGFPDQTEDGGLPQSGRIVVDYMVQKPGKTGTIVYQRGVLLPQKVWCASGRSKVIKGSLPLIGEADCLHEKYGGLNKSRPYYTGEHAKAIGNCPIWVKTPLKLANGTKYRPPAKLLKERGFFGAIAGFLEGGWEGMIAGWHGYTSHGAHGVAVAADLKSTQEAINKITKNLNSLSELEVKNLQRLSGAMDELHNEILELDEKVDDLRADTISSQIELAVLLSNEGIINSEDEHLLALERKLKKMLGPSAVDIGNGCFETKHKCNQTCLDRIAAGTFNAGEFSLPTFDSLNITAASLNDDGLDNHTILLYYSTAASSLAVTLMLAIFIVYMVSRDNVSCSICL

SEQ ID NO: 27528 - protein, 584 aa, Artificial Sequence
  derived and/or modified protein sequence (wt) from hemagglutinin__InfluenzaB__AGX21820
MKAIIVLLMVVTSNADRICTGITSSNSPHVVKTATQGEVNVTGVIPLTTTPTKSYFANLKGTRTRGKLCPDCLNCTDLDVALGRPMCVGTTPSAKASILHEVRPVTSGCFPIMHDRTKIRQLPNLLRGYENIRLSTQNVIDAEKAPGGPYRLGTSGSCPNATNKSGFFATMAWAVPKDNNKNATNPLTVEVPYICTEGEDQITVWGFHSDNKTQMKNLYGDSNPQKFTSSANGVTTHYVSQIGGFPDQTEDGGLPQSGRIVVDYMMQKPGKTGTIVYQRGVLLPQKVWCASGRSKVIKGSLPLIGEADCLHEKYGGLNKSKPYYTGEHAKAIGNCPIWVKTPLKLANGTKYRPPAKLLKERGFFGAIAGFLEGGWEGMIAGWHGYTSHGAHGVAVAADLKSTQEAINKITKNLNSLSELEVKNLQRLSGAMDELHNEILELDEKVDDLRADTISSQIELAVLLSNEGIINSEDEHLLALERKLKKMLGPSAVDIGNGCFETKHKCNQTCLDRIAAGTFNAGEFSLPTFDSLNITAASLNDDGLDNHTILLYYSTAASSLAVTLMLAIFIVYMVSRDNVSCSICL

SEQ ID NO: 27529 - protein, 584 aa, Artificial Sequence; identical to SEQ ID NO: 27023
  derived and/or modified protein sequence (wt) from hemagglutinin__InfluenzaB__AGX21831

SEQ ID NO: 27530 - protein, 584 aa, Artificial Sequence; identical to SEQ ID NO: 27026
  derived and/or modified protein sequence (wt) from hemagglutinin__InfluenzaB__AGX21842

SEQ ID NO: 27531 - protein, 584 aa, Artificial Sequence; identical to SEQ ID NO: 27026
  derived and/or modified protein sequence (wt) from hemagglutinin__InfluenzaB__AGX21853

SEQ ID NO: 27532 - protein, 584 aa, Artificial Sequence
  derived and/or modified protein sequence (wt) from hemagglutinin__InfluenzaB__AGX21864
MKAIIVLLMVVTSNADRICTGITSSNSPHVVKTATQGEVNVTGVIPLTTTPTKSYFANLKGTRTRGKLCPDCLNCTDLDVALGRPMCVGTTPSAKASILHEVRPVTSGCFPIMHDRTKIRQLPNLLRGYENIRLSNQNVIDAEKAPGGPYRLGTSGSCPNATSKSGFFATMAWAVPKDNNKNATNPLTVEVPYICTEGEDQITVWGFHSDNKTQMKNLYGDSNPQKFTSSANGVTTHYVSQIGGFPDQTEDGGLPQSGRIVVDYMMQKPGKTGTIVYQRGVLLPQKVWCASGRSKVIKGSLPLIGEADCLHEKYGGLNKSKPYYTGEHAKAIGNCPIWVKTPLKLANGTKYRPPAKLLKERGFFGAIAGFLEGGWEGMIAGWHGYTSHGAHGVAVAADLKSTQEAINKITKNLNSLSELEVKNLQRLSGAMDELHNEILELDEKVDDLRADTISSQIELAVLLSNEGIINSEDEHLLALERKLKKMLGPSAVDIGNGCFETKHKCNQTCLDRIAAGTFNAGEFSLPTFDSLNITAASLNDDGLDNHTILLYYSTAASSLAVTLMLAIFIVYMVSRDNVSCSICL

SEQ ID NO: 27533 - protein, 584 aa, Artificial Sequence; identical to SEQ ID NO: 27024
  derived and/or modified protein sequence (wt) from hemagglutinin__InfluenzaB__AGX21875

SEQ ID NO: 27534 - protein, 584 aa, Artificial Sequence; identical to SEQ ID NO: 27023
  derived and/or modified protein sequence (wt) from hemagglutinin__InfluenzaB__AGX21886

SEQ ID NO: 27535 - protein, 584 aa, Artificial Sequence; identical to SEQ ID NO: 27023
  derived and/or modified protein sequence (wt) from hemagglutinin__InfluenzaB__AGX21897

SEQ ID NO: 27536 - protein, 584 aa, Artificial Sequence; identical to SEQ ID NO: 27023
  derived and/or modified protein sequence (wt) from hemagglutinin__InfluenzaB__AGX21908

SEQ ID NO: 27537 - protein, 584 aa, Artificial Sequence
  derived and/or modified protein sequence (wt) from hemagglutinin__InfluenzaB__AGX21919
MKAIIVLLMVVTSNADRICTGITSSNSPHVVKTATQGEVNVTGVIPLTTTPTKSYFANLKGTRTRGKLCPDCLNCTDLDVALGRPMCVGTTPSAKASILHEVRPVTSGCFPIMHDRTKIRQLPNLLRGYENIRLSTQNVIDAEKAPGGPYRLGTSGSCPNATSKSGFFATMAWAVPKDNNKNATNPLTVEVPYICTEGEDQITVWGFHSDNKTQMKNLYGDSNPQKFTSSANGVTTHYVSQIGGFPDQTEDGGLPQSGRIVVDYMMQKPGKAGTIVYQRGVLLPQKVWCASGRSKVIKGSLPLIGEADCLHEKYGGLNKSKPYYTGEHAKAIGNCPIWVKTPLKLANGTKYRPPAKLLKERGFFGAIAGFLEGGWEGMIAGWHGYTSHGAHGVAVAADLKSTQEAINKITKNLNSLSELEVKNLQRLSGAMDELHNEILELDEKVDDLRADTISSQIELAVLLSNEGIINSEDEHLLALERKLKKMLGPSAVDIGNGCFETKHKCNQTCLDRIAAGTFNAGEFSLPTFDSLNITAASLNDDGLDNHTILLYYSTAASSLAVTLMLAIFIVYMVSRDNVSCSICL

SEQ ID NO: 27538 - protein, 584 aa, Artificial Sequence; identical to SEQ ID NO: 27026
  derived and/or modified protein sequence (wt) from hemagglutinin__InfluenzaB__AGX21941

SEQ ID NO: 27539 - protein, 584 aa, Artificial Sequence; identical to SEQ ID NO: 27023
  derived and/or modified protein sequence (wt) from hemagglutinin__InfluenzaB__AGX21952

SEQ ID NO: 27540 - protein, 584 aa, Artificial Sequence; identical to SEQ ID NO: 27026
  derived and/or modified protein sequence (wt) from hemagglutinin__InfluenzaB__AGX21963

SEQ ID NO: 27541 - protein, 584 aa, Artificial Sequence
  derived and/or modified protein sequence (wt) from hemagglutinin__InfluenzaB__AGX21974
MKAIIVLLMVVTSNADRICTGITSSNSPHVVKTATQGEVNVTGVIPLTTTPTKSYFANLKGTRTRGKLCPDCLNCTDLDVALGRPMCVGTTPSAKASILHEVRPVTSGCFPIMHDRTKIRQLPNLLRGYENIRLSTQNVIDAEKAPGGPYRLGTSGSCPNATSKSGFFATMAWAVPKVNNKNATNPLTVEVPYICTEGEDQITVWGFHSDNKTQMKNLYGDSNPQKFTSSANGVTTHYVSQIGSFPDQTEDGGLPQSGRIVVDYMMQKPGKTGTIVYQRGVLLPQKVWCASGRSKVIKGSLPLIGEADCLHEKYGGLNKSKPYYTGEHAKAIGNCPIWVKTPLKLANGTKYRPPAKLLKERGFFGAIAGFLEGGWEGMIAGWHGYTSHGAHGVAVAADLKSTQEAINKITKNLNSLSELEVKNLQRLSGAMDELHNEILELDEKVDDLRADTISSQIELAVLLSNEGIINSEDEHLLALERKLKKMLGPSAVDIGNGCFETKHKCNQTCLDRIAAGTFNAGEFSLPTFDSLNITAASLNDDGLDNHTILLYYSTAASSLAVTLMLAIFIVYMISRDNVSCSICL

SEQ ID NO: 27542 - protein, 584 aa, Artificial Sequence; identical to SEQ ID NO: 27026
  derived and/or modified protein sequence (wt) from hemagglutinin__InfluenzaB__AGX21985

SEQ ID NO: 27543 - protein, 584 aa, Artificial Sequence; identical to SEQ ID NO: 27024
  derived and/or modified protein sequence (wt) from hemagglutinin__InfluenzaB__AGX21996

SEQ ID NO: 27544 - protein, 584 aa, Artificial Sequence; identical to SEQ ID NO: 27024
  derived and/or modified protein sequence (wt) from hemagglutinin__InfluenzaB__AGX22007

SEQ ID NO: 27545 - protein, 584 aa, Artificial Sequence; identical to SEQ ID NO: 27023
  derived and/or modified protein sequence (wt) from hemagglutinin__InfluenzaB__AGX22018

SEQ ID NO: 27546 - protein, 584 aa, Artificial Sequence; identical to SEQ ID NO: 27023
  derived and/or modified protein sequence (wt) from hemagglutinin__InfluenzaB__AGX22029

SEQ ID NO: 27547 - protein, 584 aa, Artificial Sequence; identical to SEQ ID NO: 27023
  derived and/or modified protein sequence (wt) from hemagglutinin__InfluenzaB__AGX22040

SEQ ID NO: 27548 - protein, 584 aa, Artificial Sequence
  derived and/or modified protein sequence (wt) from hemagglutinin__InfluenzaB__AGX22051
MKAIIVLLMVVTSNADRICTGITSSNSPHVVKTATQGEVNVTGVIPLTTTPTKSYFANLKGTRTRGKLCPDCLNCTDLDVALGRPMCVGTTPSAKASILHEVRPVTSGCFPIMHDRTKIRQLPNLLRGYENIRLSTQNVIDAEKAPGGPYRLGTSGSCPNATSKSGFFATMAWAVPKDNNKNATNPLTVEVPYICTEGEDQITVWGFHSDNKTQMKNLYGDSNPQKFTSSANGVTTHYVSQIGGFPDQIEDGGLPQSGRIVVDYMMQKPGKTGTIVYQRGVLLPQKVWCASGRSKVIKGSLPLIGEADCLHEKYGGLNKSKPYYTGEHAKAIGNCPIWVKTPLKLANGTKYRPPAKLLKERGFFGAIAGFLEGGWEGMIAGWHGYTSHGAHGVAVAADLKSTQEAINKITKNLNSLSELEVKNLQRLSGAMDALHNEILELDEKVDDLRADTISSQIELAVLLSNEGIINSEDEHLLALERKLKKMLGPSAVEIGNGCFETKHKCNQTCLDRIAAGTFNAGEFSLPTFDSLNITAASLNDDGLDNHTILLYYSTAASSLAVTLMLAIFIVYMVSRDNVSCSICL

SEQ ID NO: 27549 - protein, 584 aa, Artificial Sequence; identical to SEQ ID NO: 27023
  derived and/or modified protein sequence (wt) from hemagglutinin__InfluenzaB__AGX22062

SEQ ID NO: 27550 - protein, 584 aa, Artificial Sequence
  derived and/or modified protein sequence (wt) from hemagglutinin__InfluenzaB__AGX22073
MKAIIVLLMVVTSNADRICTGITSSNSPHVVKTATQGEVNVTGVIPLTTTPTKSYFANLKGTRTRGKLCPDCLNCTDLDVALGRPMCVGTTPSAKASILHEVRPVTSGCFPIMHDRTKIRQLPNLLRGYENIRLSTQNVIDAEKAPGGPYRLGTSGSCPNATSKSGFFATMAWAVPKDNNKNATNPLTVEVPYICTEGEDQITVWGFHSDNKTQMKNLYGDSNPQKFTSSANGVTTHYVSQIGGFPDQTEDGGLPQSGRIVVDYMMQKPGKTGTIVYQRGVLLPQKVWCASGRSKVIKGSLPLIGEADCLHEKYGGLNKSKPYYTGEHAKAIGNCPIWVKTPLKLANGTKYRPPAKLLKERGFFGAIAGFIEGGWEGMIAGWHGYTSHGAHGVAVAADLKSTQEAINKITKNLNSLSELEVKNLQRLSGAMDELHNEILELDEKVDDLRADTISSQIELAVLLSNEGIINSEDEHLLALERKLKKMLGPSAVDIGNGCFETKHKCNQTCLDRIAAGTFNAGDFSLPTFDSLNITAASLNDDGLDNHTILLYYSTAASSLAVTLMLAIFIVYMVSRDNVSCSICL

SEQ ID NO: 27551 - protein, 584 aa, Artificial Sequence; identical to SEQ ID NO: 27026
  derived and/or modified protein sequence (wt) from hemagglutinin__InfluenzaB__AGX22095

SEQ ID NO: 27552 - protein, 584 aa, Artificial Sequence; identical to SEQ ID NO: 27024
  derived and/or modified protein sequence (wt) from hemagglutinin__InfluenzaB__AGX22106

SEQ ID NO: 27553 - protein, 584 aa, Artificial Sequence
  derived and/or modified protein sequence (wt) from hemagglutinin__InfluenzaB__AGX22128
MKAIIVLLMVVTSNADRICTGITSSNSPHVVKTATQGEVNVTGVIPLTTTPTKSYFANLKGTRTRGKLCPDCLNCTDLDVALGRPMCVGTTPSAKASILHEVRPVTSGCFPIMHDRTKIRQLPNLLRGYENIRLSTQNVIDAENAPGGPYRLGTSGSCPNATSKSGFFATMAWAVPKDNNKNATNPLTVEVPYVCTEGEDQITVWGFHSDNKTQMKNLYGDSNPQKFTSSANGVTTHYVSQIGGFPAQTEDGGLPQSGRIVVDYMVQKPRKTGTIVYQRGVLLPQKVWCASGRSKVIKGSLPLIGEADCLHEKYGGLNKSKPYYTGEHAKAIGNCPIWVKTPLKLANGTKYRPPAKLLKERGFFGAIAGFLEGGWEGMIAGWHGYTSHGAHGVAVAADLKSTQEAINKITKNLNSLSELEIKNLQRLSGAMNELHNEILELDEKVDDLRADTISSQIELAVLLSNEGIINSEDEHLLALERKLKKMLGPSAVDIGNGCFETKHKCNQTCLDRIAAGTFNAGEFSLPTFDSLNITAASLNDDGLDNHTILLYYSTAASSLAVTLMLAIFIVYMVSRDNVSCSICL

SEQ ID NO: 27554 - protein, 584 aa, Artificial Sequence
  derived and/or modified protein sequence (wt) from hemagglutinin__InfluenzaB__AGX22139
MKAIIVLLMVVTSNADRICTGITSSNSPHVVKTATQGEVNVTGVIPLTTTPTKSYFANLKGTRTRGKLCPDCLNCTDLDVALGRPMCVGTTPSAEASILHEVRPVTSGCFPIMHDRTKIRQLPNLLRGYENIRLSTQNVIDAEKAPGGPYRLGTSGSCPNATSKSGFFATMAWAVPKDNNKNATNPLTVEVPYICTEGEDQITVWGFHSDNKTQMKNLYGDSNPQKFTSSANGVTTHYVSQIGGFPDQTEDGGLPQSGRIVVDYMMQKPGKTGTIVYQRGVLLPQKVWCASGRSKVIKGSLPLIGEADCLHEKYGGLNKSKPYYTGEHAKAIGNCPIWVKTPLKLANGTKYRPPAKLLKERGFFGAIAGFLEGGWEGMIAGWHGYTSHGAHGVAVAADLKSTQEAINKITKNLNSLSELEVKNLQRLSGAMDELHNEILELDEKVDDLRADTISSQIELAVLLSNEGIINSEDEHLLALERKLKKMLGPSAVDIGNGCFETKHKCNQTCLDRIAAGTFNAGEFSLPTFDSLNITAASLNDDGLDNHTILLYYSTAASSLAVTLMLAIFIVYMVSRDNVSCSICL

SEQ ID NO: 27555 - protein, 584 aa, Artificial Sequence; identical to SEQ ID NO: 27554
  derived and/or modified protein sequence (wt) from hemagglutinin__InfluenzaB__AGX22150

SEQ ID NO: 27556 - protein, 584 aa, Artificial Sequence; identical to SEQ ID NO: 27554
  derived and/or modified protein sequence (wt) from hemagglutinin__InfluenzaB__AGX22161

SEQ ID NO: 27557 - protein, 584 aa, Artificial Sequence; identical to SEQ ID NO: 27023
  derived and/or modified protein sequence (wt) from hemagglutinin__InfluenzaB__AGX22172

SEQ ID NO: 27558 - protein, 584 aa, Artificial Sequence; identical to SEQ ID NO: 27554
  derived and/or modified protein sequence (wt) from hemagglutinin__InfluenzaB__AGX22183

SEQ ID NO: 27559 - protein, 584 aa, Artificial Sequence; identical to SEQ ID NO: 27554
  derived and/or modified protein sequence (wt) from hemagglutinin__InfluenzaB__AGX22194

SEQ ID NO: 27560 - protein, 584 aa, Artificial Sequence; identical to SEQ ID NO: 27554
  derived and/or modified protein sequence (wt) from hemagglutinin__InfluenzaB__AGX22205

SEQ ID NO: 27561 - protein, 584 aa, Artificial Sequence; identical to SEQ ID NO: 27024
  derived and/or modified protein sequence (wt) from hemagglutinin__InfluenzaB__AGX22216

SEQ ID NO: 27562 - protein, 584 aa, Artificial Sequence; identical to SEQ ID NO: 27026
  derived and/or modified protein sequence (wt) from hemagglutinin__InfluenzaB__AGX22227

SEQ ID NO: 27563 - protein, 584 aa, Artificial Sequence
  derived and/or modified protein sequence (wt) from hemagglutinin__InfluenzaB__AGX22238
MKAIIVLLMVVTSNADRICTGITSSNSPHMVKTATQGEVNVTGVIPLTTTPTKSYFANLKGTRTRGKLCPDCLNCTDLDVALGRPMCVGTTPSAKASILHEVRPVTSGCFPIMHDRTKIRQLPNLLRGYENIRLSTQNVIDAEKAPGGPYRLGTSGSCPNATSKSGFFATMAWAVPKDNNKNATNPLTVEVPYICTEGEDQITVWGFHSDNKTQMKNLYGDSNPQKFTSSANGVTTHYVSQIGGFPDQTEDGGLPQSGRIVVDYMMQKPGKTGTIVYQRGVLLPQKVWCASGRSKVIKGSLPLIGEADCLHEKYGGLNKSKPYYTGEHAKAIGNCPIWVKTPLKLANGTKYRPPAKLLKERGFFGAIAGFLEGGWEGMIAGWHGYTSHGAHGVAVAADLKSTQEAINKITKNLNSLSELEVKNLQRLSGAMDELHNEILELDEKVDDLRADTISSQIELAVLLSNEGIINSEDEHLLALERKLKKMLGPSAVDIGNGCFETKHKCNQTCLDRIAAGTFNAGEFSLPTFDSLNITAASLNDDGLDNHTILLYYSTAASSLAVTLMLAIFIVYMVSRDNVSCSICL

SEQ ID NO: 27564 - protein, 584 aa, Artificial Sequence; identical to SEQ ID NO: 27024
  derived and/or modified protein sequence (wt) from hemagglutinin__InfluenzaB__AGX22249

SEQ ID NO: 27565 - protein, 584 aa, Artificial Sequence; identical to SEQ ID NO: 27023
  derived and/or modified protein sequence (wt) from hemagglutinin__InfluenzaB__AGX22260

SEQ ID NO: 27566 - protein, 584 aa, Artificial Sequence
  derived and/or modified protein sequence (wt) from hemagglutinin__InfluenzaB__AGX22271
MKAIIVLLMVVTSNADRICTGITSSNSPHVVKTATQGEVNVTGVIPLTTTPTKSYFANLKGTRTRGKLCPDCLNCTDLDVALGRPMCVGTTPSAKASILHEVRPVTSGCFPIMHDRTKIRQLPNLLRGYENIRLSTQNVIDAEKAPGGPYRLGTSGSCPNATSKSGFFATMAWAVPKDNNKNATNPLTVEVPYICTEGEDQITVWGFHSDNKTQMKNLYGDSNPQKFTSSANGVTTHYVSQIGGFPDQTEDGGLPQSGRIVVDYMMQKPGKTGTIVYQRGVLLPQKVWCASGRSKVIKGSLPLIGEADCLHEKYGGLNKSKPYYTGEHAKAIGNCPIWVKTPLKLANGTKYRPSAKLLKERGFFGAIAGFLEGGWEGMIAGWHGYTSHGAHGVAVAADLKSTQEAINKITKNLNSLSELEVKNLQRLSGAMDELHNEILELDEKVDDLRADTISSQIELAVLLSNEGIINSEDEHLLALERKLKKMLGPSAVEIGNGCFETKHKCNQTCLDRIAAGTFNAGEFSLPTFDSLNITAASLNDDGLDNHTILLYYSTAASSLAVTLMLAIFIVYMVSRDNVSCSICL

SEQ ID NO: 27567 - protein, 584 aa, Artificial Sequence
  derived and/or modified protein sequence (wt) from hemagglutinin__InfluenzaB__AGX22282
MKAIIVLLMVVTSNADRICTGITSSNSPHVVKTATQGEVNVTGVIPLTTTPTKSYFANLKGTRTRGKLCPDCLNCTDLDVALGRPMCVGTTPSAKASILHEVRPVTSGCFPIMHDRTKIRQLPNLLRGYENIRLSTQNVIDAEKAPGGPYRLGTSGSCPNATSKSGFFATMAWAVPKDNNKNATNPLTVEVPYICTEGEDQITVWGFHSDNKTQMKNLYGDSNPQKFTSSANGVTTHYVSQIGDFPDQTEDGGLPQSGRIVVDYMMQKPGKTGTIVYQRGVLLPQKVWCASGRSKVIKGSLPLIGEADCLHEKYGGLNKSKPYYTGEHAKAIGNCPIWVKTPLKLANGTKYRPPAKLLKERGFFGAIAGFLEGGWEGMIAGWHGYTSHGAHGVAVAADLKSTQEAINKITKNLNSLSELEVKNLQRLSGAMDELHNEILELDEKVDDLRADTISSQIELAVLLSNEGIINSEDEHLLALERKLKKMLGPSAVDIGNGCFETKHKCNQTCLDRIAAGTFNAGEFSLPTFDSLNITAASLNDDGLDNHTILLYYSTAASSLAVTLMLAIFIVYMVSRDNVSCSICL

SEQ ID NO: 27568 - protein, 584 aa, Artificial Sequence; identical to SEQ ID NO: 27023
  derived and/or modified protein sequence (wt) from hemagglutinin__InfluenzaB__AGX22293

SEQ ID NO: 27569 - protein, 584 aa, Artificial Sequence
  derived and/or modified protein sequence (wt) from hemagglutinin__InfluenzaB__AGX22304
MKAIIVLLMVVTSNADRICTGITSSNSPHVVKTATQGEVNVTGVIPLTTTPTKSYFANLKGTRTRGKLCPDCLNCTDLDVALGRPMCVGTTPSAKASILHEVRPVTSGCFPIMHDRTKIRQLPNLLRGYENIRLSTQNVIDAEKAPGGPYRLGTSGSCPNATSKSGFFATMAWAVPKDNNKNATNPLTVEVPYICTEGEDQITVWGFHSDNKTQMKNLYGDSNPQKFTSSTNGVTTHYVSQIGGFPDQTEDGGLPQSGRIVVDYMMQKPGKTGTIVYQRGVLLPQKVWCASGRSKVIKGSLPLIGEADCLHEKYGGLNKSKPYYTGEHAKAIGNCPIWVKTPLKLANGTKYRPPAKLLKERGFFGAIAGFLEGGWEGMIAGWHGYTSHGAHGVAVAADLKSTQEAINKITKNLNSLSELEVKNLQRLSGAMDELHNEILELDEKVDDLRADTISSQIELAVLLSNEGIINSEDEHLLALERKLKKMLGPSAVDIGNGCFETKHKCNQTCLDRIAAGTFNAGEFSLPTFDSLNITAASLNDDGLDNHTILLYYSTAASSLAVTLMLAIFIVYMVSRDNVSCSICL

SEQ ID NO: 27570 - protein, 584 aa, Artificial Sequence; identical to SEQ ID NO: 27023
  derived and/or modified protein sequence (wt) from hemagglutinin__InfluenzaB__AGX22315

SEQ ID NO: 27571 - protein, 584 aa, Artificial Sequence; identical to SEQ ID NO: 26426
  derived and/or modified protein sequence (wt) from hemagglutinin__InfluenzaB__AGX22326

SEQ ID NO: 27572 - protein, 584 aa, Artificial Sequence; identical to SEQ ID NO: 27026
  derived and/or modified protein sequence (wt) from hemagglutinin__InfluenzaB__AGX22337

SEQ ID NO: 27573 - protein, 584 aa, Artificial Sequence; identical to SEQ ID NO: 27026
  derived and/or modified protein sequence (wt) from hemagglutinin__InfluenzaB__AGX22348

SEQ ID NO: 27574 - protein, 584 aa, Artificial Sequence
  derived and/or modified protein sequence (wt) from hemagglutinin__InfluenzaB__AGX22359
MKAIIVLLMVVTSNADRICTGITSSNSPHVVKTATQGEVNVTGVIPLTTTPTKSYFANLKGTRTRGKLCPDCLNCTDLDVALGRPMCVGTTPSAKASILHEVRPVTSGCFPIMHDRTKIRQLPNLLRGYENIRLSTQNVIDAENAPGGPYRLGTSGSCPNATSKSGFFATMAWAVPKDNNKNATNPLTVEVPYVCTEGEDQITVWGFHSDNKTQMKNLYGDSNPQKFTSSANGVTTHYVSQIGGFPAQTEDGGLPQSGRIVVDYMVQKPKKTGTIVYQRGVLLPQKVWCASGRSKVIKGSLPLIGEADCLHEKYGGLNKSKPYYTGEHAKAIGNCPIWVKTPLKLANGTKYRPPAKLLKERGFFGAIAGFLEGGWEGMIAGWHGYTSHGAHGVAVAADLKSTQEAINKITKNLNSLSELEIKNLQRLSGAMDELHNEILELDEKVDDLRADTISSQIELAVLLSNEGIINSEDEHLLALERKLKKMLGPSAVDIGNGCFETKHKCNQTCLDRIAAGTFNAGEFSLPTFDSLNITAASLNDDGLDNHTILLYYSTAASSLAVTLMLAIFIVYMVSRDNVSCSICL

SEQ ID NO: 27575 - protein, 584 aa, Artificial Sequence; identical to SEQ ID NO: 27024
  derived and/or modified protein sequence (wt) from hemagglutinin__InfluenzaB__AGX22370

SEQ ID NO: 27576 - protein, 584 aa, Artificial Sequence
  derived and/or modified protein sequence (wt) from hemagglutinin__InfluenzaB__AGX22381
MKAIIVLLMVVTSNADRICTGITSSNSPHVVKTATQGEVNVTGVIPLTTTPTKSYFANLKGTRTRGKLCPDCLNCTDLDVALGRPMCVGTTPSAKASILHEVRPVTSGCFPIMHDRTKIRQLSNLLRGYENIRLSTQNVIDAEKAPGGPYRLGTSGSCPNATSKSGFFATMAWAVPKDNNKNATNPLTVEVPYICTEGEDQITVWGFHSDNKTQMKNLYGDSNPQKFTSSANGVTTHYVSQIGGFPDQTEDGGLPQSGRIVVDYMMQKPGKTGTIVYQRGVLLPQKVWCASGRSKVIKGSLPLIGEADCLHEKYGGLNKSKPYYTGEHAKAIGNCPIWVKTPLKLANGTKYRPPAKLLKERGFFGAIAGFLEGGWEGMIAGWHGYTSHGAHGVAVAADLKSTQEAINKITKNLNSLSELEVKNLQRLSGAMDELHNEILELDEKVDDLRADTISSQIELAVLLSNEGIINSEDEHLLALERKLKKMLGPSAVDIGNGCFETKHKCNQTCLDRIAAGTFNAGEFSLPTFDSLNITAASLNDDGLDNHTILLYYSTAASSLAVTLMLAIFIVYMVSRDNVSCSICL

SEQ ID NO: 27577 - protein, 584 aa, Artificial Sequence; identical to SEQ ID NO: 27023
  derived and/or modified protein sequence (wt) from hemagglutinin__InfluenzaB__AGX22392

SEQ ID NO: 27578 - protein, 584 aa, Artificial Sequence
  derived and/or modified protein sequence (wt) from hemagglutinin__InfluenzaB__AGX22403
MKAIIVLLMVVTSNADRICTGITSSNSPHVVKTATQGEVNVTGVIPLTTTPTKSYFANLKGTRTRGKLCPDCLNCTDLDVALGRPMCVGTTPSAKASILHEVRPVTSGCFPIMHDRTKIRQLPNLLRGYENIRLSTQNVIDAEKAPGGPYRLGTSGSCPNATSKSGFFATMAWAVPKDNNKNATNPLTVEVPYICTEGEDQITVWGFHSDNKTQMKNLYGDSNPQKFTSSANGVTTHYVSQIGGFPDQTEDGGLPQSGRIVVDYMMQKPGKTGTIVYQRGVLLPQKVWCASGRSKVIKGSLPLIGEADCLHEKYGGLNKSKPYYTGEHAKAIGNCPIWVKTPLKLANGTKYRPPAKLLKERGFFGAIAGFLEGGWEGMIAGWHGYTSHGAHGVAVAADLKSTQEAINKITKNLNSLSELEVKNLQRLSGAMDELHNEILELDEKVDDLRADTISSQIELAVLLSNEGIINSEDEHLLALERKLKKMLGPSAVDIGNGCFETKHKCNQTCLDRIAAGTFNAGDFSLPTFDSLNITAASLNDDGLDNHTILLYYSTAASSLAVTLMLAIFIVYMVSRDNVSCSICL

SEQ ID NO: 27579 - protein, 584 aa, Artificial Sequence; identical to SEQ ID NO: 27023
  derived and/or modified protein sequence (wt) from hemagglutinin__InfluenzaB__AGX22414

SEQ ID NO: 27580 - protein, 584 aa, Artificial Sequence
  derived and/or modified protein sequence (wt) from hemagglutinin__InfluenzaB__AGX22425
MKAIIVLLMVVTSNADRICTGITSSNSPHVVKTATQGEVNVTGVIPLTTTPTKSYFANLKGTRTRGKLCPDCLNCTDLDVALGRPMCVGTTPSAKASILHEVRPVTSGCFPIMHDRTKIRQLPNLLRGYENIRLSTQNVIDAEKAPGGPYRLGTSGSCPNATSKSGFFATMAWAVPKDNNKNATNPLTVEVPYICTEGEDQITVWGFHSDNKIQMKNLYGDSNPQKFTSSANGVTTHYVSQIGGFPDQTEDGGLPQSGRIVVDYMMQKPGKTGTIVYQRGVLLPQKVWCASGRSKVIKGSLPLIGEADCLHEKYGGLNKSKPYYTGEHAKAIGNCPIWVKTPLKLANGTKYRPPAKLLKERGFFGAIAGFLEGGWEGMIAGWHGYTSHGAHGVAVAADLKSTQEAINKITKNLNSLSELEVKNLQRLSGAMDELHNEILELDEKVDDLRADTISSQIELAVLLSNEGIINSEDEHLLALERKLKKMLGPSAVEIGNGCFETKHKCNQTCLDRIAAGTFNAGEFSLPTFDSLNITAASLNDDGLDNHTILLYYSTAASSLAVTLMLAIFIVYMVSRDNVSCSICL

SEQ ID NO: 27581 - protein, 584 aa, Artificial Sequence; identical to SEQ ID NO: 27024
  derived and/or modified protein sequence (wt) from hemagglutinin__InfluenzaB__AGX22436

SEQ ID NO: 27582 - protein, 584 aa, Artificial Sequence; identical to SEQ ID NO: 27024
  derived and/or modified protein sequence (wt) from hemagglutinin__InfluenzaB__AGX22445

SEQ ID NO: 27583 - protein, 584 aa, Artificial Sequence
  derived and/or modified protein sequence (wt) from hemagglutinin__InfluenzaB__AGX22456
MKAIIVLLMVVTSNADRICTGITSSSSPHVVKTATQGEVNVTGVIPLTTTPTKSYFANLKGTRTRGKLCPDCLNCTDLDVALGRPMCVGTTPSAKASILHEVRPVTSGCFPIMHDRTKIRQLPNLLRGYENIRLSTQNVIDAEKAPGGPYRLGTSGSCPNATSKSGFFATMAWAVPKDNNKNATNPLTVEVPYICTEGEDQITVWGFHSDNKTQMKNLYGDSNPQKFTSSANGVTTHYVSQIGGFPDQTEDGGLPQSGRIVVDYMMQKPGKTGTIVYQRGVLLPQKVWCASGRSKVIKGSLPLIGEADCLHEKYGGLNKSKPYYTGEHAKAIGNCPIWVKTPLKLANGTKYRPPAKLLKERGFFGAIAGFLEGGWEGMIAGWHGYTSHGAHGVAVAADLKSTQEAINKITKNLNSLSELEVKNLQRLSGAMDELHSEILELDEKVDDLRADTISSQIELAVLLSNEGIINSEDEHLLALERKLKKMLGPSAVDIGNGCFETKHKCNQTCLDRIAAGTFNAGEFSLPTFDSLNITAASLNDDGLDNHTILLYYSTAASSLAVTLMLAIFIVYIVSRDNVSCSICL

SEQ ID NO: 27584 - protein, 584 aa, Artificial Sequence; identical to SEQ ID NO: 27023
  derived and/or modified protein sequence (wt) from hemagglutinin__InfluenzaB__AGX22467

SEQ ID NO: 27585 - protein, 584 aa, Artificial Sequence; identical to SEQ ID NO: 27023
  derived and/or modified protein sequence (wt) from hemagglutinin__InfluenzaB__AGX22478

SEQ ID NO: 27586 - protein, 584 aa, Artificial Sequence
  derived and/or modified protein sequence (wt) from hemagglutinin__InfluenzaB__AGX22489
MKAIIVLLMVVTSNADRICTGITSSNSPHVVKTATQGEVNVTGVIPLTTTPTKSYFANLKGTRTRGKLCPDCLNCTDLDVALGRPMCVGTTPSAKASILHEVRPVTSGCFPIMHDRTKIRQLPNLLRGYENIRLSTQSAIDAEKAPGGPYRLGTSGSCPNATSKSGFFATMAWAVPKDNNKNATNPLTVEVPYICTEGEDQITVWGFHSDNKTQMKNLYGDSNPQKFTSSANGVTTHYVSQIGGFPGQTEDGGLPQSGRIVVDYMIQKPGKTGTIVYQRGVLLPQKVWCASGRSKVIKGSLPLIGEADCLHEKYGGLNKSKPYYTGEHAKAIGNCPIWVKTPLKLANGTKYRPPAKLLKERGFFGAIAGFLEGGWEGMIAGWHGYTSHGAHGVAVAADLKSTQEAINKITKNLNSLSELEVKNLQRLSGAMDELHNEILELDEKVDDLRADTISAQIELAVLLSNEGIINSEDEHLLALERKLKKMLGPSAVDIGNGCFETKHKCNQTCLDRIAAGTFNAGEFSLPTFDSLNITAASLNDDGLDNHTILLYYSTAASSLAVTLMLAIFIVYMVSRDNVSCSICL

SEQ ID NO: 27587 - protein, 584 aa, Artificial Sequence
  derived and/or modified protein sequence (wt) from hemagglutinin__InfluenzaB__AGX22500
MKAIIVLLMVVTSNADRICTGITSSNSPHVVKTATQGEVNVTGVIPLTTTPTKSYFANLKGTRTRGKLCPDCLNCTDLDVALGRPMCVGTTPSAKASILHEVRPVTSGCFPIMHDRTKIRQLPNLLRGYENIRLSTQNVIDAENAPGGPYRLGTSGSCPNATSKSGFFATMAWAVPKDNNKNATNPLTVEVPYICTEGEDQITVWGFHSDNKTQMKNLYGDSNPQKFTSSANGVTTHYVSQIGGFPAQTEDGGLPQSGRIIVDYMVQKPRKTGTIVYQRGVLLPQKVWCASGRSKVIKGSLPLIGEADCLHEKYGGLNKSKPYYTGEHAKAIGNCPIWVKTPLKLANGTKYRPPAKLLKERGFFGAIAGFLEGGWEGMIAGWHGYTSHGAHGVAVAADLKSTQEAINKITKNLNSLSELEVKNLQRLSGAMDELHNEILELDEKVDDLRADTISSQIELAVLLSNEGIINSEDEHLLALERKLKKMLGPSAVDIGNGCFETKHKCNQTCLDRIAAGTFNAGEFSLPTFDSLNITAASLNDDGLDNHTILLYYSTVASSLAVTLMLAIFIVYMVSRDNVSCSICL

SEQ ID NO: 27588 - protein, 584 aa, Artificial Sequence; identical to SEQ ID NO: 27024
  derived and/or modified protein sequence (wt) from hemagglutinin__InfluenzaB__AGX22511

SEQ ID NO: 27589 - protein, 584 aa, Artificial Sequence
  derived and/or modified protein sequence (wt) from hemagglutinin__InfluenzaB__AGX22522
MKAIIVLLMVVTSNADRICTGITSSNSPHVVKTATQGEVNVTGVIPLTTTPTKSYFANLKGTRTRGKLCPDCLNCTDLDVALGRPMCVGTTPSAKASILHEVRPVTSGCFPIMHDRTKIRQLANLLRGYENIRLSTQNVIDAEKAPGGPYRLGTSGSCPNATSKSGFFATMAWAVPKDNNKNATNPLTVEVPYICTEGEDQITVWGFHSDNKTQMKNLYGDSNPQKFTSSANGVTKHYVSQIGGFPDQTEDGGLPQSGRIVVDYMMQKPGKTGTIVYQRGVLLPQKVWCASGRSKVIKGSLPLIGEADCLHEKYGGLNKSKPYYTGEHAKAIGNCPIWVKTPLKLANGTKYRPPAKLLKERGFFGAIAGFLEGGWEGMIAGWHGYTSHGAHGVAVAADLKSTQEAINKITKNLNSLSELEVKNLQRLSGAMDELHNEILELDEKVDDLRADTISSQIELAVLLSNEGIINSEDEHLLALERKLKKMLGPSAVDIGNGCFETKHKCNQTCLDRIAAGTFNAGEFSLPTFDSLNITAASLNDDGLDNHTILLYYSTAASSLAVTLMLAIFIVYMVSRDNVSCSICL

SEQ ID NO: 27590 - protein, 584 aa, Artificial Sequence; identical to SEQ ID NO: 26426
  derived and/or modified protein sequence (wt) from hemagglutinin__InfluenzaB__AGX22533

SEQ ID NO: 27591 - protein, 584 aa, Artificial Sequence; identical to SEQ ID NO: 27038
  derived and/or modified protein sequence (wt) from hemagglutinin__InfluenzaB__AGX22566

SEQ ID NO: 27592 - protein, 584 aa, Artificial Sequence; identical to SEQ ID NO: 27024
  derived and/or modified protein sequence (wt) from hemagglutinin__InfluenzaB__AGX22577

SEQ ID NO: 27593 - protein, 584 aa, Artificial Sequence; identical to SEQ ID NO: 27038
  derived and/or modified protein sequence (wt) from hemagglutinin__InfluenzaB__AGX22588

SEQ ID NO: 27594 - protein, 584 aa, Artificial Sequence; identical to SEQ ID NO: 26426
  derived and/or modified protein sequence (wt) from hemagglutinin__InfluenzaB__AGX22599

SEQ ID NO: 27595 - protein, 584 aa, Artificial Sequence
  derived and/or modified protein sequence (wt) from hemagglutinin__InfluenzaB__AGX22610
MKAIIVLLMVVTSNADRICTGITSSNSPHVVKTATQGEVNVTGVIPLTTTPTKSYFANLKGTRTRGKLCPDCLNCTDLDVALGRPMCVGTTPSAKASILHEVRPVTSGCFPIMHDRTKIRQLPNLLRGYENIRLSTQNVIDAEKAPGGPYRLGTSGSCPNATSKSGFFATMAWAVPKDNNKNATNPLTVEVPYICTEGEDQITVWGFHSDNKTQMKNLYGDPNPQKFTSSANGVTTHYVSQIGGFPDQTEDGGLPQSGRIVVDYMMQKPGKTGTIVYQRGVLLPQKVWCASGRSKVIKGSLPLIGEADCLHEKYGGLNKSKPYYTGEHAKAIGNCPIWVKTPLKLANGTKYRPPAKLLKERGFFGAIAGFLEGGWEGMIAGWHGYTSHGAHGVAVAADLKSTQEAINKITKNLNSLSELEVKNLQRLSGAMDELHNEILELDEKVDDLRADTISSQIELAVLLSNEGIINSEDEHLLALERKLKKMLGPSAVDIGNGCFETKHKCNQTCLDRIAAGTFNAGEFSLPTFDSLNITAASLNDDGLDNHTILLYYSTAASSLAVTLMLAIFIVYMVSRDNVSCSICL

SEQ ID NO: 27596 - protein, 584 aa, Artificial Sequence
  derived and/or modified protein sequence (wt) from hemagglutinin__InfluenzaB__AGX22621
MKAIIVLLMVVTSNADRICTGITSSNSPHVVKTATQGEVNVTGVIPLTTTPTKSYFANLKGTRTRGKLCPDCLNCTDLDVALGRPMCVGTTPSAKASILHEVRPVTSGCFPIMHDRTKIRQLANLLRGYENIRLSTQNVIDAEKAPGGPYRLGTSGSCPNATSKSGFFATMAWAVPKDNNKNATNPLTVEVPYICTGGEDQITVWGFHSDNKTQMKNLYGDSNPQKFTSSANGVTTHYVSQIGGFPDQTEDGGLPQSGRIVVDYMMQKPGKTGTIVYQRGVLLPQKVWCASGRSKVIKGSLPLIGEADCLHEKYGGLNKSKPYYTGEHAKAIGNCPIWVKTPLKLANGTKYRPPAKLLKERGFFGAIAGFLEGGWEGMIAGWHGYTSHGAHGVAVAADLKSTQEAINKITKNLNSLSELEVKNLQRLSGAMDELHNEILELDEKVDDLRADTISSQIELAVLLSNEGIINSEDEHLLALERKLKKMLGPSAVDIGNGCFETKHKCNQTCLDRIAAGTFNAGEFSLPTFDSLNITAASLNDDGLDNHTILLYYSTAASSLAVTLMLAIFIVYMVSRDNVSCSICL

SEQ ID NO: 27597 - protein, 584 aa, Artificial Sequence; identical to SEQ ID NO: 26426
  derived and/or modified protein sequence (wt) from hemagglutinin__InfluenzaB__AGX22632

SEQ ID NO: 27598 - protein, 584 aa, Artificial Sequence
  derived and/or modified protein sequence (wt) from hemagglutinin__InfluenzaB__AGX22643
MKAIIVLLMVVTSNADRICTGITSSNSPHVVKTATQGEVNVTGVIPLTTTPTKSYFANLKGTRTRGKLCPDCLNCTDLDVALGRPMCVGTTPSAKASILHEVRPVTSGCFPIMHDRTKIRQLANLLRGYENIRLSIQNVIDAEKAPGGPYRLGTSGSCPNATSKSGFFATMAWAVPKDNNKNATNPLTVEVPYICTEGEDQITVWGFHSDNKTQMKNLYGDSNPQKFTSSANGVTTHYVSQIGGFPDQTEDGGLPQSGRIVVDYMMQKPGKTGTIVYQRGVLLPQKVWCASGRSKVIKGSLPLIGEADCLHEKYGGLNKSKPYYTGEHAKAIGNCPIWVKTPLKLANGTKYRPPAKLLKERGFFGAIAGFLEGGWEGMIAGWHGYTSHGAHGVAVAADLKSTQEAINKITKNLNSLSELEVKNLQRLSGAMDELHNEILELDEKVDDLRADTISSQIELAVLLSNEGIINSEDEHLLALERKLKKMLGPSAVDIGNGCFETKHKCNQTCLDRIAAGTFNAGEFSLPTFDSLNITAASLNDDGLDNHTILLYYSTAASSLAVTLMLAIFIVYMVSRDNVSCSICL

SEQ ID NO: 27599 - protein, 584 aa, Artificial Sequence
  derived and/or modified protein sequence (wt) from hemagglutinin__InfluenzaB__AGX22654
MKAIIVLLMVVTSNADRICTGITSSNSPHVVKTATQGEVNVTGVIPLTTTPTKSYFANLKGTRTRGKLCPDCLNCTDLDVALGRPMCVGTTPSAKASILHEVRPVTSGCFPIMHDRTKIRQLANLLRGYENIRLSTQNVIDAEKAPGGPYRLGTSGSCPNATSKSGFFATMAWAVPKDNNKNATNPLTVEVPYICTEGEDQITVWGFHSDNKTQMKNLYGDSNPQKFTSSANGVTTHYVSQIGGFPDQTEDGGLPQSGRIVVDYMMQKPGKTGTIVYQRGVLLPQKVWCASGRSKVIKGSLPLIGEADCLHEKYGGLNKSKPYYTGEHAKAIGNCPIWVKTPLKLANGTKYRPPAKLLKERGFFGAIAGFLEGGWEGMIAGWHGYTSHGAHGVAVAADLKSTQEAINKITKNLNSLSELEVKNLQRLSGAMDELHSEILELDEKVDDLRADTISSQIELAVLLSNEGIINSEDEHLLALERKLKKMLGPSAVDIGNGCFETKHKCNQTCLDRIAAGTFNAGEFSLPTFDSLNITAASLNDDGLDNHTILLYYSTAASSLAVTLMLAIFIVYMVSRDNVSCSICL

SEQ ID NO: 27600 - protein, 584 aa, Artificial Sequence; identical to SEQ ID NO: 27038
  derived and/or modified protein sequence (wt) from hemagglutinin__InfluenzaB__AGX22665

SEQ ID NO: 27601 - protein, 584 aa, Artificial Sequence; identical to SEQ ID NO: 27038
  derived and/or modified protein sequence (wt) from hemagglutinin__InfluenzaB__AGX22676

SEQ ID NO: 27602 - protein, 584 aa, Artificial Sequence; identical to SEQ ID NO: 26426
  derived and/or modified protein sequence (wt) from hemagglutinin__InfluenzaB__AGX22687

SEQ ID NO: 27603 - protein, 584 aa, Artificial Sequence; identical to SEQ ID NO: 27038
  derived and/or modified protein sequence (wt) from hemagglutinin__InfluenzaB__AGX22698

SEQ ID NO: 27604 - protein, 584 aa, Artificial Sequence
  derived and/or modified protein sequence (wt) from hemagglutinin__InfluenzaB__AGX22709
MKAIIVLLMVVTSNADRICTGITSSNSPHVVKTATQGEVNVTGVIPLTTTPTKSYFANLKGTRTRGKLCPDCLNCTDLDVALGRPMCVGTTPSAKASILHEVRPVTSGCFPIMHDRTKIRQLANLLRGYENIRLSTQNVIDAEKAPGGPYRLGTSGSCPNATSKSGFFATMAWAVPKDNNKNATNPLTVEVPYICTEGEDQITVWGFHSDNKTQMKNLYGDSNPQKFTSSANGVTTHYVSQIGGFPDQTEDGGLPQSGRIVVDYMMQKPEKTGTIVYQRGVLLPQKVWCASGRSKVIKGSLPLIGEADCLHEKYGGLNKSKPYYTGEHAKAIGNCPIWVKTPLKLANGTKYRPPAKLLKERGFFGAIAGFLEGGWEGMIAGWHGYTSHGAHGVAVAADLKSTQEAINKITKNLNSLSELEVKNLQRLSGAMDELHNEILELDEKVDDLRADTISSQIELAVLLSNEGIINSEDEHLLALERKLKKMLGPSAVDIGNGCFETKHKCNQTCLDRIAAGTFNAGEFSLPTFDSLNITAASLNDDGLDNHTILLYYSTAASSLAVTLMLAIFIVYMVSRDNVSCSICL

SEQ ID NO: 27605 - protein, 584 aa, Artificial Sequence
  derived and/or modified protein sequence (wt) from hemagglutinin__InfluenzaB__AGX22720
MKAIIVLLMVVTSNADRICTGITSSNSPHVVKTATQGEVNVTGVIPLTTTPTKSYFANLKGTRTRGKLCPDCLNCTDLDVALGRPMCVGTTPSAKASILHEVRPVTSGCFPIMHDRTKIRQLPNLLRGYENIRLSTQNVIDAEKAPGGPYRLGTSGSCPNATSKSGFFATMAWAVPKDNNKNATNPLTVEVPYICTEGEDQITVWGFHSDNKTQMKNLYGDSNPQKFTSSANGATTHYVSQIGGFPDQTEDGGLPQSGRIVVDYMMQKPGKTGTIVYQRGVLLPQKVWCASGRSKVIKGSLPLIGEADCLHEKYGGLNKSKPYYTGEHAKAIGNCPIWVKTPLKLANGTKYRPPAKLLKERGFFGAIAGFLEGGWEGMIAGWHGYTSHGAHGVAVAADLKSTQEAINKITKNLNSLSELEVKNLQRLSGAMDELHNEILELDEKVDDLRADTISSQIELAVLLSNEGIINSEDEHLLALERKLKKMLGPSAVDIGNGCFETKHKCNQTCLDRIAAGTFNAGEFSLPTFDSLNITAASLNDDGLDNHTILLYYSTAASSLAVTLMLAIFIVYMVSRDNVSCSICL

SEQ ID NO: 27606 - protein, 584 aa, Artificial Sequence; identical to SEQ ID NO: 27038
  derived and/or modified protein sequence (wt) from hemagglutinin__InfluenzaB__AGX22731

SEQ ID NO: 27607 - protein, 584 aa, Artificial Sequence; identical to SEQ ID NO: 27599
  derived and/or modified protein sequence (wt) from hemagglutinin__InfluenzaB__AGX22742

SEQ ID NO: 27608 - protein, 584 aa, Artificial Sequence
  derived and/or modified protein sequence (wt) from hemagglutinin__InfluenzaB__AGX22753
MKAIIVLLMVVTSNADRICTGITSSNSPHVVKTATQGEVNVTGVIPLTTTPAKSYFANLKGTRTRGKLCPDCLNCTDLDVALGRPMCVGTTPSAKASILHEVRPVTSGCFPIMHDRTKIRQLANLLRGYENIRLSTQNVIDAEKAPGGPYRLGTSGSCPNATSKSGFFATMAWAVPKDNNKNATNPLTVEVPYICKEGEDQITVWGFHSDNKTQMKNLYGDSNPQKFTSSANGVTTHYVSQIGGFPDQTEDGGLPQSGRIVVDYMIQKPGKTGTIVYQRGVLLPQKVWCASGRSKVIKGSLPLIGEADCLHEKYGGLNKSKPYYTGEHAKAIGNCPIWVKTPLKLANGTKYRPPAKLLKERGFFGAIAGFLEGGWEGMIAGWHGYTSHGAHGVAVAADLKSTQEAINKITKNLNSLSELEVKNLQRLSGAMDELHNEILELDEKVDDLRADTISSQIELAVLLSNEGIINSEDEHLLALERKLKKMLGPSAVDIGNGCFETKHKCNQTCLDRIAAGTFNAGEFSLPTFDSLNITAASLNDDGLDNHTILLYYSTAASSLAVTLMLAIFIVYMVSRDNVSCSICL

SEQ ID NO: 27609 - protein, 584 aa, Artificial Sequence
  derived and/or modified protein sequence (wt) from hemagglutinin__InfluenzaB__AGX22764
MKAIIVLLMVVTSNADRICTGITSSNSPHVVKTATQGEVNVTGVIPLTTTPTKSYFANLKGTRTRGKLCPDCLNCTDLDVALGRPMCVGTTPSAKASILHEVRPVTSGCFPIMHDRTKIRQLANLLRGYENIRLSTQNVIDAEKAPGGPYRLGTSGSCPNATSKSGFFATMAWAVPKDNNKNATNPLTVEVPYICKEGEDQITVWGFHSDNKTQMKNLYGDSNPQKFTSSANGVTTHYVSQIGGFPDQTEDGGLPQSGRIVVDYMIQKPGKTGTIVYQRGVLLPQKVWCASGRSKVIKGSLPLIGEADCLHEKYGGLNKSKPYYTGDHAKAIGNCPIWVKTPLKLANGTKYRPPAKLLKERGFFGAIAGFLEGGWEGMIAGWHGYTSHGAHGVAVAADLKSTQEAINKITKNLNSLSELEVKNLQRLSGAMDELHNEILELDEKVDDLRADTISSQIELAVLLSNEGIINSEDEHLLALERKLKKMLGPSAVDIGNGCFETKHKCNQTCLDRIAAGTFNAGEFSLPTFDSLNITAASLNDDGLDNHTILLYYSTAASSLAVTLMLAIFIVYMVSRDNVSCSICL

SEQ ID NO: 27610 - protein, 584 aa, Artificial Sequence
  derived and/or modified protein sequence (wt) from hemagglutinin__InfluenzaB__AGX22775
MKAIIVLLMVVTSNADRICTGITSSNSPHVVKTATQGEVNVTGVIPLTTTPTKSYFANLKGTRTRGKLCPDCLNCTDLDVALGRPMCVGTTPSAKASILHEVRPVTSGCFPIMHDRTKIRQLPNLLRGYENIRLSTQNVIDAEKAPGGPYRLGTSGSCPNATSKSGFFATMAWAVPKDNNKNATNPLTVEVPYICTEGEDQITVWGFHSDNKTQMKNLYGDSNPQKFTSSANGVTTHYVSQIGGFPDQTEDGGLPQSGRIVVDYMMQKPGKTGTIVYQRGVLLPQKVWCASGRSKVIKGSLPLIGEADCLHEKYGGLNKSKPYYTGEHAKAIGNCPIWVKTPLKLANGTKYRPPAKLLKERGFFGAIAGFLEGGWEGMIAGWHGYTSHGAHGVAVAADLKSTQEAINKITKNLNSLSELEVKNLQRLSGAMDELHNEILELDEKVDDLRADTISSQIELAVLLSNEGIINSEDEHLLALERRLKKMLGPSAVEIGNGCFETKHKCNQTCLDRIAAGTFNAGEFSLPTFDSLNITAASLNDDGLDNHTILLYYSTAASSLAVTLMLAIFIVYMVSRDNVSCSICL

SEQ ID NO: 27611 - protein, 584 aa, Artificial Sequence; identical to SEQ ID NO: 27038
  derived and/or modified protein sequence (wt) from hemagglutinin__InfluenzaB__AGX22786

SEQ ID NO: 27612 - protein, 584 aa, Artificial Sequence
  derived and/or modified protein sequence (wt) from hemagglutinin__InfluenzaB__AGX22797
MKAIIVLLMVVTSNADRICTGITSSNSPHVVKTATQGEVNVTGVIPLTTTPTKSYFANLKGTRTRGKLCPDCLNCTDLDVALGRPMCVGTTPSAKASILHEVRPVTSGCFPIMHDRTKIRQLANLLRGYENIRLSTQNVIDAEKAPGGPYRLGTSGSCPNATSKSGFFATMAWAVPKDNNKNATNPLTVEVPYICKEGEDQITVWGFHSDNKTQMKNLYGDSNPQKFTSSANGVTTHYVSQIGGFPDQTEDGGLPQSGRIVVDYMIQKPGKTGTIVYQRGVLFPQKVWCASGRSKVIKGSLPLIGEADCLHEKYGGLNKSKPYYTGEHAKAIGNCPIWVKTPLKLANGTKYRPPAKLLKERGFFGAIAGFLEGGWEGMIAGWHGYTSHGAHGVAVAADLKSTQEAINKITKNLNSLSELEVKNLQRLSGAMDELHNEILELDEKVDDLRADTISSQIELAVLLSNEGIINSEDEHLLALERKLKKMLGPSAVDIGNGCFETKHKCNQTCLDRIAAGTFNAGEFSLPTFDSLNITAASLNDDGLDNHTILLYYSTAASSLAVTLMLAIFIVYMVSRDNVSCSICL

SEQ ID NO: 27613 - protein, 584 aa, Artificial Sequence; identical to SEQ ID NO: 27038
  derived and/or modified protein sequence (wt) from hemagglutinin__InfluenzaB__AGX22808

SEQ ID NO: 27614 - protein, 584 aa, Artificial Sequence; identical to SEQ ID NO: 27038
  derived and/or modified protein sequence (wt) from hemagglutinin__InfluenzaB__AGX22819

SEQ ID NO: 27615 - protein, 584 aa, Artificial Sequence; identical to SEQ ID NO: 27038
  derived and/or modified protein sequence (wt) from hemagglutinin__InfluenzaB__AGX22830

SEQ ID NO: 27616 - protein, 584 aa, Artificial Sequence
  derived and/or modified protein sequence (wt) from hemagglutinin__InfluenzaB__AGX22841
MKAIIVLLMVVTSNADRICTGITSSNSPHVVKTATQGEVNVTGVIPLTTTPTKSYFANLKGTRTRGKLCPDCLNCTDLDVALGRPMCVGTTPSAKASILHEVRPVTSGCFPIMHDRTKIRQLANLLRGYENIRLSTQNVIDAEKAPGGPYRLGTSGSCPNATSKSGFFATMAWAVPKDNNKNATNPLTVEVPYICKEGEDQITVWGFHSDNKTQMKNLYGDSNPQKFTSSADGVTTHYVSQIGGFPDQTEDGGLPQSGRIVVDYMIQKPGKTGTIVYQRGVLLPQKVWCASGRSKVIKGSLPLIGEADCLHEKYGGLNKSKPYYTGEHAKAIGNCPIWVKTPLKLANGTKYRPPAKLLKERGFFGAIAGFLEGGWEGMIAGWHGYTSHGAHGVAVAADLKSTQEAINKITKNLNSLSELEVKNLQRLSGAMDELHNEILELDEKVDDLRADTISSQIELAVLLSNEGIINSEDEHLLALERKLKKMLGPSAVDIGNGCFETKHKCNQTCLDRIAAGTFNAGEFSLPTFDSLNITAASLNDDGLDNHTILLYYSTAASSLAVTLMLAIFIVYMVSRDNVSCSICL

SEQ ID NO: 27617 - protein, 584 aa, Artificial Sequence; identical to SEQ ID NO: 26426
  derived and/or modified protein sequence (wt) from hemagglutinin__InfluenzaB__AGX22852

SEQ ID NO: 27618 - protein, 584 aa, Artificial Sequence; identical to SEQ ID NO: 27038
  derived and/or modified protein sequence (wt) from hemagglutinin__InfluenzaB__AGX22863

SEQ ID NO: 27619 - protein, 584 aa, Artificial Sequence; identical to SEQ ID NO: 27038
  derived and/or modified protein sequence (wt) from hemagglutinin__InfluenzaB__AGX22874

SEQ ID NO: 27620 - protein, 584 aa, Artificial Sequence; identical to SEQ ID NO: 26426
  derived and/or modified protein sequence (wt) from hemagglutinin__InfluenzaB__AGX22885

SEQ ID NO: 27621 - protein, 584 aa, Artificial Sequence; identical to SEQ ID NO: 27599
  derived and/or modified protein sequence (wt) from hemagglutinin__InfluenzaB__AGX22896

SEQ ID NO: 27622 - protein, 584 aa, Artificial Sequence
  derived and/or modified protein sequence (wt) from hemagglutinin__InfluenzaB__AGX22907
MKAIIVLLMVVTSNADRICTGITSSNSPHVVKTATQGEVNVTGVIPLTTTPTKSYFANLKGTRTRGKLCPDCLNCTDLDVALGRPMCVGTTPSAKASILHEVRPVTSGCFPIMHDRTKIRQLANLLRGYENIRLSTQNVIDAEKAPGGPYRLGTSGSCPNATSKSGFFATMAWAVPKDNNKNATNPLTVEVPYICTEGEDQITVWGFHSDNKTQMKNLYGDSNPQKFTSSANGVTTHYVSQIGGFPDQTEDGGLPQSGRIVVDYMMQKPGKTGTIVYQRGVLLPQKVWCASGRSKVIKGSLPLIGEADCLHEKYGGLNKSKPYYTGEHAKAIGNCPIWVKTPLKLANGTKYRPPAKLLKERGFFGAIAGFLEGGWEGMIAGWHGYTSHGAHGVAVAADLKSTQEAINKITKNLNSLSELEVKNLQRLSGAMDELHNEILELDEKVDDLRADTISSQIELAVLLSNEGIINSEDEHLLALERKLKKMLGPSAVDIGNGCFETKHKCNQTCLDRIAAGTFNAGEFSLPTFDSLNITAASLNDDGLDNHTILLYYSTAASSLAVTLMLAIFIVYMVSRDSVSCSICL

SEQ ID NO: 27623 - protein, 584 aa, Artificial Sequence; identical to SEQ ID NO: 26426
  derived and/or modified protein sequence (wt) from hemagglutinin__InfluenzaB__AGX22918

SEQ ID NO: 27624 - protein, 584 aa, Artificial Sequence; identical to SEQ ID NO: 26426
  derived and/or modified protein sequence (wt) from hemagglutinin__InfluenzaB__AGX22929

SEQ ID NO: 27625 - protein, 584 aa, Artificial Sequence; identical to SEQ ID NO: 27038
  derived and/or modified protein sequence (wt) from hemagglutinin__InfluenzaB__AGX22940

SEQ ID NO: 27626 - protein, 584 aa, Artificial Sequence; identical to SEQ ID NO: 26426
  derived and/or modified protein sequence (wt) from hemagglutinin__InfluenzaB__AGX22951

SEQ ID NO: 27627 - protein, 584 aa, Artificial Sequence; identical to SEQ ID NO: 26426
  derived and/or modified protein sequence (wt) from hemagglutinin__InfluenzaB__AGX22962

SEQ ID NO: 27628 - protein, 584 aa, Artificial Sequence; identical to SEQ ID NO: 26426
  derived and/or modified protein sequence (wt) from hemagglutinin__InfluenzaB__AGX22973

SEQ ID NO: 27629 - protein, 584 aa, Artificial Sequence; identical to SEQ ID NO: 26426
  derived and/or modified protein sequence (wt) from hemagglutinin__InfluenzaB__AGX22984

SEQ ID NO: 27630 - protein, 584 aa, Artificial Sequence; identical to SEQ ID NO: 26426
  derived and/or modified protein sequence (wt) from hemagglutinin__InfluenzaB__AGX22995

SEQ ID NO: 27631 - protein, 584 aa, Artificial Sequence; identical to SEQ ID NO: 26426
  derived and/or modified protein sequence (wt) from hemagglutinin__InfluenzaB__AGX23006

SEQ ID NO: 27632 - protein, 584 aa, Artificial Sequence
  derived and/or modified protein sequence (wt) from hemagglutinin__InfluenzaB__AGX23017
MKAIIVLLMVVTSNADRICTGITSSNSPHVVKTATQGEVNVTGVIPLTTTPTKSYFANLKGTRTRGKLCPDCLNCTDLDVALGRPMCVGTTPSAKASILHEIRPVTSGCFPIMHDRTKIRQLANLLRGYENIRLSTQNVIDAEKAPGGPYRLGTSGSCPNATSKSGFFATMAWAVPKDNNKNATNPLTVEVPYICTEGEDQITVWGFHSDNKTQMKNLYGDSNPQKFTSSANGVTTHYVSQIGGFPDQTEDGGLPQSGRIVVDYMMQKPGKTGTIVYQRGVLLPQKVWCASGRSKVIKGSLPLIGEADCLHEKYGGLNKSKPYYTGEHAKAIGNCPIWVKTPLKLANGTKYRPPAKLLKERGFFGAIAGFLEGGWEGMIAGWHGYTSHGAHGVAVAADLKSTQEAINKITKNLNSLSELEVKNLQRLSGAMDELHNEILELDEKVDDLRADTISSQIELAVLLSNEGIINSEDEHLLALERKLKKMLGPSAVDIGNGCFETKHKCNQTCLDRIAAGTFNAGEFSLPTFDSLNITAASLNDDGLDNHTILLYYSTAASSLAVTLMLAIFIVYMVSRDNVSCSICL

SEQ ID NO: 27633 - protein, 584 aa, Artificial Sequence
  derived and/or modified protein sequence (wt) from hemagglutinin__InfluenzaB__AGX23028
MKAIIVLLMVVTSNADRICTGITSSNSPHVVKTATQGEVNVTGVIPLTTTPTKSYFANLKGTKTRGKLCPDCLNCTDLDVALGRPMCVGTTPSAKASILHEVRPVTSGCFPIMHDRTKIRQLANLLRGYENIRLSTQNVIDAEKAPGGPYKLGTSGSCPNATSKSGFFATMAWAVPKDNNKNATNPLTVEVPYICTEGEDQITVWGFHSDNKTQMKNLYGDSNPQKFTSSANGVTTHYVSQIGGFPDQTEDGGLPQSGRIVVDYMMQKPGKTGTIVYQRGVLLPQKVWCASGRSKVIKGSLPLIGEADCLHEKYGGLNKSKPYYTGEHAKAIGNCPIWVKTPLKLANGTKYRPPAKLLKERGFFGAIAGFLEGGWEGMIAGWHGYTSHGAHGVAVAADLKSTQEAINKITKNLNSLSELEVKNLQRLSGAMDELHNEILELDEKVDDLRADTISSQIELAVLLSNEGIINSEDEHLLALERKLKKMLGPSAVDIGNGCFETKHKCNQTCLDRIAAGTFNAGEFSLPTFDSLNITAASLNDDGLDNHTILLYYSTAASSLAVTLMLAIFIVYMVSRDNVSCSICL

SEQ ID NO: 27634 - protein, 584 aa, Artificial Sequence; identical to SEQ ID NO: 26426
  derived and/or modified protein sequence (wt) from hemagglutinin__InfluenzaB__AGX23039

SEQ ID NO: 27635 - protein, 584 aa, Artificial Sequence
  derived and/or modified protein sequence (wt) from hemagglutinin__InfluenzaB__AGX23050
MKAIIVLLMVVTSNADRICTGITSSNSPHVVKTATQGEVNVTGVIPLTTTPTKSYFANLKGTRTRGKLCPDCLNCTDLDVALGRPMCVGTTPSAKASILHEVSPVTSGCFPIMHDRTKIRQLANLLRGYENIRLSTQNVIDAEKAPGGPYRLGTSGSCPNATSKSGFFATMAWAVPKDNNKNATNPLTVEVPYICTEGEDQITVWGFHSDNKTQMKNLYGDSNPQKFTSSANGVTTHYVSQIGGFPDQTEDGGLPQSGRIVVDYMMQKPGKTGTIVYQRGVLLPQKVWCASGRSKVIKGSLPLIGEADCLHEKYGGLNKSKPYYTGEHAKAIGNCPIWVKTPLRLANGTKYRPPAKLLKERGFFGAIAGFLEGGWEGMIAGWHGYTSHGAHGVAVAADLKSTQEAINKITKNLNSLSELEVKNLQRLSGAMDELHNEILELDEKVDDLRADTISSQIELAVLLSNEGIINSEDEHLLALERKLKKMLGPSAVDIGNGCFETKHKCNQTCLDRIAAGTFNAGEFSLPTFDSLNITAASLNDDGLDNHTILLYYSTAASSLAVTLMLAIFIVYMVSRDNVSCSICL

SEQ ID NO: 27636 - protein, 584 aa, Artificial Sequence
  derived and/or modified protein sequence (wt) from hemagglutinin__InfluenzaB__AGX23061
MKAIIVLLMVVTSNADRICTGITSSNSPHVVKTATQGEVNVTGVIPLTTTPTKSYFANLKGTRTRGKLCPDCLNCTDLDVALGRPMCVGTTPSAKASILHEVRPVTSGCFPIMHDRTKIRQLANLLRGYENIRLSTQNVIDAEKAPGGPYRLGTSGSCPNATSKSGFFATMAWAVPKDNNKNATNPLTVEVPYICTEGEDQITVWGFHSDNKTQMKNLYGDSNPQKFTSSANGVTTHYVSQIGGFPDQTEDGGLPQSGRIVVDYMMQKPGKTGTIVYQRGVLLPQKVWCASGRSKVIKGSLPLIGEADCLHEKYGGLNKSKPYYTGEHAKAIGNCPIWVKTPLRLANGTKYRPPAKLLKERGFFGAIAGFLEGGWEGMIAGWHGYTSHGAHGVAVAADLKSTQEAINKITKNLNSLSELEVKNLQRLSGAMDELHNEILELDEKVDDLRADTISSQIELAVLLSNEGIINSEDEHLLALERKLKKMLGPSAVDIGNGCFETKHKCNQTCLDRIAAGTFNAGEFSLPTFDSLNITAASLNDDGLDNHTILLYYSTAASSLAVTLMLAIFIVYMVSRDNVSCSICL

SEQ ID NO: 27637 - protein, 584 aa, Artificial Sequence; identical to SEQ ID NO: 26426
  derived and/or modified protein sequence (wt) from hemagglutinin__InfluenzaB__AGX23072

SEQ ID NO: 27638 - protein, 584 aa, Artificial Sequence; identical to SEQ ID NO: 27038
  derived and/or modified protein sequence (wt) from hemagglutinin__InfluenzaB__AGX23083

SEQ ID NO: 27639 - protein, 584 aa, Artificial Sequence; identical to SEQ ID NO: 26426
  derived and/or modified protein sequence (wt) from hemagglutinin__InfluenzaB__AGX23094

SEQ ID NO: 27640 - protein, 584 aa, Artificial Sequence; identical to SEQ ID NO: 26426
  derived and/or modified protein sequence (wt) from hemagglutinin__InfluenzaB__AGX23105

SEQ ID NO: 27641 - protein, 584 aa, Artificial Sequence; identical to SEQ ID NO: 27038
  derived and/or modified protein sequence (wt) from hemagglutinin__InfluenzaB__AGX23116

SEQ ID NO: 27642 - protein, 584 aa, Artificial Sequence; identical to SEQ ID NO: 26426
  derived and/or modified protein sequence (wt) from hemagglutinin__InfluenzaB__AGX23127

SEQ ID NO: 27643 - protein, 584 aa, Artificial Sequence; identical to SEQ ID NO: 26426
  derived and/or modified protein sequence (wt) from hemagglutinin__InfluenzaB__AGX23138

SEQ ID NO: 27644 - protein, 584 aa, Artificial Sequence
  derived and/or modified protein sequence (wt) from hemagglutinin__InfluenzaB__AGX23149
MKAIIVLLMVVTSNADRICTGITSSDSPHVVKTATQGEVNVTGVIPLTTTPTKSYFANLKGTRTRGKLCPDCLNCTDLDVALGRPMCVGTTPSAKASILHEVRPVTSGCFPIMHDRTKIRQLANLLRGYENIRLSTQNVIDAEKAPGGPYRLGTSGSCPNATSKSGFFATMAWAVPKDNNKNATNPLTVEVPYICTEGEDQITVWGFHSDNKTQMKNLYGDSNPQKFTSSANGVTTHYVSQIGGFPDQTEDGGLPQSGRIVVDYMMQKPGKTGTIVYQRGVLLPQKVWCASGRSKVIKGSLPLIGEADCLHEKYGGLNKSKPYYTGEHAKAIGNCPIWVKTPLKLANGTKYRPPAKLLKERGFFGAIAGFLEGGWEGMIAGWHGYTSHGAHGVAVAADLKSTQEAINKITKNLNSLSELEVKNLQRLSGAMDELHNEILELDEKVDDLRADTISSQIELAVLLSNEGIINSEDEHLLALERKLKKMLGPSAVDIGNGCFETKHKCNQTCLDRIAAGTFNAGEFSLPTFDSLNITAASLNDDGLDNHTILLYYSTAASSLAVTLMLAIFIVYMVSRDNVSCSICL

SEQ ID NO: 27645 - protein, 584 aa, Artificial Sequence
  derived and/or modified protein sequence (wt) from hemagglutinin__InfluenzaB__AGX23160
MKAIIVLLMVVTSNADRICTGITSSNSPHVVKTATQGEVNVTGVIPLTTTPTKSYFANLKGTRTRGKLCPDCLNCTDLDVALGRPMCVGITPSAKASILHEVRPVTSGCFPIMHDRTKIRQLANLLRGYENIRLSTQNVIDAEKAPGGPYRLGTSGSCPNATSKSGFFATMAWAVPKDNNKNATNPLTVEVPYICTEGEDQITVWGFHSDNKTQMKNLYGDSNPQRFTSSANGVTTHYVSQIGGFPDQTEDGGLPQSGRIVVDYMMQKPGKTGTIVYQRGVLLPQKVWCASGRSKVIKGSLPLIGEADCLHEKYGGLNKSKPYYTGEHAKAIGNCPIWVKTPLRLANGTKYRPPAKLLKERGFFGAIAGFLEGGWEGMIAGWHGYTSHGAHGVAVAADLKSTQEAINKITKNLNSLSELEVKNLQRLSGAMDELHNEILELDEKVDDLRADTISSQIELAVLLSNEGIINSEDEHLLALERKLKKMLGPSAVDIGNGCFETKHKCNQTCLDRIAAGTFNAGEFSLPTFDSLNITAASLNDDGLDNHTILLYYSTAASSLAVTLMLAIFIVYMVSRDNVSCSICL

SEQ ID NO: 27646 - protein, 584 aa, Artificial Sequence
  derived and/or modified protein sequence (wt) from hemagglutinin__InfluenzaB__AGX23171
MKAIIVLLMVVTSNADRICTGITSSNSPHVVKTATQGEVNVTGVIPLTTTPTKSYFANLKGTRTRGKLCPDCLNCTDLDVALGRPMCVGTTPSAKASILHEVRPVTSGCFPIMHDRTKIRQLANLLRGYENIRLSTQNVIDAEKAPGGPYRLGTSGSCPNATSKSGFFATMAWAVPKDNNKNATNPLTVEVPYICTEGEDQITVWGFHSDNKTQMKNLYGDSNPQRFTSSANGVTTHYVSQIGGFPDQTEDGGLPQSGRIVVDYMMQKPGKTGTIVYQRGVLLPQKVWCASGRSKVIKGSLPLIGEADCLHEKYGGLNKSKPYYTGEHAKAIGNCPIWVKTPLRLANGTKYRPPAKLLKERGFFGAIAGFLEGGWEGMIAGWHGYTSHGAHGVAVAADLKSTQEAINKITKNLNSLSELEVKNLQRLSGAMDELHNEILELDEKVDDLRADTISSQIELAVLLSNEGIINSEDEHLLALERKLKKMLGPSAVDIGNGCFETKHKCNQTCLDRIAAGTFNAGEFSLPTFDSLNITAASLNDDGLDNHTILLYYSTAASSLAVTLMLAIFIVYMVSRDNVSCSICL

SEQ ID NO: 27647 - protein, 584 aa, Artificial Sequence; identical to SEQ ID NO: 26426
  derived and/or modified protein sequence (wt) from hemagglutinin__InfluenzaB__AGX23182

SEQ ID NO: 27648 - protein, 584 aa, Artificial Sequence; identical to SEQ ID NO: 26426
  derived and/or modified protein sequence (wt) from hemagglutinin__InfluenzaB__AGX23193

SEQ ID NO: 27649 - protein, 584 aa, Artificial Sequence; identical to SEQ ID NO: 27038
  derived and/or modified protein sequence (wt) from hemagglutinin__InfluenzaB__AGX23204

SEQ ID NO: 27650 - protein, 584 aa, Artificial Sequence; identical to SEQ ID NO: 26426
  derived and/or modified protein sequence (wt) from hemagglutinin__InfluenzaB__AGX23215

SEQ ID NO: 27651 - protein, 584 aa, Artificial Sequence
  derived and/or modified protein sequence (wt) from hemagglutinin__InfluenzaB__AGX23226
MKAIIVLLMVVTSNADRICTGITSSNSPHVVKTATQGEVNVTGVIPLTTTPTKSYFANLKGTRTRGKLCPDCLNCTDLDVALGRPMCVGTTPSAKASILHEVRPVTSGCFPIMHDRTKIRQLANLLRGYENIRLSTQNVIDAEKAPGGPYRLGTSGSCPNATSKSGFFATMAWAVPKDNNKNATNPLTVEVPYICKEGEDQITVWGFHSDNKTQMKNLYGDSNPQKFTSSASGVTTHYVSQIGGFPDQTEDGGLPQSGRIVVDYMIQKPGKTGTIVYQRGVLLPQKVWCASGRSKVIKGSLPLIGEADCLHEKYGGLNKSKPYYTGEHAKAIGNCPIWVKTPLKLANGTKYRPPAKLLKERGFFGAIAGFLEGGWEGMIAGWHGYTSHGAHGVAVAADLKSTQEAINKITKNLNSLSELEVKNLQRLSGAMDELHNEILELDEKVDDLRADTISSQIELAVLLSNEGIINSEDEHLLALERKLKKMLGPSAVDIGNGCFETKHKCNQTCLDRIAAGTFNAGEFSLPTFDSLNITAASLNDDGLDNHTILLYYSTAASSLAVTLMLAIFIVYMVSRDNVSCSICL

SEQ ID NO: 27652 - protein, 584 aa, Artificial Sequence; identical to SEQ ID NO: 27599
  derived and/or modified protein sequence (wt) from hemagglutinin__InfluenzaB__AGX23237

SEQ ID NO: 27653 - protein, 584 aa, Artificial Sequence
  derived and/or modified protein sequence (wt) from hemagglutinin__InfluenzaB__AGX23248
MKAIIVLLMVVTSNADRICTGITSSNSPHVVKTATQGEVNVTGVIPLTTTPTKSYFANLKGTRTRGKLCPDCLNCTDLDVALGRPMCVGTTPSAKASILHEVRPVTSGCFPIMHDRTKIRQLANLLRGYENIRLSTQNVIDAEKAPGGPYRLGTSGSCPNATSKSGFFATMAWAVPKDNNKNATNPLTVEVPYICKEGEDQITVWGFHSDNKTQMKNLYGDSNPQKFTSSASGVTTHYVSQIGGFPDQTEDGGLPQSGRIVVDYMIQKPGKTGTIVYQRGVLLPQKVWCASGRSKVIKGSLPLIGEADCLHEKYGGLNKSKPYYTGEHAKAIGNCPIWVKTPLKLANGTKYRPPAKLLKERGFFGAIAGFLEGGWEGMIAGWHGYTSHGAHGVAVAADLKSTQEAINKITKNLNSLSELEVKNLQRLSGAMDELHNEILELDEKVDDLRADTISSQIELAVLLSNEGIINSEDEHLLALERKLKKMLGPSAVDIGNGCFETKHKCNQTCLNRIAAGTFNAGEFSLPTFDSLNITAASLNDDGLDNHTILLYYSTAASSLAVTLMLAIFIVYMVSRDNVSCSICL

SEQ ID NO: 27654 - protein, 584 aa, Artificial Sequence; identical to SEQ ID NO: 26426
  derived and/or modified protein sequence (wt) from hemagglutinin__InfluenzaB__AGX23259

SEQ ID NO: 27655 - protein, 584 aa, Artificial Sequence; identical to SEQ ID NO: 26426
  derived and/or modified protein sequence (wt) from hemagglutinin__InfluenzaB__AGX23270

SEQ ID NO: 27656 - protein, 584 aa, Artificial Sequence
  derived and/or modified protein sequence (wt) from hemagglutinin__InfluenzaB__AGX23281
MKAIIVLLMVVTSNADRICTGITSSNSPHVVKTATQGEVNVTGVIPLTTTPTKSYFANLKGTRTRGKLCPDCLNCTDLDVALGRPMCVGTTPSAKASILHEVRPVTSGCFPIMHDRTKIRQLANLLRGYENIRLSTQNVIDAEKAPGGPYRLGTSGSCPNAASKSGFFATMAWAVPKDNNKNATNPLTVEVPYICTEGEDQITVWGFHSDNKTQMKNLYGDSNPQKFTSSANGVTTHYVSQIGGFPDQTEDGGLPQSGRIVVDYMMQKPGKTGTIVYQRGVLLPQKVWCASGRSKVIKGSLPLIGEADCLHEKYGGLNKSKPYYTGEHAKAIGNCPIWVKTPLKLANGTKYRPPAKLLKERGFFGAIAGFLEGGWEGMIAGWHGYTSHGAHGVAVAADLKSTQEAINKITKNLNSLSELEVKNLQRLSGAMDELHSEILELDEKVDDLRADTISSQIELAVLLSNEGIINSEDEHLLALERKLKKMLGPSAVDIGNGCFETKHKCNQTCLDRIAAGTFNAGEFSLPTFDSLNITAASLNDDGLDNHTILLYYSTAASSLAVTLMLAIFIVYMVSRDNVSCSICL

SEQ ID NO: 27657 - protein, 584 aa, Artificial Sequence
  derived and/or modified protein sequence (wt) from hemagglutinin__InfluenzaB__AGX23292
MKAIIVLLMVVTSNADRICTGITSSNSPHVVKTATQGEVNVTGVIPLTTTPTKSYFANLKGTRTRGKLCPDCLNCTDLDVALGRPMCVGTTPSAKASILHEVRPVTSGCFPIMHDRTKIRQLANLLRGYENIRLSTQNVIDAEKAPGGPYRLGTSGSCPNANSKSGFFATMAWAVPKDNNKNATNPLTVEVPYICTEGEDQITVWGFHSDNKTQMKNLYGDSNPQKFTSSANGVTTHYVSQIGGFPDQTEDGGLPQSGRIVVDYMMQKPGKTGTIVYQRGVLLPQKVWCASGRSKVIKGSLPLIGEADCLHEKYGGLNKSKPYYTGEHAKAIGNCPIWVKTPLKLANGTKYRPPAKLLKERGFFGAIAGFLEGGWEGMIAGWHGYTSHGAHGVAVAADLKSTQEAINKITKNLNSLSELEVKNLQRLSGAMDELHNEILELDEKVDDLRADTISSQIELAVLLSNEGIINSEDEHLLALERKLKKMLGPSAVDIGNGCFETKHKCNQTCLDRIAAGTFNAGEFSLPTFDSLNITAASLNDDGLDNHTILLYYSTAASSLAVTLMLAIFIVYMVSRDNVSCSICL

SEQ ID NO: 27658 - protein, 584 aa, Artificial Sequence
  derived and/or modified protein sequence (wt) from hemagglutinin__InfluenzaB__AGX23314
MKAIIVLLMVVTSNADRICTGITSSNSPHVVKTATQGEVNVTGVIPLTTTPTKSYFANLKGTRTRGKLCPDCLNCTDLDVALGRPMCVGTTPSAKASILHEVRPVTSGCFPIMHDRTKIRQLANLLRGYENIRLSTQNVIDAERAPGGPYRLGTSGSCPNATSKSGFFATMAWAVPKDNNKNATNPLTVEVPYICTEGEDQITVWGFHSDNKTQMKNLYGDSNPQKFTSSANGVTTHYVSQIGGFPDQTEDGGLPQSGRIVVDYMMQKPGKTGTIVYQRGVLLPQKVWCASGRSKVIKGSLPLIGEADCLHEKYGGLNKSKPYYTGEHAKAIGNCPIWVKTPLKLANGTKYRPPAKLLKERGFFGAIAGFLEGGWEGMIAGWHGYTSHGAHGVAVAADLKSTQEAINKITKNLNSLSELEVKNLQRLSGAMDELHNEILELDEKVDDLRADTISSQIELAVLLSNEGIINSEDEHLLALERKLKKMLGPSAVDIGNGCFETKHKCNQTCLDRIAAGTFNAGEFSLPTFDSLNITAASLNDDGLDNHTILLYYSTAASSLAVTLMLAIFIVYMVSRDNVSCSICL

SEQ ID NO: 27659 - protein, 584 aa, Artificial Sequence; identical to SEQ ID NO: 27658
  derived and/or modified protein sequence (wt) from hemagglutinin__InfluenzaB__AGX23325

SEQ ID NO: 27660 - protein, 584 aa, Artificial Sequence; identical to SEQ ID NO: 27658
  derived and/or modified protein sequence (wt) from hemagglutinin__InfluenzaB__AGX23336

SEQ ID NO: 27661 - protein, 584 aa, Artificial Sequence; identical to SEQ ID NO: 27658
  derived and/or modified protein sequence (wt) from hemagglutinin__InfluenzaB__AGX23347

SEQ ID NO: 27662 - protein, 584 aa, Artificial Sequence; identical to SEQ ID NO: 27658
  derived and/or modified protein sequence (wt) from hemagglutinin__InfluenzaB__AGX23358

SEQ ID NO: 27663 - protein, 584 aa, Artificial Sequence; identical to SEQ ID NO: 27658
  derived and/or modified protein sequence (wt) from hemagglutinin__InfluenzaB__AGX23369

SEQ ID NO: 27664 - protein, 584 aa, Artificial Sequence; identical to SEQ ID NO: 27658
  derived and/or modified protein sequence (wt) from hemagglutinin__InfluenzaB__AGX23380

SEQ ID NO: 27665 - protein, 584 aa, Artificial Sequence; identical to SEQ ID NO: 26426
  derived and/or modified protein sequence (wt) from hemagglutinin__InfluenzaB__AGX23391

SEQ ID NO: 27666 - protein, 584 aa, Artificial Sequence
  derived and/or modified protein sequence (wt) from hemagglutinin__InfluenzaB__AGX23413
MKAIIVLLMVVTSNADRICTGITSSNSPHVVKTATQGEVNVTGVIPLTTTPTKSYFANLKGTRTRGKLCPDCLNCTDLDVALGRPMCVGTTPSAKASILHEVRPVTSGCFPIMHDRTKIRQLANLLRGYENIRLSNQNVIDAERAPGGPYRLGTSGSCPNATSKSGFFATMAWAVPKDNNKNATNPLTVEVPYICTEGEDQITVWGFHSDNKTQMKNLYGDSNPQKFTSSANGVTTHYVSQIGGFPDQTEDGGLPQSGRIVVDYMMQKPGKTGTIVYQRGVLLPQKVWCASGRSKVIKGSLPLIGEADCLHEKYGGLNKSKPYYTGEHAKAIGNCPIWVKTPLKLANGTKYRPPAKLLKERGFFGAIAGFLEGGWEGMIAGWHGYTSHGAHGVAVAADLKSTQEAINKITKNLNSLSELEVKNLQRLSGAMDELHNEILELDEKVDDLRADTISSQIELAVLLSNEGIINSEDEHLLALERKLKKMLGPSAVDIGNGCFETKHKCNQTCLDRIAAGTFNAGEFSLPTFDSLNITAASLNDDGLDNHTILLYYSTAASSLAVTLMLAIFIVYMVSRDNVSCSICL

SEQ ID NO: 27667 - protein, 584 aa, Artificial Sequence; identical to SEQ ID NO: 27666
  derived and/or modified protein sequence (wt) from hemagglutinin__InfluenzaB__AGX23424

SEQ ID NO: 27668 - protein, 584 aa, Artificial Sequence; identical to SEQ ID NO: 26820
  derived and/or modified protein sequence (wt) from hemagglutinin__InfluenzaB__AGX23435

SEQ ID NO: 27669 - protein, 584 aa, Artificial Sequence; identical to SEQ ID NO: 26731
  derived and/or modified protein sequence (wt) from hemagglutinin__InfluenzaB__AGX23446

SEQ ID NO: 27670 - protein, 584 aa, Artificial Sequence; identical to SEQ ID NO: 26820
  derived and/or modified protein sequence (wt) from hemagglutinin__InfluenzaB__AGX23457

SEQ ID NO: 27671 - protein, 584 aa, Artificial Sequence; identical to SEQ ID NO: 26731
  derived and/or modified protein sequence (wt) from hemagglutinin__InfluenzaB__AGX23468

SEQ ID NO: 27672 - protein, 584 aa, Artificial Sequence; identical to SEQ ID NO: 26426
  derived and/or modified protein sequence (wt) from hemagglutinin__InfluenzaB__AGX23479

SEQ ID NO: 27673 - protein, 584 aa, Artificial Sequence; identical to SEQ ID NO: 26426
  derived and/or modified protein sequence (wt) from hemagglutinin__InfluenzaB__AGX23490

SEQ ID NO: 27674 - protein, 584 aa, Artificial Sequence; identical to SEQ ID NO: 27047
  derived and/or modified protein sequence (wt) from hemagglutinin__InfluenzaB__AGX23501

SEQ ID NO: 27675 - protein, 584 aa, Artificial Sequence
  derived and/or modified protein sequence (wt) from hemagglutinin__InfluenzaB__AGX23512
MKAIIVLLMVVTSNADRICTGITSSNSPHVVKTATQGEVNVTGVIPLTTTPTKSYFANLKGTKTRGKLCPDCLNCTDLDVALGRPMCVGTTPSAKASILHEVRPVTSGCFPIMHDRTKIRQLANLLRGYENIRLSTQNVIDAEKAPGGPYRLGTSGSCPNATSKSGFFATMAWAVPKDNNKNATNPLTVEVPYICTEGEDQITVWGFHSDNKTQMKTLYGDSNPQKFTSSANGVTTHYVSQIGGFPDQTEDGGLPQSGRIVVDYMMQKPGKTGTIVYQRGVLLPQKVWCASGRSKVIKGSLPLIGEADCLHEKYGGLNKSKPYYTGEHAKAIGNCPIWVKTPLKLANGTKYRPPAKLLKERGFFGAIAGFLEGGWEGMIAGWHGYTSHGAHGVAVAADLKSTQEAINKITKNLNSLSELEVKNLQRLSGAMDELHNEILELDEKVDDLRADTISSQIELAVLLSNEGIINSEDEHLLALERKLKKMLGPSAVDIGNGCFETKHKCNQTCLDRIAAGTFNAGEFSLPTFDSLNITAASLNDDGLDNHTILLYYSTAASSLAVTLMLAIFIVYMVSRDNVSCSICL

SEQ ID NO: 27676 - protein, 584 aa, Artificial Sequence; identical to SEQ ID NO: 26426
  derived and/or modified protein sequence (wt) from hemagglutinin__InfluenzaB__AGX23523

SEQ ID NO: 27677 - protein, 584 aa, Artificial Sequence; identical to SEQ ID NO: 26731
  derived and/or modified protein sequence (wt) from hemagglutinin__InfluenzaB__AGX23534

SEQ ID NO: 27678 - protein, 584 aa, Artificial Sequence; identical to SEQ ID NO: 26731
  derived and/or modified protein sequence (wt) from hemagglutinin__InfluenzaB__AGX23545

SEQ ID NO: 27679 - protein, 584 aa, Artificial Sequence; identical to SEQ ID NO: 26426
  derived and/or modified protein sequence (wt) from hemagglutinin__InfluenzaB__AGX23556

SEQ ID NO: 27680 - protein, 584 aa, Artificial Sequence; identical to SEQ ID NO: 26426
  derived and/or modified protein sequence (wt) from hemagglutinin__InfluenzaB__AGX23567

SEQ ID NO: 27681 - protein, 584 aa, Artificial Sequence; identical to SEQ ID NO: 26426
  derived and/or modified protein sequence (wt) from hemagglutinin__InfluenzaB__AGX23578

SEQ ID NO: 27682 - protein, 584 aa, Artificial Sequence; identical to SEQ ID NO: 26426
  derived and/or modified protein sequence (wt) from hemagglutinin__InfluenzaB__AGX23600

SEQ ID NO: 27683 - protein, 584 aa, Artificial Sequence
  derived and/or modified protein sequence (wt) from hemagglutinin__InfluenzaB__AGX23611
MKAIIVLLMVVTSNADRICTGITSSNSPHVVKTATQGEVNVTGVIPLTTTPTKSYFANLKGTRTRGKLCPDCLNCTDLDVALGRPMCVGTTPSAKASILHEVRPVTSGCFPIMHDRTKIRQLANLLRGYENIRLSTQNVIDAEKAPGGPYRLGTSGSCPNATSKSGFFATMAWAVPKDNNKNATNPLTVEVPYICTEGEDQITVWGFHSDNKTQMKNLYGDSNPQKFTSSANGVTTHYVSQIGGFPDQTEDGGLPQSGRIVVDYMMQKPGKTGTIVYQRGVLLPQKVWCASGRSKVIKGSLPLIGEADCLHEKYGGLNKSKPYYTGEHAKAIGNCPIWVKTPLKLANGTKYRPPAKLLKERGFFGAIAGFLEGGWEGMIAGWHGYTSHGAHGVAVAADLKSTQEAINKITKNLNSLSELEIKNLQRLSGAMDELHNEILELDEKVDDLRADTISSQIELAVLLSNEGIINSEDEHLLALERKLKKMLGPSAVDIGNGCFETKHKCNQTCLDRIAAGTFNAGEFSLPTFDSLNITAASLNDDGLDNHTILLYYSTAASSLAVTLMLAIFIVYMVSRDNVSCSICL

SEQ ID NO: 27684 - protein, 584 aa, Artificial Sequence; identical to SEQ ID NO: 26426
  derived and/or modified protein sequence (wt) from hemagglutinin__InfluenzaB__AGX23622

SEQ ID NO: 27685 - protein, 584 aa, Artificial Sequence; identical to SEQ ID NO: 26731
  derived and/or modified protein sequence (wt) from hemagglutinin__InfluenzaB__AGX23633

SEQ ID NO: 27686 - protein, 584 aa, Artificial Sequence; identical to SEQ ID NO: 26731
  derived and/or modified protein sequence (wt) from hemagglutinin__InfluenzaB__AGX23644

SEQ ID NO: 27687 - protein, 584 aa, Artificial Sequence; identical to SEQ ID NO: 26426
  derived and/or modified protein sequence (wt) from hemagglutinin__InfluenzaB__AGX23655

SEQ ID NO: 27688 - protein, 584 aa, Artificial Sequence; identical to SEQ ID NO: 26731
  derived and/or modified protein sequence (wt) from hemagglutinin__InfluenzaB__AGX23666

SEQ ID NO: 27689 - protein, 584 aa, Artificial Sequence
  derived and/or modified protein sequence (wt) from hemagglutinin__InfluenzaB__AGX23677
MKAIIVLLMVVTSNADRICTGITSSNSPHVVKTATQGEVNVTGVIPLTTTPTKSYFANLKGTKTRGKLCPDCLNCTDLDVALGRPMCVGTTPSAKASILHEVRPVTSGCFPIMHDRTKIRQLANLLRGYEKIRLSTQNVIDAEKAPGGPYRLGTSGSCPNATSKSGFFATMAWAVPKDNNKNATNPLTVEVPYICIEGEDQITVWGFHSDNKTQMKNLYGDSNPQKFTSSANGVTTHYVSQIGGFPDQTEDGGLPQSGRIVVDYMMQKPGKTGTIVYQRGVLLPQKVWCASGRSKVIKGSLPLIGEADCLHEKYGGLNKSKPYYTGEHAKAIGNCPIWVKTPLKLANGTKYRPPAKLLKERGFFGAIAGFLEGGWEGMIAGWHGYTSHGAHGVAVAADLKSTQEAINKITKNLNSLSELEVKNLQRLSGAMDELHNEILELDEKVDDLRADTISSQIELAVLLSNEGIINSEDEHLLALERKLKKMLGPSAVDIGNGCFETKHKCNQTCLDRIAAGTFNAGEFSLPTFDSLNITAASLNDDGLDNHTILLYYSTAASSLAVTLMLAIFIVYMVSRDNVSCSICL

SEQ ID NO: 27690 - protein, 584 aa, Artificial Sequence; identical to SEQ ID NO: 26731
  derived and/or modified protein sequence (wt) from hemagglutinin__InfluenzaB__AGX23688

SEQ ID NO: 27691 - protein, 584 aa, Artificial Sequence; identical to SEQ ID NO: 26731
  derived and/or modified protein sequence (wt) from hemagglutinin__InfluenzaB__AGX23699

SEQ ID NO: 27692 - protein, 584 aa, Artificial Sequence; identical to SEQ ID NO: 26426
  derived and/or modified protein sequence (wt) from hemagglutinin__InfluenzaB__AGX23710

SEQ ID NO: 27693 - protein, 584 aa, Artificial Sequence; identical to SEQ ID NO: 26731
  derived and/or modified protein sequence (wt) from hemagglutinin__InfluenzaB__AGX23721

SEQ ID NO: 27694 - protein, 584 aa, Artificial Sequence; identical to SEQ ID NO: 26426
  derived and/or modified protein sequence (wt) from hemagglutinin__InfluenzaB__AGX23732

SEQ ID NO: 27695 - protein, 584 aa, Artificial Sequence; identical to SEQ ID NO: 26731
  derived and/or modified protein sequence (wt) from hemagglutinin__InfluenzaB__AGX23743

SEQ ID NO: 27696 - protein, 584 aa, Artificial Sequence; identical to SEQ ID NO: 26731
  derived and/or modified protein sequence (wt) from hemagglutinin__InfluenzaB__AGX23754

SEQ ID NO: 27697 - protein, 584 aa, Artificial Sequence; identical to SEQ ID NO: 26426
  derived and/or modified protein sequence (wt) from hemagglutinin__InfluenzaB__AGX23765

SEQ ID NO: 27698 - protein, 584 aa, Artificial Sequence; identical to SEQ ID NO: 26731
  derived and/or modified protein sequence (wt) from hemagglutinin__InfluenzaB__AGX23776

SEQ ID NO: 27699 - protein, 584 aa, Artificial Sequence; identical to SEQ ID NO: 26731
  derived and/or modified protein sequence (wt) from hemagglutinin__InfluenzaB__AGX23787

SEQ ID NO: 27700 - protein, 584 aa, Artificial Sequence; identical to SEQ ID NO: 26426
  derived and/or modified protein sequence (wt) from hemagglutinin__InfluenzaB__AGX23798

SEQ ID NO: 27701 - protein, 584 aa, Artificial Sequence; identical to SEQ ID NO: 26426
  derived and/or modified protein sequence (wt) from hemagglutinin__InfluenzaB__AGX23809

SEQ ID NO: 27702 - protein, 584 aa, Artificial Sequence; identical to SEQ ID NO: 26426
  derived and/or modified protein sequence (wt) from hemagglutinin__InfluenzaB__AGX23820

SEQ ID NO: 27703 - protein, 584 aa, Artificial Sequence; identical to SEQ ID NO: 26731
  derived and/or modified protein sequence (wt) from hemagglutinin__InfluenzaB__AGX23831

SEQ ID NO: 27704 - protein, 584 aa, Artificial Sequence; identical to SEQ ID NO: 26426
  derived and/or modified protein sequence (wt) from hemagglutinin__InfluenzaB__AGX23842

SEQ ID NO: 27705 - protein, 584 aa, Artificial Sequence
  derived and/or modified protein sequence (wt) from hemagglutinin__InfluenzaB__AGX23853
MKAIIVLLMVVTSNADRICTGITSSNSPHVVKTATQGEVNVTGVIPLTTTPTKSYFANLKGTRTRGKLCPDCLNCTDLDVALGRPMCVGTTPSAKASILHEVRPVTSGCFPIMHDRTKIRQLANLLRGYENIRLSIQNVIDAEKAPGGPYRLGTSGSCPNATSKSGFFATMAWAVPKDNNKNATNPLTVEVPYICTEGEDQITVWGFHSDNKTQMKNLYGDSNPQKFTSSANGVTTHYVSQIGGFPDQTEDGGLPQSGRIVVDYMMQKSGKTGTIVYQRGVLLPQKVWCASGRSKVIKGSLPLIGEADCLHEKYGGLNKSKPYYTGEHAKAIGNCPIWVKTPLKLANGTKYRPPAKLLKERGFFGAIAGFLEGGWEGMIAGWHGYTSHGAHGVAVAADLKSTQEAINKITKNLNSLSELEVKNLQRLSGAMDELHNEILELDEKVDDLRADTISSQIELAVLLSNEGIINSEDEHLLALERKLKKMLGPSAVDIGNGCFETKHKCNQTCLDRIAAGTFNAGEFSLPTFDSLNITAASLNDDGLDNHTILLYYSTAASSLAVTLMLAIFIVYMVSRDNVSCSICL

SEQ ID NO: 27706 - protein, 584 aa, Artificial Sequence; identical to SEQ ID NO: 26426
  derived and/or modified protein sequence (wt) from hemagglutinin__InfluenzaB__AGX23864

SEQ ID NO: 27707 - protein, 584 aa, Artificial Sequence; identical to SEQ ID NO: 26731
  derived and/or modified protein sequence (wt) from hemagglutinin__InfluenzaB__AGX23875

SEQ ID NO: 27708 - protein, 584 aa, Artificial Sequence; identical to SEQ ID NO: 26426
  derived and/or modified protein sequence (wt) from hemagglutinin__InfluenzaB__AGX23886

SEQ ID NO: 27709 - protein, 584 aa, Artificial Sequence
  derived and/or modified protein sequence (wt) from hemagglutinin__InfluenzaB__AGX23897
MKAIIVLLMVVTSNADRICTGITSSNSPHVVKTATQGEVNVTGVIPLTTTPTKSYFANLKGTRTRGKLCPDCLNCTDLDVALGRPMCVGTTPSAKASILHEVRPVTSGCFPIMHDRTKIRQLANLLRGYENIRLSTQNVIDAEKAPGGPYRLGTSGSCPNATSKSGFFATMAWAVPKDNNKNATNPLTVEVPYICTEGEDQITVWGFHSDNKTQMKNLYGDSNPQKFTSSANGVTTHYVSQIGGFPDQTEDGGLPQSGRIVVDYMMQKSGKTGTIVYQRGVLLPQKVWCASGRSKVIKGSLPLIGEADCLHEKYGGLNKSKPYYTGEHAKAIGNCPIWVKTPLKLANGTKYRPPAKLLKERGFFGAIAGFLEGGWEGMIAGWHGYTSHGAHGVAVAADLKSTQEAINKITKNLNSLSELEVKNLQRLSGAMDELHNEILELDEKVDDLRADTISSQIELAVLLSNEGIINSEDEHLLALERKLKKMLGPSAVDIGNGCFETKHKCNQTCLDRIAAGTFNAGEFSLPTFDSLNITAASLNDDGLDNHTILLYYSTAASSLAVTLMLAIFIVYMVSRDNVSCSICL

SEQ ID NO: 27710 - protein, 584 aa, Artificial Sequence
  derived and/or modified protein sequence (wt) from hemagglutinin__InfluenzaB__AGX23908
MKAIIVLLMVVTSNADRICTGITSSNSPHVVKTATQGEVNVTGVIPLTTTPTKSYFANLKGTRTRGKLCPDCLNCTDLDVALGRPMCVGTTPSAKASILHEVRPVTSGCFPIMHDRTKIRQLANLLRGYENIRLSTQNVIDAEKAPGGPYRLGTSGSCPNATSKSGFFVTMAWAVPKDNNKNATNPLTVEVPYICTEGEDQITVWGFHSDNKTQMKNLYGDSNPQKFTSSANGVTTHYVSQIGGFPDQTEDGGLPQSGRIVVDYMMQKPGKTGTIVYQRGVLLPQKVWCASGRSKVIKGSLPLIGEADCLHEKYGGLNKSKPYYTGEHAKAIGNCPIWVKTPLKLANGTKYRPPAKLLKERGFFGAIAGFLEGGWEGMIAGWHGYTSHGAHGVAVAADLKSTQEAINKITKNLNSLSELEVKNLQRLSGAMDELHNEILELDEKVDDLRADTISSQIELAVLLSNEGIINSEDEHLLALERKLKKMLGPSAVDIGNGCFETKHKCNQTCLDRIAAGTFNAGEFSLPTFDSLNITAASLNDDGLDNHTILLYYSTAASSLAVTLMLAIFIVYMVSRDNVSCSICL

SEQ ID NO: 27711 - protein, 584 aa, Artificial Sequence; identical to SEQ ID NO: 26567
  derived and/or modified protein sequence (wt) from hemagglutinin__InfluenzaB__AGX23919

SEQ ID NO: 27712 - protein, 584 aa, Artificial Sequence; identical to SEQ ID NO: 27047
  derived and/or modified protein sequence (wt) from hemagglutinin__InfluenzaB__AGX23930

SEQ ID NO: 27713 - protein, 584 aa, Artificial Sequence; identical to SEQ ID NO: 26426
  derived and/or modified protein sequence (wt) from hemagglutinin__InfluenzaB__AGX23941

SEQ ID NO: 27714 - protein, 584 aa, Artificial Sequence; identical to SEQ ID NO: 26731
  derived and/or modified protein sequence (wt) from hemagglutinin__InfluenzaB__AGX23952

SEQ ID NO: 27715 - protein, 584 aa, Artificial Sequence; identical to SEQ ID NO: 26731
  derived and/or modified protein sequence (wt) from hemagglutinin__InfluenzaB__AGX23963

SEQ ID NO: 27716 - protein, 584 aa, Artificial Sequence; identical to SEQ ID NO: 27047
  derived and/or modified protein sequence (wt) from hemagglutinin__InfluenzaB__AGX23974

SEQ ID NO: 27717 - protein, 584 aa, Artificial Sequence; identical to SEQ ID NO: 26567
  derived and/or modified protein sequence (wt) from hemagglutinin__InfluenzaB__AGX23985

SEQ ID NO: 27718 - protein, 584 aa, Artificial Sequence
  derived and/or modified protein sequence (wt) from hemagglutinin__InfluenzaB__AGX23996
MKAIIVLLMVVTSNADRICTGITSSNSPHVVKTATQGEVNVTGVIPLTTTPTKSYFANLKGTRTRGKLCPDCLNCTDLDVALGRPMCVGTTPSAKASILHEVRPITSGCFPIMHDRTKIRQLANLLRGYENIRLSTQNVIDAEKAPGGPYRLGTSGSCPNATSKSGFFATMAWAVPKDNNKNATNPLTVEVPYICTEGEDQITVWGFHSDNKTQMKNLYGDSNPQKFTSSANGVTTHYVSQIGGFPDQTEDGGLPQSGRIVVDYMMQKPGKTGTIVYQRGVLLPQKVWCASGRSKVIKGSLPLIGEADCLHEKYGGLNKSKPYYTGEHAKAIGNCPIWVKTPLKLANGTKYRPPAKLLKERGFFGAIAGFLEGGWEGMIAGWHGYTSHGAHGVAVAADLKSTQEAINKITKNLNSLSELEVKNLQRLSGAMDELHNEILELDEKVDDLRADTISSQIELAVLLSNEGIINSEDEHLLALERKLKKMLGPSAVDIGNGCFETKHKCNQTCLDRIAAGTFNAGEFSLPTFDSLNITAASLNDDGLDNHTILLYYSTAASSLAVTLMLAIFIVYMVSRDNVSCSICL

SEQ ID NO: 27719 - protein, 584 aa, Artificial Sequence; identical to SEQ ID NO: 27047
  derived and/or modified protein sequence (wt) from hemagglutinin__InfluenzaB__AGX24007

SEQ ID NO: 27720 - protein, 584 aa, Artificial Sequence; identical to SEQ ID NO: 27047
  derived and/or modified protein sequence (wt) from hemagglutinin__InfluenzaB__AGX24018

SEQ ID NO: 27721 - protein, 584 aa, Artificial Sequence
  derived and/or modified protein sequence (wt) from hemagglutinin__InfluenzaB__AGX24029
MKAIIVLLMVVTSNADRICTGITSSNSPHVVKTATQGEVNVTGVIPLTTTPTKSYFANLKGTRTRGKLCPDCLNCTDLDVALGRPMCVGTTPSAKASILHEVRPVTSGCFPIMHDRTKIRQLPNLLRGYENIRLSTQNVIDAEKAPGGPYRLGTSGSCPNATSKSGFFATMAWAVPKDNNKNATNPLTVEVPYICKEGEDQITVWGFHSDNKTQMKNLYGDSNPQKFTSSANGVTTHYVSQIGSFPDQTEDGGLPQSGRIVVDYMMQKPGKTGTIVYQRGVLLPQKVWCASGRSKVIKGSLPLIGEADCLHEKYGGLNKSKPYYTGEHAKAIGNCPIWVKTPLKLANGTKYRPPAKLLKERGFFGAIAGFLEGGWEGMIAGWHGYTSHGAHGVAVAADLKSTQEAINKITKNLNSLSELEVKNLQRLSGAMDELHNEILELDEKVDDLRADTISSQIELAVLLSNEGIINSEDEHLLALERKLKKMLGPSAVEIGNGCFETKHKCNQTCLNRIAAGTFNAGEFSLPTFDSLNITAASLNDDGLDNHTILLYYSTAASSLAVTLMLAIFIVYMVSRDNVSCSICL

SEQ ID NO: 27722 - protein, 584 aa, Artificial Sequence; identical to SEQ ID NO: 27047
  derived and/or modified protein sequence (wt) from hemagglutinin__InfluenzaB__AGX24040

SEQ ID NO: 27723 - protein, 584 aa, Artificial Sequence; identical to SEQ ID NO: 26731
  derived and/or modified protein sequence (wt) from hemagglutinin__InfluenzaB__AGX24051

SEQ ID NO: 27724 - protein, 584 aa, Artificial Sequence; identical to SEQ ID NO: 26820
  derived and/or modified protein sequence (wt) from hemagglutinin__InfluenzaB__AGX24062

SEQ ID NO: 27725 - protein, 584 aa, Artificial Sequence; identical to SEQ ID NO: 26567
  derived and/or modified protein sequence (wt) from hemagglutinin__InfluenzaB__AGX24073

SEQ ID NO: 27726 - protein, 584 aa, Artificial Sequence
  derived and/or modified protein sequence (wt) from hemagglutinin__InfluenzaB__AGX24084
MKAIIVLLMVVTSNADRICTGITSSNSPHVVKTATQGEVNVTGVIPLTTTPTKSYFANLKGTRTRGKLCPDCLNCTDLDVALGRPMCVGTTPSAKASIIHEVRPVTSGCFPIMHDRTKIRQLANLLRGYENIRLSTQNVIDAEKAPGGPYRLGTSGSCPNATSKSGFFATMAWAVPKDNNKNATNPLTVEVPYICTEGEDQITVWGFHSDNKTQMKNLYGDSNPQKFTSSANGVTTHYVSQIGGFPDQTEDGGLPQSGRIVVDYMMQKPGKTGTIVYQRGVLLPQKVWCASGRSKVIKGSLPLIGEADCLHEKYGGLNKSKPYYTGEHAKAIGNCPIWVKTPLKLANGTKYRPPAKLLKERGFFGAIAGFLEGGWEGMIAGWHGYTSHGAHGVAVAADLKSTQEAINKITKNLNSLSELEVKNLQRLSGAMDELHNEILELDEKVDDLRADTISSQIELAVLLSNEGIINSEDEHLLALERKLKKMLGPSAVDIGNGCFETKHKCNQTCLDRIAAGTFNAGEFSLPTFDSLNITAASLNDDGLDNHTILLYYSTAASSLAVTLMLAIFIVYMVSRDNVSCSICL

SEQ ID NO: 27727 - protein, 584 aa, Artificial Sequence; identical to SEQ ID NO: 27047
  derived and/or modified protein sequence (wt) from hemagglutinin__InfluenzaB__AGX24095

SEQ ID NO: 27728 - protein, 584 aa, Artificial Sequence
  derived and/or modified protein sequence (wt) from hemagglutinin__InfluenzaB__AGX24106
MKAIIVLLMVVTSNADRICTGITSSNSPHVVKTATQGEVNVTGVIPLTTTPTKSYFANLKGTRTRGKLCPDCLNCTDLDVALGRPMCVGTTPSAKASILHEVRPVTSGCFPIMHDRTKIRQLANLLRGYENIRLSTQNVIDAEKAPGGPYRLGTSGSCPNTTSKSGFFATMAWAVPKDNNKNATNPLTVEVPYICTEGEDQITVWGFHSDNKTQMKNLYGDSNPQKFTSSANGVTTHYVSQIGGFPDQTEDGGLPQSGRIVVDYMMQKPGKTGTIVYQRGVLLPQKVWCASGRSKVIKGSLPLIGEADCLHEKYGGLNKSKPYYTGEHAKAIGNCPIWVKTPLKLANGTKYRPPAKLLKERGFFGAIAGFLEGGWEGMIAGWHGYTSHGAHGVAVAADLKSTQEAINKITKNLNSLSELEVKNLQRLSGAMDELHNEILELDEKVDDLRADTISSQIELAVLLSNEGIINSEDEHLLALERKLKKMLGPSAVDIGNGCFETKHKCNQTCLDRIAAGTFNAGEFSLPTFDSLNITAASLNDDGLDNHTILLYYSTAASSLAVTLMLAIFIVYMVSRDNVSCSICL

SEQ ID NO: 27729 - protein, 584 aa, Artificial Sequence
  derived and/or modified protein sequence (wt) from hemagglutinin__InfluenzaB__AGX24117
MKAIIVLLMVVTSNADRICTGITSSNSPHVVKTATQGEVNVTGVIPLTTTPTKSYFANLKGTRTRGKLCPDCLNCTDLDVALGRPMCVGTTPSAKASILHEVRPVTSGCFPIMHDRTKIRQLPNLLRGYENIRLSTQNVIDAEKAPGGPYRLGTSGSCPNTTSKSGFFATMAWAVPKDNNKNATNPLTVEVPYICTEGEDQITVWGFHSDNKTQMKNLYGDSNPQKFTSSANGVTTHYVSQIGSFPDQTEDGGLPQSGRIVVDYMMQKPGKTGTIVYQRGILLPQKVWCASGRSKVIKGSLPLIGEADCLHEKYGGLNKSKPYYTGEHAKAIGNCPIWVKTPLKLANGTKYRPPAKLLKERGFFGAIAGFLEGGWEGMIAGWHGYTSHGAHGVAVAADLKSTQEAINKITKNLNSLSELEVKNLQRLSGAMDELHNEILELDEKVDDLRADTISSQIELAVLLSNEGIINSEDEHLLALERKLKKMLGPSAVEIGNGCFETKHKCNQTCLDRIAAGTFNAGEFSLPTFDSLNITAASLNDDGLDNHTILLYYSTAASSLAVTLMLAIFIVYMVSRDNVSCSICL

SEQ ID NO: 27730 - protein, 584 aa, Artificial Sequence
  derived and/or modified protein sequence (wt) from hemagglutinin__InfluenzaB__AGX24128
MKAIIVLLMVVTSNADRICTGITSSNSPHVVKTATQGEVNVTGVIPLTTTPTKSYFANLKGTRTRGKLCPDCLNCTDLDVALGRPMCVGTTPSAKASILHEVRPVTSGCFPIMHDRTKIRQLPNLLRGYENIRLSTQNVIDAEKAPGGPYRLGTSGSCPNATSKIGFFATMAWAVPKDNYKNATNPLTVEVPYICTEGEDQITVWGFHSDNKTQMKNLYGDSNPQKFTSSANGVTTHYVSQIGDFPDQTEDGGLPQSGRIVVDYMMQKPGKTGTIVYQRGVLLPQKVWCASGRSKVIKGSLPLIGEADCIHEKYGGLNKSKPYYTGEHAKAIGNCPIWVKTPLKLANGTKYRPPAKLLKERGFFGAIAGFLEGGWEGMIAGWHGYTSHGAHGVAVAADLKSTQEAINKITKNLNSLSELEVKNLQRLSGAMDELHNEILELDEKVDDLRADTISSQIELAVLLSNEGIINSEDEHLLALERKLKKMLGPSAVDIGNGCFETKHKCNQTCLDRIAAGTFNAGEFSLPTFDSLNITAASLNDDGLDNHTILLYYSTAASSLAVTLMLAIFIVYMVSRDNVSCSICL

SEQ ID NO: 27731 - protein, 584 aa, Artificial Sequence; identical to SEQ ID NO: 26426
  derived and/or modified protein sequence (wt) from hemagglutinin__InfluenzaB__AGX24139

SEQ ID NO: 27732 - protein, 584 aa, Artificial Sequence
  derived and/or modified protein sequence (wt) from hemagglutinin__InfluenzaB__AGX24150
MKAIIVLLMVVTSNADRICTGITSSNSPHVVKTATQGEVNVTGVIPLTTTPTKSYFANLKGTRTRGKLCPYCLNCTDLDVALGRPMCVGTTPSAKASILHEVRPVTSGCFPIMHDRTKIRQLPNLLRGYENIRLSTQNVIDAEKAPGGPYRLGTSGSCPNATSKSGFFATMAWAVPKDNNKNATNPLTVEVPYICTEGEDQITVWGFHSDNKTQMKNLYGDSNPQKFTSSANGVTTHYVSQIGSFPDQTEDGGLPQSGRIVVDYMMQKPGKTGTIVYQRGILLPQKVWCASGRSKVIKGSLPLIGEADCLHEKYGGLNKSKPYYTGEHAKAIGNCPIWVKTPLKLANGTKYRPPAKLLKERGFFGAIAGFLEGGWEGMIAGWHGYTSHGAHGVAVAADLKSTQEAINKITKNLNSLSELEVKNLQRLSGAMDELHNEILELDEKVDDLRADTISSQIELAVLLSNEGIINSEDEHLLALERKLKKMLGPSAVEIGNGCFETKHKCNQTCLDRIAAGTFNAGEFSLPTFDSLNITAASLNDDGLDNHTILLYYSTAASSLAVTLMLAIFIVYMVSRDNVSCSICL

SEQ ID NO: 27733 - protein, 584 aa, Artificial Sequence; identical to SEQ ID NO: 27047
  derived and/or modified protein sequence (wt) from hemagglutinin__InfluenzaB__AGX24161

SEQ ID NO: 27734 - protein, 584 aa, Artificial Sequence; identical to SEQ ID NO: 26820
  derived and/or modified protein sequence (wt) from hemagglutinin__InfluenzaB__AGX24172

SEQ ID NO: 27735 - protein, 584 aa, Artificial Sequence; identical to SEQ ID NO: 26820
  derived and/or modified protein sequence (wt) from hemagglutinin__InfluenzaB__AGX24183

SEQ ID NO: 27736 - protein, 584 aa, Artificial Sequence; identical to SEQ ID NO: 26820
  derived and/or modified protein sequence (wt) from hemagglutinin__InfluenzaB__AGX24194

SEQ ID NO: 27737 - protein, 584 aa, Artificial Sequence; identical to SEQ ID NO: 26567
  derived and/or modified protein sequence (wt) from hemagglutinin__InfluenzaB__AGX24205

SEQ ID NO: 27738 - protein, 584 aa, Artificial Sequence; identical to SEQ ID NO: 26731
  derived and/or modified protein sequence (wt) from hemagglutinin__InfluenzaB__AGX24227

SEQ ID NO: 27739 - protein, 584 aa, Artificial Sequence; identical to SEQ ID NO: 26820
  derived and/or modified protein sequence (wt) from hemagglutinin__InfluenzaB__AGX24238

SEQ ID NO: 27740 - protein, 584 aa, Artificial Sequence
  derived and/or modified protein sequence (wt) from hemagglutinin__InfluenzaB__AGX24249
MKAIIVLLMVVTSNADRICTGITSSKSPHVVKTATQGEVNVTGVIPLTTTPTKSYFANLKGTRTRGKLCPDCLNCTDLDVALGRPMCVGTTPSAKASILHEVRPVTSGCFPIMHDRTKIRQLPNLLRGYENIRLSTQNVIDAEKAPGGPYRLGTSGSCPNATSKIGFFATMAWAVPKDNYKNATNPLTVEVPYICTEGEDQITVWGFHSDNKTQMKNLYGDSNPQKFTSSANGVTTHYVSQIGDFPDQTEDGGLPQSGRIVVDYMMQKPGKTGTIVYQRGVLLPQKVWCASGRSKVIKGSLPLIGEADCLHEKYGGLNKSKPYYTGEHAKAIGNCPIWVKTPLKLANGTKYRPPAKLLKERGFFGAIAGFLEGGWEGMIAGWHGYTSHGAHGVAVAADLKSTQEAINKITKNLNSLSELEVKNLQRLSGAMDELHNEILELDEKVDDLRADTISSQIELAVLLSNEGIINSEDEHLLALERKLKKMLGPSAVDIGNGCFETKHKCNQTCLDRIAAGTFNAGEFSLPTFDSLNITAASLNDDGLDNHTILLYYSTAASSLAVTLMLAIFIVYMVSRDNVSCSICL

SEQ ID NO: 27741 - protein, 584 aa, Artificial Sequence; identical to SEQ ID NO: 26567
  derived and/or modified protein sequence (wt) from hemagglutinin__InfluenzaB__AGX24260

SEQ ID NO: 27742 - protein, 584 aa, Artificial Sequence; identical to SEQ ID NO: 27056
  derived and/or modified protein sequence (wt) from hemagglutinin__InfluenzaB__AGX24271

SEQ ID NO: 27743 - protein, 584 aa, Artificial Sequence
  derived and/or modified protein sequence (wt) from hemagglutinin__InfluenzaB__AGX24282
MKAIIVLLMVVTSNADRICTGITSSNSPHVVKTATQGEVNVTGVIPLTTTPTKSYFANLKGTRTRGKLCPDCLNCTDLDVALGRPMCVGTTPSAKASILHEVRPVTSGCFPIMHDRTKIRQLPNLLRGYENIRLSTQNVIDAEKAPGGPYRLGTSGSCPNATSKSGFFATMAWAVPKDNNKNATNPLTVEVPYICTKGEDQITVWGFHSDNKTQMKNLYGDSNPQKFTSSANGVTTHYVSQIGSFPDQTEDGGLPQSGRIVVDYMMQKPGKTGTIVYQRGVLLPQRVWCASGRSKVIKGSLPLIGEADCLHEKYGGLNKSKPYYTGEHAKAIGNCPIWVKTPLKLANGTKYRPPAKLLKERGFFGAIAGFLEGGWEGMIAGWHGYTSHGAHGVAVAADLKSTQEAINKITKNLNSLSELEVKNLQRLSGAMDELHNEILELDEKVDDLRADTISSQIELAVLLSNEGIINSEDEHLLALERKLKKMLGPSAVEIGNGCFETKHKCNQTCLDRIAAGTFNAGEFSLPTFDSLNITAASLNDDGLDNHTILLYYSTAASSLAVTLMLAIFIVYMVSRDNVSCSICL

SEQ ID NO: 27744 - protein, 584 aa, Artificial Sequence; identical to SEQ ID NO: 26567
  derived and/or modified protein sequence (wt) from hemagglutinin__InfluenzaB__AGX24293

SEQ ID NO: 27745 - protein, 584 aa, Artificial Sequence; identical to SEQ ID NO: 26567
  derived and/or modified protein sequence (wt) from hemagglutinin__InfluenzaB__AGX24304

SEQ ID NO: 27746 - protein, 584 aa, Artificial Sequence; identical to SEQ ID NO: 27056
  derived and/or modified protein sequence (wt) from hemagglutinin__InfluenzaB__AGX24315

SEQ ID NO: 27747 - protein, 584 aa, Artificial Sequence
  derived and/or modified protein sequence (wt) from hemagglutinin__InfluenzaB__AGX24326
MKAIIVLLMVVTSNADRICTGITSSNSPHVVKTATQGEVNVTGVIPLTTTPTKSYFANLKGTRTRGKLCPDCLNCTDLDVALGRPTCVGTTPSAKASILHEVRPVTSGCFPIMHDRTKIRQLPNLLRGYENIRLSTQNVIDAEKAPGGPYRLGTSGSCPNATSKSGFFATMAWAVPKDNNKNATNPLTVEVPYICTEGEDQITVWGFHSDNKTQMKNLYGDSNPQKFTSSANGVTTHYVSQIGSFPDQTEDGGLPQSGRIVVDYMMQKPGKTGTIVYQRGILLPQKVWCASGRSKVIKGSLPLIGEADCLHEKYGGLNKSKPYYTGEHAKAIGNCPIWVKTPLKLANGTKYRPPAKLLKERGFFGAIAGFLEGGWEGMIAGWHGYTSHGAHGVAVAADLKSTQEAINKITKNLNSLSELEVKNLQRLSGAMDELHNEILELDEKVDDLRADTISSQIELAVLLSNEGIINSEDEHLLALERKLKKMLGPSAVEIGNGCFETKHKCNQTCLDRIAAGTFNAGEFSLPTFDSLNITAASLNDDGLDNHTILLYYSTAASSLAVTLMLAIFIVYMVSRDNVSCSICL

SEQ ID NO: 27748 - protein, 584 aa, Artificial Sequence
  derived and/or modified protein sequence (wt) from hemagglutinin__InfluenzaB__AGX24337
MKAIIVLLMVVTSNADRICTGITSSNSPHVVKTATQGEVNVTGVIPLTTTPTKSYFANLKGTRTRGKLCPDCLNCTDLDVALGMPMCVGTTPSAKASILHEVRPVTSGCFPIMHDRTKIRQLPNLLRGYENIRLSTQNVIDAEKAPGGPYRLGTSGSCPNATSKIGFFATMAWAVPKDNYKNATNPLTVEVPYICTEGEDQITVWGFHSDNKTQMKNLYGDSNPQKFTSSANGVTTHYVSQIGDFPDQTEDGGLPQSGRIVVDYMMQKPGKTGTIVYQRGVLLPQKVWCASGRSKVIKGSLPLIGEADCLHEKYGGLNKSKPYYTGEHAKAIGNCPIWVKTPLKLANGTKYRPPAKLLKERGFFGAIAGFLEGGWEGMIAGWHGYTSHGAHGVAVAADLKSTQEAINKITKNLNSLSELEVKNLQRLSGAMDELHNEILELDEKVDDLRADTISSQIELAVLLSNEGIINSEDEHLLALERKLKKMLGPSAVDIGNGCFETKHKCNQTCLDRIAAGTFNAGEFSLPTFDSLNITAASLNDDGLDNHTILLYYSTAASSLAVTLMLAIFIVYMVSRDNVSCSICL

SEQ ID NO: 27749 - protein, 584 aa, Artificial Sequence; identical to SEQ ID NO: 26820
  derived and/or modified protein sequence (wt) from hemagglutinin__InfluenzaB__AGX24348

SEQ ID NO: 27750 - protein, 584 aa, Artificial Sequence; identical to SEQ ID NO: 26567
  derived and/or modified protein sequence (wt) from hemagglutinin__InfluenzaB__AGX24359

SEQ ID NO: 27751 - protein, 584 aa, Artificial Sequence; identical to SEQ ID NO: 26820
  derived and/or modified protein sequence (wt) from hemagglutinin__InfluenzaB__AGX24381

SEQ ID NO: 27752 - protein, 584 aa, Artificial Sequence
  derived and/or modified protein sequence (wt) from hemagglutinin__InfluenzaB__AGX24392
MKAIIVLLMVVTSNADRICTGITSSNSPHVVKTATQGEVNVTGVIPLTTTPTKSYFANLKGTRTRGKLCPDCLNCTDLDVALGRPMCVGTTPSAKASILHEVRPVTSGCFPIMHDRTKIRQLPNLLRGYENIRLSTQNVIDAEKAPGGPYRLGTSGSCPNATSKSGFFATMAWAVPKDNNKNATNPLTVEIPYICTEGEDQITVWGFHSDNKTQMKNLYGDSNPQKFTSSANGVTTHYVSQIGSFPDQTEDGGLPQSGRIVVDYMMQKPGKTGTIVYQRGVLLPQKVWCASGRSKVIKGSLPLIGEADCLHEKYGGLNKSKPYYTGEHAKAIGNCPIWVKTPLKLANGTKYRPPAKLLKERGFFGAIAGFLEGGWEGMIAGWHGYTSHGAHGVAVAADLKSTQEAINKITKNLNSLSELEVKNLQRLSGAMDELHNEILELDEKVDDLRADTISSQIELAVLLSNEGIINSEDEHLLALERKLKKMLGPSAVEIGNGCFETKHKCNQTCLDRIAAGTFNAGEFSLPTFDSLNITAASLNDDGLDNHTILLYYSTAASSLAVTLMLAIFIVYMVSRDNVSCSICL

SEQ ID NO: 27753 - protein, 584 aa, Artificial Sequence; identical to SEQ ID NO: 26567
  derived and/or modified protein sequence (wt) from hemagglutinin__InfluenzaB__AGX24403

SEQ ID NO: 27754 - protein, 584 aa, Artificial Sequence; identical to SEQ ID NO: 26820
  derived and/or modified protein sequence (wt) from hemagglutinin__InfluenzaB__AGX24414

SEQ ID NO: 27755 - protein, 584 aa, Artificial Sequence; identical to SEQ ID NO: 26567
  derived and/or modified protein sequence (wt) from hemagglutinin__InfluenzaB__AGX24425

SEQ ID NO: 27756 - protein, 584 aa, Artificial Sequence; identical to SEQ ID NO: 26567
  derived and/or modified protein sequence (wt) from hemagglutinin__InfluenzaB__AGX24436

SEQ ID NO: 27757 - protein, 584 aa, Artificial Sequence; identical to SEQ ID NO: 27056
  derived and/or modified protein sequence (wt) from hemagglutinin__InfluenzaB__AGX24447

SEQ ID NO: 27758 - protein, 584 aa, Artificial Sequence; identical to SEQ ID NO: 27747
  derived and/or modified protein sequence (wt) from hemagglutinin__InfluenzaB__AGX24458

SEQ ID NO: 27759 - protein, 584 aa, Artificial Sequence
  derived and/or modified protein sequence (wt) from hemagglutinin__InfluenzaB__AGX24469
MKAIIVLLMVVTSNADRICTGITSSNSPHVVKTATQGEVNVTGVIPLTTTPTKSYFANLKGTRTRGKLCPDCLNCTDLDVALGRPTCVGTTPSAKASILHEVRPVTSGCFPIMHDRTKIRQLPNLLRGYENIRLSTQNVIDAEKAPGGPYRLGTSGSCPNATSKSGFFATMAWAVPKDNNKNATNPLTVEVPYICTEGEDQITVWGFHSDNKTQMKNLYGDSNPQKFTSSANGVTTHYVSQIGSFPDQTEDGGLPQSGRIVVDYMMQKPGKTGTIVYQRGILLPQKVWCASGRSKVIKGSLPLIGEADCLHEKYGGLNKSKPYYTGEHAKAIGNCPIWVKTPLKLANGTKYRPPAKLLKERGFFGAIAGFLEGGWEGMVAGWHGYTSHGAHGVAVAADLKSTQEAINKITKNLNSLSELEVKNLQRLSGAMDELHNEILELDEKVDDLRADTISSQIELAVLLSNEGIINSEDEHLLALERKLKKMLGPSAVEIGNGCFETKHKCNQTCLDRIAAGTFNAGEFSLPTFDSLNITAASLNDDGLDNHTILLYYSTAASSLAVTLMLAIFIVYMVSRDNVSCSICL

SEQ ID NO: 27760 - protein, 584 aa, Artificial Sequence; identical to SEQ ID NO: 27056
  derived and/or modified protein sequence (wt) from hemagglutinin__InfluenzaB__AGX24480

SEQ ID NO: 27761 - protein, 584 aa, Artificial Sequence; identical to SEQ ID NO: 27056
  derived and/or modified protein sequence (wt) from hemagglutinin__InfluenzaB__AGX24491

SEQ ID NO: 27762 - protein, 584 aa, Artificial Sequence
  derived and/or modified protein sequence (wt) from hemagglutinin__InfluenzaB__AGX24502
MKAIIVLLMVVTSNADRICTGITSSNSPHVVKTATQGEVNVTGVIPLTTTPTKSYFANLKGTRTRGKLCPDCLNCTDLDVALGRPMCVGTTPSAKASILHEVRPVTSGCFPIMHDRTKIRQLPNLLRGYENIRLSTQNVIDAEKAPGGPYRLGTSGSCPNATSKSGFFATMAWAVQKDNNKNATNPLTVEVPYICTEGEDQITVWGFHSDNKTQMKNLYGDSNPQKFTSSANGVTTHYVSQIGSFPDQTEDGGLPQSGRIVVDYMMQKPGKTGTIVYQRGVLLPQRVWCASGRSKVIKGSLPLIGEADCLHEKYGGLNKSKPYYTGEHAKAIGNCPIWVKTPLKLANGTKYRPPAKLLKERGFFGAIAGFLEGGWEGMIAGWHGYTSHGAHGVAVAADLKSTQEAINKITKNLNSLSELEVKNLQRLSGAMDELHNEILELDEKVDDLRADTISSQIELAVLLSNEGIINSEDEHLLALERKLKKMLGPSAVEIGNGCFETKHKCNQTCLDRIAAGTFNAGEFSLPTFDSLNITAASLNDDGLDNHTILLYYSTAASSLAVTLMLAIFIVYMVSRDNVSCSICL

SEQ ID NO: 27763 - protein, 584 aa, Artificial Sequence; identical to SEQ ID NO: 26731
  derived and/or modified protein sequence (wt) from hemagglutinin__InfluenzaB__AGX24513

SEQ ID NO: 27764 - protein, 584 aa, Artificial Sequence; identical to SEQ ID NO: 27056
  derived and/or modified protein sequence (wt) from hemagglutinin__InfluenzaB__AGX24524

SEQ ID NO: 27765 - protein, 584 aa, Artificial Sequence
  derived and/or modified protein sequence (wt) from hemagglutinin__InfluenzaB__AGX24535
MKAIIVLLMVVTSNADRICTGITSSNSPHVVKTATQGEVNVTGVIPLTTTPTKSYFANLKGTRTRGKLCPDCLNCTDLDVALGRPMCVGTTPSAKASILHEVRPVTSGCFPIMHDRTKIRQLPNLLRGYENIRLSTQNVIDAEKAPGGPYRLGTSGSCPNATSKIGFFATMAWAVPKDNYKNATNPLTVEVPYICTEGEDQITVWGFHSDNKTQMKNLYGDSNPQKFTSSANGVTTHYVSQIGDFPDQTEDGGLPQSGRIVVDYMMQKPGKTGTIVYQRGVLLPQKVWCASGRSKVIKGSLPLIGEADCLHEKYGGLNKSKPYYTGEHAKAIGNCPIWVKTPLKLANGTKYRPPAKLLKERGFFGAIAGFLEGGWEGMIAGWHGYTSHGAHGVAVAADLKSTQEAINKITKNLNSLSELEVKNLQRLSGAMDELHNEILELDEKVDDLRADTISAQIELAVLLSNEGIINSEDEHLLALERKLKKMLGPSAVDIGNGCFETKHKCNQTCLDRIAAGTFNAGEFSLPTFDSLNITAASLNDDGLDNHTILLYYSTAASSLAVTLMLAIFIVYMVSRDNVSCSICL

SEQ ID NO: 27766 - protein, 584 aa, Artificial Sequence; identical to SEQ ID NO: 26567
  derived and/or modified protein sequence (wt) from hemagglutinin__InfluenzaB__AGX24546

SEQ ID NO: 27767 - protein, 584 aa, Artificial Sequence
  derived and/or modified protein sequence (wt) from hemagglutinin__InfluenzaB__AGX24557
MKTIIVLLMVVTSNADRICTGITSSNSPHVVKTATQGEVNVTGVIPLTTTPTKSYFANLKGTRTRGKLCPDCLNCTDLDVALGRPTCVGTTPSAKASILHEVRPVTSGCFPIMHDRTKIRQLPNLLRGYENIRLSTQNVIDAEKAPGGPYRLGTSGSCPNATSKSGFFATMAWAVPKDNNKNATNPLTVEVPYICTEGEDQITVWGFHSDNKTQMKNLYGDSNPQKFTSSANGVTTHYVSQIGSFPDQTEDGGLPQSGRIVVDYMMQKPGKTGTIVYQRGILLPQKVWCASGRSKVIKGSLPLIGEADCLHEKYGGLNKSKPYYTGEHAKAIGNCPIWVKTPLKLANGTKYRPPAKLLKERGFFGAIAGFLEGGWEGMIAGWHGYTSHGAHGVAVAADLKSTQEAINKITKNLNSLSELEVKNLQRLSGAMDELHNEILELDEKVDDLRADTISSQIELAVLLSNEGIINSEDEHLLALERKLKKMLGPSAVEIGNGCFETKHKCNQTCLDRIAAGTFNAGEFSLPTFDSLNITAASLNDDGLDNHTILLYYSTAASSLAVTLMLAIFIVYMVSRDNVSCSICL

SEQ ID NO: 27768 - protein, 584 aa, Artificial Sequence; identical to SEQ ID NO: 27056
  derived and/or modified protein sequence (wt) from hemagglutinin__InfluenzaB__AGX24579

SEQ ID NO: 27769 - protein, 584 aa, Artificial Sequence; identical to SEQ ID NO: 27056
  derived and/or modified protein sequence (wt) from hemagglutinin__InfluenzaB__AGX24590

SEQ ID NO: 27770 - protein, 584 aa, Artificial Sequence; identical to SEQ ID NO: 27056
  derived and/or modified protein sequence (wt) from hemagglutinin__InfluenzaB__AGX24601

SEQ ID NO: 27771 - protein, 584 aa, Artificial Sequence; identical to SEQ ID NO: 27056
  derived and/or modified protein sequence (wt) from hemagglutinin__InfluenzaB__AGX24612

SEQ ID NO: 27772 - protein, 584 aa, Artificial Sequence; identical to SEQ ID NO: 26567
  derived and/or modified protein sequence (wt) from hemagglutinin__InfluenzaB__AGX24623

SEQ ID NO: 27773 - protein, 584 aa, Artificial Sequence; identical to SEQ ID NO: 27056
  derived and/or modified protein sequence (wt) from hemagglutinin__InfluenzaB__AGX24634

SEQ ID NO: 27774 - protein, 584 aa, Artificial Sequence; identical to SEQ ID NO: 27765
  derived and/or modified protein sequence (wt) from hemagglutinin__InfluenzaB__AGX24656

SEQ ID NO: 27775 - protein, 584 aa, Artificial Sequence; identical to SEQ ID NO: 26567
  derived and/or modified protein sequence (wt) from hemagglutinin__InfluenzaB__AGX24667

SEQ ID NO: 27776 - protein, 584 aa, Artificial Sequence; identical to SEQ ID NO: 26820
  derived and/or modified protein sequence (wt) from hemagglutinin__InfluenzaB__AGX24678

SEQ ID NO: 27777 - protein, 584 aa, Artificial Sequence; identical to SEQ ID NO: 27056
  derived and/or modified protein sequence (wt) from hemagglutinin__InfluenzaB__AGX24689

SEQ ID NO: 27778 - protein, 584 aa, Artificial Sequence; identical to SEQ ID NO: 27056
  derived and/or modified protein sequence (wt) from hemagglutinin__InfluenzaB__AGX24700

SEQ ID NO: 27779 - protein, 584 aa, Artificial Sequence; identical to SEQ ID NO: 27056
  derived and/or modified protein sequence (wt) from hemagglutinin__InfluenzaB__AGX24711

SEQ ID NO: 27780 - protein, 584 aa, Artificial Sequence; identical to SEQ ID NO: 26567
  derived and/or modified protein sequence (wt) from hemagglutinin__InfluenzaB__AGX24722

SEQ ID NO: 27781 - protein, 584 aa, Artificial Sequence; identical to SEQ ID NO: 26567
  derived and/or modified protein sequence (wt) from hemagglutinin__InfluenzaB__AGX24733

SEQ ID NO: 27782 - protein, 584 aa, Artificial Sequence; identical to SEQ ID NO: 26567
  derived and/or modified protein sequence (wt) from hemagglutinin__InfluenzaB__AGX24744

SEQ ID NO: 27783 - protein, 584 aa, Artificial Sequence; identical to SEQ ID NO: 26567
  derived and/or modified protein sequence (wt) from hemagglutinin__InfluenzaB__AGX24755

SEQ ID NO: 27784 - protein, 584 aa, Artificial Sequence; identical to SEQ ID NO: 27056
  derived and/or modified protein sequence (wt) from hemagglutinin__InfluenzaB__AGX24766

SEQ ID NO: 27785 - protein, 584 aa, Artificial Sequence; identical to SEQ ID NO: 26567
  derived and/or modified protein sequence (wt) from hemagglutinin__InfluenzaB__AGX24777

SEQ ID NO: 27786 - protein, 584 aa, Artificial Sequence; identical to SEQ ID NO: 26567
  derived and/or modified protein sequence (wt) from hemagglutinin__InfluenzaB__AGX24788

SEQ ID NO: 27787 - protein, 584 aa, Artificial Sequence; identical to SEQ ID NO: 26567
  derived and/or modified protein sequence (wt) from hemagglutinin__InfluenzaB__AGX24799

SEQ ID NO: 27788 - protein, 584 aa, Artificial Sequence; identical to SEQ ID NO: 27056
  derived and/or modified protein sequence (wt) from hemagglutinin__InfluenzaB__AGX24810

SEQ ID NO: 27789 - protein, 584 aa, Artificial Sequence; identical to SEQ ID NO: 27056
  derived and/or modified protein sequence (wt) from hemagglutinin__InfluenzaB__AGX24821

SEQ ID NO: 27790 - protein, 584 aa, Artificial Sequence
  derived and/or modified protein sequence (wt) from hemagglutinin__InfluenzaB__AGX24832
MKAIIVLLMVVTSNADRICTGITSSNSPHVVKTATQGEVNVTGVIPLTTTPTKSYFANLKGTRTRGKLCPDCLNCTDLDVALGRPMCVGTTPSAKASILHEVRPVTSGCFPIMHDRTKIRQLPNLLRGYENIRLSTQNVIDAEKAPGGPYRLGTSGSCPNATSKSGFFATMAWAVPKDNNKNATNPLTVEVPYICTEGEDQITVWGFHSDNKTQMKNLYGDSNPQKFTSSANGVTTHYVSQIGSFPDQTEDGGLPQSGRIVVDYMMQKPGKTGTIVYQRGILLPQRVWCASGRSKVIKGSLPLIGEADCLHEKYGGLNKSKPYYTGEHAKAIGNCPIWVKTPLKLANGTKYRPPAKLLKERGFFGAIAGFLEGGWEGMIAGWHGYTSHGAHGVAVAADLKSTQEAINKITKNLNSLSELEVKNLQRLSGAMDELHNEILELDEKVDDLRADTISSQIELAVLLSNEGIINSEDEHLLALERKLKKMLGPSAVEIGNGCFETKHKCNQTCLDRIAAGTFNAGEFSLPTFDSLNITAASLNDDGLDNHTILLYYSTAASSLAVTLMLAIFIVYMVSRDNVSCSICL

SEQ ID NO: 27791 - protein, 584 aa, Artificial Sequence
  derived and/or modified protein sequence (wt) from hemagglutinin__InfluenzaB__AGX24843
MKAIIVLLMVVTSNADRICTGITSSNSPHVVKTATQGEVNVTGVIPLTTTPTKSYFANLKGTRTRGKLCPDCLNCTDLDVALGRPMCVGTTPSAKASILHEVRPVTSGCFPIMHDRTKIRQLPNLLRGYENIRLSTQNVIDAEKAPGGPYRLGTSGSCPNATSKIGFFATMAWAVPKDNYKNATNPLTVEVPYICTEGEDQITVWGFHSDNKTQMKNLYGDSNPQKFTSSANGVTTHYVSQIGDFPDQTEDGGLPQSGRIVVDYMVQKPGKTGTIVYQRGVLLPQRVWCTSGRSKVIKGSLPLIGEADCLHEKYGGLNKSKPYYTGEHAKAIGNCPIWVKTPLKLANGTKYRPPAKLLKERGFFGAIAGFLEGGWEGMIAGWHGYTSHGAHGVAVAADLKSTQEAINKITKNLNSLSELEVKNLQRLSGAMDELHNEILELDEKVDDLRADTISSQIELAVLLSNEGIINSEDEHLLALERKLKKMLGPSAVDIGNGCFETKHKCNQTCLDRIAAGTFNAGEFSLPTFDSLNITAASLNDDGLDNHTILLYYSTAASSLAVTLMLAIFIVYMVSRDNVSCSICL

SEQ ID NO: 27792 - protein, 584 aa, Artificial Sequence
  derived and/or modified protein sequence (wt) from hemagglutinin__InfluenzaB__AGX24854
MKAIIVLLMVVTSNADRICTGITSSNSPHVVKTATQGEVNVTGVIPLTTTPTKSYFANLKGTRTRGKLCPECLNCTDLDVALGRPMCVGTTPSAKASILHEVRPVTSGCFPIMHDRTKIRQLPNLLRGYENIRLSTQNVIDAEKAPGGPYRLGTSGSCPNATSKIGFFATMAWAVPKDNYKNATNPLTVEVPYICAEGEDQITVWGFHSDNKTQMKNLYGDSNPQKFTSSANGVTTHYVSQIGDFPDQTEDGGLPQSGRIVVDYMVQRPGKTGTIVYQRGVLLPQKVWCASGRSKVIKGSLPLIGEADCLHEKYGGLNKSKPYYTGEHAKAIGNCPIWVKTPLKLANGTKYRPPAKLLKERGFFGAIAGFLEGGWEGMIAGWHGYTSHGAHGVAVAADLKSTQEAINKITKNLNSLSELEVKNLQRLSGAMDELHNEILELDEKVDDLRADTISSQIELAVLLSNEGIINSEDEHLLALERKLKKMLGPSAVDIGNGCFETKHKCNQTCLDRIAAGTFNAGEFSLPTFDSLNITAASLNDDGLDNHTILLYYSTAASSLAVTLMLAIFIVYMVSRDNVSCSICL

SEQ ID NO: 27793 - protein, 584 aa, Artificial Sequence
  derived and/or modified protein sequence (wt) from hemagglutinin__InfluenzaB__AGX24865
MKAIIVLLMVVTSNADRICTGITSSNSPHVVKTATQGEVNVTGVIPLTTTPTKSYFANLKGTRTRGKLCPDCLNCTDLDVALGRPMCVGTTPSAKASILHEVRPVTSGCFPIMHDRTKIRQLPNLLRGYENIRLSTQNVIDAEKAPGGPYRLGTSGSCPNATSKIGFFATMAWAVPKDNYKNATNPLTVEVPYICAEGEDQITVWGFHSDNKTQMKNLYGDSNPQKFTSSANGVTTHYVSQIGDFPDQTEDGGLPQSGRIVVDYMVQRPGKTGTIVYQRGVLLPQKVWCASGRSKVIKGSLPLIGEADCLHEKYGGLNKSKPYYTGEHAKAIGNCPIWVKTPLKLANGTKYRPPAKLLKERGFFGAIAGFLEGGWEGMIAGWHGYTSHGAHGVAVAADLKSTQEAINKITKNLNSLSELEVKNLQRLSGAMDELHNEILELDEKVDDLRADTISSQIELAVLLSNEGIINSEDEHLLALERKLKKMLGPSAVDIGNGCFETKHKCNQTCLDRIAAGTFNAGEFSLPTFDSLNITAASLNDDGLDNHTILLYYSTAASSLAVTLMLAIFIVYMVSRDNVSCSICL

SEQ ID NO: 27794 - protein, 584 aa, Artificial Sequence
  derived and/or modified protein sequence (wt) from hemagglutinin__InfluenzaB__AGX24876
MKAIIVLLMVVTSNADRICTGITSSNSPHVVKTATQGEVNVTGVIPLTTTPTKSYFANLKGTRTRGKLCPDCLNCTDLDVALGRPMCVGTTPSAKASILHEVRPVTSGCFPIMHDRTKIRQLPNLLRGYENIRLSTQNVIDAEKAPGGPYRLGTSGSCPNATSKIGFFATMAWAVPKDNYKNATNSLTVEVPYICKEGEDQITVWGFHSDNKPQMKNLYGDSNPQKFTSSANGVTTHYVSQVGDFPDQTEDGGLPQSGRIVVDYMMQKPGRTGTIVYQRGVLLPQKVWCASGRSKVIKGSLPLIGEADCLHEKYGGLNKSKPYYTGEHAKAIGNCPIWVKTPLKLANGTKYRPPAKLLKERGFFGAIAGFLEGGWEGMIAGWHGYTSHGAHGVAVAADLKSTQEAINKITKNLNSLSELEVKNLQRLSGAMDELHNEILELDEKVDDLRADTISSQIELAVLLSNEGIINSEDEHLLALERKLKKMLGPSAVDIGNGCFETKHKCNQTCLDRIAAGTFNAGEFSLPTFDSLNITAASLNDDGLDNHTILLYYSTAASSLAVTLMLAIFIVYMVSRDNVSCSICL

SEQ ID NO: 27795 - protein, 584 aa, Artificial Sequence
  derived and/or modified protein sequence (wt) from hemagglutinin__InfluenzaB__AGX24887
MKAIIVLLMVVTSNADRICTGITSSNSPHVVKTATQGEVNVTGAIPLTTTPTKSYFANLKGTRTRGKLCPDCLNCTDLDVALGRPMCVGTTPSAKASILHEVRPVTSGCFPIMHDRTKIRQLPNLLRGYENIRLSTQNVIDAEKAPGGPYRLGTSGSCPNATSKIGFFATMAWAVPKDNYKNATNPQTVEVPYICTEGEDQITVWGFHSDNKTQMKNLYGDSNPQKFTSSANGVTTHYVSQIGDFPDQTEDGGLPQSGRIVVDYMVQKPGKTGTIVYQRGVLLPQKVWCASGRSKVIKGSLPLIGEADCLHEKYGGLNKSKPYYTGEHAKAIGNCPIWVKTPLKLANGTKYRPPAKLLKERGFFGAIAGFLEGGWEGMIAGWHGYTSHGAHGVAVAADLKSTQEAINKITKNLNSLSELEVKNLQRLSGAMDELHNEILELDEKVDDLRADTMSSQIELAVLLSNEGIINSEDEHLLALERKLKKMLGPSAVDIGNGCFETKHKCNQTCLDRIAAGTFNAGEFSLPTFDSLNITAASLNDDGLDNHTILLYYSTAASSLAVTLMLAIFIVYMVSRDNVSCSICL

SEQ ID NO: 27796 - protein, 584 aa, Artificial Sequence
  derived and/or modified protein sequence (wt) from hemagglutinin__InfluenzaB__AGX24898
MKAIIVLLMVVTSNADRICTGITSSNSPHVVKTATQGEVNVTGVIPLTTTPTKSYFANLKGTRTRGKLCPDCLNCTDLDVALGRPMCVGTTPSAKASILHEVRPVTSGCFPIMHDRTKIRQLPNLLRGYEKIRLSTQNVIDAEKAPGGPYRLGTSGSCPNATSKIGFFATMAWAVPKDNYKNATNPLTVEVPYICTGGEDQITVWGFHSDNKTQMKSLYGDSNPQKFTSSANGVTTHYVSQIGDFPDQTEDGGLPQSGRIVVDYMMQKPGKTGTIVYQRGVLLPQKVWCASGRSKVIKGSLPLIGEADCLHEKYGGLNKSKPYYTGEHAKAIGNCPIWVKTPLKLANGTKYRPPAKLLKERGFFGAIAGFLEGGWEGMIAGWHGYTSHGAHGVAVAADLKSTQEAINKITKNLNSLSELEVKNLQRLSGAMDELHNEILELDEKVDDLRADTISSQIELAVLLSNEGIINSEDEHLLALERKLKKMLGPSAVDIGNGCFETKHKCNQTCLDRIAAGTFNAGEFSLPTFDSLNITAASLNDDGLDNHTILLYYSTAASSLAVTLMLAIFIVYMVSRDNVSCSICL

SEQ ID NO: 27797 - protein, 585 aa, Artificial Sequence; identical to SEQ ID NO: 26683
  derived and/or modified protein sequence (wt) from hemagglutinin__InfluenzaB__AGX84854

SEQ ID NO: 27798 - protein, 585 aa, Artificial Sequence
  derived and/or modified protein sequence (wt) from hemagglutinin__InfluenzaB__AGX84865
MKAIIVLLMVVTSNADRICTGITSSNSPHIVKTATQGEVNVTGVIPLTTTPTKSHFANLKGTETRGKLCPKCPNCTDLDVALGRPKCTGKIPSARVSILHEVRPVTSGCFPIMHDRTKIRQLPNLLRGYEHIRLSTHNVINAENAPGGPYKIGTSGSCPNVTNGNGFFATMAWAVPKNDKNKTATNPLTIEVPYICTEGEDQITVWGFHSDNETQMAKLYGDSKPQKFTSSANGVTTHYVSQIGGFPNQTEDGGLPQSGRIVVDYMVQKSGKTGTITYQRGILLPQKVWCASGRSKVIKGSLPLIGEADCLHEKYGGLNKSKPYYTGEHAKAIGNCPIWVKTPLKLANGTKYRPPAKLLKERGFFGAIAGFLEGGWEGMIAGWHGYTSHGAHGVAVAADLKSTQEAINKITKNLNSLSELEVKNLQRLSGAMDELHNEILELDEKVDDLRADTISSQIELAVLLSNEGIINSEDEHLLALERKLKKMLGPSAVEIGNGCFETKHKCNQTCLDRIAAGTFDAGEFSLPTFDSLNITAASLNDDGLDNHTILLYYSTAASSLAVTLMIAIFVVYMVSRDNVSCSICL

SEQ ID NO: 27799 - protein, 585 aa, Artificial Sequence; identical to SEQ ID NO: 27798
  derived and/or modified protein sequence (wt) from hemagglutinin__InfluenzaB__AGX84876

SEQ ID NO: 27800 - protein, 585 aa, Artificial Sequence; identical to SEQ ID NO: 27798
  derived and/or modified protein sequence (wt) from hemagglutinin__InfluenzaB__AGX84887

SEQ ID NO: 27801 - protein, 585 aa, Artificial Sequence; identical to SEQ ID NO: 26683
  derived and/or modified protein sequence (wt) from hemagglutinin__InfluenzaB__AGX84898

SEQ ID NO: 27802 - protein, 585 aa, Artificial Sequence
  derived and/or modified protein sequence (wt) from hemagglutinin__InfluenzaB__AGX84920
MKAIIVLLMVVTSNADRICTGITSSNSPHVVKTATQGEVNVTGVIPLTTTPTKSHFANLKGTETRGKLCPKCPNCTDLDVALGRPKCTGKIPSAGVSILHEVRPVTSGCFPIMHDRTKIRQLPNLLRGYEHIRLSTHNVINAENAPGGPYKIGTSGSCPNVTNGNGFFATMAWAVPKNDKNKTATNPLTIEVPYICTEGEDQITVWGFHSDNETQMAKLYGDSKPQKFTSSANGVTTHYVSQIGGFPNQTEDGGLPQSGRIVVDYMVQKSGKTGTITYQRGILLPQKVWCASGRSKVIKGSLPLIGEADCLHEKYGGLNKSKPYYTGEHAKAIGNCPIWVKTPLKLANGTKYRPPAKLLKERGFFGAIAGFLEGGWEGMIAGWHGYTSHGAHGVAVAADLKSTQEAINKITKNLNSLSELEVKNLQRLSGAMDELHNEILELDEKVDDLRADTISSQIELAVLLSNEGIINSEDEHLLALERKLKKMLGPSAVEIGNGCFETKHKCNQTCLDRIAAGTFDAGEFSLPTFDSLNITAASLNDDGLDNHTILLYYSTAASSLAVTLMIAIFVVYMVSRDNVSCSICL

SEQ ID NO: 27803 - protein, 585 aa, Artificial Sequence
  derived and/or modified protein sequence (wt) from hemagglutinin__InfluenzaB__AGZ59821
MKAIIVLLMVVTSNADRICTGITSSNSPHVVKTATQGEVNVTGVIPLTTTPTKSHFANLKGTKTRGKLCPKCFNCTDLDVALGRPKCTGNIPSAKVSILHEVRPVTSGCFPIMHDRTKVRQLPNLLRGYEHIRLSTHNVINAEKAPGGPYKIGTSGSCPNVTNGNGFFATMAWAVPKNDNNKTATNSLTIEVPYICTEGEDQITVWGFHSDNETQMAKLYGDSKPQKFTSSANGVTTHYVSQIGGFPNQTEDGGLPQSGRIVVDYMVQKSGKTGTITYQRGILLPQKVWCASGRSKVIKGSLPLIGEADCLHEKYGGLNKSKPYYTGEHAKAIGNCPIWVKTPLKLANGTKYRPPAKLLKERGFFGAIAGFLEGGWEGMIAGWHGYTSHGAHGVAVAADLKSTQEAINKITKNLNSLSELEVKNLQRLSGAMDELHNEILELDEKVDDLRADTISSQIELAVLLSNEGIINSEDEHLLALERKLKKMLGPSAVEIGNGCFETKHKCNQTCLDRIAAGTFDAGEFSLPTFDSLNITAASLNDDGLDNHTILLYYSTAASSLAVTLMIAIFVVYMVSRDNVSCSICL

SEQ ID NO: 27804 - protein, 585 aa, Artificial Sequence
  derived and/or modified protein sequence (wt) from hemagglutinin__InfluenzaB__AGZ59832
MKAIIVLLMVVTSNADRICTGITSSNSPHVVKTATQGEVNVTGVIPLTTTPTKSHFANLKGTKTRGKLCPKCLNCTDLDVALGRPKCTGNIPSAKVSILHEVRPVTSGCFPIMHDRTKIRQLPNLLRGYEHIRLSTHNVINAEKAPGGPYKIGTSGSCPNVTNGNGFFATMAWAVPKNDNNKTATNSLTIEVPYICTEGEDQITVWGFHSDNETQMAKLYGDSKPQKFTSSANGVTTHYVSQIGGFPNQTEDGGLPQSGRIVVDYMVQKSGKTGTITYQRGILLPQKVWCASGKSKVIKGSLPLIGEADCLHEKYGGLNKSKPYYTGEHAKAIGNCPIWVKTPLKLANGTKYRPPAKLLKERGFFGAIAGFLEGGWEGMIAGWHGYTSHGAHGVAVAADLKSTQEAINKITKNLNSLSELEVKNLQRLSGAMDELHNEILELDEKVDDLRADTISSQIELAVLLSNEGIINSEDEHLLALERKLKKMLGPSAVEIGNGCFETKHKCNQTCLDRIAAGTFDAGEFSLPTFDSLNITAASLNEDGLDNHTILLYYSTAASSLAVTLMIAIFVVYMVSRDNVSCSICL

SEQ ID NO: 27805 - protein, 585 aa, Artificial Sequence
  derived and/or modified protein sequence (wt) from hemagglutinin__InfluenzaB__AGZ59843
MKAIIVLLMVVTSNADRICTGITSSNSPHVVKTATQGEVNVTGVIPLTTTPTKSHFANLKGTETRGKLCPKCLNCTDLDVALGRPKCTGNIPSARVSILHEVRPVTSGCFPIMHDRTKIRQLPNLLRGYEHIRLSTHNVINAENAPGGPYKIGTSGSCPNVTNGNGFFATMAWAVPKNDNNKTATNSLTIEVPYICTEGEDQITVWGFHSDNETQMAKLYGDSKPQKFTSSANGVTTHYVSQIGGFPNQTEDGGLPQSGRIVVDYMVQKSGKTGTITYQRGILLPQKVWCASGRSKVIKGSLPLIGEADCLHEKYGGLNKSKPYYTGEHAKAIGNCPIWVKTPLKLANGTKYRPPAKLLKERGFFGAIAGFLEGGWEGMIAGWHGYTSHGAHGVAVAADLKSTQEAINKITKNLNSLSELEVKNLQRLSGAMDELHNEILELDEKVDDLRADTISSQIELAVLLSNEGIINSEDEHLLALERKLKKMLGPSAVEIGNGCFETKHKCNQTCLDRIAAGTFDAGEFSLPTFDSLNITAASLNDDGLDNHTILLYYSTAASSLAVTLMIAIFIVYMVSRDNVSCSICL

SEQ ID NO: 27806 - protein, 585 aa, Artificial Sequence; identical to SEQ ID NO: 27152
  derived and/or modified protein sequence (wt) from hemagglutinin__InfluenzaB__AGZ59854

SEQ ID NO: 27807 - protein, 585 aa, Artificial Sequence; identical to SEQ ID NO: 26514
  derived and/or modified protein sequence (wt) from hemagglutinin__InfluenzaB__AGZ59865

SEQ ID NO: 27808 - protein, 585 aa, Artificial Sequence
  derived and/or modified protein sequence (wt) from hemagglutinin__InfluenzaB__AGZ59876
MKAIIVLLMVVTSNADRICTGITSSNSPHVVKTATQGEVNVTGVIPLTTTPTKSHFANLKGTETRGKLCPKCLNCTDLDVALGRPKCTGNIPSARVSILHEVRPVTSGCFPIMHDRTKIRQLPNLLRGYEHIRLSTHNVINAENAPGGPYKIGTSGSCPNVTNGNGFFATMAWAVPKNDKNKTATNSLTIEVPYICTEGEDQITVWGFHSDNETQMAKLYGDSKPQKFTSSANGVTTHYVSQIGGFPNQTEDGGLPQSGRIVVDYMVQKSGKTGTITYQRGILLPQKVWCTSGRSKVIKGSLPLIGEADCLHEKYGGLNKSKPYYTGEHAKAIGNCPIWVKTPLKLANGTKYRPPAKLLKERGFFGAIAGFLEGGWEGMIAGWHGYTSHGAHGVAVAADLKSTQEAINKITKNLNSLSELEVKNLQRLSGAMDELHNEILELDEKVDDLRADTISSQIELAVLLSNEGIINSEDEHLLALERKLKKMLGPSAVEIGNGCFETKHKCNQTCLDRIAAGTFDAGEFSLPTFDSLNITAASLNDDGLDNHTILLYYSTAASSLAVTLMIAIFVVYMVSRDNVSCSICL

SEQ ID NO: 27809 - protein, 584 aa, Artificial Sequence; identical to SEQ ID NO: 26567
  derived and/or modified protein sequence (wt) from hemagglutinin__InfluenzaB__AGZ59887

SEQ ID NO: 27810 - protein, 585 aa, Artificial Sequence; identical to SEQ ID NO: 26989
  derived and/or modified protein sequence (wt) from hemagglutinin__InfluenzaB__AGZ59898

SEQ ID NO: 27811 - protein, 585 aa, Artificial Sequence; identical to SEQ ID NO: 27355
  derived and/or modified protein sequence (wt) from hemagglutinin__InfluenzaB__AGZ59909

SEQ ID NO: 27812 - protein, 585 aa, Artificial Sequence; identical to SEQ ID NO: 26989
  derived and/or modified protein sequence (wt) from hemagglutinin__InfluenzaB__AGZ59920

SEQ ID NO: 27813 - protein, 585 aa, Artificial Sequence; identical to SEQ ID NO: 26989
  derived and/or modified protein sequence (wt) from hemagglutinin__InfluenzaB__AGZ59931

SEQ ID NO: 27814 - protein, 585 aa, Artificial Sequence; identical to SEQ ID NO: 26989
  derived and/or modified protein sequence (wt) from hemagglutinin__InfluenzaB__AGZ59942

SEQ ID NO: 27815 - protein, 585 aa, Artificial Sequence; identical to SEQ ID NO: 26989
  derived and/or modified protein sequence (wt) from hemagglutinin__InfluenzaB__AGZ59953

SEQ ID NO: 27816 - protein, 585 aa, Artificial Sequence
  derived and/or modified protein sequence (wt) from hemagglutinin__InfluenzaB__AGZ59965
MKAIIVLLMVVTSNADRICTGITSSNSPHVVKTATQGEVNVTGVIPLTTTPTKSHFANLKGTETRGKLCPKCLNCTDLDVALGRPKCTGKIPSARVSILHEVRPVTSGCFPIMHDRTKIRQLPNLLRGYEHIRLSTHNVINAENAPGGPYKIGTSGSCPNITNGNGFFATMAWAVPKNDKNKTATNPLTIEVPYICTEGEDQITVWGFHSDNETQMAKLYGDSKPQKFTSSANGVTTHYVSQIGGFPNQTEDGGLPQSGRVVVDYMMQKSGKTGTITYQRGILLPQKVWCASGRSKVIKGSLPLIGEADCLHEKYGGLNKSKPYYTGEHAKAIGNCPIWVKTPLKLANGTKYRPPAKLLKERGFFGAIAGFLEGGWEGMIAGWHGYTSHGAHGVAVAADLKSTQEAINKITKNLNSLSELEVKNLQRLSGAMDELHNEILELDEKVDDLRADTISSQIELAVLLSNEGIINSEDEHLLALERKLKKMLGPSAVEIGNGCFETKHKCNQTCLDRIAAGTFDAGEFSLPTFDSLNITAASLNDDGLDNHTILLYYSTAASSLAVTLMIAIFVVYMVSRDNVSCSICL

SEQ ID NO: 27817 - protein, 585 aa, Artificial Sequence; identical to SEQ ID NO: 26989
  derived and/or modified protein sequence (wt) from hemagglutinin__InfluenzaB__AGZ59976

SEQ ID NO: 27818 - protein, 585 aa, Artificial Sequence; identical to SEQ ID NO: 26989
  derived and/or modified protein sequence (wt) from hemagglutinin__InfluenzaB__AGZ59987

SEQ ID NO: 27819 - protein, 585 aa, Artificial Sequence; identical to SEQ ID NO: 26989
  derived and/or modified protein sequence (wt) from hemagglutinin__InfluenzaB__AGZ59999

SEQ ID NO: 27820 - protein, 585 aa, Artificial Sequence; identical to SEQ ID NO: 26608
  derived and/or modified protein sequence (wt) from hemagglutinin__InfluenzaB__AGZ60010

SEQ ID NO: 27821 - protein, 585 aa, Artificial Sequence; identical to SEQ ID NO: 26608
  derived and/or modified protein sequence (wt) from hemagglutinin__InfluenzaB__AGZ60021

SEQ ID NO: 27822 - protein, 585 aa, Artificial Sequence; identical to SEQ ID NO: 26608
  derived and/or modified protein sequence (wt) from hemagglutinin__InfluenzaB__AGZ60033

SEQ ID NO: 27823 - protein, 584 aa, Artificial Sequence
  derived and/or modified protein sequence (wt) from hemagglutinin__InfluenzaB__AGZ60044
MKAIIVLLMVVTSNADRICTGITSSNSPHVVKTATQGEVNVTGVIPLTTTPTKSYFANLKGTRTRGKLCPDCLNCTDLDVALGRPMCVGTTPSAKASILHEVRPVTSGCFPIMHDRTKIRQLPNLLRGYENIRLSTQNVIDAENAPGGPYRLGTSGSCPNATSKSGFFATMAWAVPKDNNKNATNPLTVEVPYVCTEGEDQITVWGFHSDNKTQMKNLYGDSNPQKFTSSANGVTTHYVSQIGGFPAQTEDGGLPQSGRIVVDYMVQKPRKTGTIVYQRGVLLPQKVWCASGRSKVIKGSLPLIGEADCLHEKYGGLNKSKPYYTGEHAKAIGNCPIWVKTPLKLANGTKYRPPAKLLKERGFFGAIAGFLEGGWEGMIAGWHGYTSHGAHGVAVAADLKSTQEAINKITKNLNSLSELEVKNLQRLSGAMDELHNEILELDEKVDDLRADTISSQIELAVLLSNEGIINSEDEHLLALERKLKKMLGPSAVDIGNGCFETKHKCNQTCLDRIAAGTFNAGEFSLPTFDSLNITAASLNDDGLDNHTILLYYSTAASSLAVTLMLAIFIVYMVSRDNVSCSICL

SEQ ID NO: 27824 - protein, 584 aa, Artificial Sequence; identical to SEQ ID NO: 27026
  derived and/or modified protein sequence (wt) from hemagglutinin__InfluenzaB__AGZ60055

SEQ ID NO: 27825 - protein, 584 aa, Artificial Sequence
  derived and/or modified protein sequence (wt) from hemagglutinin__InfluenzaB__AGZ60066
MKAIIVLLMVVTSNADRICTGITSSNSPHVVKTATQGEVNVTGVIPLTTTPTKSHFANLKGTRTRGKLCPDCLNCTDLDVALGRPMCVGTTPSAKASILHEVRPVTSGCFPIMHDRTKIRQLPNLLRGYENIRLSTQNVIDAEKALGGPYRLGTSGSCPNATSKSGFFATMAWAVPKDNNKNATNPLTVEVPYICTEGEDQITVWGFHSDNKTQMKNLYGDSNPQKFTSSANGVTTHYVSQIGGFPDQTEDGGLPQSGRIVVDYMVQKPGKTGTIVYQRGVLLPQKVWCASGRSKVIKGSLPLIGEADCLHEKYGGLNKSKPYYTGEHAKAIGNCPIWVKTPLKLANGTKYRPPAKLLKERGFFGAIAGFLEGGWEGMIAGWHGYTSHGAHGVAVAADLKSTQEAINKITKNLNSLSELEVKNLQRLSGAMDELHNEILELDEKVDDLRADTISSQIELAVLLSNEGIINSEDEHLLALERKLKKMLGPSAVDIGNGCFETKHKCNQTCLDRIAAGTFNAGEFSLPTFDSLNITAASLNDDGLDNHTILLYYSTAASSLAVTLMLAIFIVYMVSRDNVSCSICL

SEQ ID NO: 27826 - protein, 584 aa, Artificial Sequence
  derived and/or modified protein sequence (wt) from hemagglutinin__InfluenzaB__AGZ60077
MKAIIVLLMVVTSNADRICTGITSSNSPHVVKTATQGEVNVTGVIPLTTTPTKSYFANLKGTRTRGKLCPDCLNCTDLDVALGSPMCVGTTPSAKASILHEVRPVTSGCFPIMHDRTKIRQLANLLRGYENIRLSTQNVIDAEKAPGGPYRLGTSGSCPNATSKSGFFATMAWAVPKDNNKNATNPLTVEVPYICTEGEDQITVWGFHSDNKTQMKNLYGDSNPQKFTSSANGVTTHYVSQIGGFPDQTEDGGLPQSGRIVVDYMMQKSGKTGTIVYQRGVLLPQKVWCASGRSKVIKGSLPLIGEADCLHEKYGGLNKSKPYYTGEHAKAIGNCPIWVKTPLKLANGTKYRPPAKLLKERGFFGAIAGFLEGGWEGMIAGWHGYTSHGAHGVAVAADLKSTQEAINKITKNLNSLSELEVKNLQRLSGAMDELHSEILELDEKVDDLRADTISSQIELAVLLSNEGIINSEDEHLLALERKLKKMLGPSAVDIGNGCFETKHKCNQTCLDRIAAGTFNAGEFSLPTFDSLNITAASLNDDGLDNHTILLYYSTAASSLAVTLMLAIFIVYMVSRDNVSCSICL

SEQ ID NO: 27827 - protein, 584 aa, Artificial Sequence; identical to SEQ ID NO: 26731
  derived and/or modified protein sequence (wt) from hemagglutinin__InfluenzaB__AGZ60088

SEQ ID NO: 27828 - protein, 584 aa, Artificial Sequence; identical to SEQ ID NO: 26426
  derived and/or modified protein sequence (wt) from hemagglutinin__InfluenzaB__AGZ60099

SEQ ID NO: 27829 - protein, 584 aa, Artificial Sequence
  derived and/or modified protein sequence (wt) from hemagglutinin__InfluenzaB__AGZ60131
MKAIIVLLMVVTSNADRICTGITSSNSPHVVKTATQGEVNVTGVIPLTTTPTKSYFANLKGTRTRGKLCPDCLNCTDLDVALGRPMCVGTTPSAKASILHEVRPITSGCFPIMHDRTKIRQLPNLLRGYENIRLSTQNVIDAEKAPGGPYRLGTSGSCPNATSKSGFFATMAWAVPKDNNKNATNPLTVEVPYICTEGEDQITVWGFHSDNKTQMKNLYGDSNPQKFTSSANGVTTHYVSQIGSFPDQTEDGGLPQSGRIVVDYMMQKPGKTGTIVYQRGVLLPQKVWCASGRSKVIKGSLPLIGEADCLHEKYGGLNKSKPYYTGEHAKAIGNCPIWVKTPLKLANGTKYRPPAKLLKERGFFGAIAGFLEGGWEGMIAGWHGYTSHGAHGVAVAADLKSTQEAINKITKNLNSLSELEVKNLQRLSGAMDELHNEILELDEKVDDLRADTISSQIELAVLLSNEGIINSEDEHLLALERKLKKMLGPSAVEIGNGCFETKHKCNQTCLDRIAAGTFNAGEFSLPTFDSLNITAASLNDDGLDNHTILLYYSTAASSLAVTLMLAIFIVYMVSRDNVSCSICL

SEQ ID NO: 27830 - protein, 584 aa, Artificial Sequence; identical to SEQ ID NO: 26731
  derived and/or modified protein sequence (wt) from hemagglutinin__InfluenzaB__AGZ60142

SEQ ID NO: 27831 - protein, 584 aa, Artificial Sequence; identical to SEQ ID NO: 26731
  derived and/or modified protein sequence (wt) from hemagglutinin__InfluenzaB__AGZ60160

SEQ ID NO: 27832 - protein, 584 aa, Artificial Sequence; identical to SEQ ID NO: 26820
  derived and/or modified protein sequence (wt) from hemagglutinin__InfluenzaB__AGZ60172

SEQ ID NO: 27833 - protein, 584 aa, Artificial Sequence; identical to SEQ ID NO: 26820
  derived and/or modified protein sequence (wt) from hemagglutinin__InfluenzaB__AGZ60183

SEQ ID NO: 27834 - protein, 584 aa, Artificial Sequence
  derived and/or modified protein sequence (wt) from hemagglutinin__InfluenzaB__AGZ60194
MKAIIVLLMVVTSNADRICTGITSSNSPHVVKTATQGEVNVTGVIPLTTTPTKSYFANLKGTRTRGKLCPDCLNCTDLDVALGRPMCVGTTPSAKASILHEVRPVTSGCFPIMHDRTKIRQLPNLLRGYENIRLSTQNVIDAEKAPGGPYRLGTSGSCPNATSKIGFFATMAWAVPKDNYKNATNPLTVEVPYICTEGEDQITVWGFHSDNKTQMKNLYGDSNPQKFTSSANGVTTHYVSQIGDFPDQTEDGGLPQSGRIVVDYMMQKTGKTGTIVYQRGVLLPQKVWCASGRSKVIKGSLPLIGEADCLHEKYGGLNKSKPYYTGEHAKAIGNCPIWVKTPLKLANGTKYRPPAKLLKERGFFGAIAGFLEGGWEGMIAGWHGYTSHGAHGVAVAADLKSTQEAINKITKNLNSLSELEVKNLQRLSGAMDELHNEILELDEKVDDLRADTISSQIELAVLLSNEGIINSEDEHLLALERKLKKMLGPSAVDIGNGCFETKHKCNQTCLDRIAAGTFNAGEFSLPTFDSLNITAASLNDDGLDNHTILLYYSTAASSLAVTLMLAIFIVYMVSRDNVSCSICL

SEQ ID NO: 27835 - protein, 584 aa, Artificial Sequence
  derived and/or modified protein sequence (wt) from hemagglutinin__InfluenzaB__AGZ60206
MKAIIVLLMVVTSNADRICTGITSSNSPHVVKTATQGEVNVTGVIPLTTTPIKSYFANLKGTRTRGKLCPDCLNCTDLDVALGRPMCVGTTPSAKASILHEVRPVTSGCFPIMHDRTKIRQLPNLLRGYENIRLSTQNVIDAEKAPGGPYRLGTSGSCPNATSKIGFFATMAWAVPKDNYKNATNPLTVEVPYICTEGEDQITVWGFHSDNKTQMKNLYGDSNPQKFTSSANGVTTHYVSQIGDFPDQTEDGGLPQSGRIVVDYMMQKPGKTGTIVYQRGVLLPQKVWCASGRSKVIKGSLPLIGEADCLHEKYGGLNKSKPYYTGEHAKAIGNCPIWVKTPLKLANGTKYRPPAKLLKERGFFGAIAGFLEGGWEGMIAGWHGYTSHGAHGVAVAADLKSTQEAINKITKNLNSLSELEVKNLQRLSGAMDELHNEILELDEKVDDLRADTISSQIELAVLLSNEGIINSEDEHLLALERKLKKMLGPSAVDIGNGCFETKHKCNQTCLDRIAAGTFNAGEFSLPTFDSLNITAASLNDDGLDNHTILLYYSTAASSLAVTLMLAIFIVYMVSRDNVSCSICL

SEQ ID NO: 27836 - protein, 584 aa, Artificial Sequence; identical to SEQ ID NO: 27765
  derived and/or modified protein sequence (wt) from hemagglutinin__InfluenzaB__AGZ60217

SEQ ID NO: 27837 - protein, 584 aa, Artificial Sequence
  derived and/or modified protein sequence (wt) from hemagglutinin__InfluenzaB__AGZ60268
MKAIIVLLMVVTSNADRICTGITSSNSPHVVKTATQGEVNVTGVIPLTTTPTKSYFANLKGTRTRGKLCPDCLNCTDLDVALGRPMCVGTTPSAKASILHEVRPVTSGCFPIMHDRTKIRQLANLLRGYENIRLSTQNVIDAEKAPGGPYRLGTSGSCPNATSKSGFFATMAWAVPKDNNKNATNPLTVEVPYICTEGEDQITVWGFHSDNKTQMKNLYGDSNPQKFTSSANGVTTHYVSQIGGFPDQTEDGGLPQSGRIVVDYMMQKPGKTGTIVYQRGVLLPQKVWCASGRSKVIKGSLPLIGEADCLHEKYGGLNKSKPYYTGEHAKAIGNCPIWVKTPLKLANGTKYRPPAKLLKERGFFGAIAGFLEGGWEGMIAGWHGYTSHGAHGVAVAADLKSTQEAINKITKNLNSLSELEVKNLQRLSGAMDELHNEILELDEKVDDLRADTISSQIELAVLLSNEGIINSEDEHLLALERKLKKMLGPSAIDIGNGCFETKHKCNQTCLDRIAAGTFNAGEFSLPTFDSLNITAASLNDDGLDNHTILLYYSTAASSLAVTLMLAIFIVYMVSRDNVSCSICL

SEQ ID NO: 27838 - protein, 584 aa, Artificial Sequence; identical to SEQ ID NO: 26854
  derived and/or modified protein sequence (wt) from hemagglutinin__InfluenzaB__AHE37993

SEQ ID NO: 27839 - protein, 584 aa, Artificial Sequence; identical to SEQ ID NO: 26899
  derived and/or modified protein sequence (wt) from hemagglutinin__InfluenzaB__AHE37994

SEQ ID NO: 27840 - protein, 584 aa, Artificial Sequence; identical to SEQ ID NO: 26854
  derived and/or modified protein sequence (wt) from hemagglutinin__InfluenzaB__AHE37995

SEQ ID NO: 27841 - protein, 584 aa, Artificial Sequence; identical to SEQ ID NO: 26854
  derived and/or modified protein sequence (wt) from hemagglutinin__InfluenzaB__AHE37996

SEQ ID NO: 27842 - protein, 584 aa, Artificial Sequence; identical to SEQ ID NO: 26899
  derived and/or modified protein sequence (wt) from hemagglutinin__InfluenzaB__AHE37997

SEQ ID NO: 27843 - protein, 584 aa, Artificial Sequence; identical to SEQ ID NO: 26899
  derived and/or modified protein sequence (wt) from hemagglutinin__InfluenzaB__AHE37998

SEQ ID NO: 27844 - protein, 584 aa, Artificial Sequence; identical to SEQ ID NO: 26899
  derived and/or modified protein sequence (wt) from hemagglutinin__InfluenzaB__AHE37999

SEQ ID NO: 27845 - protein, 584 aa, Artificial Sequence; identical to SEQ ID NO: 26854
  derived and/or modified protein sequence (wt) from hemagglutinin__InfluenzaB__AHE38000

SEQ ID NO: 27846 - protein, 584 aa, Artificial Sequence; identical to SEQ ID NO: 26854
  derived and/or modified protein sequence (wt) from hemagglutinin__InfluenzaB__AHE38001

SEQ ID NO: 27847 - protein, 584 aa, Artificial Sequence
  derived and/or modified protein sequence (wt) from hemagglutinin__InfluenzaB__AHE38002
MKAIIVLLMVVTSNADRICTGITSSNSPHVVKTATQGEVNVTGVIPLTTTPTKSYFANLKGTKTRGKLCPDCLNCTDLDVALGRPMCVGTTPSAKASILHEVRPVTSGCFPIMHDRTKIRQLANLLRGYENIRLSTQNVIDAKKAPGGPYRLGTSGSCPNATSKSGFFATMAWAVPKDNNKNATNPLTVEVPYICAEGEDQITVWGFHSDNKTQMKNLYGDSNPQKFTSSANGVTTHYVSQIGGFPDQTEDGGLPQSGRIVVDYMMQKPGKTGTIVYQRGVLLPQKVWCASGRSKVIKGSLPLIGEADCLHEKYGGLNKSKPYYTGEHAKAIGNCPIWVKTPLKLANGTKYRPPAKLLKERGFFGAIAGFLEGGWEGMIAGWHGYTSHGAHGVAVAADLKSTQEAINKITKNLNSLSELEVKNLQRLSGAMDELHNEILELDEKVDDLRADTISSQIELAVLLSNEGIINSEDEHLLALERKLKKMLGPSAVDIGNGCFETKHKCNQTCLDRIAAGTFNAGEFSLPTFDSLNITAASLNDDGLDNHTILLYYSTAASSLAVTLMLAIFIVYMVSRDNVSCSICL

SEQ ID NO: 27848 - protein, 584 aa, Artificial Sequence; identical to SEQ ID NO: 26854
  derived and/or modified protein sequence (wt) from hemagglutinin__InfluenzaB__AHE38003

SEQ ID NO: 27849 - protein, 584 aa, Artificial Sequence; identical to SEQ ID NO: 26854
  derived and/or modified protein sequence (wt) from hemagglutinin__InfluenzaB__AHE38004

SEQ ID NO: 27850 - protein, 584 aa, Artificial Sequence; identical to SEQ ID NO: 26854
  derived and/or modified protein sequence (wt) from hemagglutinin__InfluenzaB__AHE38005

SEQ ID NO: 27851 - protein, 584 aa, Artificial Sequence
  derived and/or modified protein sequence (wt) from hemagglutinin__InfluenzaB__AHE38006
MKAIIVLLMVVTSNADRICTGITSSNSPHVVKTATQGEVNVTGVIPLTTTPTKSYFANLKGTKTRGKLCPDCLNCTDLDVALGRPMCVGATPSAKASILHEVRPVTSGCFPIMHDRTKIRQLANLLRGYENIRLSTQNVIDAEKAPGGPYRLGTSGSCPNATSKSGFFATMAWAVPKDNNKNATNPLTVEVPYICAEGEDQITVWGFHSDNKTQMKNLYGDSNPQKFTSSANGVTTHYVSQIGGFPDQTEDGGLPQSGRIVVDYMMQKPGKTGTIVYQRGVLLPQKVWCASGRSKVIKGSLPLIGEADCLHEKYGGLNKSKPYYTGEHAKAIGNCPIWVKTPLKLANGTKYRPPAKLLKERGFFGAIAGFLEGGWEGMIAGWHGYTSHGAHGVAVAADLKSTQEAINKITKNLNSLSELEVKNLQRLSGAVDELHNEILELDEKVDDLRADTISSQIELAVLLSNEGIINSEDEHLLALERKLKKMLGPSAVDIGNGCFETKHKCNQTCLDRIAAGTFNAGEFSLPTFDSLNITAASLNDDGLDNHTILLYYSTAASSLAVTLMLAIFIVYMVSRDNVSCSICL

SEQ ID NO: 27852 - protein, 584 aa, Artificial Sequence; identical to SEQ ID NO: 26854
  derived and/or modified protein sequence (wt) from hemagglutinin__InfluenzaB__AHE38007

SEQ ID NO: 27853 - protein, 584 aa, Artificial Sequence
  derived and/or modified protein sequence (wt) from hemagglutinin__InfluenzaB__AHE38008
MKAIIALLMVVTSNADRICTGITSSNSPHVVKTATQGEVNVTGVIPLTTTPTKSYFANLKGTKTRGKLCPDCLNCTDLDVALGRPMCVGTTPSAKASILHEVRPVTSGCFPIMHDRTKIRQLANLLRGYENIRLSTQNVIDAEKAPGGPYRLGTSGSCPNATSKSGFFATMAWAVPKDNNKNATNPLTVEVPYICAEGEDQIAVWGFHSDNKTQMKNLYGDSNPQKFTSSANGVTTHYVSQIGGFPDQTEDGGLPQSGRIVVDYMMQKPGKTGTIVYQRGVLLPQKVWCASGRSKVIKGSLPLIGEADCLHEKYGGLNKSKPYYTGEHAKAIGNCPIWVKTPLKLANGTKYRPPAKLLKERGFFGAIAGFLEGGWEGMIAGWHGYTSHGAHGVAVAADLKSTQEAINKITKNLNSLSELEVKNLQRLSGAMDELHNEILELDEKVDDLRADTISSQIELAVLLSNEGIINSEDEHLLALERKLKKMLGPSAVDIGNGCFETKHKCNQTCLDRIAAGTFNAGEFSLPTFDSLNITAASLNDDGLDNHTILLYYSTAASSLAVTLMLAIFIVYMVSRDNVSCSICL

SEQ ID NO: 27854 - protein, 584 aa, Artificial Sequence; identical to SEQ ID NO: 26899
  derived and/or modified protein sequence (wt) from hemagglutinin__InfluenzaB__AHE38009

SEQ ID NO: 27855 - protein, 584 aa, Artificial Sequence; identical to SEQ ID NO: 26899
  derived and/or modified protein sequence (wt) from hemagglutinin__InfluenzaB__AHE38010

SEQ ID NO: 27856 - protein, 584 aa, Artificial Sequence; identical to SEQ ID NO: 26854
  derived and/or modified protein sequence (wt) from hemagglutinin__InfluenzaB__AHE38012

SEQ ID NO: 27857 - protein, 584 aa, Artificial Sequence
  derived and/or modified protein sequence (wt) from hemagglutinin__InfluenzaB__AHE38013
MKAIIVLLMVVTSNADRICTGITSSNSPHVVKTATQGEVNVTGVIPLTTTPTKSYFANLKGTKTRGKLCPDCLNCTDLDVALGRPMCVGTTPSAKASILHEVRPVTSGCFPIMHDRTKIRQLANLLRGYENIRLSTQNVIDAEKAPGGPYRLGTSGSCPNATSKSGFFATMAWAVPKDNNKNATNPLTVEVPYICAEGEDQITVWGFHSDNKTQMKNLYGDSNPQKFTSSANGVTTHYVSQIGGFPDQTEDGGLPQSGRIVVDYMMQKPGKTGTIVYQRGVLLPQKVWCVSGRSKVIKGSLPLIGEADCLHEKYGGLNKSKPYYTGEHAKAIGNCPIWVKTPLKLANGTKYRPPAKLLKERGFFGAIAGFLEGGWEGMIAGWHGYTSHGAHGMAVAADLKSTQEAINKITKNLNSLSELEVKNLQRLSGAMDELHNEILELDEKVDDLRADTISSQIELAVLLSNEGIINSEDEHLLALERKLKKMLGPSAVDIGNGCFETKHKCNQTCLDRIAAGTFNAGEFSLPTFDSLNITAASLNDDGLDNHTILLYYSTAASSLAVTLMLAIFIVYMVSRDNVSCSICL

SEQ ID NO: 27858 - protein, 584 aa, Artificial Sequence; identical to SEQ ID NO: 26854
  derived and/or modified protein sequence (wt) from hemagglutinin__InfluenzaB__AHE38014

SEQ ID NO: 27859 - protein, 585 aa, Artificial Sequence; identical to SEQ ID NO: 26645
  derived and/or modified protein sequence (wt) from hemagglutinin__InfluenzaB__AHE38015

SEQ ID NO: 27860 - protein, 585 aa, Artificial Sequence
  derived and/or modified protein sequence (wt) from hemagglutinin__InfluenzaB__AHE38016
MKAIIVLLMVVTSNADRICTGITSSNSPHVVKTATQGEVNVTGVIPLTTTPTKSHFANLKGTETRGKLCPKCLNCTDLDVALGRPKCTGKIPSARVSILHEVRPVTSGCFPIMHDRTKIRQLPNLLRGYEHIRLSTHNVINAENAPGGPYKIGTSGSCPNVTNGNGFFATMAWAVPKNDKNKTATNPLTIEVPYICTEGEDQITVWGFHSDNETQMAKLYGDSKPQKFTSSANGVTTHYVSQIGGFPNQTEDGGLPQSGRIVVDYMVQKSGKTGTITYQRGILLPQKVWCASGKSKVIKGSLPLIGEADCLHEKYGGLNKSKPYYTGEHAKAIGNCPIWVKTPLKLANGTKYRPPAKLLKERGFFGAIAGFLEGGWEGMIAGWHGYTSHGAHGVAVAADLKSTQEAINKITKNLNSLSELEVKNLQRLSGAMDELHNEILELDEKVDDLRADTISSQIELAVLLSNEGIINSEDEHLLALERKLKKMLGPSAVEIGNGCFETKHKCNQTCLDRIAAGTFDAGEFSLPTFDSLNITAASLNDDGLDNHIILLYYSTAASSLAVTLMIAIFVVYMVSRDNVSCSICL

SEQ ID NO: 27861 - protein, 585 aa, Artificial Sequence; identical to SEQ ID NO: 26964
  derived and/or modified protein sequence (wt) from hemagglutinin__InfluenzaB__AHE38017

SEQ ID NO: 27862 - protein, 585 aa, Artificial Sequence; identical to SEQ ID NO: 26887
  derived and/or modified protein sequence (wt) from hemagglutinin__InfluenzaB__AHE38018

SEQ ID NO: 27863 - protein, 585 aa, Artificial Sequence; identical to SEQ ID NO: 26872
  derived and/or modified protein sequence (wt) from hemagglutinin__InfluenzaB__AHE38019

SEQ ID NO: 27864 - protein, 585 aa, Artificial Sequence
  derived and/or modified protein sequence (wt) from hemagglutinin__InfluenzaB__AHE38020
MKAIIVLLMVVTSNADRICTGITSSNSPHVVKTATQGEVNVTGVIPLTITPTKSHFANLKGTETRGKLCPKCLNCTDLDVALGRPKCTGKIPSARVSILHEVRPVTSGCFPIMHDRTKIRQLPNLLRGYEHIRLSTHNVINAEDAPGGPYKIGTSGSCPNVTNGNGFFATMAWAVPKNDKNKTATNPLTIEVPYICTEGEDQITVWGFHSDNETQMAKLYGDSKPQKFTSSANGVTTHYVSQIGGFPNQTEDGGLPQSGRIVVDYMVQKSGKTGTITYQRGILLPQKVWCASGRSKVIKGSLPLIGEADCLHEKYGGLNKSKPYYTGEHAKAIGNCPIWVKTPLKLANGTKYRPPAKLLKERGFFGAIAGFLEGGWEGMIAGWHGYTSHGAHGVAVAADLKSTQEAINKITKNLNSLSELEVKNLQRLSGAMDELHNEILELDEKVDDLRADTISSQIELAVLLSNEGIINSEDEHLLALERKLKKMLGPSAVEIGNGCFETKHKCNQTCLDRIAAGTFDAGEFSLPTFDSLNITAASLNDDGLDNHTILLYYSTAASSLAVTLMIAIFVVYMVSRDNVSCSICL

SEQ ID NO: 27865 - protein, 585 aa, Artificial Sequence
  derived and/or modified protein sequence (wt) from hemagglutinin__InfluenzaB__AHE38021
MKAIIVLLMVVTSNADRICTGITSSNSPHVVKTATQGEVNVTGVIPLTTTPTKSHFANLKGTETRGKLCPKCLNCTDLDVALGRPKCTGKIPSARVSILHEVRPVTSGCFPIMHDRTKIRQLPNLLRGYEHIRLSTHNVINAENAPGGPYKIGTSGSCPNVTNGNGFFATMAWAVPKNDKNKTATNPLTIEVPYICTEGEDQITVWGFHSDNETQMAKLYGDSNPQKFTSSANGVTTHYVSQIGGFPNQTEDGGLPQSGRIVVDYMVQKSGKTGTITYQRGILLPQKVWCASGRSKVIKGSLPLIGEADCLHEKYGGLNKSKPYYTGEHAKAIGNCPIWVKTPLKLANGTKYRPPAKLLKERGFFGAIAGFLEGGWEGMIAGWHGYTSHGAHGVAVAADLKSTQEAINKITKNLNSLSELEVKNLQRLSGAMDELHNEILELDEKVDDLRADTISSQIELAVLLSNEGIINSEDEHLLALERKLKKMLGPSAVEIGNGCFETKHKCNQTCLDRIAAGTFDAGEFSLPTFDSLNITAASLNDDGLDNHTILLYYSTAASSLAVTLMIAIFVVYMVSRDNVSCSICL

SEQ ID NO: 27866 - protein, 585 aa, Artificial Sequence; identical to SEQ ID NO: 26887
  derived and/or modified protein sequence (wt) from hemagglutinin__InfluenzaB__AHE38022

SEQ ID NO: 27867 - protein, 583 aa, Artificial Sequence
  derived and/or modified protein sequence (wt) from hemagglutinin__InfluenzaB__AHL91189
MKAIIVLLMVATSNADRICTGITSSNSPHVVKTATQGEVNVTGVISLTTTPTKSHFANLKGTKTRGKLCPNCLNCTDLDVALGRPICIGTIPSAKASILHEVRPVTSGCFPIMHDRTKIRQLPNLLRGYEHIRLSTHNVINAERAPGGPYRLGTSGSCPNVTSRSGFFATMAWAVPRDNKTATNPLTVEVPYICTKGEDQITVWGFHSDNKTQMKNLYGDSNPQKFTSSANGVTTHYVSQIGGFPNQTEDGGLPQSGRIVVDYMVQKPGKTGTIVYQRGVLLPQKVWCASGRSKVIKGSLPLIGEADCLHEKYGGLNKSKPYYTGEHAKAIGNCPIWVKTPLKLANGTKYRPPAKLLKERGFFGAIAGFLEGGWEGMIAGWHGYTSHGAHGVAVAADLKSTQEAINKITKNLNSLSELEVKNLQRLSGAMDELHNEILELDEKVDDLRADTISSQIELAVLLSNEGIINSEDEHLLALERKLKKMLGPSAVDIGNGCFETKHKCNQTCLDRIAAGTFNAGEFSLPTFDSLNITAASLNDDGLDNHTILLYYSTAASSLAVTLMIAIFIVYMVSRDNVSCSICL

SEQ ID NO: 27868 - protein, 583 aa, Artificial Sequence
  derived and/or modified protein sequence (wt) from hemagglutinin__InfluenzaB__AHL91200
MKAIIVLLMVVTSNADRICTGITSSNSPHVVKTATQGEVNVTGVIPLTTTPTKSHFANLKGTKTRGKLCPNCLNCTDLDVALGRPMCIGTIPSAKASILHEVRPVTSGCFPIMHDRTKIRQLPNLLRGYEHIRLSTHNVINAERAPGGPYRLGTSGSCPNVTSRSGFFATMAWAVPRDNKTATNPLTVEVPYICTKGEDQITVWGFHSDNKTQMKNLYGDSNPQKFTSSANGVTTHYVSQIGDFPNQTEDGGLPQSGRIVVDYMVQKPGKTGTIVYQRGVLLPQKVWCASGRSKVIKGSLPLIGEADCLHEKYGGLNKSKPYYTGEHAKAIGNCPIWVKTPLKLANGTKYRPPAKLLKERGFFGAIAGFLEGGWEGMIAGWHGYTSHGAHGVAVAADLKSTQEAINKITKNLNSLSELEVKNLQRLSGAMDELHNEILELDEKVDDLRADTISSQIELAVLLSNEGIINSEDEHLLALERKLKKMLGPSAVDIGNGCFETKHKCNQTCLDRIAAGTFNAGEFSLPTFDSLNITAASLNDDGLDNHTILLYYSTAASSLAVTLMIAIFIVYMVSRDNVSCSICL

SEQ ID NO: 27869 - protein, 583 aa, Artificial Sequence
  derived and/or modified protein sequence (wt) from hemagglutinin__InfluenzaB__AHL91211
MKAIIVLLMVATSNADRICTGITSSNSPHVVKTATQGEVNVTGVISLTTTPTKSHFANLKGTKTRGKLCPNCLNCTDLDVALGRPMCIGTIPSAKASILHEVRPVTSGCFPIMHDRTKIRQLPNLLRGYEHIRLSTHNVINAERAPGGPYRLGTSGSCPNVTSRSGFFATMAWAVPRDNKTATNPLTVEVPYICTKGEDQITVWGFHSDNKTQMKNLYGDSNPQKFTSSANGVTTHYVSQIGGFPNQTEDGGLPQSGRIVVDYMVQKPGKTGTIVYQRGVLLPQKVWCASGRSKVIKGSLPLIGEADCLHEKYGGLNKSKPYYTGEHAKAIGNCPIWVKTPLKLANGTKYRPPAKLLKERGFFGAIAGFLEGGWEGMIAGWHGYTSHGAHGVAVAADLKSTQEAINKITKNLNSLSELEVKNLQRLSGAMDELHNEILELDEKVDDLRADTISSQIELAVLLSNEGIINSEDEHLLALERKLKKMLGPSAVDIGNGCFETKHKCNQTCLDRIAAGTFNAGEFSLPTFDSLNITAASLNDDGLDNHTILLYYSTAASSLAVTLMIAIFIVYMVSRDNVSCSICL

SEQ ID NO: 27870 - protein, 584 aa, Artificial Sequence
  derived and/or modified protein sequence (wt) from hemagglutinin__InfluenzaB__AHL91222
MKAIIVLLMVVTSNADRICTGITSSNSPHVVKTATQGEVNVTGVIPLTTTPTKSHFANLKGTKTRGKLCPNCLNCTDLDVALGRPMCVGTTPSAKASILHEVRPVTSGCFPIMHDRTKIRQLPNLLRGYENIRLSTQNVINAEKAPGGPYRLGTSGSCPNATSRSGFFATMAWAVPRDNNKTATNPLTVEVPYVCTEGEDQITVWGFHSDNKTQMKNLYGDSNPQKFTSSANGVTTHYVSQIGGFPDQTEDGGLPQSGRIVVDYMVQKPGKTGTIVYQRGVLLPQKVWCASGRSKVIKGSLPLIGEADCLHEKYGGLNKSKPYYTGEHAKAIGNCPIWVKTPLKLANGTKYRPPAKLLKERGFFGAIAGFLEGGWEGMIAGWHGYTSHGAHGVAVAADLKSTQEAINKITKNLNSLSELEVKNLQRLSGAMDELHNEILELDEKVDDLRADTISSQIELAVLLSNEGIINSEDEHLLALERKLKKMLGPSAVDIGNGCFETKHKCNQTCLDRIAAGTFNAGEFSLPTFDSLNITAASLNDDGLDNHTILLYYSTAASSLAVTLMIAIFIVYMVSRDNISCSICL

SEQ ID NO: 27871 - protein, 584 aa, Artificial Sequence
  derived and/or modified protein sequence (wt) from hemagglutinin__InfluenzaB__AHL91244
MKAIIVLLMVVTSNADRICTGITSSNSPHVVKTATQGEVNVTGVIPLTTTPTKSHFANLKGTKTRGKLCPTCLNCTDLDVALGRPMCVGTTPSAKASILHEVRPVTSGCFPIMHDRTKIRQLPNLLRGYEKIRLSTQNVINAEKAPGGPYRLGTSGSCPNATSRSGFFATMAWAVPRDNNKTATNPLTVEVPYICTKEEDQITVWGFHSDNKTQMKNLYGDSNPQKFTSSANGVTTHYVSQIGGFPDQTEDGGLPQSGRIVVDYMVQKPGKTGTIVYQRGVLLPQKVWCASGRSKVIKGSLPLIGEADCLHEKYGGLNKSKPYYTGEHAKAIGNCPIWVKTPLKLANGTKYRPPAKLLKERGFFGAIAGFLEGGWEGMIAGWHGYTSHGAHGVAVAADLKSTQEAINKITKNLNSLSELEVKNLQRLSGAMDELHNEILELDEKVDDLRADTISSQIELAVLLSNEGIINSEDEHLLALERKLKKMLGPSAVDIGNGCFETKHKCNQTCLDRIAAGTFNAGEFSLPTFDSLNITAASLNDDGLDNHTILLYYSTAASSLAVTLMIAIFIVYMVSRDNVSCSICL

SEQ ID NO: 27872 - protein, 584 aa, Artificial Sequence; identical to SEQ ID NO: 26501
  derived and/or modified protein sequence (wt) from hemagglutinin__InfluenzaB__AHL91255

SEQ ID NO: 27873 - protein, 584 aa, Artificial Sequence; identical to SEQ ID NO: 26501
  derived and/or modified protein sequence (wt) from hemagglutinin__InfluenzaB__AHL91266

SEQ ID NO: 27874 - protein, 583 aa, Artificial Sequence
  derived and/or modified protein sequence (wt) from hemagglutinin__InfluenzaB__AHL91277
MKAIIVLLMVVTSNADRICTGITSSNSPHVVKTATQGEVNVTGVIPLTTTPTKSHFANLKGTKTRGKLCPNCLNCTDLDVALGRPMCIGITPSAKASILHEVRPVTSGCFPIMHDRTKIRQLPNLLRGYEHIRLSTHNVINAERAPGGPYRLGTSGSCPNVTSRSGFFATMAWAVPRDNKTATNPLTVEVPYICTKGEDQITVWGFHSDNKTQMKNLYGDSNPQKFTSSANGITTHYVSQIGGFPNQTEDGGLPQSGRIVVDYMVQKPGKTGTIVYQRGVLLPQKVWCASGRSKVIKGSLPLIGEADCLHEKYGGLNKSKPYYTGEHAKAIGNCPIWVKTPLKLANGTKYRPPAKLLKERGFFGAIAGFLEGGWEGMIAGWHGYTSHGAHGVAVAADLKSTQEAINKITKNLNSLSELEVKNLQRLSGAMDELHNEILELDEKVDDLRADTISSQIELAVLLSNEGIINSEDEHLLALERKLKKMLGPSAVDIGNGCFETKHKCNQTCLDRIAAGTFNAGEFSLPTFDSLNITAASLNDDGLDNHTILLYYSTAASSLAVTLMIAIFIVYMVSRDNVSCSICL

SEQ ID NO: 27875 - protein, 584 aa, Artificial Sequence
  derived and/or modified protein sequence (wt) from hemagglutinin__InfluenzaB__AHL91299
MKAIIVLLMVVTSNADRICTGITSSNSPHVVKTATQGEVNVTGVIPLTTTPTRSHFANLKGTKTRGKLCPTCLNCTDLDVALGRPMCVGTTPSAKASILHEVRPVTSGCFPIMHDRTKIRQLPNLLRGYEKIRLSTQNVINAEKAPGGPYRLGTSGSCPNATSRSGFFATMAWAVPRDNNKTATNPLTVEVPYICTKEEDQITVWGFHSDNKTQMKNLYGDSNPQKFTSSANGVTTHYVSQIGGFPDQTEDGGLPQSGRIVVDYMVQKPGKTGTIVYQRGILLPQKVWCASGRSKVIKGSLPLIGEADCLHEKYGGLNKSKPYYTGEHAKAIGNCPIWVKTPLKLANGTKYRPPAKLLKERGFFGAIAGFLEGGWEGMIAGWHGYTSHGAHGVAVAADLKSTQEAINKITKNLNSLSELEVKNLQRLSGAMDELHNEILELDEKVDDLRADTISSQIELAVLLSNEGIINSEDEHLLALERKLKKMLGPSAVDIGNGCFETKHKCNQTCLDRIAAGTFNAGEFSLPTFDSLNITAASLNDDGLDNHTILLYYSTAASSLAVTLMIAIFIVYMISRDNVSCSICL

SEQ ID NO: 27876 - protein, 584 aa, Artificial Sequence
  derived and/or modified protein sequence (wt) from hemagglutinin__InfluenzaB__AHL91310
MKAIIVLLMVVTSNADRICTGITSSNSPHVVKTATQGEVNVTGVIPLTTTPTKSHFANLKGTKTRGKLCPTCLNCTDLDVALGRPMCVGTTPSAKASILHEVRPVTSGCFPIMHDRTKIRQLPNLLRGYEKIRLSTQNVINAEKAPGGPYRLGTSGSCPNATSRSGFFATMAWAVPRDNNKTATNPLTVEVPYICTKEEDQITVWGFHSDNKTQMKNLYGDSNPQKFTSSANGVTTHYVSQIGGFPDQTEDGGLPQSGRIVVDYMVQKPGKTGTIVYQRGILLPQKVWCASGRSKVIKGSLPLIGEADCLHEKYGGLNKSKPYYTGEHAKAIGNCPIWVKTPLKLANGTKYRPPAKLLKERGFFGAIAGFLEGGWEGMIAGWHGYTSHGAHGVAVAADLKSTQEAINKITKNLNSLSELEVKNLQRLSGAMDELHNEILELDEKVDDLRADTISSQIELAVLLSNEGIINSEDEHLLALERKLKKMLGPSAVDIGNGCFETKHKCNQTCLDRIAAGTFNAGEFSLPTFDSLNITAASLNDDGLDNHTILLYYSTAASSLAVTLMIAIFIVYMISRDNVSCSICL

SEQ ID NO: 27877 - protein, 584 aa, Artificial Sequence
  derived and/or modified protein sequence (wt) from hemagglutinin__InfluenzaB__AHL91321
MKAIIVLLMVVTSNADRICTGITSSNSPHVVKTATQGEVNVTGVIPLTTTPTKSHFANLKGTKTRGKLCPTCLNCTDLDVALGRPMCVGTTPSAKASILHEVRPVTSGCFPIMHDRTKIRQLPNLLRGYEKIRLSTQNVINAEKAPGGPYRLGTSGSCPNATSRSGFFATMAWAVPRDNNKTATNPLTVEVPYICTKEEDQITVWGFHSDNKTQMKNLYGDSNPQKFTSSANGVTTHYVSQIGGFPDQTEDGGLPQSGRIVVDYMVQKPGKTGTIVYQRGVLLPQKVWCASGRSKVIKGSLPLIGEADCLHEKYGGLNKSKPYYTGEHAKAIGNCPIWVKTPLKLANGTKYRPPAKLLKEKGFFGAIAGFLEGGWEGMIAGWHGYTSHGAHGVAVAADLKSTQEAINKITKNLNSLSELEVKNLQRLSGAMDELHNEILELDEKVDDLRADTISSQIELAVLLSNEGIINSEDEHLLALERKLKKMLGPSAVDIGNGCFETKHKCNQTCLDRIAAGTFNAGEFSLPTFDSLNITAASLNDDGLDNHTILLYYSTAASSLAVTLMIAIFIVYMVSRDNVSCSICL

SEQ ID NO: 27878 - protein, 584 aa, Artificial Sequence; identical to SEQ ID NO: 27876
  derived and/or modified protein sequence (wt) from hemagglutinin__InfluenzaB__AHL91332

SEQ ID NO: 27879 - protein, 584 aa, Artificial Sequence; identical to SEQ ID NO: 27876
  derived and/or modified protein sequence (wt) from hemagglutinin__InfluenzaB__AHL91343

SEQ ID NO: 27880 - protein, 584 aa, Artificial Sequence; identical to SEQ ID NO: 27876
  derived and/or modified protein sequence (wt) from hemagglutinin__InfluenzaB__AHL91354

SEQ ID NO: 27881 - protein, 584 aa, Artificial Sequence; identical to SEQ ID NO: 26479
  derived and/or modified protein sequence (wt) from hemagglutinin__InfluenzaB__AHL91365

SEQ ID NO: 27882 - protein, 584 aa, Artificial Sequence
  derived and/or modified protein sequence (wt) from hemagglutinin__InfluenzaB__AHL91376
MKAIIVLLMVVTSNADRICTGITSSNSPHVVKTATQGEVNVTGVIPLTATPTKSHFANLKGTKTRGKLCPTCLNCTDLDVALGRPMCVGVTPSAKASILHEVRPVTSGCFPIMHDRTKIRQLPNLLRGYEKIRLSTQNVINAEKAPGGPYRLGTSGSCPNATSRSGFFATMAWAVPRDNNKTATNPLTVEVPHICTKEEDQITVWGFHSDNKTQMKNLYGDSNPQKFTSSANGVTTHYVSQIGGFPDQTEDGGLPQSGRIVVDYMVQKPGKTGTIVYQRGILLPQKVWCASGRSKVIKGSLPLIGEADCLHEKYGGLNKSKPYYTGEHAKAIGNCPIWVKTPLKLANGTKYRPPAKLLKERGFFGAIAGFLEGGWEGMIAGWHGYTSHGAHGVAVAADLKSTQEAINKITKNLNSLSELEVKNLQRLSGAMDELHNEILELDEKVDDLRADTISSQIELAVLLSNEGIINSEDEHLLALERKLKKMLGPSAVDIGNGCFETKHKCNQTCLDRIAAGTFNAGEFSLPTFDSLNITAASLNDDGLDNHTILLYYSTAASSLAVTLMIAIFIVYMISRDNVSCSICL

SEQ ID NO: 27883 - protein, 584 aa, Artificial Sequence
  derived and/or modified protein sequence (wt) from hemagglutinin__InfluenzaB__AHL91387
MKAIIVLLMVVTSNADRICTGITSSNSPHVVKTATQGEVNVTGVIPLTTTPAKSHFANLKGTKTRGKLCPTCLNCTDLDVALGRPMCVGVTPSAKASILHEVRPVTSGCFPIMHDRTKIRQLPNLLRGYEKIRLSTQNVINAEKAPGGPYRLGTSGSCPNATSRSGFFATMAWAVPRDNNKTATNPLTVEVPHICTKEEDQITVWGFHSDNKTQMKNLYGDSNPQKFTSSANGVTTHYVSQIGGFPDQTEDGGLPQSGRIVVDYMVQKPGKTGTIVYQRGILLPQKVWCASGRSKVIKGSLPLIGEADCLHEKYGGLNKSKPYYTGEHAKAIGNCPIWVKTPLKLANGTKYRPPAKLLKERGFFGAIAGFLEGGWEGMIAGWHGYTSHGAHGVAVAADLKSTQEAINKITKNLNSLSELEVKNLQRLSGAMDELHNEILELDEKVDDLRADTISSQIELAVLLSNEGIINSEDEHLLALERKLKKMLGPSAVDIGNGCFETKHKCNQTCLDRIAAGTFNAGEFSLPTFDSLNITAASLNDDGLDNHTILLYYSTAASSLAVTLMIAIFIVYMISRDNVSCSICL

SEQ ID NO: 27884 - protein, 584 aa, Artificial Sequence
  derived and/or modified protein sequence (wt) from hemagglutinin__InfluenzaB__AHL91409
MKAIIVLLMVVTSNADRICTGITSSDSPHVVKTATQGEVNVTGAIPLTTTPTKSYFANLKGTKTRGKLCPTCLNCTDLDVALGRPMCVGITPSAKASILHEVRPVTSGCFPIMHDRTKIRQLPNLLRGYEKIRLSTQNVINAEKAPGGPYRLGTSGSCPNATSRSGFFATMAWAVPRDNNKTATNPLTVEVPHICTKEEDQITVWGFHSDNKTQMKNLYGDSNPQKFTSSANGITTHYVSQIGGFPDQTEDGGLPQSGRIVVDYMVQKPGKTGTIVYQRGILLPQKVWCASGRSKVIKGSLPLIGEADCLHEKYGGLNKSKPYYTGEHAKAIGNCPIWVKTPLKLANGTKYRPPAKLLKERGFFGAIAGFLEGGWEGMVAGWHGYTSHGAHGVAVAADLKSTQEAINKITKNLNSLSELEVKNLQRLSGAMDELHNEILELDEKVDDLRADTISSQIELAVLLSNEGIINSEDEHLLALERKLKKMLGPSAVDIGNGCFETKHKCNQTCLDRIAAGTFNAGEFSLPTFDSLNITAASLNDDGLDNHTILLYYSTAASSLAVTLMIAIFIVYMISRDNVSCSICL

SEQ ID NO: 27885 - protein, 584 aa, Artificial Sequence
  derived and/or modified protein sequence (wt) from hemagglutinin__InfluenzaB__AHL91431
MKAIIVLLMVVTSNADRICTGITSSNSPHVVKTATQGEVNVTGAIPLTTTPTKSHFANLKGTKTRGKLCPTCLNCTDLDVALGRPMCVGITPSAKASILHEVRPVTSGCFPIMHDRTKIRQLPNLLRGYEKIRLSTQNVINAEKAPGGPYRLGTSGSCPNATSKSGFFATMAWAVPRDNNKTATNPLTVEVPHICTKEEDQITVWGFHSDNKTQMKNLYGDSNPQKFTSSANGITTHYVSQIGGFPDQTEDGGLPQSGRIVVDYMVQKPGKTGTIVYQRGILLPQKVWCASGRSKVIKGSLPLIGEADCLHEKYGGLNKSKPYYTGEHAKAIGNCPIWVKTPLKLANGTKYRPPAKLLKERGFFGAIAGFLEGGWEGMIAGWHGYTSHGAHGVAVAADLKSTQEAINKITKNLNFLSELEVKNLQRLSGAMDELHNEILELDEKVDDLRADTISSQIELAVLLSNEGIINSEDEHLLALERKLKKMLGPSAVDIGNGCFETKHKCNQTCLDRIAAGTFNAGEFSLPTFDSLNITAASLNDDGLDNHTILLYYSTAASSLAVTLMIAIFIVYMISRDNVSCSICL

SEQ ID NO: 27886 - protein, 584 aa, Artificial Sequence
  derived and/or modified protein sequence (wt) from hemagglutinin__InfluenzaB__AHL91442
MKAIIVLLMVVTSNADRICTGITSSNSPHVVKTATQGEVNVTGAIPLTTTPTKSHFANLKGTKTRGKLCPTCLNCTDLDVALGRPMCVGITPSAKASILHEVRPVTSGCFPIMHDRTKIRQLPNLLRGYEKIRLSTQNVINAETAPGGPYRLGTSGSCPNATSKSGFFATMAWAVPRDNNKTATNPLTVEVPHICTKEEDQITVWGFHSDNKTQMKNLYGDSNPQKFTSSANGITTHYVSQIGGFPDQTEDGGLPQSGRIVVDYMVQKPGKTGTIVYQRGILLPQKVWCASGRSKVIKGSLPLIGEADCLHEKYGGLNKSKPYYTGEHAKAIGNCPIWVKTPLKLANGTKYRPPAKLLKERGFFGAIAGFLEGGWEGMIAGWHGYTSHGAHGVAVAADLKSTQEAINKITKNLNSLSELEVKNLQRLSGAMDELHNEILELDEKVDDLRADTISSQIELAVLLSNEGIINSEDEHLLALERKLKKMLGPSAVDIGNGCFETKHKCNQTCLDRIAAGTFNAGEFSLPTFDSLNITAASLNDDGLDNHTILLYYSTAASSLAVTLMIAIFIVYMISRDNVSCSICL

SEQ ID NO: 27887 - protein, 584 aa, Artificial Sequence
  derived and/or modified protein sequence (wt) from hemagglutinin__InfluenzaB__AHL91453
MKAIIVLLMVVTSNADRICTGITSSNSPHVVKTATQGEVNVTGAIPLTTTPTKSHFANLKGTKTRGKLCPTCLNCTDLDVALGRPMCVGITPSAKASILHEVRPVTSGCFPIMHDRTKIRQLPNLLRGYEKIRLSTQNVINAEKAPGGPYRLGTSGSCPNATSKSGFFATMAWAVPRDNNKTATNPLTIEVPHVCTKEEDQITVWGFHSDNKTQMKNLYGDSNPQKFTSSANGITTHYVSQIGGFPDQTEDGGLPQSGRIVVDYMVQKPGKTGTIVYQRGILLPQKVWCASGRSKVIKGSLPLIGEADCLHEKYGGLNKSKPYYTGEHAKAIGNCPIWVKTPLKLANGTKYRPPAKLLKERGFFGAIAGFLEGGWEGMIAGWHGYTSHGAHGVAVAADLKSTQEAINKITKNLNSLSELEVKNLQRLSGAMDELHNEILELDEKVDDLRADTISSQIELAVLLSNEGIINSEDEHLLALERKLKKMLGPSAVDIGNGCFETKHKCNQTCLDRIAAGTFNAGEFSLPTFDSLNITAASLNDDGLDNHTILLYYSTAASSLAVTLMIAIFIVYMISRDNVSCSICL

SEQ ID NO: 27888 - protein, 584 aa, Artificial Sequence; identical to SEQ ID NO: 26405
  derived and/or modified protein sequence (wt) from hemagglutinin__InfluenzaB__AHL91464

SEQ ID NO: 27889 - protein, 584 aa, Artificial Sequence; identical to SEQ ID NO: 26511
  derived and/or modified protein sequence (wt) from hemagglutinin__InfluenzaB__AHL91475

SEQ ID NO: 27890 - protein, 584 aa, Artificial Sequence; identical to SEQ ID NO: 27886
  derived and/or modified protein sequence (wt) from hemagglutinin__InfluenzaB__AHL91486

SEQ ID NO: 27891 - protein, 584 aa, Artificial Sequence; identical to SEQ ID NO: 27886
  derived and/or modified protein sequence (wt) from hemagglutinin__InfluenzaB__AHL91497

SEQ ID NO: 27892 - protein, 584 aa, Artificial Sequence; identical to SEQ ID NO: 27886
  derived and/or modified protein sequence (wt) from hemagglutinin__InfluenzaB__AHL91530

SEQ ID NO: 27893 - protein, 584 aa, Artificial Sequence; identical to SEQ ID NO: 26405
  derived and/or modified protein sequence (wt) from hemagglutinin__InfluenzaB__AHL91541

SEQ ID NO: 27894 - protein, 584 aa, Artificial Sequence; identical to SEQ ID NO: 27886
  derived and/or modified protein sequence (wt) from hemagglutinin__InfluenzaB__AHL91552

SEQ ID NO: 27895 - protein, 584 aa, Artificial Sequence; identical to SEQ ID NO: 27886
  derived and/or modified protein sequence (wt) from hemagglutinin__InfluenzaB__AHL91574

SEQ ID NO: 27896 - protein, 584 aa, Artificial Sequence
  derived and/or modified protein sequence (wt) from hemagglutinin__InfluenzaB__AHL91585
MKAIIVLLMVVTSNADRICTGITSSNSPHVVKTATQGEVNVTGAIPLTTTPTKSHFANLKGTKTRGKLCPTCLNCTDLDVALGRPMCVGITPSAKASILHEVRPVTSGCFPIMHDRTKIRQLPNLLRGYEKIRLSTQNVINAEKAPGGPYRLGTSGSCPNATSKSGFFATMAWAVPRDNNKTATNPLTVEVPHICTKEEDQITVWGFHSDNKTQMKNLYGDSNPQKFTSSANGMTTHYVSQIGGFPDQTEDGGLPQSGRIVVDYMVQKPGKTGTIVYQRGILLPQKVWCASGRSKVIKGSLPLIGEADCLHEKYGGLNKSKPYYTGEHAKAIGNCPIWVKTPLKLANGTKYRPPAKLLKERGFFGAIAGFLEGGWEGMIAGWHGYTSHGAHGVAVAADLKSTQEAINKITKNLNSLSELEVKNLQRLSGAMDELHNEILELDEKVDDLRADTISSQIELAVLLSNEGIINSEDEHLLALERKLKKMLGPSAVDIGNGCFETKHKCNQTCLDRIAAGTFNAGEFSLPTFDSLNITAASLNDDGLDNHTILLYYSTAASSLAVTLMIAIFIVYMISRDNVSCSICL

SEQ ID NO: 27897 - protein, 584 aa, Artificial Sequence
  derived and/or modified protein sequence (wt) from hemagglutinin__InfluenzaB__AHL91596
MKAIIVLLMVVTSNADRICTGITSSNSPHVVKTATQGEVNVTGAIPLTTTPTKSHFANLKGTKTRGKLCPTCLNCTDLDVALGRPMCVGITPSAKASILHEVRPVTSGCFPIMHDRTKIRQLPNLLRGYEKIRLSTQNVINAEKAPGGPYRLGTSGSCPNATSKSGFFATMAWAVPRDNNKTATNPLTVEVPHICTKEEDQITVWGFHSDNKTQMKNLYGDSNPQKFTSSANGITTHYVSQIGGFPDQTEDGGLPQSGRIVVDYMVQKPGKTGTIVYQRGILLPQKVWCASGRSKVIKGSLPLIGEADCLHEKYGGLNKSKPYYTGEHAKAIGNCPIWVKTPLKLANGTKYRPPAKILKERGFFGAIAGFLEGGWEGMIAGWHGYTSHGAHGVAVAADLKSTQEAINKITKNLNSLSELEVKNLQRLSGAMDELHNEILELDEKVDDLRADTISSQIELAVLLSNEGIINSEDEHLLALERKLKKMLGPSAVDIGNGCFETKHKCNQTCLDRIAAGTFNAGEFSLPTFDSLNITAASLNDDGLDNHTILLYYSTAASSLAVTLMIAIFIVYMISRDNVSCSICL

SEQ ID NO: 27898 - protein, 584 aa, Artificial Sequence; identical to SEQ ID NO: 27897
  derived and/or modified protein sequence (wt) from hemagglutinin__InfluenzaB__AHL91607

SEQ ID NO: 27899 - protein, 584 aa, Artificial Sequence
  derived and/or modified protein sequence (wt) from hemagglutinin__InfluenzaB__AHL91618
MKAIIVLLMVVTSNADRICTGITSSNSPHVVKTATQGEVNVTGAIPLTTTPTKSHFANLKGTKTRGKLCPTCLNCTDLDVALGRPMCVGITPSAKASILHEVRPVTSGCFPIMHDRTKIRQLPNLLRGYEKIRLSTQNVINAETAPGGPYRLGTSGSCPNATSKSGFFATMAWAVPRDNNKTATNPLTVEVPHICTKEEDQITVWGFHSDNKTQMKNLYGDSNPQKFTSSANGITTHYVSQIGGFPDQTEDGGLPQSGRIVVDYMVQKPGKTGTIVYQRGILLPQKVWCASGRSKVIKGSLPLIGEADCLHEKYGGLNKSKPYYTGEHAKAIGNCPIWVKTPLKLANGTKYRPPAKLLKERGFFGAIAGFLEGGWEGMIAGWHGYTSHGAHGVAVAADLKSTQEAINKITKNLNSLSELEVKNLQRLSGAMDELHNEILELDEKVDDLRADTISSQIELAVLLSNEGIINSEDEHLLALERKLKKMLGPSAVDIGNGCFETKHKCNQTCLDRIAAGTFNVGEFSLPTFDSLNITAASLNDDGLDNHTILLYYSTAASSLAVTLMIAIFIVYMISRDNVSCSICL

SEQ ID NO: 27900 - protein, 584 aa, Artificial Sequence
  derived and/or modified protein sequence (wt) from hemagglutinin__InfluenzaB__AHL91629
MKAIIVLLMVVTSNADRICTGITSSNSPHVVKTATQGEVNVTGAIPLTTTPTKSHFANLKGTKTRGKLCPTCFNCTDLDVALGRPMCVGITPSAKASILHEVRPVTSGCFPIMHDRTKIRQLPNLLRGYEKIRLSTQNVIDAEKAPGGPYKLGTSGSCPNATSKSGFFATMAWAVPRDNNKTATNPLTVEVPHICTKEEDQITVWGFHSDNKTQMKNLYGDSNPQKFTSSANGITTHYVSQIGGFPDQTEDGGLPQSGRIVVDYMVQKPGKTGTIVYQRGILLPQKVWCASGRSKVIKGSLPLIGEADCLHEKYGGLNKSKPYYTGEHAKAIGNCPIWVKTPLKLANGTKYRPPAKLLKERGFFGAIAGFLEGGWEGMIAGWHGYTSHGAHGVAVAADLKSTQEAINKITKNLNSLSELEVKNLQRLSGAMDELHNEILELDEKVDDLRADTISSQIELAVLLSNEGIINSEDEHLLALERKLKKMLGPSAVDIGNGCFETKHKCNQTCLDRIAAGTFNAGEFSLPTFDSLNITAASLNDDGLDNHTILLYYSTAASSLAVTLMIAIFIVYMISRDNVSCSICL

SEQ ID NO: 27901 - protein, 584 aa, Artificial Sequence; identical to SEQ ID NO: 27900
  derived and/or modified protein sequence (wt) from hemagglutinin__InfluenzaB__AHL91640

SEQ ID NO: 27902 - protein, 584 aa, Artificial Sequence; identical to SEQ ID NO: 26407
  derived and/or modified protein sequence (wt) from hemagglutinin__InfluenzaB__AHL91651

SEQ ID NO: 27903 - protein, 583 aa, Artificial Sequence
  derived and/or modified protein sequence (wt) from hemagglutinin__InfluenzaB__AHL91662
MKAIIVLLMVVTSNADRICTGITSSNSPHVVKTATQGEVNVTGAIPLTTTPTKSHFANLKGTKTRGKLCPTCLNCTDLDVALGRPMCVGITPSAKASILHEVRPVTSGCFPIMHDRTKIRQLPNLLRGYEKIRLSTQNVINAETAPGGPYRLGTSGSCPNATSKSGFFATMAWAVPRDNNKTATNPLTVEVPHICTKEEDQITVWGFHSDNKTQMKNLYGDSNPQKFTSSANGITTHYVSQIGGFPDQTEDGGLPQSGRIVVDYMVQKPGKTGTIVYQRGILLPQKVWCASGRSKVIKGSLPLIGEADCLHEKYGGLNKSKPYYTGEHAKAIGNCPIWVKTPLKLANGTKYRPPAKLLKERGFFGAIAGFLEGGWEGMIAGWHGYTSHGAHGVAVAADLKSTQEAINKITKNLNSLSELEVKNLQRLSGAMDELHNEILELDEKVDDLRADTISSQIELAVLLSNEGIINSEDEHLLALERKLKKMLGPSAVDIGNGCFETKHKCNQTCLDRIAAGTFNAGEFSLPTFDSLNITAASLNDGLDNHTILLYYSTAASSLAVTLMIAIFIVYMISRDNVSCSICL

SEQ ID NO: 27904 - protein, 584 aa, Artificial Sequence; identical to SEQ ID NO: 26511
  derived and/or modified protein sequence (wt) from hemagglutinin__InfluenzaB__AHL91673

SEQ ID NO: 27905 - protein, 584 aa, Artificial Sequence
  derived and/or modified protein sequence (wt) from hemagglutinin__InfluenzaB__AHL91684
MKAIIVLLMVVTSNADRICTGITSSNSPHVVKTATQGEVNVTGAIPLTTTPTKSHFANLKGTKTRGKLCPTCLNCTDLDVALGRPMCVGITPSAKASILHEVRPVTSGCFPIMHDRTKIRQLPNLLRGYEKIRLSTQNVINAEKAPGGPYRLGTSGSCPNATSKSGFFATMAWAVPRDNNKTATNPLTIEVPHICTKEEDQITVWGFHSDNKTQMKNLYGDSNPQKFTSSANGITTHYVSQIGGFPDQTEDGGLPQSGRIVVDYMVQKPGKTGTIVYQRGILLPQKVWCASGRSKVIKGFLPLIGEADCLHEKYGGLNKSKPYYTGEHAKAIGNCPIWVKTPLKLANGTKYRPPAKLLKERGFFGAIAGFLEGGWEGMIAGWHGYTSHGAHGVAVAADLKSTQEAINKITKNLNSLSELEVKNLQRLSGAMDELHNEILELDEKVDDLRADTISSQIELAVLLSNEGIINSEDEHLLALERKLKKMLGPSAVDIGNGCFETKHKCNQTCLDRIAAGTFNAGEFSLPTFDSLNITAASLNDDGLDNHTILLYYSTAASSLAVTLMIAIFIVYMISRDNVSCSICL

SEQ ID NO: 27906 - protein, 584 aa, Artificial Sequence; identical to SEQ ID NO: 26407
  derived and/or modified protein sequence (wt) from hemagglutinin__InfluenzaB__AHL91695

SEQ ID NO: 27907 - protein, 584 aa, Artificial Sequence; identical to SEQ ID NO: 26511
  derived and/or modified protein sequence (wt) from hemagglutinin__InfluenzaB__AHL91706

SEQ ID NO: 27908 - protein, 585 aa, Artificial Sequence; identical to SEQ ID NO: 26979
  derived and/or modified protein sequence (wt) from hemagglutinin__InfluenzaB__AHL91717

SEQ ID NO: 27909 - protein, 585 aa, Artificial Sequence; identical to SEQ ID NO: 26979
  derived and/or modified protein sequence (wt) from hemagglutinin__InfluenzaB__AHL91728

SEQ ID NO: 27910 - protein, 585 aa, Artificial Sequence; identical to SEQ ID NO: 26979
  derived and/or modified protein sequence (wt) from hemagglutinin__InfluenzaB__AHL91739

SEQ ID NO: 27911 - protein, 584 aa, Artificial Sequence; identical to SEQ ID NO: 26511
  derived and/or modified protein sequence (wt) from hemagglutinin__InfluenzaB__AHL91750

SEQ ID NO: 27912 - protein, 585 aa, Artificial Sequence; identical to SEQ ID NO: 26979
  derived and/or modified protein sequence (wt) from hemagglutinin__InfluenzaB__AHL91761

SEQ ID NO: 27913 - protein, 585 aa, Artificial Sequence
  derived and/or modified protein sequence (wt) from hemagglutinin__InfluenzaB__AHL91772
MKAIIVLLMVVTSNADRICTGITSSNSPHVVKTATQGEVNVTGVIPLTTTPTKSHFANLKGTKTRGKLCPKCLNCTDLDVALGRPKCTGNIPSAKVSILHEVRPVTSGCFPIMHDRTKIRQLPNLLRGYEHIRLSTHNVINAEKAPGGPYKIGTSGSCPNITNGNGFFATMAWAVPKNDNNKTATNSLTIEVPYICTEGEDQITVWGFHSDNETQMAKLYGDSKPQKFTSSANGVTTHYVSQIGGFPNQTEDGGLPQSGRIVVDYMVQKSGKTGTITYQRGILLPQKVWCASGRSKVIKGSLPLIGEADCLHEKYGGLNKSKPYYTGEHAKAIGNCPIWVKTPLKLANGTKYRPPAKLLKERGFFGAIAGFLEGGWEGMIAGWHGYTSHGAHGVAVAADLKSTQEAINKITKNLNSLSELEVKNLQRLSGAMDELHNEILELDEKVDDLRADTISSQIELAVLLSNEGIINSEDEHLLALERKLKKMLGPSAVEIGNGCFETKHKCNQTCLDRIAAGTFDAGEFSLPTFDSLNITAASLNDDGLDNHTILLYYSTAASSLAVTLMIAIFVVYMVSRDNVSCSICL

SEQ ID NO: 27914 - protein, 585 aa, Artificial Sequence; identical to SEQ ID NO: 27913
  derived and/or modified protein sequence (wt) from hemagglutinin__InfluenzaB__AHL91783

SEQ ID NO: 27915 - protein, 585 aa, Artificial Sequence; identical to SEQ ID NO: 27913
  derived and/or modified protein sequence (wt) from hemagglutinin__InfluenzaB__AHL91794

SEQ ID NO: 27916 - protein, 585 aa, Artificial Sequence
  derived and/or modified protein sequence (wt) from hemagglutinin__InfluenzaB__AHL91805
MKAIIVLLMVVTSNADRICTGITSSNSPHVVKTATQGEVNVTGVIPLTTTPTKSHFANLKGTKTRGKLCPKCFNCTDLDVALGRPKCTGNIPSAEVSILHEVRPVTSGCFPIMHDRTKIRQLPNLLRGYEHIRLSTHNVINAEKAPGGPYKIGTSGSCPNVTNGNGFFATMAWAVPKNDNNKTATNSLTIEVPYICTEGEDQITVWGFHSDNETQMAKLYGDSKPQKFTSSANGVTTHYVSQIGGFPNQTEDGGLPQSGRIVVDYMVQKSGKTGTITYQRGILLPQKVWCASGRSKVIKGSLPLIGEADCLHEKYGGLNKSKPYYTGEHAKAIGNCPIWVKTPLKLANGTKYRPPAKLLKERGFFGAIAGFLEGGWEGMIAGWHGYTSHGAHGVAVAADLKSTQEAINKITKNLNSLSELEVKNLQRLSGAMDELHNEILELDEKVDDLRADTISSQIELAVLLSNEGIINSEDEHLLALERKLKKMLGPSAVEIGNGCFETKHKCNQTCLDRIAAGTFDAGEFSLPTFDSLNITAASLNDDGLDNHTILLYYSTAASSLAVTLMIAIFVVYMVSRDNVSCSICL

SEQ ID NO: 27917 - protein, 585 aa, Artificial Sequence; identical to SEQ ID NO: 26419
  derived and/or modified protein sequence (wt) from hemagglutinin__InfluenzaB__AHL91816

SEQ ID NO: 27918 - protein, 585 aa, Artificial Sequence; identical to SEQ ID NO: 26419
  derived and/or modified protein sequence (wt) from hemagglutinin__InfluenzaB__AHL91827

SEQ ID NO: 27919 - protein, 584 aa, Artificial Sequence; identical to SEQ ID NO: 27026
  derived and/or modified protein sequence (wt) from hemagglutinin__InfluenzaB__AHL91838

SEQ ID NO: 27920 - protein, 584 aa, Artificial Sequence
  derived and/or modified protein sequence (wt) from hemagglutinin__InfluenzaB__AHL91849
MKAIIVLLMVVTSNADRICTGITSSNSPHVVKTATQGEVNVTGVIPLTTTPTKSYFANLKGTRTRGKLCPDCLNCTDLDVALGRPMCVGTTPSAKASILHEARPVTSGCFPIMHDRTKIRQLPNLLRGYENIRLSTQNVIDAENAPGGPYRLGTSGSCPNATSKSGFFATMAWAVPKDNNKNATNPLTVEVPYICKEGEDQITVWGFHSDNKTQMKNLYGDSNPQKFTSSANGVTTHYVSQISGFPAQTEDGGLPQSGRIVVDYMVQKPRKTGTIVYQRGVLLPQKVWCASGRSKVIKGSLPLIGEADCLHEKYGGLNKSKPYYTGEHAKAIGNCPIWVKTPLKLANGTKYRPPAKLLKERGFFGAIAGFLEGGWEGMIAGWHGYTSHGAHGVAVAADLKSTQEAINKITKNLNSLSELEVKNLQRLSGAMDELHNEILELDEKVDDLRADTISSQIELAVLLSNEGIINSEDEHLLALERKLKKMLGPSAVDIGNGCFETKHKCNQTCLDRIAAGTFNAGEFSLPTFDSLNITAASLNDDGLDNHTILLYYSTAASSLAVTLMLAIFIVYMVSRDNVSCSICL

SEQ ID NO: 27921 - protein, 584 aa, Artificial Sequence
  derived and/or modified protein sequence (wt) from hemagglutinin__InfluenzaB__AHL91860
MKAIIVLLMVVTSNADRICTGITSSNSPHVVKTATQGEVNVTGVIPLTTTPTKSYFANLKGTRTRGKLCPDCLNCTDLDVALGRPMCVGTTPSAKASILHEVRPVTSGCFPIMHDRTKIRQLPNLLRGYENIRLSTQNVIDAEKAPGGPYRLGTSGSCPNATSKSGFFATMAWAVPKDNNKNATNPLTVEIPYICTEGEDQITVWGFHSDNKTQMKNLYGDSNPQKFTSSANGVTTHYVSQIGGFPDQTEDGGLPQSGRIVVDYMMQKPGKTGTIVYQRGVLLPQKVWCASGRSKVIKGSLPLIGEADCLHEKYGGLNKSKPYYTGEHAKAIGNCPIWVKTPLKLANGTKYRPPAKLLKERGFFGAIAGFLEGGWEGMIAGWHGYTSHGAHGVAVAADLKSTQEAINKITKNLNSLSELEVKNLQRLSGAMDELHNEILELDEKVDDLRADTISSQIELAVLLSNEGIINSEDEHLLALERKLKKMLGPSAVEIGNGCFETKHKCNQTCLDRIAAGTFNAGEFSLPTFDSLNITAASLNDDGLDNHAILLYYSTAASSLAVTLMLAIFIVYMVSRDNVSCSICL

SEQ ID NO: 27922 - protein, 584 aa, Artificial Sequence
  derived and/or modified protein sequence (wt) from hemagglutinin__InfluenzaB__AHL91871
MKAIIVLLMVVTSNADRICTGITSSNSPHVVKTATQGEVNVTGVIPLTTTPTKSYFANLKGTRTRGKLCPDCLNCTDLDVALGRPMCVGTTPSAKASILHEVRPVTSGCFPIMHDRTKIRQLPNLLRGYENIRLSTQNVIDAEKAPGGPYRLGTSGSCPNATSKSGFFATMAWAVPKDNNKNATNPLTVEIPYICTEGEDQITVWGFHSDNKTQMKNLYGDSNPQKFTSSANGVTTHYVSQIGGFPDQTEDGGLPQSGRIVVDYMMQKPGKTGTIVYQRGVLLPQKVWCASGRSKVIKGSLPLIGEADCLHEKYGGLNKSKPYYTGEHAKAIGNCPIWVKTPLKLANGTKYRPPAKLLKERGFFGAIAGFLEGGWEGMIAGWHGYTSHGAHGVAVAADLKSTQEAINKITKNLNSLSELEVKNLQRLSGAMDELHNEILELDEKVDDLRADTISSQIELAVLLSNEGIINSEDEHLLALERKLKKMLGPSAVEIGNGCFETKHKCNQTCLDRIAAGTFNAGEFSLPTFDSLNITAASLNDDGLDNHTILLYYSTAASSLAVTLMLAIFIVYMVSRDNVSCSICL

SEQ ID NO: 27923 - protein, 584 aa, Artificial Sequence; identical to SEQ ID NO: 26426
  derived and/or modified protein sequence (wt) from hemagglutinin__InfluenzaB__AHL91882

SEQ ID NO: 27924 - protein, 584 aa, Artificial Sequence
  derived and/or modified protein sequence (wt) from hemagglutinin__InfluenzaB__AHL91904
MKAIIVLLMVVTSNADRICTGITSSNSPHVVKTATQGEVNVTGVIPLTTTPTKSYFANLKGTRTRGKLCPDCLNCTDLDVALGRPMCVGTTPSAKASILHEVRPVTSGCFPIMHDRTKIRQLANLLRGYENIRLSTQNVIDAEKAPGGPYRLGTSGSCPNATSKSGFFATMAWAVPKDNNKNATNPLTVEVPYICTEGEDQITVWGFHSDNKTQMKNLYGDSNPQKFTSSANGVTTHYVSQIGGFPDQTEDGGLPQSGRIVVDYMMQKHGKTGTIVYQRGVLLPQKVWCASGRSKVIKGSLPLIGEADCLHEKYGGLNKSKPYYTGEHAKAIGNCPIWVKTPLKLANGTKYRPPAKLLKERGFFGAIAGFLEGGWEGMIAGWHGYTSHGAHGVAVAADLKSTQEAINKITKNLNSLSELEVKNLQRLSGAMDELHNEILELDEKVDDLRADTISSQIELAVLLSNEGIINSEDEHLLALERKLKKMLGPSAVDIGNGCFETKHKCNQTCLDRIAAGTFNAGEFSLPTFDSLNITAASLNDDGLDNHTILLYYSTAASSLAVTLMLAIFIVYMVSRDNVSCSICL

SEQ ID NO: 27925 - protein, 584 aa, Artificial Sequence
  derived and/or modified protein sequence (wt) from hemagglutinin__InfluenzaB__AHL91915
MKAIIVLLMVVTSNADRICTGITSSNSPHVVKTATQGEVNVTGVIPLTTTPTKSYFANLKGTRTRGKLCPDCLNCTDLDVALGRPMCVGTTPSAKASILHEVRPVTSGCFPIMHDRTKIRQLPNLLRGYENIRLSTQNVIDAEKAPGGPYRLGTSGSCPNATSKSGFFATMAWAVPKDNYKNATNPLTVEVPYICTEGEDQITVWGFHSDNKTQMKNLYGDSNPQKFTSSANGVTTHYVSQIGGFPDQTEDGGLPQSGRIVVDYMMQKPGKTGTIVYQRGVLLPQKVWCASGRSKVIKGSLPLIGEADCLHEKYGGLNKSKPYYTGEHAKAIGNCPIWVKTPLKLANGTKYRPPAKLLKERGFFGAIAGFLEGGWEGMIAGWHGYTSHGAHGVAVAADLKSTQEAINKITKNLNSLSELEVKNLQRLSGAMDELHNEILELDEKVDDLRADTISSQIELAVLLSNEGIINSEDEHLLALERKLKKMLGPSAVDIGNGCFETKHKCNQTCLDRIAAGTFNAGEFSLPTFDSLNITAASLNDDGLDNHTILLYYSTAASSLAVTLMLAIFIVYMVSRDNVSCSICL

SEQ ID NO: 27926 - protein, 584 aa, Artificial Sequence; identical to SEQ ID NO: 27024
  derived and/or modified protein sequence (wt) from hemagglutinin__InfluenzaB__AHL91926

SEQ ID NO: 27927 - protein, 584 aa, Artificial Sequence; identical to SEQ ID NO: 27599
  derived and/or modified protein sequence (wt) from hemagglutinin__InfluenzaB__AHL91937

SEQ ID NO: 27928 - protein, 584 aa, Artificial Sequence; identical to SEQ ID NO: 26426
  derived and/or modified protein sequence (wt) from hemagglutinin__InfluenzaB__AHL91948

SEQ ID NO: 27929 - protein, 585 aa, Artificial Sequence
  derived and/or modified protein sequence (wt) from hemagglutinin__InfluenzaB__AHL91959
MKAIIVLLMVVTSNADRICTGITSSNSPHVVKTATQGEVNVTGVIPLTTTPTKSHFANLKGTKTRGKLCPKCLNCTDLDVALGRPKCTGNIPSAEVSILHEVRPVTSGCFPIMHDRTKIRQLPNLLRGYEHIRLSTHNVINAEKAPGGPYKIGTSGSCPNVTNGNGFFATMAWAVPKNDNNKTATNSLTIEVPYICTEGEDQITIWGFHSDNETQMAKLYGDSKPQKFTSSANGVTTHYVSQIGGFPNQTEDGGLPQSGRIVVDYMVQKSGKTGTITYQRGILLPQKVWCASGRSKVIKGSLPLIGEADCLHEKYGGLNKSKPYYTGEHAKAIGNCPIWVKTPLKLANGTKYRPPAKLLKERGFFGAIAGFLEGGWEGMIAGWHGYTSHGAHGVAVAADLKSTQEAINKITKNLNSLSELEVKNLQRLSGAMDELHNEILELDEKVDDLRADTISSQIELAVLLSNEGIINSEDEHLLALERKLKKMLGPSAVEIGNGCFETKHKCNQTCLDRIAAGTFDAGEFSLPTFDSLNITAASFNDDGLDNHTILLYYSTAASSLAVTLMIAIFVVYMVSRDNVSCSICL

SEQ ID NO: 27930 - protein, 585 aa, Artificial Sequence; identical to SEQ ID NO: 26638
  derived and/or modified protein sequence (wt) from hemagglutinin__InfluenzaB__AHL91970

SEQ ID NO: 27931 - protein, 584 aa, Artificial Sequence
  derived and/or modified protein sequence (wt) from hemagglutinin__InfluenzaB__AHL91991
MKAIIVLLMVVTSNADRICTGITSSNSPHVVKTATQGEVNVTGVIPLTTTPTKSYFANLKGTRTRGKLCPDCLNCTDLDVALGRPMCVGTTPSAKASILHEVRPVTSGCFPIMHDRTKIRQLANLLRGYENIRLSTQNVIDAEKAPGGPYRLGTSGSCPNATNKSGFFATMAWAVPKDNNKNATNPLTVEVPYICTEGEDQITVWGFHSDNKTQMKNLYGDSNPQKFTSSANGVTTHYVSQIGGFPDQTEDGGLPQSGRIVVDYMMQKPGKTGTIVYQRGVLLPQKVWCASGRSKVIKGSLPLIGEADCLHEKYGGLNKSKPYYTGEHAKAIGNCPIWVKTPLKLANGTKYRPPAKLLKERGFFGAIAGFLEGGWEGMIAGWHGYTSHGAHGVAVAADLKSTQEAINKITKNLNSLSELEVKNLQRLSGAMDELHNEILELDEKVDDLRADTISSQIELAVLLSNEGIINSEDEHLLALERKLKKMLGPSAVDIGNGCFETKHKCNQTCLDRIAAGTFNAGEFSLPTFDSLNITAASLNDDGLDNHTILLYYSTAASSLAVTLMLAIFIVYMVSRDNVSCSICL

SEQ ID NO: 27932 - protein, 585 aa, Artificial Sequence; identical to SEQ ID NO: 26514
  derived and/or modified protein sequence (wt) from hemagglutinin__InfluenzaB__AHL92002

SEQ ID NO: 27933 - protein, 585 aa, Artificial Sequence; identical to SEQ ID NO: 26514
  derived and/or modified protein sequence (wt) from hemagglutinin__InfluenzaB__AHL92013

SEQ ID NO: 27934 - protein, 585 aa, Artificial Sequence; identical to SEQ ID NO: 26514
  derived and/or modified protein sequence (wt) from hemagglutinin__InfluenzaB__AHL92024

SEQ ID NO: 27935 - protein, 585 aa, Artificial Sequence; identical to SEQ ID NO: 26514
  derived and/or modified protein sequence (wt) from hemagglutinin__InfluenzaB__AHL92035

SEQ ID NO: 27936 - protein, 585 aa, Artificial Sequence; identical to SEQ ID NO: 26514
  derived and/or modified protein sequence (wt) from hemagglutinin__InfluenzaB__AHL92046

SEQ ID NO: 27937 - protein, 585 aa, Artificial Sequence; identical to SEQ ID NO: 26514
  derived and/or modified protein sequence (wt) from hemagglutinin__InfluenzaB__AHL92057

SEQ ID NO: 27938 - protein, 585 aa, Artificial Sequence
  derived and/or modified protein sequence (wt) from hemagglutinin__InfluenzaB__AHL92068
MKAIIVLLMVVTSNADRICTGITSSNSPHVVKTATQGEVNVTGVIPLTTTPTKSHFANLKGTETRGKLCPKCLNCTDLDVALGRPKCTGNIPSARVSILHEVRPVTSGCFPIMHDRTKIRQLPNLLRGYEHIRLSTHNVINAENAPGGPYKIGTSGSCPNITNGNGFFATMAWAVPKNDNNKTATNSLTIEVPYICTEGEDQITVWGFHSDNETQMAKLYGDSKPQKFTSSANGVTTHYVSQVGGFPNQTEDGGLPQSGRIVVDYMVQKSGKTGTITYQRGILLPQKVWCASGRSKVIKGSLPLIGEADCLHEKYGGLNKSKPYYTGEHAKAIGNCPIWVKTPLKLANGTKYRPPAKLLKERGFFGAIAGFLEGGWEGMIAGWHGYTSHGAHGVAVAADLKSTQEAINKITKNLNSLSELEVKNLQRLSGAMDELHNEILELDEKVDDLRADTISSQIELAVLLSNEGIINSEDEHLLALERKLKKMLGPSAVEIGNGCFETKHKCNQTCLDRIAAGTFDAGEFSLPTFDSLNITAASLNDDGLDNHTILLYYSTAASSLAVTLMIAIFVVYMVSRDNVSCSICL

SEQ ID NO: 27939 - protein, 585 aa, Artificial Sequence
  derived and/or modified protein sequence (wt) from hemagglutinin__InfluenzaB__AHL92079
MKAIIVLLMVVTSNADRICTGITSSNSPHVVKTATQGEVNVTGVIPLTTTPTKSHFANLKGTETRGKLCPKCLNCTDLDVALGRPKCTGNIPSARVSILHEVRPVTSGCFPIMHDRTKIRQLPNLLRGYEHIRLSTHNVINAENAPGGPYKIGTSGSCPNITNGNGFFATMAWAVPKNDNNKTATNSLTIEVPYICTEGEDQITVWGFHSDNETQMAKLYGDSKPQKFTSSANGVTTHYVSQIGGFPNQTEDGGLPQSGRIVVDYMVQKSGKTGTITYQRGILLPQKVWCASGRSKVIKGSLPLIGEADCLHEKYGGLNKSKPYYTGEHAKAIGNCPIWVKTPLKLANGTKYRPPAKLLKERGFFGAIAGFLEGGWEGMIAGWHGYTSHGAHGVAVAADLKSTQEAINKITKNLNSLSELEVKNLQRLSGAMDELHNEILELDEKVDDLRADTISSQIELAVLLSNEGIINSEDEHLLALERKLKKMLGPSAVEIGNGCFETKHKCNQTCLDRIAAGTFDAGEFSLPTFDSLNITAASLNDDGLDNHTILLYYSTAASSLAVTLMIAIFVVYMVSRDNVSCSICL

SEQ ID NO: 27940 - protein, 585 aa, Artificial Sequence; identical to SEQ ID NO: 27939
  derived and/or modified protein sequence (wt) from hemagglutinin__InfluenzaB__AHL92090

SEQ ID NO: 27941 - protein, 585 aa, Artificial Sequence; identical to SEQ ID NO: 26514
  derived and/or modified protein sequence (wt) from hemagglutinin__InfluenzaB__AHL92101

SEQ ID NO: 27942 - protein, 584 aa, Artificial Sequence; identical to SEQ ID NO: 26567
  derived and/or modified protein sequence (wt) from hemagglutinin__InfluenzaB__AHL92112

SEQ ID NO: 27943 - protein, 585 aa, Artificial Sequence; identical to SEQ ID NO: 26514
  derived and/or modified protein sequence (wt) from hemagglutinin__InfluenzaB__AHL92123

SEQ ID NO: 27944 - protein, 585 aa, Artificial Sequence; identical to SEQ ID NO: 27939
  derived and/or modified protein sequence (wt) from hemagglutinin__InfluenzaB__AHL92134

SEQ ID NO: 27945 - protein, 585 aa, Artificial Sequence; identical to SEQ ID NO: 27939
  derived and/or modified protein sequence (wt) from hemagglutinin__InfluenzaB__AHL92145

SEQ ID NO: 27946 - protein, 585 aa, Artificial Sequence; identical to SEQ ID NO: 26514
  derived and/or modified protein sequence (wt) from hemagglutinin__InfluenzaB__AHL92156

SEQ ID NO: 27947 - protein, 585 aa, Artificial Sequence; identical to SEQ ID NO: 27939
  derived and/or modified protein sequence (wt) from hemagglutinin__InfluenzaB__AHL92167

SEQ ID NO: 27948 - protein, 585 aa, Artificial Sequence; identical to SEQ ID NO: 26514
  derived and/or modified protein sequence (wt) from hemagglutinin__InfluenzaB__AHL92178

SEQ ID NO: 27949 - protein, 585 aa, Artificial Sequence; identical to SEQ ID NO: 26514
  derived and/or modified protein sequence (wt) from hemagglutinin__InfluenzaB__AHL92189

SEQ ID NO: 27950 - protein, 584 aa, Artificial Sequence; identical to SEQ ID NO: 26567
  derived and/or modified protein sequence (wt) from hemagglutinin__InfluenzaB__AHL92200

SEQ ID NO: 27951 - protein, 585 aa, Artificial Sequence; identical to SEQ ID NO: 26514
  derived and/or modified protein sequence (wt) from hemagglutinin__InfluenzaB__AHL92211

SEQ ID NO: 27952 - protein, 585 aa, Artificial Sequence; identical to SEQ ID NO: 26514
  derived and/or modified protein sequence (wt) from hemagglutinin__InfluenzaB__AHL92222

SEQ ID NO: 27953 - protein, 584 aa, Artificial Sequence; identical to SEQ ID NO: 27829
  derived and/or modified protein sequence (wt) from hemagglutinin__InfluenzaB__AHL92233

SEQ ID NO: 27954 - protein, 585 aa, Artificial Sequence; identical to SEQ ID NO: 27939
  derived and/or modified protein sequence (wt) from hemagglutinin__InfluenzaB__AHL92244

SEQ ID NO: 27955 - protein, 585 aa, Artificial Sequence; identical to SEQ ID NO: 26514
  derived and/or modified protein sequence (wt) from hemagglutinin__InfluenzaB__AHL92255

SEQ ID NO: 27956 - protein, 585 aa, Artificial Sequence; identical to SEQ ID NO: 26514
  derived and/or modified protein sequence (wt) from hemagglutinin__InfluenzaB__AHL92266

SEQ ID NO: 27957 - protein, 585 aa, Artificial Sequence
  derived and/or modified protein sequence (wt) from hemagglutinin__InfluenzaB__AHL92277
MKAIIVLLMVVTSNADRICTGITSSNSPHVVKTATQGEVNVTGVIPLTTTPTKSHFANLKGTETRGKLCPKCLNCTDLDVALGRPKCTGNIPSARVSILHEVRPVTSGCFPIMHDRTKIRQLPNLLRGYEHIRLSTHNVINAENAPGGPYKIGTSGSCPNVTNGNGFFATMAWAVPKNDNNKTATNSLTIEVPYICTEGEDQITVWGFHSDNETQMAKLYGDSKPQKFTSSANGVTTHYVSQIGGFPNQTEDGGLPQSGRIVVDYMVQKSGKTGTITYQRGILLPQKVWCASGRSKVIKGSLPLIGEADCLHEKYGGLNKSKPYYTGEHAKAIGNCPIWVKTPLKLANGTKYRPPAKLLKERGFFGAIAGFLEGGWEGMIAGWHGYTSHGAHGVAVAADLKSTQEAINKITKNLNSLSELEVKNLQRLSGAMDELHNEILELDEKVDDLRADTISSQIELAVLLSNEGIINSEDEHLLALERKLKKMLGPSAVEIGNGCFETKHKCNQTCLDRIATGTFDAGEFSLPTFDSLNITAASLNDDGLDNHTILLYYSTAASSLAVTLMIAIFVVYMVSRDNVSCSICL

SEQ ID NO: 27958 - protein, 585 aa, Artificial Sequence; identical to SEQ ID NO: 26514
  derived and/or modified protein sequence (wt) from hemagglutinin__InfluenzaB__AHL92288

SEQ ID NO: 27959 - protein, 585 aa, Artificial Sequence; identical to SEQ ID NO: 26514
  derived and/or modified protein sequence (wt) from hemagglutinin__InfluenzaB__AHL92299

SEQ ID NO: 27960 - protein, 584 aa, Artificial Sequence; identical to SEQ ID NO: 27632
  derived and/or modified protein sequence (wt) from hemagglutinin__InfluenzaB__AHL92310

SEQ ID NO: 27961 - protein, 584 aa, Artificial Sequence; identical to SEQ ID NO: 26567
  derived and/or modified protein sequence (wt) from hemagglutinin__InfluenzaB__AHL92321

SEQ ID NO: 27962 - protein, 584 aa, Artificial Sequence; identical to SEQ ID NO: 26567
  derived and/or modified protein sequence (wt) from hemagglutinin__InfluenzaB__AHL92332

SEQ ID NO: 27963 - protein, 584 aa, Artificial Sequence
  derived and/or modified protein sequence (wt) from hemagglutinin__InfluenzaB__AHL92354
MKAIIVLLMVVTSNADRICTGITSSNSPHVVKTATQGEVNVTGVIPLTTTPTKSYFANLKGTRTRGKLCPDCLNCTDLDVALGRPMCVGITPSAKASILHEVRPVTSGCFPIMHDRTKIRQLANLLRGYENIRLSTQNVVDAEKAPGGPYRLGTSGSCPNATSKSGFFATMAWAVPKDNNKNATNPLTVEVPYICTEGEDQITVWGFHSDNKTQMKNLYGDSNPQKFTSSANGVTTHYVSQIGGFPDQTEDGGLPQSGRIVVDYMMQKPGKTGTIVYQRGVLLPQKVWCASGRSKVIKGSLPLIGEADCLHEKYGGLNKSKPYYTGEHAKAIGNCPIWVKTPLKLANGTKYRPPAKLLKERGFFGAIAGFLEGGWEGMIAGWHGYTSHGAHGVAVAADLKSTQEAINKITKNLNSLSELEVKNLQRLSGAMDELHNEILELDEKVDDLRADTISSQIELAVLLSNEGIINSEDEHLLALERKLKKMLGPSAVDIGNGCFETKHKCNQTCLDRIAAGTFNAGEFSLPTFDSLNITAASLNDDGLDNHTILLYYSTAASSLAVTLMLAIFIVYMVSRDNVSCSICL

SEQ ID NO: 27964 - protein, 584 aa, Artificial Sequence; identical to SEQ ID NO: 27963
  derived and/or modified protein sequence (wt) from hemagglutinin__InfluenzaB__AHL92365

SEQ ID NO: 27965 - protein, 584 aa, Artificial Sequence; identical to SEQ ID NO: 26820
  derived and/or modified protein sequence (wt) from hemagglutinin__InfluenzaB__AHL92376

SEQ ID NO: 27966 - protein, 584 aa, Artificial Sequence; identical to SEQ ID NO: 26820
  derived and/or modified protein sequence (wt) from hemagglutinin__InfluenzaB__AHL92387

SEQ ID NO: 27967 - protein, 584 aa, Artificial Sequence; identical to SEQ ID NO: 26820
  derived and/or modified protein sequence (wt) from hemagglutinin__InfluenzaB__AHL92398

SEQ ID NO: 27968 - protein, 584 aa, Artificial Sequence; identical to SEQ ID NO: 26820
  derived and/or modified protein sequence (wt) from hemagglutinin__InfluenzaB__AHL92409

SEQ ID NO: 27969 - protein, 584 aa, Artificial Sequence; identical to SEQ ID NO: 26820
  derived and/or modified protein sequence (wt) from hemagglutinin__InfluenzaB__AHL92420

SEQ ID NO: 27970 - protein, 584 aa, Artificial Sequence; identical to SEQ ID NO: 26567
  derived and/or modified protein sequence (wt) from hemagglutinin__InfluenzaB__AHL92431

SEQ ID NO: 27971 - protein, 584 aa, Artificial Sequence; identical to SEQ ID NO: 26820
  derived and/or modified protein sequence (wt) from hemagglutinin__InfluenzaB__AHL92442

SEQ ID NO: 27972 - protein, 584 aa, Artificial Sequence; identical to SEQ ID NO: 26820
  derived and/or modified protein sequence (wt) from hemagglutinin__InfluenzaB__AHL92453

SEQ ID NO: 27973 - protein, 584 aa, Artificial Sequence; identical to SEQ ID NO: 26820
  derived and/or modified protein sequence (wt) from hemagglutinin__InfluenzaB__AHL92464

SEQ ID NO: 27974 - protein, 584 aa, Artificial Sequence
  derived and/or modified protein sequence (wt) from hemagglutinin__InfluenzaB__AHL92475
MKAIIVLLMVVTSNADRICTGITSSNSPHVVKTATQGEVNVTGVIPLTTTPTKSYFANLKGTRTRGKLCPDCLNCTDLDVALGRPMCVGTTPSAKASILHEVRPVTSGCFPIMHDRTKIRQLPNLLRGYENIRLSTQNVIDAEKAPGGPYRLGTSGSCPNATSKIGFFATMAWAVPKDNYKNATNPLTVEVPYICTEGEDQITVWGFHSDNKTQMKNLYGDSNPQKFTSSANGVTTHYVSQIGDFPDQTEDGGLPQSGRIVVDYMMQKPGKTGTIVYQRGVLLPQKVWCASGRSKVIKGSLPLIGEADCLHEKYGGLNKSKPYYTGEHAKAIGNCPIWVKTPLKLANGTKYRPPAKLLKERGFFGAIAGFLEGGWEGMIAGWHGYTSHGAHGVAVAADLKSTQEAINKITKNLNSLSELEVKNLQRLSGAMDELHNEILELDEKVDDLRADTISSQIELAVLLSNEGIINSEDEHLLALERKLKKMLGPSAVDIGNGCFETKHKCNQACLDRIAAGTFNAGEFSLPTFDSLNITAASLNDDGLDNHTILLYYSTAASSLAVTLMLAIFIVYMVSRDNVSCSICL

SEQ ID NO: 27975 - protein, 584 aa, Artificial Sequence; identical to SEQ ID NO: 26567
  derived and/or modified protein sequence (wt) from hemagglutinin__InfluenzaB__AHL92486

SEQ ID NO: 27976 - protein, 584 aa, Artificial Sequence; identical to SEQ ID NO: 26820
  derived and/or modified protein sequence (wt) from hemagglutinin__InfluenzaB__AHL92497

SEQ ID NO: 27977 - protein, 584 aa, Artificial Sequence; identical to SEQ ID NO: 26820
  derived and/or modified protein sequence (wt) from hemagglutinin__InfluenzaB__AHL92508

SEQ ID NO: 27978 - protein, 584 aa, Artificial Sequence; identical to SEQ ID NO: 26820
  derived and/or modified protein sequence (wt) from hemagglutinin__InfluenzaB__AHL92519

SEQ ID NO: 27979 - protein, 584 aa, Artificial Sequence; identical to SEQ ID NO: 26820
  derived and/or modified protein sequence (wt) from hemagglutinin__InfluenzaB__AHL92530

SEQ ID NO: 27980 - protein, 584 aa, Artificial Sequence; identical to SEQ ID NO: 26567
  derived and/or modified protein sequence (wt) from hemagglutinin__InfluenzaB__AHL92541

SEQ ID NO: 27981 - protein, 583 aa, Artificial Sequence
  derived and/or modified protein sequence (wt) from hemagglutinin__InfluenzaB__AHL92563
MKAIIVLLMVVTSNADRICTGITSSNSPHVVKTATQGEVNVTGVIPLTTTPKKSYFANLKGTRTRGKLCPDCLNCTDLDVALGRPMCVGTTPSAKASILHEVRPVTSGCFPIMHDRTKIRQLPNLLRGYENIRLSTQNVIDAEKAPGGPYRLGTSGSCPNATSKIGFFATMAWAVPKDNYKNATNPLTVEVPYICTEGEDQITVWGFHSDNKTQMKNLYGDSNPQKFTSSANGVTTHYVSQIGDFPDQTEDGGLPQSGRIVVDYMMQKPGKTGTIVYQRGVLLPQKVWCASGRSKVIKGSLPLIGEADCLHEKYGGLNKSKPYYTGEHAKAIGNCPIWVKTPLKLANGTKYRPPAKLLKERGFFGAIAGFLEGGWEGMIAGWHGYTSHGAHGVAVAADLKSTQEAINKITKNLNSLSELEVKNLQRLSGAMDELHNEILELDEKVDDLRADTISSQIELAVLLSNEGIINSEDEHLLALERKLKKMLGPSAVDIGNGCFETKHKCNQTCLDRIAAGTFNAGEFSLPTFDSLNITAASLNDGLDNHTILLYYSTAASSLAVTLMLAIFIVYMVSRDNVSCSICL

SEQ ID NO: 27982 - protein, 584 aa, Artificial Sequence; identical to SEQ ID NO: 26820
  derived and/or modified protein sequence (wt) from hemagglutinin__InfluenzaB__AHL92574

SEQ ID NO: 27983 - protein, 584 aa, Artificial Sequence
  derived and/or modified protein sequence (wt) from hemagglutinin__InfluenzaB__AHL92585
MKAIIVLLMVVTSNADRICTGITSSNSPHVVKTATQGEVNVTGVIPLTTTPTKSYFANLKGTRTRGKLCPDCLNCTDLDVALGRPMCVGATPSAKASILHEVRPVTSGCFPIMHDRTKIRQLPNLLRGYENIRLSTQNVIDAEKAPGGPYRLGTSGSCPNATSKSGFFATMAWAVPKDNNKNATNPLTVEVPYICTEGEDQITVWGFHSDNKTQMKNLYGDSNPQKFTSSANGVTTHYVSQIGSFPDQTEDGGLPQSGRIVVDYMMQKPGKTGTIVYQRGVLLPQKVWCASGRSKVIKGSLPLIGEADCLHEKYGGLNKSKPYYTGEHAKAIGNCPIWVKTPLKLANGTKYRPPAKLLKERGFFGAIAGFLEGGWEGMIAGWHGYTSHGAHGVAVAADLKSTQEAINKITKNLNSLSELEVKNLQRLSGAMDELHNEILELDEKVDDLRADTISSQIELAVLLSNEGIINSEDEHLLALERKLKKMLGPSAVEIGNGCFETKHKCNQTCLDRIAAGTFNAGEFSLPTFDSLNITAASLNDDGLDNHTILLYYSTAASSLAVTLMLAIFIVYMVSRDNVSCSICL

SEQ ID NO: 27984 - protein, 584 aa, Artificial Sequence; identical to SEQ ID NO: 26820
  derived and/or modified protein sequence (wt) from hemagglutinin__InfluenzaB__AHL92596

SEQ ID NO: 27985 - protein, 584 aa, Artificial Sequence; identical to SEQ ID NO: 26567
  derived and/or modified protein sequence (wt) from hemagglutinin__InfluenzaB__AHL92607

SEQ ID NO: 27986 - protein, 584 aa, Artificial Sequence
  derived and/or modified protein sequence (wt) from hemagglutinin__InfluenzaB__AHL92629
MKAIIVLLMVVTSNADRICTGITSSNSPHVVKTATQGEVNVTGVIPLTTTPEKSYFANLKGTRTRGKLCPDCLNCTDLDVALGRPMCVGTTPSAKASILHEVRPVTSGCFPIMHDRTKIRQLPNLLRGYENIRLSTQNVIDAEKAPGGPYRLGTSGSCPNATSKIGFFATMAWAVPKDNYKNATNPLTVEVPYICTEGEDQITVWGFHSDNKTQMKNLYGDSNPQKFTSSANGVTTHYVSQIGDFPDQTEDGGLPQSGRIVVDYMMQKPGKTGTIVYQRGVLLPQKVWCASGRSKVIKGSLPLIGEADCLHEKYGGLNKSKPYYTGEHAKAIGNCPIWVKTPLKLANGTKYRPPAKLLKERGFFGAIAGFLEGGWEGMIAGWHGYTSHGAHGVAVAADLKSTQEAINKITKNLNSLSELEVKNLQRLSGAMDELHNEILELDEKVDDLRADTISSQIELAVLLSNEGIINSEDEHLLALERKLKKMLGPSAVDIGNGCFETKHKCNQTCLDRIAAGTFNAGEFSLPTFDSLNITAASLNDDGLDNHTILLYYSTAASSLAVTLMLAIFIVYMVSRDNVSCSICL

SEQ ID NO: 27987 - protein, 584 aa, Artificial Sequence; identical to SEQ ID NO: 26567
  derived and/or modified protein sequence (wt) from hemagglutinin__InfluenzaB__AHL92640

SEQ ID NO: 27988 - protein, 584 aa, Artificial Sequence; identical to SEQ ID NO: 26567
  derived and/or modified protein sequence (wt) from hemagglutinin__InfluenzaB__AHL92651

SEQ ID NO: 27989 - protein, 584 aa, Artificial Sequence
  derived and/or modified protein sequence (wt) from hemagglutinin__InfluenzaB__AHL92684
MKAIIVLLMVVTSNADRICTGITSSNSPHVVKTATQGEVNVTGVIPLTTTPTKSYFANLKGTRTRGKLCPDCLNCTDLDVALGRPMCVGTTPSAKASILHEVRPVTSGCFPIMHDRTKIRQLPNLLRGYENIRLSTQNVIDAEKAPGGPYRLGTSGSCPNATSKSGFFATMAWAVPKDNNKNATNPLTVEVPYICTEGEDQITVWGFHSDNKTQMKNLYGDSNPQKFTSSANGVTTHYVSQIGSFPDQTEDGGLPQSGRIVVDYMMQKPGKTGTIVYQRGVLLPQKVWCASGRSKVIKGSLPLIGEADCLHEKYGGLNKSKPYYTGEHAKAIGNCPIWVKTPLKLANGTKYRPPAKLLKERGFFGAIAGFLEGGWEGMIAGWHGYTSHGAHGVAVAADLKSTQEAINKITKNLNSLSELEVKNLQRLSGAMDELHNEILELDEKVDDLRADTISSQIELAVLLSNEGIINSEDEHLLALERKLKKMLGPSAVEIGNGCFETKHKCNQTCLDRIAAGTFNAGEFSLPTFDSLNITAASLNDDGLDNHIILLYYSTAASSLAVTLMLAIFIVYMVSRDNVSCSICL

SEQ ID NO: 27990 - protein, 584 aa, Artificial Sequence; identical to SEQ ID NO: 26820
  derived and/or modified protein sequence (wt) from hemagglutinin__InfluenzaB__AHL92695

SEQ ID NO: 27991 - protein, 584 aa, Artificial Sequence; identical to SEQ ID NO: 26820
  derived and/or modified protein sequence (wt) from hemagglutinin__InfluenzaB__AHL92706

SEQ ID NO: 27992 - protein, 584 aa, Artificial Sequence
  derived and/or modified protein sequence (wt) from hemagglutinin__InfluenzaB__AHL92728
MKAIIVLLMVVTSNADRICTGITSSNSPHVVKTATQGEVNVTGVIPLTTTPTKSYFANLKGTRTRGKLCPDCLNCTDLDVALGRPMCVGTTPSAKASILHEVRPVTSGCFPIMHDRTKIRQLPNLLRGYENIRLSTQNVIDAEKAPGGPYRLGTSGSCPNATSKIGFFATMAWAVPKDNYKNATNPLTVEVPYICTEGEDQITVWGFHSDNKTQMKNLYGDSNPQKFTSSANGVTTHYVSQIGDFPDQTEDGGLPQSGRIVVDYMMQKPGKTGTIVYQRGVLLPQKVWCASGRSKVIKGSLPLIGEADCLHEKYGGLNKSKPYYTGKHAKAIGNCPIWVKTPLKLANGTKYRPPAKLLKERGFFGAIAGFLEGGWEGMIAGWHGYTSHGAHGVAVAADLKSTQEAINKITKNLNSLSELEVKNLQRLSGAMDELHNEIIELDEKVDDLRADTISSQIELAVLLSNEGIINSEDEHLLALERKLKKMLGPSAVDIGNGCFETKHKCNQTCLDRIAAGTFNAGEFSLPTFDSLNITAASLNDDGLDNHTILLYYSTAASSLAVTLMLAIFIVYMVSRDNVSCSICL

SEQ ID NO: 27993 - protein, 584 aa, Artificial Sequence; identical to SEQ ID NO: 27992
  derived and/or modified protein sequence (wt) from hemagglutinin__InfluenzaB__AHL92739

SEQ ID NO: 27994 - protein, 584 aa, Artificial Sequence; identical to SEQ ID NO: 27992
  derived and/or modified protein sequence (wt) from hemagglutinin__InfluenzaB__AHL92750

SEQ ID NO: 27995 - protein, 584 aa, Artificial Sequence; identical to SEQ ID NO: 26820
  derived and/or modified protein sequence (wt) from hemagglutinin__InfluenzaB__AHL92761

SEQ ID NO: 27996 - protein, 584 aa, Artificial Sequence
  derived and/or modified protein sequence (wt) from hemagglutinin__InfluenzaB__AHL92772
MKAIIVLLMVVTSNADRICTGITSSNSPHVVKTATQGEVNVTGVIPLTTTPTKSYFANLKGTRTRGKLCPDCLNCTDLDVALGRPMCMGTTPSAKASILHEVRPVTSGCFPIMHDRTKIRQLPNLLRGYENIRLSTQNVIDAEKAPGGPYRLGTSGSCPNATSKIGFFATMAWAVPKDNYKNATNPLTVEVPYICTEGEDQITVWGFHSDNKTQMKNLYGDSNPQKFTSSANGVTTHYVSQIGDFPDQTEDGGLPQSGRIVVDYMMQKPGKTGTIVYQRGVLLPQKVWCASGRSKVIKGSLPLIGEADCLHEKYGGLNKSKPYYTGEHAKAIGNCPIWVKTPLKLANGTKYRPPAKLLKERGFFGAIAGFLEGGWEGMIAGWHGYTSHGAHGVAVAADLKSTQEAINKITKNLNSLSELEVKNLQRLSGAMDELHNEILELDEKVDDLRADTISSQIELAVLLSNEGIINSEDEHLLALERKLKKMLGPSAVDIGNGCFETKHKCNQTCLDRIAAGTFNAGEFSLPTFDSLNITAASLNDDGLDNHTILLYYSTAASSLAVTLMLAIFIVYMVSRDNVSCSICL

SEQ ID NO: 27997 - protein, 584 aa, Artificial Sequence; identical to SEQ ID NO: 26820
  derived and/or modified protein sequence (wt) from hemagglutinin__InfluenzaB__AHL92794

SEQ ID NO: 27998 - protein, 584 aa, Artificial Sequence; identical to SEQ ID NO: 26820
  derived and/or modified protein sequence (wt) from hemagglutinin__InfluenzaB__AHL92805

SEQ ID NO: 27999 - protein, 584 aa, Artificial Sequence; identical to SEQ ID NO: 26820
  derived and/or modified protein sequence (wt) from hemagglutinin__InfluenzaB__AHL92816

SEQ ID NO: 28000 - protein, 584 aa, Artificial Sequence
  derived and/or modified protein sequence (wt) from hemagglutinin__InfluenzaB__AHL92827
MKAIIVLLMVVTSNADRICTGITSSNSPHVVKTATQGEVNVTGVIPLTTTPTKSYFANLKGTRTRGKLCPDCLNCTDLDVALGRPMCVGTTPSAKASILHEVRPVTSGCFPIMHDRTKIRQLPNLLRGYENIRLSTQNVIDAEKAPGGPYRLGTSGSCPNATSKIGFFATMAWAVPKDNYKNATNPLTVEVPYICTEGEDQITVWGFHSDNKTQMKNLYGDSNPQKFTSSANGVTTHYVSQIGDFPDQTEDGGLPQSGRIVVDYMMQKPGKTGTIVYQRGVLLPQKVWCASGRSKVIKGSLPLIGEADCLHEKYGGLNKSKPYYTGEHAKAIGNCPIWVKTPLKLANGTKYRPPAKLLKERGFFGAIAGFLEGGWEGMIAGWHGYTSHGAHGVAVAADLKSTQEAINKITKNLNSLSELEVKNLQRLSGAMDELHNEILELDEKVDDLRADTISSQIELAVLLSNEGIINSEDEHLLALERKLKKMLGPSAVDIGNGCFETKHKCNQTCLDRIAAGTFNAGEFSLPTFDSLNITAASLNDDGLDNHTILLYYSTAASSLAVTLMLAIFVVYMVSRDNVSCSICL

SEQ ID NO: 28001 - protein, 584 aa, Artificial Sequence; identical to SEQ ID NO: 26820
  derived and/or modified protein sequence (wt) from hemagglutinin__InfluenzaB__AHL92838

SEQ ID NO: 28002 - protein, 584 aa, Artificial Sequence; identical to SEQ ID NO: 26820
  derived and/or modified protein sequence (wt) from hemagglutinin__InfluenzaB__AHL92849

SEQ ID NO: 28003 - protein, 584 aa, Artificial Sequence; identical to SEQ ID NO: 26820
  derived and/or modified protein sequence (wt) from hemagglutinin__InfluenzaB__AHL92860

SEQ ID NO: 28004 - protein, 585 aa, Artificial Sequence; identical to SEQ ID NO: 26638
  derived and/or modified protein sequence (wt) from hemagglutinin__InfluenzaB__AHL92871

SEQ ID NO: 28005 - protein, 584 aa, Artificial Sequence; identical to SEQ ID NO: 26426
  derived and/or modified protein sequence (wt) from hemagglutinin__InfluenzaB__AHL92882

SEQ ID NO: 28006 - protein, 585 aa, Artificial Sequence
  derived and/or modified protein sequence (wt) from hemagglutinin__InfluenzaB__AHL92893
MKAIIVLLMVVTSNADRICTGITSSNSPHVVKTATQGEVNVTGVIPLTTTPTKSHFANLKGTKTRGKLCPKCLNCTDLDVALGRPKCTGNIPSAEVSILHEVRPVTSGCFPIMHDRTKIRQLPNLLRGYEHIRLSTHNVINAEKAPGGPYKIGTSGSCPNVTNGNGFFATMAWAVPKNDNNKTATNSLTIEVPYICTEGEDQITIWGFHSDKETQMAKLYGDSKPQKFTSSANGVTTHYVSQIGGFPNQTEDGGLPQSGRIVVDYMVQKSGKTGTITYQRGILLPQKVWCASGRSKVIKGSLPLIGEADCLHEKYGGLNKSKPYYTGEHAKAIGNCPIWVKTPLKLANGTKYRPPAKLLKERGFFGAIAGFLEGGWEGMIAGWHGYTSHGAHGVAVAADLKSTQEAINKITKNLNSLSELEVKNLQRLSGAMDELHNEILELDEKVDDLRADTISSQIELAVLLSNEGIINSEDEHLLALERKLKKMLGPSAVEIGNGCFETKHKCNQTCLDRIAAGTFDAGEFSLPTFDSLNITAASLNDDGLDNHTILLYYSTAASSLAVTLMIAIFIVYMVSRDNVSCSICL

SEQ ID NO: 28007 - protein, 584 aa, Artificial Sequence; identical to SEQ ID NO: 27023
  derived and/or modified protein sequence (wt) from hemagglutinin__InfluenzaB__AHL92904

SEQ ID NO: 28008 - protein, 585 aa, Artificial Sequence
  derived and/or modified protein sequence (wt) from hemagglutinin__InfluenzaB__AHL92915
MKAIIVLLMVVTSNADRICTGITSSNSPHVVKTATQGEVNVTGVIPLTTTPTKSHFANLKGTKTRGKLCPKCLNCTDLDVALGRPKCTGNIPSAEVSILHEVRPVTSGCFPIMHDRTKIRQLPNLLRGYEHIRLSTHNVINAEKAPGGPYKIGTSGSCPNVTNGNGFFATMAWAVPKNDNNKTATNSLTIEVPYICTEGEDQITIWGFHSDNETQMAKLYGDSKPQKFTSSANGVTTHYVSQIGGFPNQTEDGGLPQSGRIVVDYMVQKSGKTGTITYQRGILLPQKVWCASGRSKVIKGSLPLIGEADCLHEKYGGLNKSKPYYTGEHAKAIGNCPIWVKTPLKLANGTKYRPPAKLLKERGFFGAIAGFLEGGWEGMIAGWHGYTSHGAHGVAVAADLKSTQEAINKITKNLNSLSELEVKNLQRLSGAMDELHNEILELDEKVDDLRADTISSQIELAVLLSNEGIINSEDEHLLALERKLKKMLGPSAVEIGNGCFETKHKCNQTCLDRIAAGTFDAGEFSLPTFDSLNITAASLNDDGLDNHTILLYYSTAASSLAVTLMIAIFIVYMVSRDNVSCSICL

SEQ ID NO: 28009 - protein, 585 aa, Artificial Sequence; identical to SEQ ID NO: 26638
  derived and/or modified protein sequence (wt) from hemagglutinin__InfluenzaB__AHL92926

SEQ ID NO: 28010 - protein, 584 aa, Artificial Sequence; identical to SEQ ID NO: 27599
  derived and/or modified protein sequence (wt) from hemagglutinin__InfluenzaB__AHL92937

SEQ ID NO: 28011 - protein, 585 aa, Artificial Sequence; identical to SEQ ID NO: 26514
  derived and/or modified protein sequence (wt) from hemagglutinin__InfluenzaB__AHL92948

SEQ ID NO: 28012 - protein, 585 aa, Artificial Sequence; identical to SEQ ID NO: 26514
  derived and/or modified protein sequence (wt) from hemagglutinin__InfluenzaB__AHL92959

SEQ ID NO: 28013 - protein, 585 aa, Artificial Sequence; identical to SEQ ID NO: 26514
  derived and/or modified protein sequence (wt) from hemagglutinin__InfluenzaB__AHL92970

SEQ ID NO: 28014 - protein, 585 aa, Artificial Sequence; identical to SEQ ID NO: 26514
  derived and/or modified protein sequence (wt) from hemagglutinin__InfluenzaB__AHL92981

SEQ ID NO: 28015 - protein, 585 aa, Artificial Sequence; identical to SEQ ID NO: 26514
  derived and/or modified protein sequence (wt) from hemagglutinin__InfluenzaB__AHL92992

SEQ ID NO: 28016 - protein, 585 aa, Artificial Sequence; identical to SEQ ID NO: 27939
  derived and/or modified protein sequence (wt) from hemagglutinin__InfluenzaB__AHL93004

SEQ ID NO: 28017 - protein, 585 aa, Artificial Sequence; identical to SEQ ID NO: 26514
  derived and/or modified protein sequence (wt) from hemagglutinin__InfluenzaB__AHL93015

SEQ ID NO: 28018 - protein, 585 aa, Artificial Sequence; identical to SEQ ID NO: 26514
  derived and/or modified protein sequence (wt) from hemagglutinin__InfluenzaB__AHL93026

SEQ ID NO: 28019 - protein, 584 aa, Artificial Sequence; identical to SEQ ID NO: 27963
  derived and/or modified protein sequence (wt) from hemagglutinin__InfluenzaB__AHL93037

SEQ ID NO: 28020 - protein, 584 aa, Artificial Sequence; identical to SEQ ID NO: 27963
  derived and/or modified protein sequence (wt) from hemagglutinin__InfluenzaB__AHL93048

SEQ ID NO: 28021 - protein, 584 aa, Artificial Sequence; identical to SEQ ID NO: 27992
  derived and/or modified protein sequence (wt) from hemagglutinin__InfluenzaB__AHL93059

SEQ ID NO: 28022 - protein, 584 aa, Artificial Sequence; identical to SEQ ID NO: 26820
  derived and/or modified protein sequence (wt) from hemagglutinin__InfluenzaB__AHL93070

SEQ ID NO: 28023 - protein, 584 aa, Artificial Sequence
  derived and/or modified protein sequence (wt) from hemagglutinin__InfluenzaB__AHL93081
MKAIIVLLMVVTSNADRICTGITSSNSPHVVKTATQGEVNVTGVIPLTTTPTKSYFANLKGTRTRGKLCPDCLNCTDLDVALGRPMCVGTTPSAKASILHEVRPVTSGCFPIMHDRTKIRQLPNLLRGYENIRLSTQNVIDAEKAPGGPYRLGTSGSCPNATSKIGFFATMAWAVPKDNYKNATNPLTVEVPYICTEGEDQITVWGFHSDNKTQMKNLYGDSNPQKFTSSANGVTTHYVSQIGDFPDQTEDGGLPQSGRIVVDYMMQKPGKTGTIVYQRGVLLPQKVWCASGRSKVIKGSLPLIGEADCLHEKYGGLNKSKPYYTGEHAKAIGNCPIWVKTPLKLANGTKYRPPAKLLKERGFFGAIAGFLEGGWEGMIAGWHGYTSHGAHGVAVAADLKSTQEAINKITKNLNSLSELEVKNLQRLSGAMDELHNEILELDGKVDDLRADTISSQIELAVLLSNEGIINSEDEHLLALERKLKKMLGPSAVDIGNGCFETKHKCNQTCLDRIAAGTFNAGEFSLPTFDSLNITAASLNDDGLDNHTILLYYSTAASSLAVTLMLAIFIVYMVSRDNVSCSICL

SEQ ID NO: 28024 - protein, 584 aa, Artificial Sequence; identical to SEQ ID NO: 26820
  derived and/or modified protein sequence (wt) from hemagglutinin__InfluenzaB__AHL93092

SEQ ID NO: 28025 - protein, 584 aa, Artificial Sequence; identical to SEQ ID NO: 26820
  derived and/or modified protein sequence (wt) from hemagglutinin__InfluenzaB__AHL93103

SEQ ID NO: 28026 - protein, 584 aa, Artificial Sequence; identical to SEQ ID NO: 26820
  derived and/or modified protein sequence (wt) from hemagglutinin__InfluenzaB__AHL93114

SEQ ID NO: 28027 - protein, 584 aa, Artificial Sequence; identical to SEQ ID NO: 26567
  derived and/or modified protein sequence (wt) from hemagglutinin__InfluenzaB__AHL93125

SEQ ID NO: 28028 - protein, 584 aa, Artificial Sequence
  derived and/or modified protein sequence (wt) from hemagglutinin__InfluenzaB__AHL93136
MKAIIVLLMVVTSNADRICTGITSSNSPHVVKTATQGEVNVTGVIPLTTTPTKSYFANLKGTRTRGKLCPDCLNCTDLDVALGRPMCVGTTPSAKASILHEVRPVTSGCFPIMHDRTKIRQLPNLLRGYENIRLSTQNVIDAEKAPGGPYRLGTSGSCPNATSKIGFFATMAWAVPKDNYKNATNPLTVEVPYICTEGEDQITVWGFHSDNKTQMKNLYGDSNPQKFTSSANGVTTHYVSQIGDFPDQTEDGGLPQSGRIVVDYMMQKPGKTGTIVYQRGVLLPQRVWCASGRSKVIKGSLPLIGEADCLHEKYGGLNKSKPYYTGEHAKAIGNCPIWVKTPLKLANGTKYRPPAKLLKERGFFGAIAGFLEGGWEGMIAGWHGYTSHGAHGVAVAADLKSTQEAINKITKNLNSLSELEVKNLQRLSGAMDELHNEILELDEKVDDLRADTISSQIELAVLLSNEGIINSEDEHLLALERKLKKMLGPSAVDIGNGCFETKHKCNQTCLDRIAAGTFNAGEFSLPTFDSLNITAASLNDDGLDNHTILLYYSTAASSLAVTLMLAIFIVYMVSRDNVSCSICL

SEQ ID NO: 28029 - protein, 584 aa, Artificial Sequence; identical to SEQ ID NO: 26567
  derived and/or modified protein sequence (wt) from hemagglutinin__InfluenzaB__AHL93147

SEQ ID NO: 28030 - protein, 584 aa, Artificial Sequence; identical to SEQ ID NO: 26820
  derived and/or modified protein sequence (wt) from hemagglutinin__InfluenzaB__AHL93158

SEQ ID NO: 28031 - protein, 584 aa, Artificial Sequence
  derived and/or modified protein sequence (wt) from hemagglutinin__InfluenzaB__AHL93169
MKAIIVLLMVVTSNADRICTGITSSNSPHVVKTATQGEVNVTGVIPLTTTPTKSYFANLKGTRTRGKLCPDCFNCTDLDVALGRPMCVGTTPSAKASILHEVRPVTSGCFPIMHDRTKIRQLPNLLRGYENIRLSTQNVIDAEKAPGGPYRLGTSGSCPNATSKIGFFATMAWAVPKDNYKNATNPLTVEVPYICTEGEDQITVWGFHSDNKTQMKNLYGDSNPQKFTSSANGVTTHYVSQIGDFPDQTEDGGLPQSGRIVVDYMMQKPGKTGTIVYQRGVLLPQKVWCASGRSKVIKGSLPLIGEADCLHEKYGGLNKSKPYYTGEHAKAIGNCPIWVKTPLKLANGTKYRPPAKLLKERGFFGAIAGFLEGGWEGMIAGWHGYTSHGAHGVAVAADLKSTQEAINKITKNLNSLSELEVKNLQRLSGAMDELHNEILELDEKVDDLRADTISSQIELAVLLSNEGIINSEDEHLLALERKLKKMLGPSAVDIGNGCFETKHKCNQTCLDRIAAGTFNAGEFSLPTFDSLNITAASLNDDGLDNHTILLYYSTAASSLAVTLMLAIFIVYMVSRDNVSCSICL

SEQ ID NO: 28032 - protein, 584 aa, Artificial Sequence
  derived and/or modified protein sequence (wt) from hemagglutinin__InfluenzaB__AHL93180
MKAIIVLLMVVTSNADRICTGITSSNSPHVVKTATQGEVNVTGVIPLTTTPTKSYFANLKGTRTRGKLCPDCLNCTDLDVALGRPMCVGTTPSAKASILHEVRPVTSGCFPIIHDRTKIRQLPNLLRGYENIRLSTQNVIDAEKAPGGPYRLGTSGSCPNATSKSGFFATMAWAVPKDNNKNATNPLTVEVPYICTEGEDQITVWGFHSDNKTQMKNLYGDSNPQKFTSSANGVTTHYVSQIGSFPDQTEDGGLPQSGRIVVDYMMQKPGKTGTIVYQRGVLLPQRVWCASGRSKVIKGSLPLIGEADCLHEKYGGLNKSKPYYTGEHAKAIGNCPIWVKTPLKLANGTKYRPPAKLLKERGFFGAIAGFLEGGWEGMIAGWHGYTSHGAHGVAVAADLKSTQEAINKITKNLNSLSELEVKNLQRLSGAMDELHNEILELDEKVDDLRADTISSQIELAVLLSNEGIINSEDEHLLALERKLKKMLGPSAVEIGNGCFETKHKCNQTCLDRIAAGTFNAGEFSLPTFDSLNITAASLNDDGLDNHTILLYYSTAASSLAVTLMLAIFIVYMVSRDNVSCSICL

SEQ ID NO: 28033 - protein, 584 aa, Artificial Sequence
  derived and/or modified protein sequence (wt) from hemagglutinin__InfluenzaB__AHL93191
MKAIIVLLMVVTSNADRICTGITSSNSPHVVKTATQGEVNVTGVIPLTTTPTKSYFANLKGTRTRGKLCPDCLNCTDLDVALGRPMCVGTTPSAKASILHEVRPVTSGCFPIMHDRTKIRQLPNLLRGYENIRLSTQNVIDAEKAPGGPYRLGTSGSCPNDTSKIGFFATMAWAVPKDNYKNATNPLTVEVPYICTEGEDQITVWGFHSDNKTQMKNLYGDSNPQKFTSSANGVTTHYVSQIGDFPDQTEDGGLPQSGRIVVDYMMQKPGKTGTIVYQRGVLLPQKVWCASGRSKVIKGSLPLIGEADCLHEKYGGLNKSKPYYTGEHAKAIGNCPIWVKTPLKLANGTKYRPPAKLLKERGFFGAIAGFLEGGWEGMIAGWHGYTSHGAHGVAVAADLKSTQEAINKITKNLNSLSELEVKNLQRLSGAMDELHNEILELDEKVDDLRADTISSQIELAVLLSNEGIINSEDEHLLALERKLKKMLGPSAVDIGNGCFETKHKCNQTCLDRIAAGTFNAGEFSLPTFDSLNITAASLNDDGLDNHTILLYYSTAASSLAVTLMLAIFIVYMVSRDNVSCSICL

SEQ ID NO: 28034 - protein, 584 aa, Artificial Sequence
  derived and/or modified protein sequence (wt) from hemagglutinin__InfluenzaB__AHL93202
MKAIIVLLMVVTSNADRICTGITSSNSPHVVKTATQGEVNVTGVIPLTTTPTKSYFANLKGTRTRGKLCPDCLNCTDLDVALGRPMCVGTTPSAKASILHEVRPVTSGCFPIMHDRTKIRQLPNLLRGYENIRLSTQNVIDAEKAPGGPYRLGTSGSCPNATSKIGFFATMAWAVPKDNYKNATNPLTVEVPYICTEGEDQITVWGFHSDNKTQMKNLYGDSNPQKFTSSANGVTTHYVSQIGDFPDQTEDGGLPQSGRIVVDYMMQKPGKTGTIVYQRGVLLPQKVWCASGRSKVIKGSLPLIGEADCLHEKYGGLNKSKPYYTGEHAKAIGNCPIWVKTPLKLANGTKYRPPAKLLKERGFFGAIAGFLEGGWEGMIAGWHGYTSHGAHGVAVAADLKSTQEAINKITKNLNSLSELEVKNLQRLSGAMDEFHNEILELDEKVDDLRADTISSQIELAVLLSNEGIINSEDEHLLALERKLKKMLGPSAVDIGNGCFETKHKCNQTCLDRIAAGTFNAGEFSLPTFDSLNITAASLNDDGLDNHTILLYYSTAASSLAVTLMLAIFIVYMVSRDNVSCSICL

SEQ ID NO: 28035 - protein, 585 aa, Artificial Sequence; identical to SEQ ID NO: 26989
  derived and/or modified protein sequence (wt) from hemagglutinin__InfluenzaB__AHL93213

SEQ ID NO: 28036 - protein, 585 aa, Artificial Sequence; identical to SEQ ID NO: 26989
  derived and/or modified protein sequence (wt) from hemagglutinin__InfluenzaB__AHL93224

SEQ ID NO: 28037 - protein, 585 aa, Artificial Sequence
  derived and/or modified protein sequence (wt) from hemagglutinin__InfluenzaB__AHL93235
MKAIIVLLMVVTSNADRICTGITSSNSPHVVKTATQGEVNVTGVIPLTTTPTKSHFANLKGTETRGKLCPKCPNCTDLDVALGRPKCTGKIPSARVSILHEVRPVTSGCFPIMHDRTKIRQLPNLLRGYEHIRLSTHNVINAENAPGGPYKIGTSGSCPNVTNGNGFFATMAWAVPKNDKNKTATNPLTIEVPYICTEGEDQITVWGFHSDNETQMAKLYGDSKPQKFTSSANGVTTHYVSQIGGFPNQTEDGGLPQSGRIVVDYMVQKSGKTGTITYQRGILLPQKVWCASGRSKVIKGSLPLIGEADCLHEKYGGLNKSKPYYTGEHAKAIGNCPIWVKTPLKLANGTKYRPPAKLLKERGFFGAIAGFLEGGWEGMIAGWHGYTSHGAHGVAVAADLKSTQEAINKITKNLNSLSELEVKNLQRLSGAMDELHNEILELDEKVDDLRADTISSQIELAVLLSNEGIINSEDEHLLALERKLKKMLGPSAVEIGNGCFETKHKCNQTCLDRIAAGTFDAGEFSLPTFDSLNITAASLNNDGLDNHTILLYYSTAASSLAVTLMIAIFVVYMVSRDNVSCSICL

SEQ ID NO: 28038 - protein, 585 aa, Artificial Sequence
  derived and/or modified protein sequence (wt) from hemagglutinin__InfluenzaB__AHL93246
MKAIIVLLMVVTSNADRICTGITSSNSPHVVKTATQGEVNVTGVIPLTTTPTKSHFANLKGTETRGKLCPKCLNCTDLDVALGRPKCTGNIPSARVSILHEVRPVTSGCFPIMHDRTKIRQLPNLLRGYEHIRLSTHNVINAENAPGGPYKIGTSGSCPNVTNGNGFFATMAWAVPKNDKNKTATNSLTIEVPYICTEGEDQITIWGFHSDNETQMAKLYGDSKPQKFTSSANGVTTHYVSQIGGFPNQTEDGGLPQSGRIVVDYMVQKSGKTGTITYQRGILLPQKVWCASGRSKVIKGSLPLIGEADCLHEKYGGLNKSKPYYTGEHAKAIGNCPIWVKTPLKLANGTKYRPPAKLLKERGFFGAIAGFLEGGWEGMIAGWHGYTSHGAHGVAVAADLKSTQEAINKITKNLNSLGELEVKNLQRLSGAMDELHNEILELDEKVDDLRADTISSQIELAVLLSNEGIINSEDEHLLALERKLKKMLGPSAVEIGNGCFETKHKCNQTCLDRIAAGTFDAGEFSLPTFDSLNITAASLNDDGLDNHTILLYYSTAASSLAVTLMIAIFVVYMVSRDNVSCSICL

SEQ ID NO: 28039 - protein, 585 aa, Artificial Sequence; identical to SEQ ID NO: 26989
  derived and/or modified protein sequence (wt) from hemagglutinin__InfluenzaB__AHL93257

SEQ ID NO: 28040 - protein, 585 aa, Artificial Sequence; identical to SEQ ID NO: 27322
  derived and/or modified protein sequence (wt) from hemagglutinin__InfluenzaB__AHL93268

SEQ ID NO: 28041 - protein, 585 aa, Artificial Sequence
  derived and/or modified protein sequence (wt) from hemagglutinin__InfluenzaB__AHL93279
MKAIIVLLMVVTSNADRICTGITSSNSPHVVKTATQGEVNVTGVIPLTTTPTKSHFANLKGTETRGKLCPKCLNCTDLDVALGRPKCTGKIPSARVSILHEVRPVTSGCFPIMHDRTKIRQLPNLLRGYEHIRLSTHNVINAENAPGGPYKIGTSGSCPNITNGNGFFATMAWAVPKNDKNKTATNPLTIEVPYICTEGEDQITVWGFHSDNETQMAKLYGDSKPQKFTSSANGVTTHYVSQIGGFPNQTEDGGLPQSGRIVVDYMVQKSGKTGTITYQRGILLPQKVWCASGKSKVIKGSLPLIGEADCLHEKYGGLNKSKPYYTGEHAKAIGNCPIWVKTPLKLANGTKYRPPAKLLKERGFFGAIAGFLEGGWEGMIAGWHGYTSHGAHGVAVAADLKSTQEAINKITKNLNSLSELEVKNLQRLSGAMDELHNEILELDEKVDDLRADTISSQIELAVLLSNEGIINSEDEHLLALERKLKKMLGPSAVEIGNGCFETKHKCNQTCLDRIAAGTFDAGEFSLPTFDSLNITAASLNDDGLDNHTILLYYSTAASSLAVTLMIAIFVVYMVSRDNVSCSICL

SEQ ID NO: 28042 - protein, 585 aa, Artificial Sequence; identical to SEQ ID NO: 26989
  derived and/or modified protein sequence (wt) from hemagglutinin__InfluenzaB__AHL93290

SEQ ID NO: 28043 - protein, 585 aa, Artificial Sequence
  derived and/or modified protein sequence (wt) from hemagglutinin__InfluenzaB__AHL93301
MKAIIVLLMVVTSNADRICTGITSSNSPHVVKTATQGEVNVTGVIPLTTTPTKSHFANLKGTETRGKLCPKCLNCTDLDVALGRPKCTGKIPSARVSILHEVRPVTSGCFPIMHDRTKIRQLPNLLRGYEHIRLSTHNVINAENAPGGPYKIGTSGSCPNITNGNGFFATMAWAVPKNDKNKTATNPLTIEVPYICTEGEDQITVWGFHSDNETQMAKLYGDSKPQKFTSSANGVTTHYVSQIGGFPNQTEDGGLPQSGRIVVDYMVQKSGKTGTITYQRGILLPQKVWCASGRSKVIKGSLPLIGEADCLHEKYGGLNKSKPYYTGEHAKAIGNCPIWVKTPLKLANGTKYRPPAKLLKERGFFGAIAGFLEGGWEGMIAGWHGYTSHGAHGVAVAADLKSTQEAINKITKNLNSLSELEVKNLQRLSGAMDELHNEILELDEKVDDLRADTISSQIELAVLLSNEGIINSEDEHLLALERKLKKMLGPSAVEIGNGCFETKHKCNQTCLDRIAAGTFNAGEFSLPTFDSLNITAASLNDDGLDNHTILLYYSTAASSLAVTLMIAIFVVYMVSRDNVSCSICL

SEQ ID NO: 28044 - protein, 585 aa, Artificial Sequence
  derived and/or modified protein sequence (wt) from hemagglutinin__InfluenzaB__AHL93312
MKAIIVLLMVVTSNADRICTGITSSNSPHVVKTATQGEVNVTGVIPLTTTPTKSHFANLKGTETRGKLCPKCLNCTDLDVALGRPKCTGKIPSARVSILHEVRPVTSGCFPIMHDRTKIRQLPNLLRGYEHIRLSTHNVINAENAPGGPYKIGTSGSCPNITNGNGFYATMAWAVPKNDKNKTATNPLTIEVPYICTEGEDQITVWGFHSDNETQMAKLYGDSKPQKFTSSANGVTTHYVSQIGGFPNQTEDGGLPQSGRIVVDYMVQKSGKTGTITYQRGILLPQKVWCASGRSKVIKGSLPLIGEADCLHEKYGGLNKSKPYYTGEHAKAIGNCPIWVKTPLKLANGTKYRPPAKLLKERGFFGAIAGFLEGGWEGMIAGWHGYTSHGAHGVAVAADLKSTQEAINKITKNLNSLSELEVKNLQRLSGAMDELHNEILELDEKVDDLRADTISSQIELAVLLSNEGIINSEDEHLLALERKLKKMLGPSAVEIGNGCFETKHKCNQTCLDRIAAGTFDAGEFSLPTFDSLNITAASLNDDGLDNHTILLYYSTAASSLAVTLMIAIFVVYMVSRDNVSCSICL

SEQ ID NO: 28045 - protein, 585 aa, Artificial Sequence
  derived and/or modified protein sequence (wt) from hemagglutinin__InfluenzaB__AHL93323
MKAIIVLLMVVTSNADRICTGITSSNSPHVVKTATQGEVNVTGVIPLTTTPTKSHFANLKGTETRGKLCPKCLNCTDLDVALGRPKCTGKIPSARVSILHEVRPVTSGCFPIMHDRTKIRQLPNLLRGYEHIRLSTHNVINAENAPGGPYKIGTSGSCPNITNGNGFFATMAWAVPKNDKNKTATNPLTIEVPYICTEGEDQITVWGFHSDNETQMAKLYGDSKPQKFTSSANGVTTHYVSQIGGFPNQTEDGGLPQSGRIVVDYMVQKSGKTGTITYQRGILLPQKVWCTSGRSKVIKGSLPLIGEADCLHEKYGGLNKSKPYYTGEHAKAIGNCPIWVKTPLKLANGTKYRPPAKLLKERGFFGAIAGFLEGGWEGMIAGWHGYTSHGAHGVAVAADLKSTQEAINKITKNLNSLSELEVKNLQRLSGAMDELHNEILELDEKVDDLRADTISSQIELAVLLSNEGIINSEDEHLLALERKLKKMLGPSAVEIGNGCFETKHKCNQTCLDRIAAGTFDAGEFSLPTFDSLNITAASLNDDGLDNHTILLYYSTAASSLAVTLMIAIFVVYMVSRDNVSCSICL

SEQ ID NO: 28046 - protein, 585 aa, Artificial Sequence
  derived and/or modified protein sequence (wt) from hemagglutinin__InfluenzaB__AHL93334
MKAIIVLLMVVTSNADRICTGITSSNSPHVVKTATQGEVNVTGVIPLTTTPTKSHFANLKGTETRGKLCPKCPNCTDLDVALGRPKCTGKIPSARVSILHEVRPVTSGCFPIMHDRTKIRQLPNLLRGYEHIRLSTHNVINAENAPGGPYKIGTSGSCPNITNGNGFFATMAWAVPKNDKNKTATNPLTIEVPYICTEGEDQITVWGFHSDNETQMAKLYGDSKPQKFTSSANGVTTHYVSQIGGFPNQTEDGGLPQSGRIVVDYMVQKSGKTGTITYQRGILLPQKVWCTSGRSKVIKGSLPLIGEADCLHEKYGGLNKSKPYYTGEHAKAIGNCPIWVKTPLKLANGTKYRPPAKLLKERGFFGAIAGFLEGGWEGMIAGWHGYTSHGAHGVAVAADLKSTQEAINKITKNLNSLSELEVKNLQRLSGAMDELHNEILELDEKVDDLRADTISSQIELAVLLSNEGIINSEDEHLLALERKLKKMLGPSAVEIGNGCFETKHKCNQTCLDRIAAGTFDAGEFSLPTFDSLNITAASLNDDGLDNHTILLYYSTAASSLAVTLMIAIFVVYMVSRDNVSCSICL

SEQ ID NO: 28047 - protein, 585 aa, Artificial Sequence; identical to SEQ ID NO: 26989
  derived and/or modified protein sequence (wt) from hemagglutinin__InfluenzaB__AHL93345

SEQ ID NO: 28048 - protein, 585 aa, Artificial Sequence; identical to SEQ ID NO: 26989
  derived and/or modified protein sequence (wt) from hemagglutinin__InfluenzaB__AHL93356

SEQ ID NO: 28049 - protein, 585 aa, Artificial Sequence
  derived and/or modified protein sequence (wt) from hemagglutinin__InfluenzaB__AHL93367
MKAIIVLLMVVTSNADRICTGITSSNSPHVVKTATQGEVNVTGVIPLTTTPTKSHFANLKGTETRGKLCPKCLNCTDLDVALGRPKCTGKIPSARVSILHEVRPVTSGCFPIMHDRTKIRQLPNLLRGYEYIRLSTHNVINAENAPGGPYKIGTSGSCPNITNGNGFFATMAWAVPKNDKNKTATNPLTIEVPYICTEGEDQITVWGFHSDNETQMAKLYGDSKPQKFTSSANGVTTHYVSQIGGFPNQTEDGGLPQSGRIVVDYMVQKSGKTGTITYQRGILLPQKVWCASGRSKVIKGSLPLIGEADCLHEKYGGLNKSKPYYTGEHAKAIGNCPIWVKTPLKLANGTKYRPPAKLLKERGFFGAIAGFLEGGWEGMIAGWHGYTSHGAHGVAVAADLKSTQEAINKITKNLNSLSELEVKNLQRLSGAMDELHNEILELDEKVDDLRADTISSQIELAVLLSNEGIINSEDEHLLALERKLKKMLGPSAVEIGNGCFETKHKCNQTCLDRIAAGTFDAGEFSLPTFDSLNITAASLNDDGLDNHTILLYYSTAASSLAVTLMIAIFVVYMVSRDNVSCSICL

SEQ ID NO: 28050 - protein, 585 aa, Artificial Sequence; identical to SEQ ID NO: 26989
  derived and/or modified protein sequence (wt) from hemagglutinin__InfluenzaB__AHL93378

SEQ ID NO: 28051 - protein, 585 aa, Artificial Sequence
  derived and/or modified protein sequence (wt) from hemagglutinin__InfluenzaB__AHL93389
MKAIIVLLMVVTSNADRICTGITSSNSPHVVKTATQGEVNVTGVIPLTTTPTKSYFANLKGTETRGKLCPKCLNCTDLDVALGRPKCTGKIPSARVSILHEVRPVTSGCFPIMHDRTKIRQLPNLLRGYEHIRLSTHNVINAENAPGGPYKIGTSGSCPNITNGNGFFATMAWAVPKNDKNKTATNPLTIEVPYICTEGEDQITVWGFHSDNETQMAKLYGDSKPQKFTSSANGVTTHYVSQIGGFPNQTEDGGLPQSGRIVVDYMVQKSGKTGTITYQRGILLPQKVWCASGRSKVIKGSLPLIGEADCLHEKYGGLNKSKPYYTGEHAKAIGNCPIWVKTPLKLANGTKYRPPAKLLKERGFFGAIAGFLEGGWEGMIAGWHGYTSHGAHGVAVAADLKSTQEAINKITKNLNSLSELEVKNLQRLSGAMDELHNEILELDEKVDDLRADTISSQIELAVLLSNEGIINSEDEHLLALERKLKKMLGPSAVEIGNGCFETKHKCNQTCLDRIAAGTFDAGEFSLPTFDSLNITAASLNDDGLDNHTILLYYSTAASSLAVTLMIAIFVVYMVSRDNVSCSICL

SEQ ID NO: 28052 - protein, 585 aa, Artificial Sequence; identical to SEQ ID NO: 26989
  derived and/or modified protein sequence (wt) from hemagglutinin__InfluenzaB__AHL93400

SEQ ID NO: 28053 - protein, 585 aa, Artificial Sequence; identical to SEQ ID NO: 27322
  derived and/or modified protein sequence (wt) from hemagglutinin__InfluenzaB__AHL93411

SEQ ID NO: 28054 - protein, 585 aa, Artificial Sequence; identical to SEQ ID NO: 27322
  derived and/or modified protein sequence (wt) from hemagglutinin__InfluenzaB__AHL93422

SEQ ID NO: 28055 - protein, 585 aa, Artificial Sequence; identical to SEQ ID NO: 27322
  derived and/or modified protein sequence (wt) from hemagglutinin__InfluenzaB__AHL93433

SEQ ID NO: 28056 - protein, 585 aa, Artificial Sequence; identical to SEQ ID NO: 26989
  derived and/or modified protein sequence (wt) from hemagglutinin__InfluenzaB__AHL93444

SEQ ID NO: 28057 - protein, 585 aa, Artificial Sequence
  derived and/or modified protein sequence (wt) from hemagglutinin__InfluenzaB__AHL93455
MKAIIVLLMVVTSNADRICTGITSSNSPHVVKTATQGEVNVTGVIPLTTTPTKSHFANLKGTETRGKLCPKCLNCTDLDVALGRPKCTGKIPSARVSILHEVRPVTSGCFPIMHDRTKIRQLPNLLRGYEHIRLSTHNVINAENAPGGPYKIGTSGSCPNITNGNGFFATMAWAVPKNDKNKTATNPLTIEVPYICTEGEDQITVWGFHSDNETQMAKLYGDSKPQKFTSSANGVTTHYVSQIGGFPNQTEDGGLPQSGRIVVDYMVQKSGKTGTITYQRGILLPQKVWCASGRSKVIKGSLPLIGEADCLHEKYGGLNKSKPYYTGEHAKAIGNCPIWVKTPLKLANGTKYRPPAKLLKERGFFGAIAGFLEGGWEGMIAGWHGYTSHGAHGVAVAADLKSTQEAINKITKNLNSLSELEVKNLQRLSGAMNELHNEILELDEKVDDLRADTISSQIELAVLLSNEGIINSEDEHLLALERKLKKMLGPSAVEIGNGCFETKHKCNQTCLDRIAAGTFDAGEFSLPTFDSLNITAASLNDDGLDNHTILLYYSTAASSLAVTLMIAIFVVYMVSRDNVSCSICL

SEQ ID NO: 28058 - protein, 585 aa, Artificial Sequence; identical to SEQ ID NO: 26989
  derived and/or modified protein sequence (wt) from hemagglutinin__InfluenzaB__AHL93466

SEQ ID NO: 28059 - protein, 585 aa, Artificial Sequence; identical to SEQ ID NO: 26608
  derived and/or modified protein sequence (wt) from hemagglutinin__InfluenzaB__AHL93477

SEQ ID NO: 28060 - protein, 585 aa, Artificial Sequence; identical to SEQ ID NO: 26683
  derived and/or modified protein sequence (wt) from hemagglutinin__InfluenzaB__AHL93488

SEQ ID NO: 28061 - protein, 584 aa, Artificial Sequence
  derived and/or modified protein sequence (wt) from hemagglutinin__InfluenzaB__AHL93499
MKAIIVLLMVVTSNADRICTGITSSNSPHVVKTATQGEVNVTGVIPLTTTPTKSYFANLKGTRTRGKLCPDCLNCTDLDVALGRPMCVGTTPSAKASILHEIRPVTSGCFPIMHDRTKIRQLPNLLRGYENIRLSTQNVIDAEKAPGGPYRLGTSGSCPNATSKIGFFATMAWAVPKDNYKNATNPLTVEVPYICTEGEDQITVWGFHSDNKTQMKNLYGDSNPQKFTSSANGVTAHYVSQIGDFPDQTEDGGLPQSGRIVVDYMMQKPGKTGTIVYQRGVLLPQKVWCASGRSKVIKGSLPLIGEADCLHEKYGGLNKSKPYYTGEHAKAIGNCPIWVKTPLKLANGTKYRPPAKLLKERGFFGAIAGFLEGGWEGMIAGWHGYTSHGAHGVAVAADLKSTQEAINKITKNLNSLSELEVKNLQRLSGAMDELHNEILELDEKVDDLRADTISSQIELAVLLSNEGIINSEDEHLLALERKLKKMLGPSAVDIGNGCFETKHKCNQTCLDRIAAGTFNAGEFSLPTFDSLNITAASLNDDGLDNHTILLYYSTAASSLAVTLMLAIFIVYMVSRDNVSCSICL

SEQ ID NO: 28062 - protein, 585 aa, Artificial Sequence; identical to SEQ ID NO: 26608
  derived and/or modified protein sequence (wt) from hemagglutinin__InfluenzaB__AHL93510

SEQ ID NO: 28063 - protein, 584 aa, Artificial Sequence
  derived and/or modified protein sequence (wt) from hemagglutinin__InfluenzaB__AHL93521
MKAIIALLMVVTSNADRICTGITSSNSPHVVKTATQGEVNVTGVIPLTTTPTKSYFANLKGTRTRGKLCPDCLNCTDLDVALGRPMCVGTTPSAKASILHEVRPVTSGCFPIMHDRTKIRQLPNLLRGYENIRLSTQNVIDAEKAPGGPYRLGTSGSCPNATSKIGFFATMAWAVPKDNYKNATNPLTVEVPYICTEGEDQITVWGFHSDNKTQMKNLYGDSNPQRFTSSANGVTTHYVSQIGDFPDQTEDGGLPQSGRIVVDYMVQKPGKTGTIVYQRGVLLPQKVWCASGRSKVIKGSLPLIGEADCLHEKYGGLNKSKPYYTGEHAKAIGNCPIWVKTPLKLANGTKYRPPAKLLKERGFFGAIAGFLEGGWEGMIAGWHGYTSHGAHGVAVAADLKSTQEAINKITKNLNSLSELEVKNLQRLSGAMDELHNEILELDEKVDDLRADTISSQIELAVLLSNEGIINSEDEHLLALERKLKKMLGPSAVDIGNGCFETKHKCNQTCLDRIAAGTFNAGEFSLPTFDSLNITAASLNDDGLDNHTILLYYSTAASSLAVTLMLAIFIVYMVSRDNVSCSICL

SEQ ID NO: 28064 - protein, 585 aa, Artificial Sequence; identical to SEQ ID NO: 26683
  derived and/or modified protein sequence (wt) from hemagglutinin__InfluenzaB__AHL93532

SEQ ID NO: 28065 - protein, 585 aa, Artificial Sequence; identical to SEQ ID NO: 26645
  derived and/or modified protein sequence (wt) from hemagglutinin__InfluenzaB__AHL93543

SEQ ID NO: 28066 - protein, 585 aa, Artificial Sequence; identical to SEQ ID NO: 26645
  derived and/or modified protein sequence (wt) from hemagglutinin__InfluenzaB__AHL93554

SEQ ID NO: 28067 - protein, 585 aa, Artificial Sequence; identical to SEQ ID NO: 26645
  derived and/or modified protein sequence (wt) from hemagglutinin__InfluenzaB__AHL93565

SEQ ID NO: 28068 - protein, 585 aa, Artificial Sequence; identical to SEQ ID NO: 26683
  derived and/or modified protein sequence (wt) from hemagglutinin__InfluenzaB__AHL93576

SEQ ID NO: 28069 - protein, 585 aa, Artificial Sequence; identical to SEQ ID NO: 26683
  derived and/or modified protein sequence (wt) from hemagglutinin__InfluenzaB__AHL93587

SEQ ID NO: 28070 - protein, 585 aa, Artificial Sequence
  derived and/or modified protein sequence (wt) from hemagglutinin__InfluenzaB__AHL93609
MKAIIVLLMVVTSNADRICTGITSSNSPHVVKTATQGEVNVTGVIPLTTTPTKSHFANLKGTETRGKLCPKCPNCTDLDVALGRPKCTGKIPSARVSILHEVRPVTSGCFPIMHDRTKIRQLPNLLRGYEHIRLSTHNVINAENAPGGPYKIGTSGSCPNVTNGNGFFATMAWAVPKNDKNKTATNPLTIEVPYICTEGEDQITVWGFHSDNETQMAKLYGDSKPQKFTSSANGVTTHYVSQIGGFPNQTEDGGLPQSGRIVVDYMVQKSGKTGTITYQRGILLPQKVWCASGRSKVIKGSLPLIGEADCLHEKYGGLNKSKPYYTGEHAKAIGNCPIWVKTPLKLANGTKYRPPAKLLTERGFFGAIAGFLEGGWEGMIAGWHGYTSHGAHGVAVAADLKSTQEAINKITKNLNSLSELEVKNLQRLSGAMDELHNEILELDEKVDDLRADTISSQIELAVLLSNEGIINSEDEHLLALERKLKKMLGPSAVEIGNGCFETKHKCNQTCLDRIAAGTFDAGEFSLPTFDSLNITAASLNDDGLDNHTILLYYSTAASSLAVTLMIAIFVVYMVSRDNVSCSICL

SEQ ID NO: 28071 - protein, 585 aa, Artificial Sequence; identical to SEQ ID NO: 26683
  derived and/or modified protein sequence (wt) from hemagglutinin__InfluenzaB__AHL93620

SEQ ID NO: 28072 - protein, 585 aa, Artificial Sequence; identical to SEQ ID NO: 28070
  derived and/or modified protein sequence (wt) from hemagglutinin__InfluenzaB__AHL93631

SEQ ID NO: 28073 - protein, 585 aa, Artificial Sequence; identical to SEQ ID NO: 28070
  derived and/or modified protein sequence (wt) from hemagglutinin__InfluenzaB__AHL93642

SEQ ID NO: 28074 - protein, 584 aa, Artificial Sequence
  derived and/or modified protein sequence (wt) from hemagglutinin__InfluenzaB__AHL93653
MKAIIVLLMVVTSNADRICTGITSSNSPHVVKTATQGEVNVTGVIPLTTTPTKSYFANLKGTRTRGKLCPDCLNCTDLDVALGRPMCVGTTPSAKASILHEVRPVTSGCFPIMHDRTKIRQLPNLLRGYENIRLSTQNVIDAEKAPGGPYRLGTSGSCPNATSKIGFFATMAWAVPKDNYKNATNPLTVEVPYICTEGEDQITVWGFHSDNKTQMKNLYGDSNPQKFTSSANGVTTHYVSQIGDFPDQTEDGGLPQSGRIVVDYMVQKPGKTGTIVYQRGVLLPQKVWCASGRSKVIKGSLPLIGEADCLHEKYGGLNKSKPYYTGEHAKAIGDCPIWVKTPLKLANGTKYRPPAKLLKERGFFGAIAGFLEGGWEGMIAGWHGYTSHGAHGVAVAADLKSTQEAINKITKNLNSLSELEVKNLQRLSGAMDELHNEILELDEKVDDLRADTISSQIELAVLLSNEGIINSEDEHLLALERKLKKMLGPSAVDIGNGCFETKHKCNQTCLDRIAAGTFNAGEFSLPTFDSLNITAASLNDDGLDNHTILLYYSTAASSLAVTLMLAIFIVYMVSRDNVSCSICL

SEQ ID NO: 28075 - protein, 585 aa, Artificial Sequence; identical to SEQ ID NO: 26683
  derived and/or modified protein sequence (wt) from hemagglutinin__InfluenzaB__AHL93664

SEQ ID NO: 28076 - protein, 585 aa, Artificial Sequence; identical to SEQ ID NO: 26608
  derived and/or modified protein sequence (wt) from hemagglutinin__InfluenzaB__AHL93675

SEQ ID NO: 28077 - protein, 585 aa, Artificial Sequence; identical to SEQ ID NO: 28070
  derived and/or modified protein sequence (wt) from hemagglutinin__InfluenzaB__AHL93686

SEQ ID NO: 28078 - protein, 585 aa, Artificial Sequence; identical to SEQ ID NO: 28070
  derived and/or modified protein sequence (wt) from hemagglutinin__InfluenzaB__AHL93697

SEQ ID NO: 28079 - protein, 585 aa, Artificial Sequence
  derived and/or modified protein sequence (wt) from hemagglutinin__InfluenzaB__AHL93708
MKAIIVLLMVVTSNADRICTGITSSNSPHVVKTATQGEVNVTGVIPLTTTPTKSHFANLKGTETRGKLCPKCPNCTDLDVALGRPKCTGKIPSARVSILHEVRPVTSGCFPIMHDRTKIRQLPNLLRGYEHIRLSTHNVINAENAPGGPYKIGTSGSCPNVTNGNGFFATMAWAVPKNDKNKTATNPLTIEVPYICTEGEDQITVWGFHSDNETQMAKLYGDSKPQKFTSSANGVTTHYVSQIGGFPNQTEDGGLPQSGRIVVDYMVQKSGKTGTITYQRGILLPQKVWCASGRSKVIKGSLPLIGEADCLHEKYGGLNKSKPYYTGKHAKAIGNCPIWVKTPLKLANGTKYRPPAKLLTERGFFGAIAGFLEGGWEGMIAGWHGYTSHGAHGVAVAADLKSTQEAINKITKNLNSLSELEVKNLQRLSGAMDELHNEILELDEKVDDLRADTISSQIELAVLLSNEGIINSEDEHLLALERKLKKMLGPSAVEIGNGCFETKHKCNQTCLDRIAAGTFDAGEFSLPTFDSLNITAASLNDDGLDNHTILLYYSTAASSLAVTLMIAIFVVYMVSRDNVSCSICL

SEQ ID NO: 28080 - protein, 585 aa, Artificial Sequence
  derived and/or modified protein sequence (wt) from hemagglutinin__InfluenzaB__AHL93719
MKAIIVLLMVVTSNADRICTGITSSNSPHIVKTATQGEVNVTGVIPLTTTPTKSHFANLKGTETRGKLCPKCLNCTDLDVALGRPKCTGKIPSARVSILHEVIPVTSGCFPIMHDRTKIRQLPNLLRGYEHIRLSTHNVINAENAPGGPYKIGTSGSCPNITNGNGFFATMAWAVPKNDKNKTATNPLTIEVPYICTEGEDQITVWGFHSDNETQMAKLYGDSKPQKFTSSANGVTTHYVSQIGGFPNQTEDGGLPQSGRIVVDYMVQKSGKTGTITYQRGILLPQKVWCASGRSKVIKGSLPLIGEADCLHEKYGGLNKSKPYYTGEHAKAIGNCPIWVKTPLKLANGTKYRPPAKLLKERGFFGAIAGFLEGGWEGMIAGWHGYTSHGAHGVAVAADLKSTQEAINKITKNLNSLSELEVKNLQRLSGAMDELHNEILELDEKVDDLRADTISSQIELAVLLSNEGIINSEDEHLLALERKLKKMLGPSAVEIGNGCFETKHKCNQTCLDRIAAGTFDAGEFSLPTFDSLNITAASLNDDGLDNHTILLYYSTAASSLAVTLMIAIFVVYMVSRDNVSCSICL

SEQ ID NO: 28081 - protein, 585 aa, Artificial Sequence; identical to SEQ ID NO: 26683
  derived and/or modified protein sequence (wt) from hemagglutinin__InfluenzaB__AHL93730

SEQ ID NO: 28082 - protein, 585 aa, Artificial Sequence; identical to SEQ ID NO: 26683
  derived and/or modified protein sequence (wt) from hemagglutinin__InfluenzaB__AHL93741

SEQ ID NO: 28083 - protein, 585 aa, Artificial Sequence; identical to SEQ ID NO: 26645
  derived and/or modified protein sequence (wt) from hemagglutinin__InfluenzaB__AHL93752

SEQ ID NO: 28084 - protein, 585 aa, Artificial Sequence; identical to SEQ ID NO: 28070
  derived and/or modified protein sequence (wt) from hemagglutinin__InfluenzaB__AHL93763

SEQ ID NO: 28085 - protein, 585 aa, Artificial Sequence; identical to SEQ ID NO: 26608
  derived and/or modified protein sequence (wt) from hemagglutinin__InfluenzaB__AHL93774

SEQ ID NO: 28086 - protein, 585 aa, Artificial Sequence; identical to SEQ ID NO: 28070
  derived and/or modified protein sequence (wt) from hemagglutinin__InfluenzaB__AHL93785

SEQ ID NO: 28087 - protein, 585 aa, Artificial Sequence; identical to SEQ ID NO: 26683
  derived and/or modified protein sequence (wt) from hemagglutinin__InfluenzaB__AHL93796

SEQ ID NO: 28088 - protein, 585 aa, Artificial Sequence; identical to SEQ ID NO: 26608
  derived and/or modified protein sequence (wt) from hemagglutinin__InfluenzaB__AHL93818

SEQ ID NO: 28089 - protein, 585 aa, Artificial Sequence
  derived and/or modified protein sequence (wt) from hemagglutinin__InfluenzaB__AHL93829
MKAIIVLLMVVTSNADRICTGITSSNSPHIVKTATQGEVNVTGVIPLTTTPTKSHFANLKGTETRGKLCPKCLNCTDLDVALGRPKCTGKIPSARVSILHEVRPVTSGCFPIMHDRTKIRQLPNLLRGYEHIRLSTHNVINTENAPGGPYKIGTSGSCPNITNGNGFFATMAWAVPKNDKNKTATNPLTIEVPYICTEGEDQITVWGFHSDNETQMAKLYGDSKPQKFTSSANGVTTHYVSQIGGFPNQTEDGGLPQSGRIVVDYMVQKSGKTGTITYQRGILLPQKVWCASGRSKVIKGSLPLIGEADCLHEKYGGLNKSKPYYTGEHAKAIGNCPIWVKTPLKLANGTKYRPPAKLLKERGFFGAIAGFLEGGWEGMIAGWHGYTSHGAHGVAVAADLKSTQEAINKITKNLNSLSELEVKNLQRLSGAMDELHNEILELDEKVDDLRADTISSQIELAVLLSNEGIINSEDEHLLALERKLKKMLGPSAVEIGNGCFETKHKCNQTCLDRIAAGTFDAGEFSLPTFDSLNITAASLNDDGLDNHTILLYYSTAASSLAVTLMIAIFVVYMVSRDNVSCSICL

SEQ ID NO: 28090 - protein, 585 aa, Artificial Sequence; identical to SEQ ID NO: 26989
  derived and/or modified protein sequence (wt) from hemagglutinin__InfluenzaB__AHL93840

SEQ ID NO: 28091 - protein, 585 aa, Artificial Sequence; identical to SEQ ID NO: 26683
  derived and/or modified protein sequence (wt) from hemagglutinin__InfluenzaB__AHL93851

SEQ ID NO: 28092 - protein, 585 aa, Artificial Sequence; identical to SEQ ID NO: 26683
  derived and/or modified protein sequence (wt) from hemagglutinin__InfluenzaB__AHL93862

SEQ ID NO: 28093 - protein, 585 aa, Artificial Sequence
  derived and/or modified protein sequence (wt) from hemagglutinin__InfluenzaB__AHL93873
MKAIIVLLMVVTSNADRICTGITSSNSPHIVKTATQGEVNVTGVIPLTTTPTKSHFANLKGTETRGELCPKCLNCTDLDVALGRPKCTGKIPSARVSILHEVRPVTSGCFPIMHDRTKIRQLPNLLRGYEHIRLSTHNVINAENAPGGPYKIGTSGSCPNITNGNGFFATMAWAVPKNDKNKTATNPLTIEVPYICTEGEDQITVWGFHSDNETQMAKLYGDSKPQKFTSSANGVTTHYVSQIGGFPNQTEDGGLPQSGRIVVDYMVQKSGKTGTITYQRGILLPQKVWCASGRSKVIKGSLPLIGEADCLHEKYGGLNKSKPYYTGEHAKAIGNCPIWVKTPLKLANGTKYRPPAKLLKERGFFGAIAGFLEGGWEGMIAGWHGYTSHGAHGVAVAADLKSTQEAINKITKNLNSLSELEVKNLQRLSGAMDELHNEILELDEKVDDLRADTISSQIELAVLLSNEGIINSEDEHLLALERKLKKMLGPSAVEIGNGCFETKHKCNQTCLDRIAAGTFDAGEFSLPTFDSLNITAASLNDDGLDNHTILLYYSTAASSLAVTLMIAIFVVYMVSRDNVSCSICL

SEQ ID NO: 28094 - protein, 585 aa, Artificial Sequence; identical to SEQ ID NO: 26683
  derived and/or modified protein sequence (wt) from hemagglutinin__InfluenzaB__AHL93884

SEQ ID NO: 28095 - protein, 585 aa, Artificial Sequence; identical to SEQ ID NO: 26683
  derived and/or modified protein sequence (wt) from hemagglutinin__InfluenzaB__AHL93895

SEQ ID NO: 28096 - protein, 585 aa, Artificial Sequence; identical to SEQ ID NO: 26683
  derived and/or modified protein sequence (wt) from hemagglutinin__InfluenzaB__AHL93906

SEQ ID NO: 28097 - protein, 585 aa, Artificial Sequence; identical to SEQ ID NO: 26683
  derived and/or modified protein sequence (wt) from hemagglutinin__InfluenzaB__AHL93917

SEQ ID NO: 28098 - protein, 585 aa, Artificial Sequence; identical to SEQ ID NO: 26608
  derived and/or modified protein sequence (wt) from hemagglutinin__InfluenzaB__AHL93928

SEQ ID NO: 28099 - protein, 585 aa, Artificial Sequence; identical to SEQ ID NO: 26645
  derived and/or modified protein sequence (wt) from hemagglutinin__InfluenzaB__AHL93939

SEQ ID NO: 28100 - protein, 585 aa, Artificial Sequence; identical to SEQ ID NO: 26683
  derived and/or modified protein sequence (wt) from hemagglutinin__InfluenzaB__AHL93950

SEQ ID NO: 28101 - protein, 585 aa, Artificial Sequence; identical to SEQ ID NO: 26645
  derived and/or modified protein sequence (wt) from hemagglutinin__InfluenzaB__AHL93961

SEQ ID NO: 28102 - protein, 585 aa, Artificial Sequence
  derived and/or modified protein sequence (wt) from hemagglutinin__InfluenzaB__AHL93972
MKAIIVLLMVVTSTADRICTGITSSNSPHVVKTATQGEVNVTGVIPLTTTPTKSHFANLKGTETRGKLCPKCLNCTDLDVALGRPKCTGKIPSARVSILHEVRPVTSGCFPIMHDRTKIRQLPNLLRGYEHIRLSTHNVINAENAPGGPYKIGTSGSCPNVTNGNGFFATMAWAVPKNDKNKTATNPLTIEVPYICTEGEDQITVWGFHSDNETQMAKLYGDSKPQKFTSSANGVTTHYVSQIGGFPNQTEDGGLPQSGRIVVDYMVQKSGKTGTITYQRGILLPQKVWCASGRSKVIKGSLPLIGEADCLHEKYGGLNKSKPYYTGEHAKAVGNCPIWVKTPLKLANGTKYRPPAKLLKERGFFGAIAGFLEGGWEGMIAGWHGYTSHGAHGVAVAADLKSTQEAINKITKNLNSLSELEVKNLQRLSGAMDELHNEILELDEKVDDLRADTISSQIELAVLLSNEGIINSEDEHLLALERKLKKMLGPSAVEIGNGCFETKHKCNQTCLDRIAAGTFDAGEFSLPTFDSLNITAASLNDDGLDNHTILLYYSTAASSLAVTLMIAIFVVYMVSRDNVSCSICL

SEQ ID NO: 28103 - protein, 585 aa, Artificial Sequence; identical to SEQ ID NO: 26608
  derived and/or modified protein sequence (wt) from hemagglutinin__InfluenzaB__AHL93983

SEQ ID NO: 28104 - protein, 584 aa, Artificial Sequence
  derived and/or modified protein sequence (wt) from hemagglutinin__InfluenzaB__AHL93994
MKAIIVLLMVVTSNADRICTGITSSNSPHVVKTATQGEVNVTGVIPLTTTPKKSYFANLKGTKTRGKLCPDCLNCTDLDVALGRPMCVGTTPSAKASILHEVRPVTSGCFPIMHDRTKIRQLANLLRGYENIRLSTQNVIDAEKAPGGPYRLGTSGSCPNATSKSGFFATMAWAVPKDNNKNATNPLTVEVPYICAEGEDQITVWGFHSDNKTQMKNLYGDSNPQKFTSSANGVTTHYVSQIGGFPDQTEDGGLPQSGRIVVDYMMQKPGKTGTIVYQRGVLLPQKVWCASGRSKVIKGSLPLIGEADCLHEKYGGLNKSKPYYTGEHAKAIGNCPIWVKTPLKLANGTKYRPPAKLLKERGFFGAIAGFLEGGWEGMIAGWHGYTSHGAHGVAVAADLKSTQEAINKITKNLNSLSELEVKNLQRLSGAMDELHNEILELDEKVDDLRADTISSQIELAVLLSNEGIINSEDEHLLALERKLKKMLGPSAVDIGNGCFETKHKCNQTCLDRIAAGTFNAGEFSLPTFDSLNITAASLNDDGLDNHTILLYYSTAASSLAVTLMLAIFIVYMISRDNVSCSICL

SEQ ID NO: 28105 - protein, 585 aa, Artificial Sequence; identical to SEQ ID NO: 26683
  derived and/or modified protein sequence (wt) from hemagglutinin__InfluenzaB__AHL94005

SEQ ID NO: 28106 - protein, 585 aa, Artificial Sequence; identical to SEQ ID NO: 26683
  derived and/or modified protein sequence (wt) from hemagglutinin__InfluenzaB__AHL94016

SEQ ID NO: 28107 - protein, 585 aa, Artificial Sequence
  derived and/or modified protein sequence (wt) from hemagglutinin__InfluenzaB__AHL94027
MKAIIVLLMVVTSNADRICTGITSSNSPHIVKTATQGEVNVTGVIPLTTTPTKSHFANLKGTETRGKLCPKCLNCTDLDVALGRPKCTGKIPSARVSILHEVRPVTSGCFPIMHDRTKIRQLPNLLRGYEHIRLSTHNVINAENAPGGPYKIGTSGSCPNITNGNGFFATMAWAVPKNDKNKTATNPLTIEVPYICTEGEDQITVWGFHSDNETQMAKLYGDSKPQKFTSSANGVTTHYVSQIGGFPNQTEDGGLPQSGRIVVDYMVQKSGKTGTITYQMGVLLPQKVWCASGRSKVIKGSLPLIGEADCLHEKYGGLNKSKPYYTGEHAKAIGNCPIWVKTPLKLANGTKYRPPAKLLKERGFFGAIAGFLEGGWEGMIAGWHGYTSHGAHGVAVAADLKSTQEAINKITKNLNSLSELEVKNLQRLSGAMDELHNEILELDEKVDDLRADTISSQIELAVLLSNEGIINSEDEHLLALERKLKKMLGPSAVEIGNGCFETKHKCNQTCLDRIAAGTFDAGEFSLPTFDSLNITAASLNDDGLDNHTILLYYSTAASSLAVTLMIAIFVVYMVSRDNVSCSICL

SEQ ID NO: 28108 - protein, 585 aa, Artificial Sequence; identical to SEQ ID NO: 26645
  derived and/or modified protein sequence (wt) from hemagglutinin__InfluenzaB__AHL94038

SEQ ID NO: 28109 - protein, 585 aa, Artificial Sequence; identical to SEQ ID NO: 26608
  derived and/or modified protein sequence (wt) from hemagglutinin__InfluenzaB__AHL94049

SEQ ID NO: 28110 - protein, 585 aa, Artificial Sequence; identical to SEQ ID NO: 26683
  derived and/or modified protein sequence (wt) from hemagglutinin__InfluenzaB__AHL94060

SEQ ID NO: 28111 - protein, 585 aa, Artificial Sequence
  derived and/or modified protein sequence (wt) from hemagglutinin__InfluenzaB__AHL94071
MKAIIVLLMVVTSNADRICTGITSSNSPHIVKTATQGEVNVTGVIPLTTTPTKSHFANLKGTETRGKLCPKCLNCTDLDVALGRPKCTGKIPSARVSILHEVRPVTSGCFPIMHDRTKIRQLPNLLRGYEHIRLSTHNVINAENAPGGPYKIGTSGSCPNITNGNGFFATMAWAVPKNDKNKTATNPLTIEVPYICTEGEDQITVWGFHSDNETQMAKLYGDSKPQKFTSSANGVTTHYVSQIGGFPNQTEDGGLPQSGRIVVDYMMQKSGKTGTITYQRGILLPQKVWCASGRSKVIKGSLPLIGEADCLHEKYGGLNKSKPYYTGEHAKAIGNCPIWVKTPLKLANGTKYRPPAKLLKERGFFGAIAGFLEGGWEGMIAGWHGYTSHGAHGVAVAADLKSTQEAISKITKNLNSLSELEVKNLQRLSGAMDELHNEILELDEKVDDLRADTISSQIELAVLLSNEGIINSEDEHLLALERKLKKMLGPSAVEIGNGCFETKHKCNQTCLDRIAAGTFDAGEFSLPTFDSLNITAASLNDDGLDNHTILLYYSTAASSLAVTLMIAIFVVYMVSRDNVSCSICL

SEQ ID NO: 28112 - protein, 584 aa, Artificial Sequence
  derived and/or modified protein sequence (wt) from hemagglutinin__InfluenzaB__AHL94082
MKAIIVLLMVVTSNADRICTGITSSNSPHVVKTATQGEVNVTGVIPLTTTPTKSYFANLKGTRTRGKLCPDCLNCTDLDVALGRPMCVGTTPSAKASILHEIRPVTSGCFPIMHDRTKIRQLPNLLRGYENIRLSTQNVIDAEKAPGGPYRLGTSGSCPNATSKIGFFATMAWAVPKDNYKNATNPLTVEVPYICTEGEDQITVWGFHSDNKTQMKNLYGDSNPQKFTSSANGVTTHYVSQIGDFPDQTEDGGLPQSGRIVVDYMMQKPGKTGTIVYQRGVLLPQKVWCASGRSKVIKGSLPLIGEADCLHEKYGGLNKSKPYYTGEHAKAIGNCPIWVKTPLKLANGTKYRPPAKLLKERGFFGAIAGFLEGGWEGMIAGWHGYTSHGAHGVAVAADLKSTQEAINKITKNLNSLSELEVKNLQRLSGAMDELHNEILELDEKVDDLRADTISSQIELAVLLSNEGIINSEDEHLLALERKLKKMLGPSAVDIGNGCFETKHKCNQTCLDRIAAGTFNAGEFSLPTFDSLNITAASLNDDGLDNHTILLYYSTAASSLAVTLMLAIFIVYMVSRDNVSCSICL

SEQ ID NO: 28113 - protein, 585 aa, Artificial Sequence; identical to SEQ ID NO: 26645
  derived and/or modified protein sequence (wt) from hemagglutinin__InfluenzaB__AHL94093

SEQ ID NO: 28114 - protein, 585 aa, Artificial Sequence; identical to SEQ ID NO: 26683
  derived and/or modified protein sequence (wt) from hemagglutinin__InfluenzaB__AHL94102

SEQ ID NO: 28115 - protein, 585 aa, Artificial Sequence
  derived and/or modified protein sequence (wt) from hemagglutinin__InfluenzaB__AHL94113
MKAIIVLLMVVTSNADRICTGITSSNSPHIVKTATQGEVNVTGVIPLTTTPTKSHFANLKGTETRGKLCPKCLNCTDLDVALGRPKCTGKIPSARVSILHEVRPVTSGCFPIMHDRTKIRQLPNLLRGYEHIRLSTHNVINAENAPGGPYKIGTSGSCLNITNGNGFFATMAWAVPKNDKNKTATNPLTIEVPYICTEGEDQITVWGFHSDNETQMAKLYGDSKPQKFTSSANGVTTHYVSQIGGFPNQTEDGGLPQSGRIVVDYMVQKSGKTGTITYQRGILLPQKVWCASGRSKVIKGSLPLIGEADCLHEKYGGLNKSKPYYTGEHAKAIGNCPIWVKTPLKLANGTKYRPPAKLLKERGFFGAIAGFLEGGWEGMIAGWHGYTSHGAHGVAVAADLKSTQEAINKITKNLNSLSELEVKNLQRLSGAMDELHNEILELDEKVDDLRADTISSQIELAVLLSNEGIINSEDEHLLALERKLKKMLGPSAVEIGNGCFETKHKCNQTCLDRIAAGTFDAGEFSLPTFDSLNITAASLNDDGLDNHTILLYYSTAASSLAVTLMIAIFVVYMVSRDNVSCSICL

SEQ ID NO: 28116 - protein, 585 aa, Artificial Sequence
  derived and/or modified protein sequence (wt) from hemagglutinin__InfluenzaB__AHL94124
MKAIIVLLMVVTSNADRICTGITSSNSPHIVKTATQGEVNVTGVIPLTTTPTKSHFANLKGTETRGKLCPKCLNCTDLDVALGRPKCTGKIPSARVSILHEIRPVTSGCFPIMHDRTKIRQLPNLLRGYEHIRLSTHNVINAENAPGGPYKIGTSGSCPNITNGNGFFATMAWAVPKNDKNKTATNPLTIEVPYICTEGEDQITVWGFHSDNETQMAKLYGDSKPQKFTSSANGVTTHYVSQIGGFPNQTEDGGLPQSGRIVVDYMVQKSGKTGTITYQRGILLPQKVWCASGRSKVIKGSLPLIGEADCLHEKYGGLNKSKPYYTGEHAKAIGNCPIWVKTPLKLANGTKYRPPAKLLKERGFFGAIAGFLEGGWEGMIAGWHGYTSHGAHGVAVAADLKSTQEAINKITKNLNSLSELEVKNLQRLSGAMDELHNEILELDEKVDDLRADTISSQIELAVLLSNEGIINSEDEHLLALERKLKKMLGPSAVEIGNGCFETKHKCNQTCLDRIAAGTFDAGEFSLPTFDSLNITAASLNDDGLDNHTILLYYSTAASSLAVTLMIAIFVVYMVSRDNVSCSICL

SEQ ID NO: 28117 - protein, 585 aa, Artificial Sequence; identical to SEQ ID NO: 26608
  derived and/or modified protein sequence (wt) from hemagglutinin__InfluenzaB__AHL94135

SEQ ID NO: 28118 - protein, 585 aa, Artificial Sequence; identical to SEQ ID NO: 26608
  derived and/or modified protein sequence (wt) from hemagglutinin__InfluenzaB__AHL94146

SEQ ID NO: 28119 - protein, 585 aa, Artificial Sequence; identical to SEQ ID NO: 26683
  derived and/or modified protein sequence (wt) from hemagglutinin__InfluenzaB__AHL94157

SEQ ID NO: 28120 - protein, 585 aa, Artificial Sequence; identical to SEQ ID NO: 26683
  derived and/or modified protein sequence (wt) from hemagglutinin__InfluenzaB__AHL94168

SEQ ID NO: 28121 - protein, 585 aa, Artificial Sequence; identical to SEQ ID NO: 26608
  derived and/or modified protein sequence (wt) from hemagglutinin__InfluenzaB__AHL94179

SEQ ID NO: 28122 - protein, 585 aa, Artificial Sequence; identical to SEQ ID NO: 26608
  derived and/or modified protein sequence (wt) from hemagglutinin__InfluenzaB__AHL94190

SEQ ID NO: 28123 - protein, 585 aa, Artificial Sequence
  derived and/or modified protein sequence (wt) from hemagglutinin__InfluenzaB__AHL94201
MKAIIVLLMVVTSNADRICTGITSSNSPHIVKTATQGEVNVTGVIPLTTTPTKSHFANLKGTETRGKLCPKCLNCTDLDVALGRPKCTGKIPSARVSILHEVRPVTSGCFPIMHDRTKIRQLPNLLRGYEHIRLSTHNVINAENAPGGPYKIGTSGSCPNITNGNGFFETMAWAVPKNDKNKTATNPLTIEVPYICTEGEDQITVWGFHSDNETQMAKLYGDSKPQKFTSSANGVTTHYVSQIGGFPNQTEDGGLPQSGRIVVDYMVQKSGKTGTITYQRGILLPQKVWCASGRSKVIKGSLPLIGEADCLHEKYGGLNKSKPYYTGEHAKAIGNCPIWVKTPLKLANGTKYRPPAKLLKERGFFGAIAGFLEGGWEGMIAGWHGYTSHGAHGVAVAADLKSTQEAINKITKNLNSLSELEVKNLQRLSGAMDELHNEILELDEKVDDLRADTISSQIELAVLLSNEGIINSEDEHLLALERKLKKMLGPSAVEIGNGCFETKHKCNQTCLDRIAAGTFDAGEFSLPTFDSLNITAASLNDDGLDNHTILLYYSTAASSLAVTLMIAIFVVYMVSRNNVSCSICL

SEQ ID NO: 28124 - protein, 585 aa, Artificial Sequence
  derived and/or modified protein sequence (wt) from hemagglutinin__InfluenzaB__AHL94212
MKAIIVLLMVVTSNADRICTGITSSNSPHVVKTATQGEVNVTGVIPLTTTPTKSHFANLKGTETRGKLCPKCLNCTDLDVALGRPKCTGKIPSARVSILHEVRPVTSGCFPIMHDRTKIRQLPNLLRGYEHIRLSTHNVINAENAPGGPYKIGTSGSCPNVTNGNGFFATMAWAVPKNDKNKTATNPLTIEVPYICTEGEDQVTVWGFHSDNETQMAKLYGDSKPQKFTSSANGVTTHYVSQIGGFPNQTEDGGLPQSGRIVVDYMVQKSGKTGTITYQRGILLPQKVWCASGRSKVIKGSLPLIGEADCLHEKYGGLNKSKPYYTGEHAKAIGNCPIWVKTPLKLANGTKYRPPAKLLKERGFFGAIAGFLEGGWEGMIAGWHGYTSHGAHGVAVAADLKSTQEAINKITKNLNSLSELEVKNLQRLSGAMDELHNEILELDEKVDDLRADTISSQIELAVLLSNEGIINSEDEHLLALERKLKKMLGPSAVEIGNGCFETKHKCNQTCLDRIAAGTFDAGEFSLPTFDSLNITAASLNDDGLDNHTILLYYSTAASSLAVTLMIAIFVVYMVSRDNVSCSICL

SEQ ID NO: 28125 - protein, 585 aa, Artificial Sequence; identical to SEQ ID NO: 26683
  derived and/or modified protein sequence (wt) from hemagglutinin__InfluenzaB__AHL94220

SEQ ID NO: 28126 - protein, 585 aa, Artificial Sequence; identical to SEQ ID NO: 26683
  derived and/or modified protein sequence (wt) from hemagglutinin__InfluenzaB__AHL94231

SEQ ID NO: 28127 - protein, 585 aa, Artificial Sequence
  derived and/or modified protein sequence (wt) from hemagglutinin__InfluenzaB__AHL94242
MKAIIVLLMVVTSNADRICTGITSSNSPHVVKTATQGEVNVTGVIPLTTTPTKSHFANLKGTETRGKLCPKCLNCTDLDVALGRPKCTGKIPSARVSILHEVRPVTSGCFPIMHDRTKIRQLPNLLRGYEHIRLSTHNVINAENAPGGPYKIGTSGSCPNVTNGNGFFATMAWAVPKNDKNKTATNPLTIEVPYICTEGEDQITVWGFHSDNETQMAKLYGDSKPQKFTSSANGVTTHYVSQIGGFPNQTEDGGLPQSGRIVVDYMVQKSGKTGTITYQRGILLPQKVWCANGRSKVIKGSLPLIGEADCLHEKYGGLNKSKPYYTGEHAKAIGNCPIWVKTPLKLANGTKYRPPAKLLKERGFFGAIAGFLEGGWEGMIAGWHGYTSHGAHGVAVAADLKSTQEAINKITKNLNSLSELEVKNLQRLSGAMDELHNEILELDEKVDDLRADTISSQIELAVLLSNEGIINSEDEHLLALERKLKKMLGPSAVEIGNGCFETKHKCNQTCLDRIAAGTFDAGEFSLPTFDSLNITAASLNDDGLDNHTILLYYSTAASSLAVTLMIAIFVVYMVSRDNVSCSICL

SEQ ID NO: 28128 - protein, 585 aa, Artificial Sequence; identical to SEQ ID NO: 26645
  derived and/or modified protein sequence (wt) from hemagglutinin__InfluenzaB__AHL94253

SEQ ID NO: 28129 - protein, 584 aa, Artificial Sequence
  derived and/or modified protein sequence (wt) from hemagglutinin__InfluenzaB__AHL94274
MKAIIVLLMVVTSNADRICTGITSSNSPHVVKTATQGEVNVTGVIPLTTTPTKSYFANLKGTRTRGKLCPDCLNCTDLDVALGRPMCVGTTPSAKASILHEVRPVTSGCFPIMHDRTKIRQLPNLLRGYEKIRLSTQNVIDAEKAPGGPYRLGTSGSCPNATSKIGFFATMAWAVPKDNYKNATNPLTVEVPYICTEGEDQITVWGFHSDNKTQMKSLYGDSNPQKFTSSANGVTTHYVSQIGDFPDQTEDGGLPQSGRIVVDYMMQKPGKTGTIVYQRGVLLPQKVWCASGRSKVIKGSLPLIGEADCLHEEYGGLNKSKPYYTGKHAKAIGNCPIWVKTPLKLANGTKYRPPAKLLKERGFFGAIAGFLEGGWEGMIAGWHGYTSHGAHGVAVAADLKSTQEAINKITKNLNSLSELEVKNLQRLSGAMDELHNEILELDEKVDDLRADTISSQIELAVLLSNEGIINSEDEHLLALERKLKKMLGPSAVDIGNGCFETKHKCNQTCLDRIAAGTFNAGEFSLPTFDSLNITAASLNDDGLDNHTILLYYSTAASSLAVTLMLAIFIVYMVSRDNVSCSICL

SEQ ID NO: 28130 - protein, 584 aa, Artificial Sequence; identical to SEQ ID NO: 28129
  derived and/or modified protein sequence (wt) from hemagglutinin__InfluenzaB__AHL94295

SEQ ID NO: 28131 - protein, 584 aa, Artificial Sequence
  derived and/or modified protein sequence (wt) from hemagglutinin__InfluenzaB__AHL94306
MKAIIVLLMVVTSNADRICTGITSSNSPHVVKTATQGEVNVTGAIPLTTTPTKSYFANLKGTRTRGKLCPDCLNCTDLDVALGRPMCVGTTPSAKASILHEVRPVTSGCFPIMHDRTKIRQLPNLLRGYENIRLSTQNVIDAEKAPGGPYRLGTSGSCPNATSKIGFFATMAWAVPKDNYKNATNPQTVEVPYICTEGEDQITVWGFHSDNKTQMKNLYGDSNPQKFTSSANGVTTHYVSQIGDFPDQTEDGGLPQSGRIVVDYMVQKPGKTGTIVYQRGVLLPQKVWCASGRSKVIKGSLPLIGEADCLHEKYGGLNKSKPYYTGEHAKAIGNCPIWVKTPLKLANGTKYRPPAKLLKERGFFGAIAGFLEGGWEGMIAGWHGYTSHGAHGVAVAADLKSTQEAINKITKNLNSLSELEVKNLQRLSGAMDELHNEILELDEKVDDLRADTISSQIELAVLLSNEGIINSEDEHLLALERKLKKMLGPSAVDIGNGCFETKHKCNQTCLDRIAAGTFNAGEFSLPTFDSLNITAASLNDDGLDNHTILLYYSTAASSLAVTLMLAIFIVYMVSRDNVSCSICL

SEQ ID NO: 28132 - protein, 584 aa, Artificial Sequence
  derived and/or modified protein sequence (wt) from hemagglutinin__InfluenzaB__AHL94317
MKAIIVLLMVVTSNADRICTGITSSNSPHVVKTATQGEVNVTGAIPLTTTPTKSYFANLKGIRTRGKLCPDCLNCTDLDVALGRPMCVGTTPSAKASILHEVRPVTSGCFPIMHDRTKIRQLPNLLRGYENIRLSTQNVIDAEKAPGGPYRLGTSGSCPNATSKIGFFATMAWAVPRDNYKNATNPQTVEVPYICTEGEDQITVWGFHSDNKTQMKNLYGDSNPQKFTSSANGVTTHYVSQIGDFPDQTEDGGLPQSGRIVVDYMVQKPGKTGTIVYQRGVLLPQKVWCASGRSKVIKGSLPLIGEADCLHEKYGGLNKSKPYYTGEHAKAIGNCPIWVKTPLKLANGTKYRPPAKLLKERGFFGAIAGFLEGGWEGMIAGWHGYTSHGAHGVAVAADLKSTQEAINKITKNLNSLSELEVKNLQRLSGAMDELHNEILELDEKVDDLRADTISSQIELAVLLSNEGIINSEDEHLLALERKLKKMLGPSAVDIGNGCFETKHKCNQTCLDRIAAGTFNAGEFSLPTFDSLNITAASLNDDGLDNHTILLYYSTAASSLAVTLMLAIFIVYMVSRDNVSCSICL

SEQ ID NO: 28133 - protein, 584 aa, Artificial Sequence; identical to SEQ ID NO: 28131
  derived and/or modified protein sequence (wt) from hemagglutinin__InfluenzaB__AHL94328

SEQ ID NO: 28134 - protein, 584 aa, Artificial Sequence; identical to SEQ ID NO: 28129
  derived and/or modified protein sequence (wt) from hemagglutinin__InfluenzaB__AHL94339

SEQ ID NO: 28135 - protein, 585 aa, Artificial Sequence
  derived and/or modified protein sequence (wt) from hemagglutinin__InfluenzaB__AHL94350
MKAIIVLLMVVTSNADRICTGITSSNSPHVVKTATQGEVNVTGVIPLTTTPTKSHFANLKGTETRGKLCPKCLNCTDLDVALGRPKCTGKIPSARVSILHEVRPVTSGCFPIMHDRTKIRQLPNLLRGYEHIRLSTHNVINAENAPGGPYKIGTSGSCPNVTNGNGFFATMAWAVPKNDKNKTATNPLTIEVPYICTEGEDQITVWGFHSDNETQMAKLYGDSNPQKFTSSANGVTTHYVSQIGGFPNQTEDGGLPQSGRIVVDYMVQKSGKTGTITYQRGILLPQKVWCASGRSKVIKGSLPLIGEADCLHEKYGGLNKSKPYYTGEHAKAIGNCPIWVKTPLKLANGTKYRPPAKLLKERGFFGAIAGFLEGGWEGMIAGWHGYTSHGAHGVAVAADLKSTQEAINKITKNLNSLSELEVKNLQRLSGAMDELHNEILELDEKVDDLRADTISSQIELAVLLSNEGIINSEDEHLLALERKLKKMLGPSAVEIGNGCFETKHKCNQTCLDRIAAGTFDAGEFSLPTFDSLNITAASLNDDGLDNHTILLYYSTAASSLAVTLMIAIFVVYMVSKDNVSCSICL

SEQ ID NO: 28136 - protein, 585 aa, Artificial Sequence
  derived and/or modified protein sequence (wt) from hemagglutinin__InfluenzaB__AHL94361
MKAIIVLLMVVTSNADRICTGITSSNSPHVVKTATQGEVNVTGVIPLTTTPTKSHFANLKGTETRGKLCPKCLNCTDLDVALGRPKCTGKIPSARVSILHEVRPVTSGCFPIMHDRTKIRQLPNLLRGYEHIRLSTHNVINAENAPGGPYKIGTSGSCPNVTNGNGFFATMAWAVPKNDKNKTATNPLTIEVPYICTEGEDQITVWGFHSDNETQMAKLYGDSNPQKFTSSANGVTTHYVSQIGGFPNQTEDGGLPQSGRIVVDYMVQKSGKTGTIAYQRGILLPQKVWCASGRSKVIKGSLPLIGEADCLHEKYGGLNKSKPYYTGEHAKAIGNCPIWVKTPLKLANGTKYRPPAKLLKERGFFGAIAGFLEGGWEGMIAGWHGYTSHGAHGVAVAADLKSTQEAINKITKNLNSLSELEVKNLQRLSGAMDELHNEILELDEKVDDLRADTISSQIELAVLLSNEGIINSEDEHLLALERKLKKMLGPSAVEIGNGCFETKHKCNQTCLDRIAAGTFDAGEFSLPTFDSLNITAASLNDDGLDNHTILLYYSTAASSLAVTLMIAIFVVYMVSRDSVSCSICL

SEQ ID NO: 28137 - protein, 585 aa, Artificial Sequence
  derived and/or modified protein sequence (wt) from hemagglutinin__InfluenzaB__AHL94383
MKAIIVLLMVVTSNADRICTGITSSNSPHVVKTATQGEVNVTGVIPLTTTPTKSHFANLKGTETRGKLCPKCLNCTDLDVALGRPKCTGKIPSARVSILHEVRPVTSGCFPIMHDRTKIRQLPNLLRGYEHIRLSTHNVINAENAPGGPYKIGTSGSCPNVTNGNGFFATMAWAVPKNDKNKTATNPLTIEVPYICTEGEDQITVWGFHSDNETQMEKLYGDSKPQKFTSSANGVTTHYVSQIGGFPNQTEDGGLPQSGRIVVDYMVQKSGKTGTITYQRGILLPQKVWCASGRSKVIKGSLPLIGEADCLHEKYGGLNKSKPYYTGEHAKAIGNCPIWVKTPLKLANGTKYRPPAKLLKERGFFGAIAGFLEGGWEGMIAGWHGYTSHGAHGVAVAADLKSTQEAINKITKNLNSLSELEVKNLQRLSGAMDELHNEILELDEKVDDLRADTISSQIELAVLLSNEGIINSEDEHLLALERKLKKMLGPSAVEIGNGCFETKHKCNQTCLDRIAAGTFDAGEFSLPTFDSLNITAASLNDDGLDNHTILLYYSTAASSLAVTLMIAIFVVYMVSRDNVSCSICL

SEQ ID NO: 28138 - protein, 585 aa, Artificial Sequence; identical to SEQ ID NO: 26645
  derived and/or modified protein sequence (wt) from hemagglutinin__InfluenzaB__AHL94394

SEQ ID NO: 28139 - protein, 585 aa, Artificial Sequence
  derived and/or modified protein sequence (wt) from hemagglutinin__InfluenzaB__AHL94405
MKAIIVLLMVVTSNADRICTGITSSNSPHVVKTATQGEVNVTGVIPLTTTPTKSHFANLKGTETRGKLCPKCLNCTDLDVALGRPKCTGKIPSARVSILHEVRPVTSGCFPIMHDRTKIRQLPNLLRGYEHIRLSTHNVINAENAPGGPYKIGTSGSCPNVTNGNGFFATMAWAVPKNDKNKTATNPLTIEVPYICTEGEDQITVWGFHSDNETQMAKLYGDSKPQKFTSSANGVTTHYVSQIGGFPNQTEDGGLPQSGRIVVDYMVQKSGKTGTITYQRGILLPQKVWCASGRSKVIKGSLPLIGEADCLHEKYGGLNKSKPYYTGEHAKAIGNCPIWVKTPLKLANGTKYRPPAKLLKERGFFGAIAGFLEGGWEGMIAGWHGYTSHGAHGVAVAADLKSTQEAINKITKNLNSLSELEVKNLQRLSGAMDELHNEILELDEKVDDLRADTISSQIELAVLLSNEGIINSEDEHLLALERKLKKMLGPSAVEIGNGCFETKHKCNQTCLDRIAAGTFNAGEFSLPTFDSLNITAASLNDDGLDNHTILLYYSTAASSLAVTLMIAIFVVYMVSRDNVSCSICL

SEQ ID NO: 28140 - protein, 585 aa, Artificial Sequence; identical to SEQ ID NO: 26645
  derived and/or modified protein sequence (wt) from hemagglutinin__InfluenzaB__AHL94416

SEQ ID NO: 28141 - protein, 584 aa, Artificial Sequence; identical to SEQ ID NO: 26854
  derived and/or modified protein sequence (wt) from hemagglutinin__InfluenzaB__AHL94427

SEQ ID NO: 28142 - protein, 584 aa, Artificial Sequence
  derived and/or modified protein sequence (wt) from hemagglutinin__InfluenzaB__AHL94438
MKAIIVLLMVVTSNADRICTGITSSNSPHVVKTATQGEVNVTGAIPLTTTPTKSYFANLKGTRTRGKLCPDCLNCTDLDVALGRPMCVGTTPSAKASILHEVRPVTSGCFPIMHDRTKIRQLPNLLRGYENIRLSTQNVIDAEKAPGGPYRLGTSGSCPNATSKIGFFETMAWAVPKDNYKNATNPQTVEVPYICTEGEDQITVWGFHSDNKTQMKNLYGDSNPQKFTSSANGVTTHYVSQIGDFPDQTEDGGLPQSGRIVVDYMVQKPGKTGTIVYQRGVLLPQKVWCASGRSKVIKGSLPLIGEADCLHEKYGGLNKSKPYYTGEHAKAIGNCPIWVKTPLKLANGTKYRPPAKLLKERGFFGAIAGFLEGGWEGMIAGWHGYTSHGAHGVAVAADLKSTQEAINKITKNLNSLSELEVKNLQRLSGAMDELHNEILELDEKVDDLRADTISSQIELAVLLSNEGIINSEDEHLLALERKLKKMLGPSAVDIGNGCFETKHKCNQTCLDRIAAGTFNAGEFSLPTFDSLNITAASLNDDGLDNHTILLYYSTAASSLAVTLMLAIFIVYMVSRDNVSCSICL

SEQ ID NO: 28143 - protein, 584 aa, Artificial Sequence
  derived and/or modified protein sequence (wt) from hemagglutinin__InfluenzaB__AHL94460
MKAIIVLLMVVTSNADRICTGITSSNSPHVVKTATQGEVNVTGAIPLTTTPTKSYFANLKGTRTRGKLCPDCLNCTDLDVALGRPMCVGTTPSAKASILHEVRPVTSGCFPIMHDRTKIRQLPNLLRGYENIRLSTQNVIDAEKAPGGPYRLGTSGSCPNATSKIGFFATMAWAVPKDNYKNATNPQTVEVPYICTEEEDQITVWGFHSDNKTQMKNLYGDSNPQKFTSSANGVTTHYVSQIGDFPDQTEDGGLPQSGRIVVDYMVQKPGKTGTIVYQRGVLLPQKVWCASGRSKVIKGSLPLIGEADCLHEKYGGLNKSKPYYTGEHAKAIGNCPIWVKTPLKLANGTKYRPPAKLLKERGFFGAIAGFLEGGWEGMIAGWHGYTSHGAHGVAVAADLKSTQEAINKITKNLNSLSELEVKNLQRLSGAMDELHNEILELDEKVDDLRADTISSQIELAVLLSNEGIINSEDEHLLALERKLKKMLGPSAVDIGNGCFETKHKCNQTCLDRIAAGTFNAGEFSLPTFDSLNITAASLNDDGLDNHTILLYYSTAASSLAVTLMLAIFIVYMVSRDNVSCSICL

SEQ ID NO: 28144 - protein, 584 aa, Artificial Sequence
  derived and/or modified protein sequence (wt) from hemagglutinin__InfluenzaB__AHL94471
MKAIIVLLMVVTSNADRICTGITSSNSPHVVKTATQGEVNVTGVIPLTTTPTKSYFANLKGTRTRGKLCPDCLNCTDLDVALGRPMCVGTTPSAKASILHEVRPVTSGCFPIMHDRTKIRQLPNLLRGYEKIRLSTQNVIDAEKAPGGPYRLGTSGSCPNATSKIGFFATMAWAVPKDNYKNATNPLTVEVPYICTEGEDQITVWGFHSDNKTQMKSLYGDSNPQKFTSSANGVTTHYVSQIGDFPDQTEDGGLPQSGRIVVDYMMQKPGKTGTIVYQRGVLLPQKVWCASGRSKVIKGSLPLIGEADCLHEEYGGLNKSKPYYTGKHAKAIGNCPIWVKTPLKLANGTKYRPPAKLLKERGFFGAIAGFLEGGWEGMIAGWHGYTSHGAHGVAVAADLKSTQEAINKITKNLNSLSELEVKNLQRLSGAMDELHNEILELDEKVDDLRADTISSQIELAVLLSNEGIINSEDEHLLALERKLKKMLGPSAVDIGNGCFETKHKCNQTCLDRIAAGTFNAGEFSLPTFDSLNITAASLNDDGLDNHTILLYYSTAASSLAVTLMLAIFIVYMVSRDNISCSICL

SEQ ID NO: 28145 - protein, 585 aa, Artificial Sequence
  derived and/or modified protein sequence (wt) from hemagglutinin__InfluenzaB__AHL94482
MKAIIVLLMVVTSNADRICTGITSSNSPHVVKTATQGEVNVTGVIPLTTTPTKSHFANLKGTETRGKLCPKCLNCTDLDVALGRPKCTGKIPSARVSILHEVRPVTSGCFPIMHDRTKIRQLPNLLRGYEHIRLSTHNVINAENAPGGPYKIGTSGSCPNVTNGNGFFTTMAWAVPKNDKNKTATNPLTIEVPYICTEGEDQITVWGFHSDNETQMAKLYGDSKPQKFTSSANGVTTHYVSQIGGFPNQTEDGGLPQSGRIVVDYMVQKSGKTGTITYQRGILLPQKVWCASGRSKVIKGSLPLIGEADCLHEKYGGLNKSKPYYTGEHAKAIGNCPIWVKTPLKLANGTKYRPPAKLLKERGFFGAIAGFLEGGWEGMIAGWHGYTSHGAHGVAVAADLKSTQEAINKITKNLNSLSELEVKNLQRLSGAMDELHNEILELDEKVDDLRADTISSQIELAVLLSNEGIINSEDEHLLALERKLKKMLGPSAVEIGNGCFETKHKCNQTCLDRIAAGTFDAGEFSLPTFDSLNITAASLNDDGLDNHTILLYYSTAASSLAVTLMIAIFVVYMVSRDNVSCSICL

SEQ ID NO: 28146 - protein, 584 aa, Artificial Sequence; identical to SEQ ID NO: 28129
  derived and/or modified protein sequence (wt) from hemagglutinin__InfluenzaB__AHL94493

SEQ ID NO: 28147 - protein, 584 aa, Artificial Sequence; identical to SEQ ID NO: 28131
  derived and/or modified protein sequence (wt) from hemagglutinin__InfluenzaB__AHL94504

SEQ ID NO: 28148 - protein, 585 aa, Artificial Sequence
  derived and/or modified protein sequence (wt) from hemagglutinin__InfluenzaB__AHL94515
MKAIIVLLMVVTSNADRICTGITSSNSPHVVKTATQGEVNVTGVIPLTTTPTKSHFANLKGTETRGKLCPKCLNCTDLDVALGRPKCTGKIPSARVSILHEVRPVTSGCFPIMHDRTKIRQLPNLLRGYEHIRLSTYNVINAEDAPGGPYKIGTSGSCPNVTNGNGFFATMAWAVPKNDKNKTATNPLTIEVPYICTEGEDQITVWGFHSDNETQMEKLYGDSKPQKFTSSANGVTTHYVSQIGGFPNQTEDGGLPQSGRIVVDYMVQKSGKTGTITYQRGILLPQKVWCASGRSKVIKGSLPLIGEADCLHEKYGGLNKSKPYYTGEHAKAIGNCPIWVKTPLKLANGTKYRPPAKLLKERGFFGAIAGFLEGGWEGMIAGWHGYTSHGAHGVAVAADLKSTQEAINKITKNLNSLSELEVKNLQRLSGAMDELHNEILELDEKVDDLRADTISSQIELAVLLSNEGIINSEDEHLLALERKLKKMLGPSAVEIGNGCFETKHKCNQTCLDRIAAGTFDAGEFSLPTFDSLNITAASLNDDGLDNHTILLYYSTAASSLAVTLMIAIFVVYMVSRDNVSCSICL

SEQ ID NO: 28149 - protein, 584 aa, Artificial Sequence; identical to SEQ ID NO: 28131
  derived and/or modified protein sequence (wt) from hemagglutinin__InfluenzaB__AHL94526

SEQ ID NO: 28150 - protein, 585 aa, Artificial Sequence
  derived and/or modified protein sequence (wt) from hemagglutinin__InfluenzaB__AHL94537
MKAIIVLLMVVTSNADRICTGITSSNSPHVVKTATQGEVNVTGVIPLTTTPTKSHFANLKGTETRGKLCPKCLNCTDLDVALGRPKCTGKIPSARVSILHEVRPVTSGCFPIMHDRTKIRQLPNLLRGYEHIRLSTHNVINAENAPGGPYKIGTSGSCPNVTNGNGFFATMAWAVPKNDKNKTATNPLTIEVPYICTEGEDQITVWGFHSDNETQMAKLYGDSNPQKFTSSANGVTTHYISQIGGFPNQTEDGGLPQSGRIVVDYMVQKSGKTGTITYQRGILLPQKVWCASGRSKVIKGSLPLIGEADCLHEKYGGLNKSKPYYTGEHAKAIGNCPIWVKTPLKLANGTKYRPPAKLLKERGFFGAIAGFLEGGWEGMIAGWHGYTSHGAHGVAVAADLKSTQEAINKITKNLNSLSELEVKNLQRLSGAMDELHNEILELDEKVDDLRADTISSQIELAVLLSNEGIINSEDEHLLALERKLKKMLGPSAVEIGNGCFETKHKCNQTCLDRIAAGTFDAGEFSLPTFDSLNITAASLNDDGLDNHTILLYYSTAASSLAVTLMIAIFVVYMVSRDNVSCSICL

SEQ ID NO: 28151 - protein, 584 aa, Artificial Sequence
  derived and/or modified protein sequence (wt) from hemagglutinin__InfluenzaB__AHL94548
MKAIIVLLMVVTSNADRICTGITSSNSPHVVKTATQGEVNVTGVIPLTTTPIKSYFANLKGTKTRGKLCPDCLNCTDLDVALGRPMCVGTTPSAKASILHEVRPVTSGCFPIMHDRTKIRQLANLLRGYENIRLSTQNVIDAERAPGGPYRLGTSGSCPNATSKSGFFATMAWAVPKDNNKNATNPLTVEVPYICAEGEDQITVWGFHSDNKTQMKNLYGDSNPQKFTSSANGVTTHYVSQIGGFPDQTEDGGLPQSGRIVVDYMMQKPGKTGTIVYQRGVLLPQKVWCASGRSKVIKGSLPLIGEADCLHEKYGGLNKSKPYYTGEHAKAIGNCPIWVKTPLKLANGTKYRPPAKLLKERGFFGAIAGFLEGGWEGMIAGWHGYTSHGAHGVAVAADLKSTQEAINKITKNLNSLSELEVKNLQRLSGAMDELHNEILELDEKVDDLRADTISSQIELAVLLSNEGIINSEDEHLLALERKLKKMLGPSAVDIGNGCFETKHKCNQTCLDRIAAGTFNAGEFSLPTFDSLNITAASLNDDGLDNHTILLYYSTAASSLAVTLMLAIFIVYMVSRDNVSCSICL

SEQ ID NO: 28152 - protein, 584 aa, Artificial Sequence; identical to SEQ ID NO: 28129
  derived and/or modified protein sequence (wt) from hemagglutinin__InfluenzaB__AHL94559

SEQ ID NO: 28153 - protein, 584 aa, Artificial Sequence; identical to SEQ ID NO: 26854
  derived and/or modified protein sequence (wt) from hemagglutinin__InfluenzaB__AHL94570

SEQ ID NO: 28154 - protein, 584 aa, Artificial Sequence; identical to SEQ ID NO: 26854
  derived and/or modified protein sequence (wt) from hemagglutinin__InfluenzaB__AHL94581

SEQ ID NO: 28155 - protein, 584 aa, Artificial Sequence; identical to SEQ ID NO: 26854
  derived and/or modified protein sequence (wt) from hemagglutinin__InfluenzaB__AHL94592

SEQ ID NO: 28156 - protein, 585 aa, Artificial Sequence
  derived and/or modified protein sequence (wt) from hemagglutinin__InfluenzaB__AHL94603
MKAIIVLLMVVTSNADRICTGITSSNSPHVVKTATQGEVNVTGVIPLTTTPTKSHFANLKGTETRGKLCPKCLNCTDLDVALGRPKCTGKIPSARVSILHEVRPVTSGCFPIMHDRTKIRQLPNLLRGYENIRLSTHNVINAENAPGGPYKIGTSGSCPNVTNGNGFFATMAWAVPKNDKNKTATNPLTIEVPYICTEGEDQITVWGFHSDNETQMAKLYGDSKPQKFTSSANGVTTHYVSQIGGFPNQTEDGGLPQSGRIVVDYMVQKSGKTGTITYQRGILLPQKVWCASGRSKVIKGSLPLIGEADCLHEKYGGLNKSKPYYTGEHAKAIGNCPIWVKTPLKLANGTKYRPPAKLLKERGFFGAIAGFLEGGWEGMIAGWHGYTSHGAHGVAVAADLKSTQEAINKITKNLNSLSELEVKNLQRLSGAMDELHNEILELDEKVDDLRADTISSQIELAVLLSNEGIINSEDEHLLALERKLKKMLGPSAVEIGNGCFETKHKCNQTCLDRIAAGTFDAGEFSLPTFDSLNITAASLNDDGLDNHTILLYYSTAASSLAVTLMIAIFVVYMVSRDNVSCSICL

SEQ ID NO: 28157 - protein, 585 aa, Artificial Sequence
  derived and/or modified protein sequence (wt) from hemagglutinin__InfluenzaB__AHL94614
MKAIIVLLMVVTSNADRICTGITSSNSPHVVKTATQGEVNVTGVIPLTTTPTKSHFANLKGTETRGKLCPKCLNCTDLDVALGRPKCTGKIPSARVSILHEVRPVTSGCFPIMHDRTKIRQLPNLLRGYEHIRLSTHNVINAENAPGGPYKIGTSGSCPNVTNGNGFFATMAWAVPKNDKNKTATNPLTIEVPYICTEGEDQITVWGFHSDNETQMAKLYGDSKPQKFTSSANGVTTHYVSQIGGFPNQTEDGGLPQSGRIVVDYMVQKSGKTGTITYQRGILLPQKVWCASGRSKVIKGSLPLIGEADCLHEKYGGLNKSKPYYTGEHAKAIGNCPIWVKTPLKLANGTKYRPPAKLLKERGFFGAIAGFLEGGWEGMIAGWHGYISHGAHGVAVAADLKSTQEAINKITKNLNSLSELEVKNLQRLSGAMDELHNEILELDEKVDDLRADTISSQIELAVLLSNEGIINSEDEHLLALERKLKKMLGPSAVEIGNGCFETKHKCNQTCLDRIAAGTFDAGEFSLPTFDSLNITAASLNDDGLDNHTILLYYSTAASSLAVTLMIAIFVVYMVSRDNVSCSICL

SEQ ID NO: 28158 - protein, 584 aa, Artificial Sequence; identical to SEQ ID NO: 28131
  derived and/or modified protein sequence (wt) from hemagglutinin__InfluenzaB__AHL94624

SEQ ID NO: 28159 - protein, 585 aa, Artificial Sequence
  derived and/or modified protein sequence (wt) from hemagglutinin__InfluenzaB__AHL94646
MKAIIVLLMVVTSNADRICTGITSSNSPHVVKTATQGEVNVTGVIPLTTTPTKSHFANLKGTETRGKLCPKCLNCTDLDVALGRPKCTGKIPSARVSILHEVRPVTSGCFPIMHDRTKIRQLPNLLRGYEHIRLSTHNVINAENAPGGPYKIGTSGSCLNVTNGNGFFATMAWAVPKNDKNKTATNPLTIEVPYICTEGEDQITVWGFHSDNETQMAKLYGDSKPQKFTSSANGVTTHYVSQIGGFPNQTEDGGLPQSGRIVVDYMVQKSGKTGTITYQRGILLPQKVWCASGRSKVIKGSLPLIGEADCLHEKYGGLNKSKPYYTGEHAKAIGNCPIWVKTPLKLANGTKYRPPAKLLKERGFFGAIAGFLEGGWEGMIAGWHGYTSHGAHGVAVAADLKSTQEAINKITKNLNSLSELEVKNLQRLSGAMDELHNEILELDEKVDDLRADTISSQIELAVLLSNEGIINSEDEHLLALERKLKKMLGPSAVEIGNGCFETKHKCNQTCLDRIAAGTFDAGEFSLPTFDSLNITAASLNDDGLDNHTILLYYSTAASSLAVTLMIAIFVVYMVSRDNVSCSICL

SEQ ID NO: 28160 - protein, 585 aa, Artificial Sequence
  derived and/or modified protein sequence (wt) from hemagglutinin__InfluenzaB__AHL94657
MKAIIVLLMVVTSNADRICTGITSSNSPHVVKTATQGEVNVTGVIPLTTTPTKSHFANLKGTETRGKLCPKCPNCTDLDVALGRPKCTGKIPSARVSILHEVRPVTSGCFPIMHDRTKIRQLPNLLRGYEHIRLSTHNVINAESAPGGPYKIGTSGSCPNVTNGNGFFATMAWAVPKNDKNKTATDPLTIEVPYICTEGEDQITVWGFHSDNETQMAKLYGDSKPQKFTSSANGVTTHYVSQIGGFPNQTEDGGLPQSGRIVVDYMVQKSGKTGTITYQRGILLPQKVWCASGRSKVIKGSLPLIGEADCLHEKYGGLNKSKPYYTGEHAKAIGNCPIWVKTPLKLANGTKYRPPAKLLKERGFFGAIAGFLEGGWEGMIAGWHGYTSHGAHGVAVAADLKSTQEAINKITKNLNSLSELEVKNLQRLSGAMDELHNEILELDEKVDDLRADTISSQIELAVLLSNEGIINSEDEHLLALERKLKKMLGPSAVEIGNGCFETKHKCNQTCLDRIAAGTFDAGEFSLPTFDSLNITAASLNDDGLDNHTILLYYSTAASSLAVTLMIAIFVVYMVSRDNVSCSICL

SEQ ID NO: 28161 - protein, 584 aa, Artificial Sequence; identical to SEQ ID NO: 28131
  derived and/or modified protein sequence (wt) from hemagglutinin__InfluenzaB__AHL94668

SEQ ID NO: 28162 - protein, 584 aa, Artificial Sequence; identical to SEQ ID NO: 28131
  derived and/or modified protein sequence (wt) from hemagglutinin__InfluenzaB__AHL94679

SEQ ID NO: 28163 - protein, 585 aa, Artificial Sequence; identical to SEQ ID NO: 28156
  derived and/or modified protein sequence (wt) from hemagglutinin__InfluenzaB__AHL94690

SEQ ID NO: 28164 - protein, 585 aa, Artificial Sequence
  derived and/or modified protein sequence (wt) from hemagglutinin__InfluenzaB__AHL94701
MKAIIVLLMVVTSNADRICTGITSSNSPHVVKTATQGEVNVTGVIPLTTTLTKSHFANLKGTETRGKLCPKCLNCTDLDVALGRPKCTGKIPSARVSILHEVRPVTSGCFPIMHDRTKIRQLPNLLRGYEHIRLSTHNVINAENAPGGPYKIGTSGSCLNVTNGNGFFATMAWAVPKNDKNKTATNPLTIEVPYICTEGEDQITVWGFHSDNETQMAKLYGDSKPQKFTSSANGVTTHYVSQIGGFPNQTEDGGLPQSGRIVVDYMVQKSGKTGTITYQRGILLPQKVWCASGRSKVIKGSLPLIGEADCLHEKYGGLNKSKPYYTGEHAKAIGNCPIWVKTPLKLANGTKYRPPAKLLKERGFFGAIAGFLEGGWEGMIAGWHGYTSHGAHGVAVAADLKSTQEAINKITKNLNSLSELEVKNLQRLSGAMDELHNEILELDEKVDDLRADTISSQIELAVLLSNEGIINSEDEHLLALERKLKKMLGPSAVEIGNGCFETKHKCNQTCLDRIAAGTFDAGEFSLPTFDSLNITAASLNDDGLDNHTILLYYSTAASSLAVTLMIAIFVVYMVSRDNVSCSICL

SEQ ID NO: 28165 - protein, 584 aa, Artificial Sequence; identical to SEQ ID NO: 28129
  derived and/or modified protein sequence (wt) from hemagglutinin__InfluenzaB__AHL94712

SEQ ID NO: 28166 - protein, 585 aa, Artificial Sequence; identical to SEQ ID NO: 28160
  derived and/or modified protein sequence (wt) from hemagglutinin__InfluenzaB__AHL94723

SEQ ID NO: 28167 - protein, 584 aa, Artificial Sequence; identical to SEQ ID NO: 28129
  derived and/or modified protein sequence (wt) from hemagglutinin__InfluenzaB__AHL94734

SEQ ID NO: 28168 - protein, 585 aa, Artificial Sequence
  derived and/or modified protein sequence (wt) from hemagglutinin__InfluenzaB__AHL94745
MKAIIVLLMVVTSNADRICTGITSSNSPHVVKTATQGEVNVTGVIPLTTTPTKSHFANLKGTETRGKLCPKCLNCTDLDVALGRPKCTGKIPSARVSILHEVRPVTSGCFPIMHDRTKIRQLPNLLRGYEHIRLSTHNVINAENAPGGPYKIGTSGSCLNVTNGNGFFATMAWAVPKNDKNKTATNPLTIEVPYICTEGEDQITVWGFHSDNETQMAKLYGDSKPQKFTSSANGVTTHYVSQIGGFPNQTEDGGLPQSGRIVVDYMVQKSGKTGTITYQRGILLPQKVWCASGRSKVIKGSLPLIGEADCLHEKYGGLNKSKPYYTGEHAKAIGNCPIWVKTPLKLANGTKYRPPAKLLKERGFFGAIAGFLEGGWEGMIAGWHGYTSHGAHGVAVAADLKSTQEAINKITKNLNSLSELEVKNLQRLSGAMDELHNEILELDEKVDDLRADTISSQIELAVLLSNEGIINSEDEHLLALERKLKKMLGPSAVEIGNGCFETKHKCNQTCLDRIAAGTFDAGEFSLPTFDSLNITAASLNGDGLDNHTILLYYSTAASSLAVTLMIAIFVVYMVSRDNVSCSICL

SEQ ID NO: 28169 - protein, 584 aa, Artificial Sequence; identical to SEQ ID NO: 26854
  derived and/or modified protein sequence (wt) from hemagglutinin__InfluenzaB__AHL94756

SEQ ID NO: 28170 - protein, 585 aa, Artificial Sequence; identical to SEQ ID NO: 28159
  derived and/or modified protein sequence (wt) from hemagglutinin__InfluenzaB__AHL94766

SEQ ID NO: 28171 - protein, 584 aa, Artificial Sequence
  derived and/or modified protein sequence (wt) from hemagglutinin__InfluenzaB__AHL94777
MKAIIVLLMVVTSNADRICTGITSSNSPHVVKTATQGEVNVTGAIPLTTTPTKSYFANLKGTRTRGKLCPDCFNCTDLDVALGRPMCVGTTPSAKASILHEVRPVTSGCFPIMHDRTKIRQLPNLLRGYENIRLSTQNAIDAEKAPGGPYRLGTSGSCPNATSKIGFFATMAWAVPKDNYKNATNPQTVEVPYICTEGEDQITVWGFHSDNKTQMKNLYGDSNPQKFTSSANGVTTHYVSQIGDFPDQTEDGGLPQSGRIVVDYMVQKPGKTGTIVYQRGVLLPQKVWCASGRSKVIKGSLPLIGEADCLHEKYGGLNKSKPYYTGEHAKAIGNCPIWVKTPLKLANGTKYRPPAKLLKERGFFGAIAGFLEGGWEGMIAGWHGYTSHGAHGVAVAADLKSTQEAINKITKNLNSLSELEVKNLQRLSGAMDELHNEILELDEKVDDLRADTISSQIELAVLLSNEGIINSEDEHLLALERKLKKMLGPSAVDIGNGCFETKHKCNQTCLDRIAAGTFNAGEFSLPTFDSLNITAASLNDDGLDNHTILLYYSTAASSLAVTLMLAIFIVYMVSRDNVSCSICL

SEQ ID NO: 28172 - protein, 585 aa, Artificial Sequence; identical to SEQ ID NO: 28156
  derived and/or modified protein sequence (wt) from hemagglutinin__InfluenzaB__AHL94797

SEQ ID NO: 28173 - protein, 584 aa, Artificial Sequence
  derived and/or modified protein sequence (wt) from hemagglutinin__InfluenzaB__AHL94808
MKAIIVLLMVVTSNADRICTGITSSNSPHVVKTATQGEVNVTGAIPLTTTPTKSYFANLKGIRTRGKLCPDCLNCTDLDVALGRPMCVGTTPSAKASILHEVRPVTSGCFPIMHDRTKIRQLPNLLRGYENIRLSTQNVIDAEKAPGGPYRLGTSGSCPNATSKIGFFATMAWAVPKDNYKNATNPQTVEVPYICTEGEDQITVWGFHSDNKTQMKNLYGDSNPQKFTSSANGVTTHYVSQIGDFPDQTEDGGLPQSGRIVVDYMVQKPGKTGTIVYQRGVLLPQKVWCASGRSKVIKGSLPLIGEADCLHEKYGGLNKSKPYYTGEHAKAIGNCPIWVKTPLKLANGTKYRPPAKLLKERGFFGAIAGFLEGGWEGMIAGWHGYTSHGAHGVAVAADLKSTQEAINKITKNLNSLSELEVKNLQRLSGAMDELHNEILELDEKVDDLRADTISSQIELAVLLSNEGIINSEDEHLLALERKLKKMLGPSAVDIGNGCFETKHKCNQTCLDRIAAGTFNAGEFSLPTFDSLNITAASLNDDGLDNHTILLYYSTAASSLAVTLMLAIFIVYMVSRDNVSCSICL

SEQ ID NO: 28174 - protein, 584 aa, Artificial Sequence
  derived and/or modified protein sequence (wt) from hemagglutinin__InfluenzaB__AHL94817
MKAIIVLLMVVTSNADRICTGITSSNSPHVVKTATQGEVNVTGAIPLTTTPTKSYFANLKGTRTRGKLCPDCLNCTDLDVALGRPMCVGTTPSAKASILHEVRPVTSGCFPIMHDRTKIRQLPNLLRGYENIRLSTQNVIDAEKAPGGPYRLGTSGSCPNATSKIGFFATMAWAVPKDNYKNATNPQTVEVPYICTEGEDQITVWGFHSDNKTQMKNLYGDSNPQKFTSSANGVTTHYVSQIGDFPDQTEDGGLPQSGRIVVDYMVQKPGKTGTIVYQRGVLLPQKVWCASGRSKVIKGSLPLIGEADCLHEKYGGLNKSKPYYTGEHAKAIGNCPIWVKTPLKLANGTKYRPPAKLLKERGFFGAIAGFLEGGWEGMIAGWHGYTSHGAHGVAVAADLKSTQEAINKITKNLNSLSELEVKNLQRLSGAMDELHNEIIELDEKVDDLRADTISSQIELAVLLSNEGIINSEDEHLLALERKLKKMLGPSAVDIGNGCFETKHKCNQTCLDRIAAGTFNAGEFSLPTFDSLNITAASLNDDGLDNHTILLYYSTAASSLAVTLMLAIFIVYMVSRDNVSCSICL

SEQ ID NO: 28175 - protein, 585 aa, Artificial Sequence; identical to SEQ ID NO: 27865
  derived and/or modified protein sequence (wt) from hemagglutinin__InfluenzaB__AHL94827

SEQ ID NO: 28176 - protein, 584 aa, Artificial Sequence
  derived and/or modified protein sequence (wt) from hemagglutinin__InfluenzaB__AHL94837
MKAIIVLLMVVTSNADRICTGITSSNSPHVVKTATQGEVNVTGVIPLTTTPAKSYFANLKGTRTRGKLCPDCLNCTDLDVALGRPMCVGTTPSAKASILHEVRPVTSGCFPIMHDRTKIRQLPNLLRGYENIRLSTQNVIDAEKAPGGPYKLGTSGSCPNATSKIGFFATMAWAVPKDNYKNATNPLTVEVPYICKEGEDQITVWGFHSDNKTQMKNLYGDSNPQKFTSSANGVTTHYVSQIGDFPDQTEDGGLPQSGRIVVDYMMQKPGKTGTIVYQRGVLLPQKVWCASGRSKVIKGSLPLIGEADCLHEEYGGLNKSKPYYTGKHAKAIGNCPIWVKTPLKLANGTKYRPPAKLLKERGFFGAIAGFLEGGWEGMIAGWHGYTSHGAHGVAVAADLKSTQEAINKITKNLNSLSELEVKNLQRLSGAMDELHNEILELDEKVDDLRADTISSQIELAVLLSNEGIINSEDEHLLALERKLKKMLGPSAVDIGNGCFETKHKCNQTCLDRIAAGTFNAGEFSLPTFDSLNITAASLNDDGLDNHTILLYYSTAASSLAVTLMLAIFIVYMVSRDNVSCSICL

SEQ ID NO: 28177 - protein, 584 aa, Artificial Sequence; identical to SEQ ID NO: 26854
  derived and/or modified protein sequence (wt) from hemagglutinin__InfluenzaB__AHL94847

SEQ ID NO: 28178 - protein, 585 aa, Artificial Sequence
  derived and/or modified protein sequence (wt) from hemagglutinin__InfluenzaB__AHL94858
MKAIIVLLMVVTSNADRICTGITSSNSPHVVKTATQGEVNVTGVIPLTTTPTKSHFANLKGTETRGKLCPKCLNCTDLDVALGRPKCTGNIPSARVSILHEVRPVTSGCFPIMHDRTKIRQLPNLLRGYEHIRLSTHNVINAENAPGGPYKIGTSGSCPNVTNGNGFFATMAWAVPKNDNNKTATNSLTIEVPYICTEGEDQITVWGFHSDNETQMAKLYGDSKPQKFTSSANGVTTHYVSQIGGFPNQTEDGGLPQSGRIVVDYMVQKSGKAGTITYQRGILLPQKVWCASGRSKVIKGSLPLIGEADCLHEKYGGLNKSKPYYTGEHAKAIGNCPIWVKTPLKLANGTKYRPPAKLLKERGFFGAIAGFLEGGWEGMIAGWHGYTSHGAHGVAVAADLKSTQEAINKITKNLNSLSELEVKNLQRLSGAMDELHNEILELDEKVDDLRADTISSQIELAVLLSNEGIINSEDEHLLALERKLKKMLGPSAVEIGNGCFETKHKCNQTCLDRIAAGTFDAGEFSLPTFDSLNITAASLNDDGLDNHTILLYYSTAASSLAVTLMIAIFVVYMVSRDNVSCSICL

SEQ ID NO: 28179 - protein, 584 aa, Artificial Sequence; identical to SEQ ID NO: 26820
  derived and/or modified protein sequence (wt) from hemagglutinin__InfluenzaB__AHL94869

SEQ ID NO: 28180 - protein, 585 aa, Artificial Sequence; identical to SEQ ID NO: 26989
  derived and/or modified protein sequence (wt) from hemagglutinin__InfluenzaB__AHL94880

SEQ ID NO: 28181 - protein, 585 aa, Artificial Sequence; identical to SEQ ID NO: 27322
  derived and/or modified protein sequence (wt) from hemagglutinin__InfluenzaB__AHL94889

SEQ ID NO: 28182 - protein, 585 aa, Artificial Sequence; identical to SEQ ID NO: 26989
  derived and/or modified protein sequence (wt) from hemagglutinin__InfluenzaB__AHL94900

SEQ ID NO: 28183 - protein, 585 aa, Artificial Sequence
  derived and/or modified protein sequence (wt) from hemagglutinin__InfluenzaB__AHL94911
MKAIIVLLMVVTSNADRICTGITSSNSPHVVKTATQGEVNVTGVIPLTTTPTKSHFANLKGTETRGKLCPKCPNCTDLDVALGRPKCTGKIPSARVSILHEVRPVTSGCFPIMHDRTKIRQLPNLLRGYEHIRLSTHNVINAENAPGGPYKIGTSGSCPNVTNGNGFFATMAWAVPKNDKNKTATNPLTIEVPYICTEGEDQITVWGFHSDNETQMAKLYGDSKPQKFTSSANGVTTHYVSQIGGFPNQTEDGGLPQSGRIVVDYMVQKSGRTGTITYQRGILLPQKVWCASGRSKVIKGSLPLIGEADCLHEKYGGLNKSKPYYTGEHAKAIGNCPIWVKTPLKLANGTKYRPPAKLLKERGFFGAIAGFLEGGWEGMIAGWHGYTSHGAHGVAVAADLKSTQEAINKITKNLNSLSELEVKNLQRLSGAMDELHNEILELDEKVDDLRADTISSQIELAVLLSNEGIINSEDEHLLALERKLKKMLGPSAVEIGNGCFETKHKCNQTCLDRIAAGTFDAGEFSLPTFDSLNITAASLNDDGLDNHTILLYYSTAASSLAVTLMIAIFVVYMVSRDNVSCSICL

SEQ ID NO: 28184 - protein, 585 aa, Artificial Sequence; identical to SEQ ID NO: 26989
  derived and/or modified protein sequence (wt) from hemagglutinin__InfluenzaB__AHL94922

SEQ ID NO: 28185 - protein, 585 aa, Artificial Sequence
  derived and/or modified protein sequence (wt) from hemagglutinin__InfluenzaB__AHL94933
MKAIIVLLMVVTSNADRICTGITSSNSPHVVKTATQGEVNVTGVIPLTTTPTKSHFANLKGTETRGKLCPKCLNCTDLDVALGRPKCTGKIPSARVSILHEVRPVTSGCFPIMHDRTKIRQLPNLLRGYEHIRLSTHNVINAENAPGGPYKIGTSGSCPNITNGNGFFATMAWAVPKNDKNKTATNPLTIEVPYICTEGEDQITVWGFHSDNETQMAKLYGDSKPQKFTSSANGVTTHYVSQIGGFPNQTEDGGLPQSGRIVVDYMVQKSGKAGTITYQRGILLPQKVWCASGRSKVIKGSLPLIGEADCLHEKYGGLNKSKPYYTGEHAKAIGNCPIWVKTPLKLANGTKYRPPAKLLKERGFFGAIAGFLEGGWEGMIAGWHGYTSHGAHGVAVAADLKSTQEAINKITKNLNSLSELEVKNLQRLSGAMDELHNEILELDEKVDDLRADTISSQIELAVLLSNEGIINSEDEHLLALERKLKKMLGPSAVEIGNGCFETKHKCNQTCLDRIAAGTFDAGEFSLPTFDSLNITAASLNDDGLDNHTILLYYSTAASSLAVTLMIAIFVVYMVSRDNVSCSICL

SEQ ID NO: 28186 - protein, 585 aa, Artificial Sequence; identical to SEQ ID NO: 28070
  derived and/or modified protein sequence (wt) from hemagglutinin__InfluenzaB__AHL94944

SEQ ID NO: 28187 - protein, 585 aa, Artificial Sequence; identical to SEQ ID NO: 26683
  derived and/or modified protein sequence (wt) from hemagglutinin__InfluenzaB__AHL94955

SEQ ID NO: 28188 - protein, 585 aa, Artificial Sequence; identical to SEQ ID NO: 26683
  derived and/or modified protein sequence (wt) from hemagglutinin__InfluenzaB__AHL94965

SEQ ID NO: 28189 - protein, 585 aa, Artificial Sequence; identical to SEQ ID NO: 26683
  derived and/or modified protein sequence (wt) from hemagglutinin__InfluenzaB__AHL94975

SEQ ID NO: 28190 - protein, 584 aa, Artificial Sequence; identical to SEQ ID NO: 26854
  derived and/or modified protein sequence (wt) from hemagglutinin__InfluenzaB__AHM00986

SEQ ID NO: 28191 - protein, 585 aa, Artificial Sequence; identical to SEQ ID NO: 26887
  derived and/or modified protein sequence (wt) from hemagglutinin__InfluenzaB__AHM00997

SEQ ID NO: 28192 - protein, 585 aa, Artificial Sequence
  derived and/or modified protein sequence (wt) from hemagglutinin__InfluenzaB__AHM01008
MKAIIVLLMVVTSNADRICTGITSSNSPHVVKTATQGEVNVTGVIPLTTTPTKSHFANLKGTETRGKLCPKCLNCTDLDVALGRPKCTGKIPSARVSILHEVRPVTSGCFPIMHDRTKIRQLPNLLRGYEHIRLSTHNVINAEDAPGGPYKIGTSGSCPNVTNGNGFFATMAWTVPKNDKNKTATNPLTIEVPYICTEGEDQITVWGFHSDNETQMAKLYGDSKPQKFTSSANGVTTHYVSQIGGFPNQTEDGGLPQSGRIVVDYMVQKSGKTGTITYQRGILLPQKVWCASGRSKVIKGSLPLIGEADCLHEKYGGLNKSKPYYTGEHAKAIGNCPIWVKTPLKLANGTKYRPPAKLLKERGFFGAIAGFLEGGWEGMIAGWHGYTSHGAHGVAVAADLKSTQEAINKITKNLNSLSELEVKNLQRLSGAMDELHNEILELDEKVDDLRADTISSQIELAVLLSNEGIINSEDEHLLALERKLKKMLGPSAVEIGNGCFETKHKCNQTCLDRIAAGTFDAGEFSLPTFDSLNITAASLNDDGLDNHTILLYYSTAASSLAVTLMIAIFVVYMVSRDNVSCSICL

SEQ ID NO: 28193 - protein, 585 aa, Artificial Sequence; identical to SEQ ID NO: 26887
  derived and/or modified protein sequence (wt) from hemagglutinin__InfluenzaB__AHM01019

SEQ ID NO: 28194 - protein, 585 aa, Artificial Sequence; identical to SEQ ID NO: 26887
  derived and/or modified protein sequence (wt) from hemagglutinin__InfluenzaB__AHM01030

SEQ ID NO: 28195 - protein, 585 aa, Artificial Sequence
  derived and/or modified protein sequence (wt) from hemagglutinin__InfluenzaB__AHM01041
MKAIIVLLMVVTSNADRICTGITSSNSPHVVKTATQGEVNVTGVIPLTTTPTKSHFANLKGTETRGKLCPKCLNCTDLDVALGRPKCTGKIPSARVSILHEVRPVTSGCFPIMHDRTKIRQLPNLLRGYEHIRLSTHNVINAEDAPGGPYKIGTSGSCPNVTNGNGFFATMAWAVPKNDKNKTATNPLTIEVPYICTEGEDQITVWGFHSDNETQMAKLYGDSKPQKFTSSANGVTTHYVSQIGGFPNQTEDGGLPQSGRIVVDYMVQKSEKTGTITYQRGILLPQKVWCASGRSKVIKGSLPLIGEADCLHEKYGGLNKSKPYYTGEHAKAIGNCPIWVKTPLKLANGTKYRPPAKLLKERGFFGAIAGFLEGGWEGMIAGWHGYTSHGAHGVAVAADLKSTQEAINKITKNLNSLSELEVKNLQRLSGAMDELHNEILELDEKVDDLRADTISSQIELAVLLSNEGIINSEDEHLLALERKLKKMLGPSAVEIGNGCFETKHKCNQTCLDRIAAGTFDAGEFSLPTFDSLNITAASLNDDGLDNHTILLYYSTAASSLAVTLMIAIFVVYMVSRDNVSCSICL

SEQ ID NO: 28196 - protein, 585 aa, Artificial Sequence
  derived and/or modified protein sequence (wt) from hemagglutinin__InfluenzaB__AHM01052
MKAIIVLLMVVTSNADRICTGITSSNSPHVVKTATQGEVNVTGVIPLTTTPTKSHFANLKGTETRGKLCPKCLNCTDLDVALGRPKCTGKIPSARVSILHEVRPVTSGCFPIMHDRTKIRQLPNLLRGYEHIRLSTHNVINAENAPGGPYKIGTSGSCPNVTNGNGFFATMAWAVPKNDKNKTATNPLTIEVPYICTEGEDQITVWGFHSDNETQMAKLYGDSKPQKFTSSANGVTTHYVSQIGGFPNQTEDGGLPQSGRIVVDYMVQKSGKTGTITYQRGILLPQKVWCASGRSKVIKGSLPLIGEADCLHEKYGGLNKSKPYYTGEHAKAIGNCPIWVKTPLKLANGTKYRPPAKLLKERGFFGAIAGFLEGGWEGMIAGWHGYTSHGAHGVAVAADLKSTQEAINKITKNLNSLSELEVKNLQRLSGAMDELHNEILELDEKVDDLRADTISSQIELAVLLSNEGIINSEDEHLLALERKLKKMLGPSAVEIGNGCFETKHKCNQTCLDRIAAGTFDAGEFSLPTFDSLNITAASLNDDGLDNHTIMLYYSTAASSLAVTLMIAIFVVYMVSRDNVSCSICL

SEQ ID NO: 28197 - protein, 585 aa, Artificial Sequence; identical to SEQ ID NO: 26887
  derived and/or modified protein sequence (wt) from hemagglutinin__InfluenzaB__AHM01063

SEQ ID NO: 28198 - protein, 584 aa, Artificial Sequence; identical to SEQ ID NO: 26854
  derived and/or modified protein sequence (wt) from hemagglutinin__InfluenzaB__AHM01074

SEQ ID NO: 28199 - protein, 584 aa, Artificial Sequence
  derived and/or modified protein sequence (wt) from hemagglutinin__InfluenzaB__AHM01096
MKAIIVLLMVVTSNADRICTGITSSNSPHVVKTATQGEVNVTGVIPLTTTPTKSYFANLKGTKTRGKLCPDCLNCTDLDVALGRPMCVGTTPSAKASILHEVRPVTSGCFPIMHDRTKIRQLANLLRGYENIRLSTQNVIDAEKAPGGPYRLGTSGSCPNATSKSGFFATMAWAVPKDNNKNATNPLTVEVPYICAEGEDQITVWGFHSDNKTQMKNLYGDSNPQKFTSSANGVTTHYVSQIGGFPDQTEDGGLPQSGRIVVDYMMQKPGKTGTIVYQRGILLPQKVWCASGRSKVIKGSLPLIGEADCLHEKYGGLNKSKPYYTGEHAKAIGNCPIWVKTPLKLANGTKYRPPAKLLKERGFFGAIAGFLEGGWEGMIAGWHGYTSHGAHGVAVAADLKSTQEAINKITKNLNSLSELEVKNLQRLSGAMDELHNEILELDEKVDDLRADTISSQIELAVLLSNEGIINSEDEHLLALERKLKKMLGPSAVDIGNGCFETKHKCNQTCLDRIAAGTFNAGEFSLPTFDSLNITAASLNDDGLDNHTILLYYSTAASSLAVTLMLAIFIVYMVSRDNVSCSICL

SEQ ID NO: 28200 - protein, 585 aa, Artificial Sequence; identical to SEQ ID NO: 26887
  derived and/or modified protein sequence (wt) from hemagglutinin__InfluenzaB__AHM01107

SEQ ID NO: 28201 - protein, 585 aa, Artificial Sequence
  derived and/or modified protein sequence (wt) from hemagglutinin__InfluenzaB__AHM01118
MKAIIVLLMVVTSNADRICTGITSSNSPHVVKTATQGEVNVTGVIPLTTTPTKSHFANLKGTETRGKLCPKCLNCTDLDVALGRPKCTGKIPSARVSILHEVRPVTSGCFPIMHDRTKIRQLPNLLRGYEHIRLSTHNVINAEDAPGGPYKIGTSGSCPNVTNGNGFFATMAWAVPKNDKNKTATNPLTIEVPYICTEGEDQITVWGFHSDNETQMAKLYGDSKPQKFTSSANGVTTHYVSQIGGFPNQTEDGGLPQSGRIVVDYMVQKSGKTGTITYQRGILLPQKVWCASGRSKVIKGSLPLIGEADCLHEKYGGLNKSKPYYTGEHAKAIGNCPIWVKTPLKLANGTKYRPPAKLLKERGFFGAIAGFLEGGWEGMIAGWHGYTSHGAHGVAVAADLKSTQEAINKITKNLNSLSELEVKNLQRLSGAMDELHNEILELDEKVDDLRADTISSQIELAVLLSNEGIINSEDEHLLALERKLKKMLGPSAVEIGNGCFETKHKCNQTCLDRIAAGTFDAGEFSLPTFDSLNITAVSLNDDGLDNHTILLYYSTAASSLAVTLMIAIFVVYMVSRDNVSCSICL

SEQ ID NO: 28202 - protein, 585 aa, Artificial Sequence; identical to SEQ ID NO: 26887
  derived and/or modified protein sequence (wt) from hemagglutinin__InfluenzaB__AHM01129

SEQ ID NO: 28203 - protein, 585 aa, Artificial Sequence
  derived and/or modified protein sequence (wt) from hemagglutinin__InfluenzaB__AHM01140
MKAIIVLLMVVTSNADRICTGITSSNSPHVVKTATQGEVNVTGVIPLTTTPTKSHFANLKGTETRGKLCPKCLNCTDLDVALGRPKCTGKIPSARVSILHEVRPVTSGCFPIMHDRTKIRQLPNLLRGYEHIRLSAHNVINAENAPGGPYKIGTSGSCPNVTNGNGFFATMAWAVPKNDKNKTATNPLTIEVPYICTEGEDQITVWGFHSDNETQMAKLYGDSKPQKFTSSANGVTTHYVSQIGGFPNQTEDGGLPQSGRIVVDYMVQKSGKTGTITYQRGILLPQKVWCASGRSKVIKGSLPLIGEADCLHEKYGGLNKSKPYYTGEHAKAIGNCPIWVKTPLKLANGTKYRPPAKLLKERGFFGAIAGFLEGGWEGMIAGWHGYTSHGAHGVAVAADLKSTQEAINKITKNLNSLSELEVKNLQRLSGAMDELHNEILELDEKVDDLRADTISSQIELAVLLSNEGIINSEDEHLLALERKLKKMLGPSAVEIGNGCFETKHKCNQTCLDRIAAGTFDAGEFSLPTFDSLNITAASLNDDGLDNHTILLYYSTAASSLAVTLMIAIFVVYMVSRDNVSCSICL

SEQ ID NO: 28204 - protein, 585 aa, Artificial Sequence; identical to SEQ ID NO: 26872
  derived and/or modified protein sequence (wt) from hemagglutinin__InfluenzaB__AHM01151

SEQ ID NO: 28205 - protein, 585 aa, Artificial Sequence
  derived and/or modified protein sequence (wt) from hemagglutinin__InfluenzaB__AHM01162
MKAIIVLLMVVTSNADRICTGITSSNSPHVVKTATQGEVNVTGVIPLTTTPTKSHFANLKGTETRGKLCPKCLNCTDLDVALGRPKCTGKIPSARVSILHEVRPVTSGCFPIMHDRTKIRQLPNLLRGYEHIRLSTHNVINAKDAPGGPYKIGTSGSCPNVTNGNGFFATMAWAVPKNDKNKTATNPLTIEVPYICTEGEDQITVWGFHSDNETQMAKLYGDSKPQKFTSSANGVTTHYVSQIGGFPNQTEDGGLPQSGRIVVDYMVQKSGKTGTITYQRGILLPQKVWCASGRSKVIKGSLPLIGEADCLHEKYGGLNKSKPYYTGEHAKAIGNCPIWVKTPLKLANGTKYRPPAKLLKERGFFGAIAGFLEGGWEGMIAGWHGYTSHGAHGVAVAADLKSTQEAINKITKNLNSLSELEVKNLQRLSGAMDELHNEILELDEKVDDLRADTISSQIELAVLLSNEGIINSEDEHLLALERKLKKMLGPSAVEIGNGCFETKHKCNQTCLDRIAAGTFDAGEFSLPTFDSLNITAASLNDDGLDNHTILLYYSTAASSLAVTLMIAIFVVYMVSRDNVSCSICL

SEQ ID NO: 28206 - protein, 584 aa, Artificial Sequence; identical to SEQ ID NO: 26854
  derived and/or modified protein sequence (wt) from hemagglutinin__InfluenzaB__AHM01173

SEQ ID NO: 28207 - protein, 585 aa, Artificial Sequence
  derived and/or modified protein sequence (wt) from hemagglutinin__InfluenzaB__AHM01184
MKAIIVLLMVVTSNADRICTGITSSNSPHVVKTATQGEVNVTGVITLTTTPTKSHFANLKGTETRGKLCPKCLNCTDLDVALGRPKCTGKIPSARVSILHEVRPVTSGCFPIMHDRTKIRQLPNLLRGYEHIRLSTHNVINAEDAPGGPYKIGTSGSCPNVTNGNGFFATMAWAVPKNDKNKTATNPLTIEVPYICTEGEDQITVWGFHSDNETQMAKLYGDSKPQKFTSSANGVTTHYVSQIGGFPNQTEDGGLPQSGRIVVDYMVQKSGKTGTITYQRGILLPQKVWCASGRSKVIKGSLPLIGEADCLHEKYGGLNKSKPYYTGEHAKAIGNCPIWVKTPLKLANGTKYRPPAKLLKERGFFGAIAGFLEGGWEGMIAGWHGYTSHGAHGVAVAADLKSTQEAINKITKNLNSLSELEVKNLQRLSGAMDELHNEILELDEKVDDLRADTISSQIELAVLLSNEGIINSEDEHLLALERKLKKMLGPSAVEIGNGCFETKHKCNQTCLDRIAAGTFDAGEFSLPTFDSLNITAASLNDDGLDNHTILLYYSTAASSLAVTLMIAIFVVYMVSRDNVSCSICL

SEQ ID NO: 28208 - protein, 585 aa, Artificial Sequence; identical to SEQ ID NO: 28203
  derived and/or modified protein sequence (wt) from hemagglutinin__InfluenzaB__AHM01195

SEQ ID NO: 28209 - protein, 585 aa, Artificial Sequence
  derived and/or modified protein sequence (wt) from hemagglutinin__InfluenzaB__AHM01206
MKAIIVLLMVVTSNADRICTGITSSNSPHVVKTATQGEVNVTGVIPLTTTPTKSHFANLKGTETRGKLCPKCLNCTDLDVALGRPKCTGKIPSARVSILHEVRPVTSGCFPIMHDRTKIRQLPNLLRGYEHIRLSTHNVINAEDAPGGPYKIGTSGSCPNVTNGNGFFATMAWAVPKNDKNKTATNPLTIEVPYICTEGEDQITVWGFHSDNETQMAKLYGDSKPQKFTSSANGVTTHYVSQIGGFPNQTEDGGLPQSGRIVVDYMVQKSEKTGTITYQRGILLPQKVWCASGRSKVIKGSLPLIGEADCLHEKYGGLNKSKPYYTGEHAKAIGNCPIWVKTPLKLANGTKYRPPAKLLKERGFFGAIAGFLEGGWEGMIAGWHGYTSHGAHGVAVAADLKSTQEAINKITKNLNSLSELEVKNLQRLSGAMDELHNEILELDEKVDDLRADTISSQIELAVLLSNEGIINSEDEHLLALERKLKKMLGPSAVEIGNGCFETKHKCNQTCLDRIAAGTFDAGEFSLPTFDSLNITAASLNDDGLGNHTILLYYSTAASSLAVTLMIAIFVVYMVSRDNVSCSICL

SEQ ID NO: 28210 - protein, 585 aa, Artificial Sequence; identical to SEQ ID NO: 26872
  derived and/or modified protein sequence (wt) from hemagglutinin__InfluenzaB__AHM01217

SEQ ID NO: 28211 - protein, 584 aa, Artificial Sequence; identical to SEQ ID NO: 26854
  derived and/or modified protein sequence (wt) from hemagglutinin__InfluenzaB__AHM01228

SEQ ID NO: 28212 - protein, 585 aa, Artificial Sequence; identical to SEQ ID NO: 26887
  derived and/or modified protein sequence (wt) from hemagglutinin__InfluenzaB__AHM01239

SEQ ID NO: 28213 - protein, 585 aa, Artificial Sequence; identical to SEQ ID NO: 26887
  derived and/or modified protein sequence (wt) from hemagglutinin__InfluenzaB__AHM01250

SEQ ID NO: 28214 - protein, 585 aa, Artificial Sequence
  derived and/or modified protein sequence (wt) from hemagglutinin__InfluenzaB__AHM01261
MKAIIVLLMVVTSNADRICTGITSSNSPHVVKTATQGEVNVTGVIPLTTTPTKSHFANLKGTETRGKLCPKCLNCTDLDVALGRPKCTGKIPSARVSILHEVRPVTSGCFPIMHDRTKIRQLPNLLRGYEHIRLSTHNVINAENAPGGPYKIGTSGSCPNVTNGNGFFATMAWAVPKNDKNKTATNPLTIEVPYICTEGEDQITIWGFHSDNETQMAKLYGDSNPQKFTSSANGVTTHYVSQIGGFPNQTEDGGLPQSGRIVVDYMVQKSGKTGTITYQRGILLPQKVWCAGGRSKVIKGSLPLIGEADCLHEKYGGLNKSKPYYTGEHAKAIGNCPIWVKTPLKLANGTKYRPPAKLLKERGFFGAIAGFLEGGWEGMIAGWHGYTSHGAHGVAVAADLKSTQEAINKITKNLNSLSELEVKNLQRLSGAMDELHNEILELDEKVDDLRADTISSQIELAVLLSNEGIINSEDEHLLALERKLKKMLGPSAVEIGNGCFETKHKCNQTCLDRIAAGTFDAGEFSLPTFDSLNITAASLNDDGLDNHTILLYYSTAASSLAVTLMIAIFVVYMVSRDNVSCSICL

SEQ ID NO: 28215 - protein, 584 aa, Artificial Sequence; identical to SEQ ID NO: 26854
  derived and/or modified protein sequence (wt) from hemagglutinin__InfluenzaB__AHM01272

SEQ ID NO: 28216 - protein, 585 aa, Artificial Sequence; identical to SEQ ID NO: 28203
  derived and/or modified protein sequence (wt) from hemagglutinin__InfluenzaB__AHM01283

SEQ ID NO: 28217 - protein, 585 aa, Artificial Sequence; identical to SEQ ID NO: 28203
  derived and/or modified protein sequence (wt) from hemagglutinin__InfluenzaB__AHM01294

SEQ ID NO: 28218 - protein, 584 aa, Artificial Sequence; identical to SEQ ID NO: 26854
  derived and/or modified protein sequence (wt) from hemagglutinin__InfluenzaB__AHM01305

SEQ ID NO: 28219 - protein, 585 aa, Artificial Sequence; identical to SEQ ID NO: 26887
  derived and/or modified protein sequence (wt) from hemagglutinin__InfluenzaB__AHM01316

SEQ ID NO: 28220 - protein, 585 aa, Artificial Sequence; identical to SEQ ID NO: 28203
  derived and/or modified protein sequence (wt) from hemagglutinin__InfluenzaB__AHM01327

SEQ ID NO: 28221 - protein, 585 aa, Artificial Sequence; identical to SEQ ID NO: 26887
  derived and/or modified protein sequence (wt) from hemagglutinin__InfluenzaB__AHM01338

SEQ ID NO: 28222 - protein, 585 aa, Artificial Sequence; identical to SEQ ID NO: 26887
  derived and/or modified protein sequence (wt) from hemagglutinin__InfluenzaB__AHM01349

SEQ ID NO: 28223 - protein, 585 aa, Artificial Sequence
  derived and/or modified protein sequence (wt) from hemagglutinin__InfluenzaB__AHM01360
MKAIIVLLMVVTSNADRICTGITSSNSPHVVKTATQGEVNVTGVIPLTTTPTKSHFANLKGTETRGKLCPKCLNCTDLDVALGRPKCTGKIPSARVSILHEVRPVTSGCFPIMHDRTKIRQLPNLLRGYEHIRLSTHNVINAENAPGGPYKIGTSGSCPNVTNGNGFFATMAWAVPKNDKNKTATNPLTIEVPYICTKGEDQITVWGFHSDNETQMAKLYGDSNPQKFTSSANGVTTHYVSQIGGFPNQTEDGGLPQSGRIVVDYMVQKSGKTGTITYQRGILLPQKVWCASGRSKVIKGSLPLIGEADCLHEKYGGLNKSKPYYTGEHAKAIGNCPIWVKTPLKLANGTKYRPPAKLLKERGFFGAIAGFLEGGWEGMIAGWHGYTSHGAHGVAVAADLKSTQEAINKITKNLNSLSELEVKNLQRLSGAMDELHNEILELDEKVDDLRADTISSQIELAVLLSNEGIINSEDEHLLALERKLKKMLGPSAVEIGNGCFETKHKCNQTCLDRIAAGTFDAGEFSLPTFDSLNITAASLNDDGLDNHTILLYYSTAASSLAVTLMIAIFVVYMVSRDNVSCSICL

SEQ ID NO: 28224 - protein, 584 aa, Artificial Sequence
  derived and/or modified protein sequence (wt) from hemagglutinin__InfluenzaB__AHM01371
MKAIIVLLMVVTSNADRICTGITSSNSPHVVKTATQGEVNVTGVIPLTTTPTKSYFANLKGTKTRGKLCPDCLNCTDLDVALGRPMCVGTTPSAKASILHEVRPVTSGCFPIMHDRTKIRQLANLLRGYENIRLSTQNVIDAEKAPGGPYRLGTSGSCPNATSKNGFFATMAWAVPKDNNKNATNPLTVEVPYICAEGEDQIAVWGFHSDNKTQMKNLYGDSNPQKFTSSANGVTTHYVSQIGGFPDQTEDGGLPQSGRIVVDYMMQKPGKTGTIVYQRGVLLPQKVWCASGRSKVIKGSLPLIGEADCLHEKYGGLNKSKPYYTGEHAKAIGNCPIWVKTPLKLANGTKYRPPAKLLKERGFFGAIAGFLEGGWEGMIAGWHGYTSHGAHGVAVAADLKSTQEAINKITKNLNSLSELEVKNLQRLSGAMDELHNEILELDEKVDDLRADTISSQIELAVLLSNEGIINSEDEHLLALERKLKKMLGPSAVDIGNGCFETKHKCNQTCLDRIAAGTFNAGEFSLPTFDSLNITAASLNDDGLDNHTILLYYSTAASSLAVTLMLAIFIVYMVSRDNVSCSICL

SEQ ID NO: 28225 - protein, 584 aa, Artificial Sequence; identical to SEQ ID NO: 26854
  derived and/or modified protein sequence (wt) from hemagglutinin__InfluenzaB__AHM01382

SEQ ID NO: 28226 - protein, 585 aa, Artificial Sequence
  derived and/or modified protein sequence (wt) from hemagglutinin__InfluenzaB__AHM01393
MKAIIVLLMVVTSNADRICTGITSSNSPHIVKTATQGEVNVTGVIPLTTTPTKSHFANLKGTETRGKLCPKCLNCTDLDVALGRPKCTGKIPSARVSILHEVRPVTSGCFPIMHDRTKIRQLPNLLRGYEHIRLSTHNVINAENAPGGPYKIGTSGSCPNVTNGNGFFATMAWAVPKNDKNKTATNPLTIEVPYICTEGEDQITVWGFHSDNETQMAKLYGDSKPQKFTSSANGVTTHYVSQIGGFPNQTEDGGLPQSGRIVVDYMVQKSGKTGTITYQRGILLPQKVWCASGRSKVIKGSLPLIGEADCLHEKYGGLNKSKPYYTGEHAKAIGNCPIWVKTPLKLANGTKYRPPAKLLKERGFFGAIAGFLEGGWEGMIAGWHGYTSHGAHGVAVAADLKSTQEAINKITKNLNSLSELEVKNLQRLSGAMDELHNEILELDEKVDDLRADTISSQIELAVLLSNEGIINSEDEHLLALERKLKKMLGPSAVEIGNGCFETKHKCNQTCLDRIAAGTFDAGEFSLPTFDSLNITAASLNDDGLDNHTILLYYSTAASSLAVTLMIAIFVVYMVSRDNVSCSICL

SEQ ID NO: 28227 - protein, 585 aa, Artificial Sequence; identical to SEQ ID NO: 26887
  derived and/or modified protein sequence (wt) from hemagglutinin__InfluenzaB__AHM01404

SEQ ID NO: 28228 - protein, 585 aa, Artificial Sequence
  derived and/or modified protein sequence (wt) from hemagglutinin__InfluenzaB__AHM01415
MKAIIVLLMVVTSNADRICTGITSSNSPHVVKTATQGEVNVTGVIPLTTTPTKSHFANLKGTETRGKLCPKCLNCTDLDVALGRPKCTGKIPSARVSILHEVRPVTSGCFPIMHDRTKIRQLPNLLRGYEHIRLSTHNVINAEDAPGGPYKIGTSGSCPNVTNGNGFFATMAWAVPKNDKNKTATNPLTIEVPYICTEGEDQITVWGFHSDNETQMAKLYGDSKPQKFTSSANGVTTHYVSQIGGFPNQTEDGGLPQSGRIVIDYMVQKSGKTGTITYQRGILLPQKVWCASGRSKVIKGSLPLIGEADCLHEKYGGLNKSKPYYTGEHAKAIGNCPIWVKTPLKLANGTKYRPPAKLLKERGFFGAIAGFLEGGWEGMIAGWHGYTSHGAHGVAVAADLKSTQEAINKITKNLNSLSELEVKNLQRLSGAMDELHNEILELDEKVDDLRADTISSQIELAVLLSNEGIINSEDEHLLALERKLKKMLGPSAVEIGNGCFETKHKCNQTCLDRIAAGTFDAGEFSLPTFDSLNITAASLNDDGLDNHTILLYYSTAASSLAVTLMIAIFVVYMVSRDNVSCSICL

SEQ ID NO: 28229 - protein, 585 aa, Artificial Sequence
  derived and/or modified protein sequence (wt) from hemagglutinin__InfluenzaB__AHM01426
MKAIIVLLMVVTSNADRICTGITSSNSPHVVKTATQGEVNVTGVIPLTTTPTKSHFANLKGTETRGKLCPKCLNCTDLDVALGRPKCTGKIPSARVSILHEVRPVTSGCFPIMHDRTKIRQLPNLLRGYEHIRLSTHNVINAENAPGGPYKIGTSGSCPNVTNGNGFFATMAWAVPKNDKNKTATNPLTIEVPYICTEGEDQITIWGFHSDNETQMAKLYGDSNPQKFTSSANGVTTHYVSQIGGFPNQTEDGGLPQSGRIVVDYMVQKSGKTGTITYQRGILLPQKVWCASGRSKVIKGSLPLIGEADCLHEKYGGLNKSKPYYTGEHAKAIGNCPIWVKTPLKLANGTKYRPPAKLLKERGFFGAIAGFLEGGWEGMIAGWHGYTSHGAHGVAVAADLKSTQEAINKITKNLNSLSELEVKNLQRLSGAMDELHNEILELDEKVDDLRADTISSQIELAVLLSNEGIINSEDEHLLALERKLKKMLGPSAVEIGNGCFETKHKCNQTCLDRIAAGTFDAGEFSLPTFDSLNITAASLNDDGLDNHTILLYYSTAASSLAVTLMIAIFVVYMVSRDNVSCSICL

SEQ ID NO: 28230 - protein, 584 aa, Artificial Sequence
  derived and/or modified protein sequence (wt) from hemagglutinin__InfluenzaB__AHM01437
MKAVIVLLMVVTSNADRICTGITSSNSPHVVKTATQGEVNVTGVIPLTTTPTKSYFANLKGTKTRGKLCPDCLNCTDLDVALGRPMCVGTTPSAKASILHEVRPVTSGCFPIMHDRTKIRQLANLLRGYENIRLSTQNVIDAEKAPGGPYRLGTSGSCPNATSKSGFFATMAWAVPKDNNKNATNPLTVEVPYICAEEEDQITVWGFHSDNKTQMKNLYGDSNPQKFTSSANGVTTHYVSQIGGFPDQTEDGGLPQSGRIVVDYMMQKPGKTGTIVYQRGVLLPQKVWCASGRSKVIKGSLPLIGEADCLHEKYGGLNKSKPYYTGEHAKAIGNCPIWVKTPLKLANGTKYRPPAKLLKERGFFGAIAGFLEGGWEGMIAGWHGYTSHGAHGVAVAADLKSTQEAINKITKNLNSLSELEVKNLQRLSGAMDELHNEILELDEKVDDLRADTISSQIELAVLLSNEGIINSEDEHLLALERKLKKMLGPSAVDIGNGCFETKHKCNQTCLDRIAAGTFNAGEFSLPTFDSLNITAASLNDDGLDNHTILLYYSTAASSLAVTLMLAIFIVYMVSRDNVSCSICL

SEQ ID NO: 28231 - protein, 584 aa, Artificial Sequence
  derived and/or modified protein sequence (wt) from hemagglutinin__InfluenzaB__AHM01448
MKAIIVLLMVVTSNADRICTGITSSNSPHVVKTATQGEVNVTGVIPLTTTPTKSYFANLKGTKTRGKLCPDCLNCTDLDVALGRPMCVGTTPSAKASILHEVRPVTSGCFPIMHDRTKIRQLANLLRGYENIRLSTQNVIDAEKAPGGPYRLGTSGSCPNATSKSGFFATMAWAVPKDNNKNATNPLTAEVPYICAEGEDQITVWGFHSDNKTQMKNLYGDSNPQKFTSSANGVTTHYVSQIGGFPDQTEDGGLPQSGRIVVDYMMQKPGKTGTIVYQRGVLLPQKVWCASGRSKVIKGSLPLIGEADCLHEKYGGLNKSKPYYTGEHAKAIGNCPIWVKTPLKLANGTKYRPPAKLLKERGFFGAIAGFLEGGWEGMIAGWHGYTSHGAHGVAVAADLKSTQEAINKITKNLNSLSELEVKNLQRLSGAMDELHNEILELDEKVDDLRADTISSQIELAVLLSNEGIINSEDEHLLALERKLKKMLGPSAVDIGNGCFETKHKCNQTCLDRIAAGTFNAGEFSLPTFDSLNITAASLNDDGLDNHTILLYYSTAASSLAVTLMLAIFIVYMVSRDNVSCSICL

SEQ ID NO: 28232 - protein, 585 aa, Artificial Sequence; identical to SEQ ID NO: 26645
  derived and/or modified protein sequence (wt) from hemagglutinin__InfluenzaB__AHM01459

SEQ ID NO: 28233 - protein, 584 aa, Artificial Sequence
  derived and/or modified protein sequence (wt) from hemagglutinin__InfluenzaB__AHM01470
MKAIIVLLMVVTSNADRICTGITSSNSPHVVKTATQGEVNVTGVIPLTTTPTKSYFANLKGTKTRGKLCPDCLNCTDLDVALGRPMCVGTTPSAKASILHEVRPVTSGCFPIMHDRTKIRQLANLLRGYENIRLSTQNVIDAEKAPGGPYRLGTSGSCPNATSKSGFFATMAWAVPKDNNKNATNPLTVEVPYICTEGEDQIAVWGFHSDNKTQMKNLYGDSNPQKFTSSANGVTTHYVSQIGGFPDQTEDGGLPQSGRIVVDYMMQKPGKTGTIVYQRGVLLPQKVWCASGRSKVIKGSLPLIGEADCLHEKYGGLNKSKPYYTGEHAKAIGNCPIWVKTPLKLANGTKYRPPAKLLKERGFFGAIAGFLEGGWEGMIAGWHGYTSHGAHGVAVAADLKSTQEAVNKITKNLNSLSELEVKNLQRLSGAMDELHNEILELDEKVDDLRADTISSQIELAVLLSNEGIINSEDEHLLALERKLKKMLGPSAVDIGNGCFETKHKCNQTCLDRIAAGTFNAGEFSLPTFDSLNITAASLNDDGLDNHTILLYYSTAASSLAVTLMLAIFIVYMVSRDNVSCSICL

SEQ ID NO: 28234 - protein, 584 aa, Artificial Sequence
  derived and/or modified protein sequence (wt) from hemagglutinin__InfluenzaB__AHM01481
MKAIIVLLMVVTSNADRICTGITSSNSPHVVKTATQGEVNVTGVIPLTTTPTKSYFANLKGTKTRGKLCPDCLNCTDLDVALGRPMCVGTTPSAKASILHEVRPVTSGCFPIMHDRTKIRQLANLLRGYENIRLSTQNVIDAEKAPGGPYRLGTSGSCPNATSKSGFFATMAWAVPKDNNKNATNPLTVEVPYICAEGEDQITVWGFHSDNKTQMKNLYGDSNPQKFTSSANGVTTHYVSQIGGFPDQTEDGGLPQSGRIVVDYMMQKPGKTGTIVYQRGVLLPQRVWCASGRSKVIKGSLPLIGEADCLHEKYGGLNKSKPYYTGEHAKAIGNCPIWVKTPLKLANGTKYRPPAKLLKERGFFGAIAGFLEGGWEGMIAGWHGYTSHGAHGVAVAADLKSTQEAINKITKNLNSLSELEVKNLQRLSGAMDELHNEILELDEKVDDLRADTISSQIELAVLLSNEGIINSEDEHLLALERKLKKMLGPSAVDIGNGCFETKHKCNQTCLDRIAAGTFNAGEFSLPTFDSLNITAASLNDDGLDNHTILLYYSTAASSLAVTLMLAIFIVYMVSRDNVSCSICL

SEQ ID NO: 28235 - protein, 584 aa, Artificial Sequence; identical to SEQ ID NO: 26899
  derived and/or modified protein sequence (wt) from hemagglutinin__InfluenzaB__AHM01492

SEQ ID NO: 28236 - protein, 584 aa, Artificial Sequence; identical to SEQ ID NO: 26854
  derived and/or modified protein sequence (wt) from hemagglutinin__InfluenzaB__AHM01503

SEQ ID NO: 28237 - protein, 584 aa, Artificial Sequence; identical to SEQ ID NO: 26854
  derived and/or modified protein sequence (wt) from hemagglutinin__InfluenzaB__AHM01514

SEQ ID NO: 28238 - protein, 584 aa, Artificial Sequence
  derived and/or modified protein sequence (wt) from hemagglutinin__InfluenzaB__AHM01525
MKAIIVLLMVVTSNADRICTGITSSNSPHVVKTATQGEVNVTGVIPLTTTPTKSYFANLKGTKTRGKLCPDCLNCTDLDVALGRPMCVGTTPSAKASILHEVRPVTSGCFPIMHDRTKIRQLANLLRGYENIRLSTQNVIDAEKAPGGPYRLGTSGSCPNATSKSGFFATMAWAVPKDNNKNATNPLTVEVPYICAEGEDQITVWGFHSDNKTQMKNLYGDSNPQKFTSSANGVTTHYVSQIGGFPDQTEDGGLPQSGRIVVDYMIQKPGKTGTIVYQRGVLLPQKVWCASGRSKVIKGSLPLIGEADCLHEKYGGLNKSKPYYTGEHAKAIGNCPIWVKTPLKLANGTKYRPPAKLLKERGFFGAIAGFLEGGWEGMIAGWHGYTSHGAHGVAVAADLKSTQEAINKITKNLNSLSELEVKNLQRLSGAMDELHNEILELDEKVDDLRADTISSQIELAVLLSNEGIINSEDEHLLALERKLKKMLGPSAVDIGNGCFETKHKCNQTCLDRIAAGTFNAGEFSLPTFDSLNITAASLNDDGLDNHTILLYYSTAASSLAVTLMLAIFIVYMVSRDNVSCSICL

SEQ ID NO: 28239 - protein, 584 aa, Artificial Sequence
  derived and/or modified protein sequence (wt) from hemagglutinin__InfluenzaB__AHM01536
MKAIIVLLMVVTSNADRICTGITSSNSPHVVKTATQGEVNVTGVIPLTTTPTKSYFANLKGTKTRGKLCPDCLNCTDLDVALGRPMCVGTTPSAKASILHEVRPVTSGCFPIMHDRTKIRQLANLLRGYENIRLSTQNVIDAEKAPGGPYRLGTSGSCPNATSKSGFFATMAWAVPKDNNKNATNPLTVEVPYICAEGEDQITVWGFHSDNKTQMKNLYGDSNPQKFTSSANGVTTHYVSQIGGFPDQTEDGGLPQSGRIVVDYMMQKPGKTGTIVYQRGVLLPQKVWCASGRSKVIKGSLPLIGEADCLHEKYGGLNKSKPYYTGEHAKAIGNCPIWVKTPLKLANGTKYRPPAKLLKERGFFGAIAGFLEGGWEGMIAGWHGYTSHGVHGVAVAADLKSTQEAINKITKNLNSLSELEVKNLQRLSGAMDELHNEILELDEKVDDLRADTISSQIELAVLLSNEGIINSEDEHLLALERKLKKMLGPSAVDIGNGCFETKHKCNQTCLDRIAAGTFNAGEFSLPTFDSLNITAASLNDDGLDNHTILLYYSTAASSLAVTLMLAIFIVYMVSRDNVSCSICL

SEQ ID NO: 28240 - protein, 584 aa, Artificial Sequence; identical to SEQ ID NO: 26854
  derived and/or modified protein sequence (wt) from hemagglutinin__InfluenzaB__AHM01547

SEQ ID NO: 28241 - protein, 584 aa, Artificial Sequence; identical to SEQ ID NO: 26899
  derived and/or modified protein sequence (wt) from hemagglutinin__InfluenzaB__AHM01558

SEQ ID NO: 28242 - protein, 585 aa, Artificial Sequence; identical to SEQ ID NO: 26740
  derived and/or modified protein sequence (wt) from hemagglutinin__InfluenzaB__AHV83951

SEQ ID NO: 28243 - protein, 584 aa, Artificial Sequence; identical to SEQ ID NO: 28129
  derived and/or modified protein sequence (wt) from hemagglutinin__InfluenzaB__AHV83952

SEQ ID NO: 28244 - protein, 585 aa, Artificial Sequence; identical to SEQ ID NO: 26683
  derived and/or modified protein sequence (wt) from hemagglutinin__InfluenzaB__AHZ36697

SEQ ID NO: 28245 - protein, 585 aa, Artificial Sequence
  derived and/or modified protein sequence (wt) from hemagglutinin__InfluenzaB__AHZ36708
MKAIIVLLMVVTSNADRICTGITSSNSPHVVKTATQGEVNVTGVIPLTTTPTKSHFANLKGTETRGKLCPKCLNCTDLDVALGRPKCTGKIPSARVSILHEVRPVTSGCFPIMHDRTKIRQLPNLLRGYEHIRLSTHNVINAENAPGGPYKIGTSGSCLNVTNGNGFFATMAWAVPKNDKNKTATNPLTIEVPYICTEGEDQITVWGFHSDNETQMAKLYGDSKPQKFTSSANGVTTHYVSQIGGFPNQTEDGGLPQSGRIVVDYMVQKSGKTGTITYQRGILLPQKVWCTSGRSKVIKGSLPLIGEADCLHEKYGGLNKSKPYYTGEHAKAIGNCPIWVKTPLKLANGTKYRPPAKLLKERGFFGAIAGFLEGGWEGMIAGWHGYTSHGAHGVAVAADLKSTQEAINKITKNLNSLSELEVKNLQRLSGAMDELHNEILELDEKVDDLRADTISSQIELAVLLSNEGIINSEDEHLLALERKLKKMLGPSAVEIGNGCFETKHKCNQTCLDRIAAGTFDAGEFSLPTFDSLNITAASLNDDGLDNHTILLYYSTAASSLAVTLMIAIFVVYMVSRDNVSCSICL

SEQ ID NO: 28246 - protein, 585 aa, Artificial Sequence
  derived and/or modified protein sequence (wt) from hemagglutinin__InfluenzaB__AHZ36719
MKAIIVLLMVVTSNADRICTGITSSNSPHVVKTATQGEVNVTGVIPLTTTPTKSHFANLKGTETRGKLCPKCLNCTDLDVALGRPKCTGKIPSARVSILHEVRPVTSGCFPIMHDRTKIRQLPNLLRGYEHIRLSTHNVINAENAPGGPYKIGTSGSCPNVTNGNGFFATMAWAVPKNDKNKTATNPLTIEVPYVCTEGEDQITVWGFHSDNETQMAKLYGDSKPQKFTSSANGVTTHYVSQIGGFPNQTEDGGLPQSGRIVVDYMVQKSGKTGTITYQRGILLPQKVWCASGRSKVIKGSLPLIGEADCLHEKYGGLNKSKPYYTGEHAKAIGNCPIWVKTPLKLANGTKYRPPAKLLKERGFFGAIAGFLEGGWEGMIAGWHGYTSHGAHGVAVAADLKSTQEAINKITKNLNSLSELEVKNLQRLSGAMDELHNEILELDEKVDDLRADTISSQIELAVLLSNEGIINSEDEHLLALERKLKKMLGPSAVEIGNGCFETKHKCNQTCLDRIAAGTFDAGEFSLPTFDSLNITAASLNDDGLDNHTILLYYSTAASSLAVTLMIAIFVVYMVSRDNVSCSICL

SEQ ID NO: 28247 - protein, 585 aa, Artificial Sequence; identical to SEQ ID NO: 26683
  derived and/or modified protein sequence (wt) from hemagglutinin__InfluenzaB__AHZ36730

SEQ ID NO: 28248 - protein, 585 aa, Artificial Sequence; identical to SEQ ID NO: 26683
  derived and/or modified protein sequence (wt) from hemagglutinin__InfluenzaB__AHZ36752

SEQ ID NO: 28249 - protein, 585 aa, Artificial Sequence; identical to SEQ ID NO: 26645
  derived and/or modified protein sequence (wt) from hemagglutinin__InfluenzaB__AHZ36763

SEQ ID NO: 28250 - protein, 585 aa, Artificial Sequence
  derived and/or modified protein sequence (wt) from hemagglutinin__InfluenzaB__AHZ36774
MKAIIVLLMVVTSNADRICTGITSSNSPHVVKTATQGEVNVTGVIPLTTTPTKSHFANLKGTETRGKLCPKCPNCTDLDVALGRPKCTGKIPSARVSILHEVRPVTSGCFPIMHDRTKIRQLPNLLRGYEHIRLSTHNVINAESAPGGPYKIGTSGSCPNVTNGNGFFATMAWAVPKNDKNKTATDPLTIEVPYICTEEEDQITVWGFHSDNETQMAKLYGDSKPQKFTSSANGVTTHYVSQIGGFPNQTEDGGLPQSGRIVVDYMVQKSGKTGTITYQRGILLPQKVWCASGRSKVIKGSLPLIGEADCLHEKYGGLNKSKPYYTGEHAKAIGNCPIWVKTPLKLANGTKYRPPAKLLKERGFFGAIAGFLEGGWEGMIAGWHGYTSHGAHGVAVAADLKSTQEAINKVTKNLNSLSELEVKNLQRLSGAMDELHNEILELDEKVDDLRADTISSQIELAVLLSNEGIINSEDEHLLALERKLKKMLGPSAVEIGNGCFETKHKCNQTCLDRIAAGTFDAGEFSLPTFDSLNITAASLNDDGLDNHTILLYYSTAASSLAVTLMIAIFVVYMVSRDNVSCSICL

SEQ ID NO: 28251 - protein, 585 aa, Artificial Sequence; identical to SEQ ID NO: 28159
  derived and/or modified protein sequence (wt) from hemagglutinin__InfluenzaB__AHZ36785

SEQ ID NO: 28252 - protein, 585 aa, Artificial Sequence; identical to SEQ ID NO: 28159
  derived and/or modified protein sequence (wt) from hemagglutinin__InfluenzaB__AHZ36796

SEQ ID NO: 28253 - protein, 584 aa, Artificial Sequence
  derived and/or modified protein sequence (wt) from hemagglutinin__InfluenzaB__AHZ36807
MKAIIVLLMVVTSNADRICTGITSSNSPHVVKTATQGEVNVTGVIPLTTTPTKSYFANLKGTKTRGKLCPDCLNCTDLDVALGRPMCVGTTPSAKASILHEVRPVTSGCFPIMHDRTKIRQLANLLRGYENIRLSTQNVIDAEKAPGGPYRLGTSGSCPNATSKSGFFATMAWAVPKDNNKNATNPLTVEVPYICAEGEDQITVWGFHSDNKTQMKNLYGDSNPQKFTSSANGVTTHYVSQIGGFPDQTEDGGLPQSGRIVVDYMMQKPEKTGTIVYQRGVLLPQKVWCASGRSKVIKGSLPLIGEADCLHEKYGGLNKSKPYYTGEHAKAIGNCPIWVKTPLKLANGTKYRPPAKLLKERGFFGAIAGFLEGGWEGMIAGWHGYTSHGAHGVAVAADLKSTQEAINKITKNLNSLSELEVKNLQRLSGAMDELHNEILELDEKVDDLRADTISSQIELAVLLSNEGIINSEDEHLLALERKLKKMLGPSAVDIGNGCFETKHKCNQTCLDRIAAGTFNAGEFSLPTFDSLNITAASLNDDGLDNHTILLYYSTAASSLAVTLMLAIFIVYMVSRDNVSCSICL

SEQ ID NO: 28254 - protein, 585 aa, Artificial Sequence; identical to SEQ ID NO: 26683
  derived and/or modified protein sequence (wt) from hemagglutinin__InfluenzaB__AHZ36818

SEQ ID NO: 28255 - protein, 585 aa, Artificial Sequence; identical to SEQ ID NO: 26645
  derived and/or modified protein sequence (wt) from hemagglutinin__InfluenzaB__AHZ36829

SEQ ID NO: 28256 - protein, 585 aa, Artificial Sequence; identical to SEQ ID NO: 26645
  derived and/or modified protein sequence (wt) from hemagglutinin__InfluenzaB__AHZ36840

SEQ ID NO: 28257 - protein, 585 aa, Artificial Sequence; identical to SEQ ID NO: 28159
  derived and/or modified protein sequence (wt) from hemagglutinin__InfluenzaB__AHZ36851

SEQ ID NO: 28258 - protein, 585 aa, Artificial Sequence; identical to SEQ ID NO: 26683
  derived and/or modified protein sequence (wt) from hemagglutinin__InfluenzaB__AHZ36862

SEQ ID NO: 28259 - protein, 585 aa, Artificial Sequence; identical to SEQ ID NO: 26645
  derived and/or modified protein sequence (wt) from hemagglutinin__InfluenzaB__AHZ36873

SEQ ID NO: 28260 - protein, 585 aa, Artificial Sequence
  derived and/or modified protein sequence (wt) from hemagglutinin__InfluenzaB__AHZ36884
MKAIIVLLMVVTSNADRICTGITSSNSPHIVKTATQGEVNVTGVIPLTTTPTKSHFANLKGTETRGKLCPKCLNCTDLDVALGRPKCTGKIPSARVSILHEVRPVTSGCFPIMHDRTKIRQLPNLLRGYEHIRLSTHNVINAENAPGGPYKIGTSGSCPNITNGNGFFETMAWAVPKNDKNKTATNPLTIEVPYICTEGEDQITVWGFHSDNETQMAKLYGDSKPQKFTSSANGVTTHYVSQIGGFPNQTEDGGLPQSGRIVVDYMVQKSGKTGTITYQRGILLPQKVWCASGRSKVIKGSLPLIGEADCLHEKYGGLNKSKPYYTGEHAKAIGNCPIWVKTPLKLANGTKYRPPAKLLKERGFFGAIAGFLEGGWEGMIAGWHGYTSHGAHGVAVAADLKSTQEAINKITKNLNSLSELEVKNLQRLSGAMDELHNEILELDEKVDDLRADTISSQIELAVLLSNEGIINSEDEHLLALERKLKKMLGPSAVEIGNGCFETKHKCNQTCLDRIAAGTFDAGEFSLPTFDSLNITAASLNDDGLDNHTILLYYSTAASSLAVTLMIAIFVVYMVSRDNVSCSICL

SEQ ID NO: 28261 - protein, 585 aa, Artificial Sequence; identical to SEQ ID NO: 26683
  derived and/or modified protein sequence (wt) from hemagglutinin__InfluenzaB__AHZ36895

SEQ ID NO: 28262 - protein, 585 aa, Artificial Sequence; identical to SEQ ID NO: 26683
  derived and/or modified protein sequence (wt) from hemagglutinin__InfluenzaB__AHZ36906

SEQ ID NO: 28263 - protein, 585 aa, Artificial Sequence
  derived and/or modified protein sequence (wt) from hemagglutinin__InfluenzaB__AHZ36928
MKAIIVLLMVVTSNADRICTGITSSNSPHVVKTATQGEVNVTGVIPLTTTPTKSHFANLKGTKTRGKLCPKCLNCTDLDVALGRPKCTGKIPSARVSILHEVRPVTSGCFPIMHDRTKIRQLPNLLRGYEHIRLSTHNVINAENAPGGPYKIGTSGSCLNVTNGNGFFATMAWAVPKNDKNKTATNPLTIEVPYICTEGEDQITVWGFHSDNETQMAKLYGDSKPQKFTSSANGVTTHYVSQIGGFPNQTEDGGLPQSGRIVVDYMVQKSGKTGTITYQRGILLPQKVWCASGRSKVIKGSLPLIGEADCLHEKYGGLNKSKPYYTGEHAKAIGNCPIWVKTPLKLANGTKYRPPAKLLKERGFFGAIAGFLEGGWEGMIAGWHGYTSHGAHGVAVAADLKSTQEAINKITKNLNSLSELEVKNLQRLSGAMDELHNEILELDEKVDDLRADTISSQIELAVLLSNEGIINSEDEHLLALERKLKKMLGPSAVEIGNGCFETKHKCNQTCLDRIAAGTFDAGEFSLPTFDSLNITAASLNDDGLDNHTILLYYSTAASSLAVTLMIAIFVVYMVSRDNVSCSICL

SEQ ID NO: 28264 - protein, 585 aa, Artificial Sequence; identical to SEQ ID NO: 28159
  derived and/or modified protein sequence (wt) from hemagglutinin__InfluenzaB__AHZ36939

SEQ ID NO: 28265 - protein, 585 aa, Artificial Sequence
  derived and/or modified protein sequence (wt) from hemagglutinin__InfluenzaB__AHZ36950
MKAIIVLLMVVTSNADRICTGITSSNSPHIVKTATQGEVNVTGVIPLTTTPTKSHFANLKGTETRGKLCPKCLNCTDLDVALGRPKCTGKIPSARVSILHEVRPITSGCFPIMHDRTKIRQLPNLLRGYEHIRLSTHNVINAENAPGGPYKIGTSGSCPNITNGNGFFATMAWAVPKNDKNKTATNPLTIEVPYICTEGEDQITVWGFHSDNETQMAKLYGDSKPQKFTSSANGVTTHYVSQIGGFPNQTEDGGLPQSGRIVVDYMVQKSGKTGTITYQRGILLPQKVWCASGRSKVIKGSLPLIGEADCLHEKYGGLNKSKPYYTGEHAKAIGNCPIWVKTPLKLANGTKYRPPAKLLKERGFFGAIAGFLEGGWEGMIAGWHGYTSHGAHGVAVAADLKSTQEAINKITKNLNSLSELEVKNLQRLSGAMDELHNEILELDEKVDDLRADTISSQIELAVLLSNEGIINSEDEHLLALERKLKKMLGPSAVEIGNGCFETKHKCNQTCLDRIAAGTFDAGEFSLPTFDSLNITAASLNDDGLDNHTILLYYSTAASSLAVTLMIAIFVVYMVSRDNVSCSICL

SEQ ID NO: 28266 - protein, 585 aa, Artificial Sequence
  derived and/or modified protein sequence (wt) from hemagglutinin__InfluenzaB__AHZ36961
MKAIIVLLMVVTSNADRICTGITSSNSPHVVKTATQGEVNVTGVIPLTTTPTKSHFANLKGTETRGKLCPKCLNCTDLDVALGRPKCTGKIPSARVSILHEVRPVTSGCFPIMHDRTKIRQLPNLLRGYEHIRLSTHNVINAENAPGGPYKIGTSGSCPNVTNGNGFFATMAWAVPKNDKNKTATNPLTIEVPYICTEGEDQITVWGFHSDNETQMAKLYGDSKPQKFTSSANGVTTHYVSQIGGFPNQTEDGGLPQSGRIVVDYMVQKSGKTGTITYQRGILLPQKVWCASGGSKVIKGSLPLIGEADCLHEKYGGLNKSKPYYTGEHAKAIGNCPIWVKTPLKLANGTKYRPPAKLLKERGFFGAIAGFLEGGWEGMIAGWHGYTSHGAHGVAVAADLKSTQEAINKITKNLNSLSELEVKNLQRLSGAMDELHNEILELDEKVDDLRADTISSQIELAVLLSNEGIINSEDEHLLALERKLKKMLGPSAVEIGNGCFETKHKCNQTCLDRIAAGTFDAGEFSLPTFDSLNITAASLNDDGLDNHTILLYYSTAASSLAVTLMIAIFVVYMVSRDNVSCSICL

SEQ ID NO: 28267 - protein, 585 aa, Artificial Sequence; identical to SEQ ID NO: 26683
  derived and/or modified protein sequence (wt) from hemagglutinin__InfluenzaB__AHZ36972

SEQ ID NO: 28268 - protein, 585 aa, Artificial Sequence
  derived and/or modified protein sequence (wt) from hemagglutinin__InfluenzaB__AHZ36983
MKAIIVLLMVVTSNADRICTGITSSNSPHIVKTATQGEVNVTGVIPLTTTPTKSHFANLKGTETRGKLCPKCLNCTDLDVALGRPKCTGKIPSARVSILHEVRPVTSGCFPIMHDRTKIRQLPNLLRGYEHIRLSTHNVINAENAPGGPYKIGTSGSCPNITNGNGFFATMAWAVPKNDKNKTATNPLTIEVPYICTEGEDQITVWGFHSDNETQMAKLYGDSKPQKFTSSANGVTAHYVSQIGGFPNQTEDGGLPQSGRIVVDYMVQKSGKTGTITYQRGILLPQKVWCASGRSKVIKGSLPLIGEADCLHEKYGGLNKSKPYYTGEHAKAIGNCPIWVKTPLKLANGTKYRPPAKLLKERGFFGAIAGFLEGGWEGMIAGWHGYTSHGAHGVAVAADLKSTQEAINKITKNLNSLSELEVKNLQRLSGAMDELHNEILELDEKVDDLRADTISSQIELAVLLSNEGIINSEDEHLLALERKLKKMLGPSAVEIGNGCFETKHKCNQTCLDRIAAGTFDAGEFSLPTFDSLNITAASLNDDGLDNHTILLYYSTAASSLAVTLMIAIFVVYMVSRDNVSCSICL

SEQ ID NO: 28269 - protein, 585 aa, Artificial Sequence
  derived and/or modified protein sequence (wt) from hemagglutinin__InfluenzaB__AHZ37005
MKAIIVLLMVVTSNADRICTGITSSNSPHVVKTATQGEVNVTGVIPLTTTPTKSHFANLKGTETRGKLCPKCPNCTDLDVALGRPKCTGKIPSARVSILHEVRPVTSGCFPIMHDRTKIRQLPNLLRGYEHIRLSTHNVINAESAPGGPYKIGTSGSCPNVTNGNGFFATMAWAVPKNDKNKTATDPLTIEVPYICTEEEDQITVWGFHSDNETQMAKLYGDSKPQKFTSSANGVTTHYVSQIGGFPNQTEDGGLPQSGRIVVDYMVQKSGKTGTITYQRGILLPQKVWCASGRSKVIKGSLPLIGEADCLHEKYGGLNKSKPYYTGEHAKAIGNCPIWVKTPLKLANGTKYRPPAKLLKERGFFGAIAGFLEGGWEGMIAGWHGYTSHGAHGVAVAADLKSTQEAINKITKNLNSLSELEVKNLQRLSGAMDELHNEILELDEKVDDLRADTISSQIELAVLLSNEGIINSEDEHLLALERKLKKMLGPSAVEIGNGCFETKHKCNQTCLDRIAAGTFDAGEFSLPTFDSLNITAASLNDDGLDNHTILLYYSTAASSLAVTLMIAIFVVYMVSRDNVSCSICL

SEQ ID NO: 28270 - protein, 585 aa, Artificial Sequence; identical to SEQ ID NO: 26645
  derived and/or modified protein sequence (wt) from hemagglutinin__InfluenzaB__AHZ37016

SEQ ID NO: 28271 - protein, 585 aa, Artificial Sequence
  derived and/or modified protein sequence (wt) from hemagglutinin__InfluenzaB__AHZ37027
MKAIIVLLMVVTSNADRICTGITSSNSPHVVKTATQGEVNVTGVIPLTTTPTKSHFANLKGTETRGKLCPKCLNCTDLDVALGRPKCTGKIPSARVSIIHEVRPVTSGCFPIMHDRTKIRQLPNLLRGYEHIRLSTHNVINAENAPGGPYKIGTSGSCLNVTNGNGFFATMAWAVPKNDKNKTATNPLTIEVPYICTEGEDQITVWGFHSDNETQMAKLYGDSKPQKFTSSANGVTTHYVSQIGGFPNQTEDGGLPQSGRIVVDYMVQKSGKTGTITYQRGILLPQKVWCASGRSKVIKGSLPLIGEADCLHEKYGGLNKSKPYYTGEHAKAIGNCPIWVKTPLKLANGTKYRPPAKLLKERGFFGAIAGFLEGGWEGMIAGWHGYTSHGAHGVAVAADLKSTQEAINKITKNLNSLSELEVKNLQRLSGAMDELHNEILELDEKVDDLRADTISSQIELAVLLSNEGIINSEDEHLLALERKLKKMLGPSAVEIGNGCFETKHKCNQTCLDRIAAGTFDAGEFSLPTFDSLNITAASLNDDGLDNHTILLYYSTAASSLAVTLMIAIFVVYMVSRDNVSCSICL

SEQ ID NO: 28272 - protein, 585 aa, Artificial Sequence; identical to SEQ ID NO: 26645
  derived and/or modified protein sequence (wt) from hemagglutinin__InfluenzaB__AHZ37038

SEQ ID NO: 28273 - protein, 585 aa, Artificial Sequence; identical to SEQ ID NO: 28159
  derived and/or modified protein sequence (wt) from hemagglutinin__InfluenzaB__AHZ37049

SEQ ID NO: 28274 - protein, 585 aa, Artificial Sequence; identical to SEQ ID NO: 28159
  derived and/or modified protein sequence (wt) from hemagglutinin__InfluenzaB__AHZ37060

SEQ ID NO: 28275 - protein, 585 aa, Artificial Sequence; identical to SEQ ID NO: 26645
  derived and/or modified protein sequence (wt) from hemagglutinin__InfluenzaB__AHZ37071

SEQ ID NO: 28276 - protein, 585 aa, Artificial Sequence; identical to SEQ ID NO: 26645
  derived and/or modified protein sequence (wt) from hemagglutinin__InfluenzaB__AHZ37082

SEQ ID NO: 28277 - protein, 585 aa, Artificial Sequence; identical to SEQ ID NO: 28159
  derived and/or modified protein sequence (wt) from hemagglutinin__InfluenzaB__AHZ37093

SEQ ID NO: 28278 - protein, 585 aa, Artificial Sequence
  derived and/or modified protein sequence (wt) from hemagglutinin__InfluenzaB__AHZ37104
MKAIIVLLMVVTSNADRICTGITSSNSPHVVKTATQGEVNVTGVIPLTTTPTKSHFANLKGTETRGKLCPKCLNCTDLDVALGRPKCTGKIPSARVSILHEVRPVTSGCFPIMHDRTKIRQLPNLLRGYEHIRLSTHNVINAENAPGGPYKIGTSGSCPNVTNGNGFFATMAWAVPKNDKNKTATNPLTIEVPYICTEGEDQITVWGFHSDNETQMAKLYGDSKPQKFTSSANGVTTHYVSQIGGFPNQTEDGGLPQSGRIVVDHMVQKSGKTGTITYQRGILLPQKVWCASGRSKVIKGSLPLIGEADCLHEKYGGLNKSKPYYTGEHAKAIGNCPIWVKTPLKLANGTKYRPPAKLLKERGFFGAIAGFLEGGWEGMIAGWHGYTSHGAHGVAVAADLKSTQEAINKITKNLNSLSELEVKNLQRLSGAMDELHNEILELDEKVDDLRADTISSQIELAVLLSNEGIINSEDEHLLALERKLKKMLGPSAVEIGNGCFETKHKCNQTCLDRIAAGTFDAGEFSLPTFDSLNITAASLNDDGLDNHTILLYYSTAASSLAVTLMIAIFVVYMVSRDNVSCSICL

SEQ ID NO: 28279 - protein, 585 aa, Artificial Sequence
  derived and/or modified protein sequence (wt) from hemagglutinin__InfluenzaB__AHZ41770
MKAIIVLLMVVTSNADRICTGITSSNSPHIVKTATQGEVNVTGVIPLTTTPTKSHFANLKGTETRGKLCPKCLNCTDLDVALGRPKCTGKIPSARVSILHEVRPVTSGCFPIMHDRTKIRQLPNLLRGYEHIRLSTHNVINAENAPGGPYKIGTSGSCPNITNGNGFFATMAWAVPKNDKNKTAINPLTIEVPYICTEGEDQITVWGFHSDNETQMAKLYGDSEPQKFTSSANGVTTHYVSQIGGFPNQTEDGGLPQSGRIVVDYMVQKSGKTGTITYQRGILLPQKVWCASGRSKVIKGSLPLIGEADCLHEKYGGLNKSKPYYTGEHAKAIGNCPIWVKTPLKLANGTKYRPPAKLLKERGFFGAIAGFLEGGWEGMIAGWHGYTSHGAHGVAVAADLKSTQEAINKITKNLNSLSELEVKNLQRLSGAMDELHNEILELDEKVDDLRADTISSQIELAVLLSNEGIINSEDEHLLALERKLKKMLGPSAVEIGNGCFETKHKCNQTCLDRIAAGTFDAGEFSLPTFDSLNITAASLNDDGLDNHTILLYYSTAASSLAVTLMIAIFVVYMVSRDNVSCSICL

SEQ ID NO: 28280 - protein, 585 aa, Artificial Sequence; identical to SEQ ID NO: 26683
  derived and/or modified protein sequence (wt) from hemagglutinin__InfluenzaB__AHZ41781

SEQ ID NO: 28281 - protein, 585 aa, Artificial Sequence; identical to SEQ ID NO: 26683
  derived and/or modified protein sequence (wt) from hemagglutinin__InfluenzaB__AHZ41792

SEQ ID NO: 28282 - protein, 585 aa, Artificial Sequence; identical to SEQ ID NO: 26683
  derived and/or modified protein sequence (wt) from hemagglutinin__InfluenzaB__AHZ41803

SEQ ID NO: 28283 - protein, 585 aa, Artificial Sequence
  derived and/or modified protein sequence (wt) from hemagglutinin__InfluenzaB__AHZ41814
MKAIIVLLMVVTSNADRICTGITSSNSPHVVKTATQGEVNVTGVIPLTTTPTKSHFANLKGTETRGKLCPKCPNCTDLDVALGRPKCTGKIPSARVSILHEVRPVTSGCFPIMHDRTKIRQLPNLLRGYEHIRLSTHNVINAENAPGGPYKIGTSGSCPNVTNGNGFFATMAWAVPKNDKNKTATNPLTIEVPYICTEGEDQITVWGFHSDNETQMAKLYGDSKPQKFTSSANGVTTHYVSQIGGFPNQTEDGGLPQSGRIVVDYMVQKSGKTGTVTYQRGILLPQKVWCASGRSKVIKGSLPLIGEADCLHEKYGGLNKSKPYYTGEHAKAIGNCPIWVKTPLKLANGTKYRPPAKLLKERGFFGAIAGFLEGGWEGMIAGWHGYTSHGAHGVAVAADLKSTQEAINKITKNLNSLSELEVKNLQRLSGAMDELHNEILELDEKVDDLRADTISSQIELAVLLSNEGIINSEDEHLLALERKLKKMLGPSAVEIGNGCFETKHKCNQTCLDRIAAGTFDAGEFSLPTFDSLNITAASLNDDGLDNHTILLYYSTAASSLAVTLMIAIFVVYMVSRDNVSCSICL

SEQ ID NO: 28284 - protein, 585 aa, Artificial Sequence; identical to SEQ ID NO: 26683
  derived and/or modified protein sequence (wt) from hemagglutinin__InfluenzaB__AHZ41825

SEQ ID NO: 28285 - protein, 585 aa, Artificial Sequence; identical to SEQ ID NO: 26683
  derived and/or modified protein sequence (wt) from hemagglutinin__InfluenzaB__AHZ41836

SEQ ID NO: 28286 - protein, 585 aa, Artificial Sequence; identical to SEQ ID NO: 26683
  derived and/or modified protein sequence (wt) from hemagglutinin__InfluenzaB__AHZ41847

SEQ ID NO: 28287 - protein, 584 aa, Artificial Sequence; identical to SEQ ID NO: 28131
  derived and/or modified protein sequence (wt) from hemagglutinin__InfluenzaB__AHZ41858

SEQ ID NO: 28288 - protein, 585 aa, Artificial Sequence; identical to SEQ ID NO: 28156
  derived and/or modified protein sequence (wt) from hemagglutinin__InfluenzaB__AHZ41869

SEQ ID NO: 28289 - protein, 584 aa, Artificial Sequence
  derived and/or modified protein sequence (wt) from hemagglutinin__InfluenzaB__AIC73844
MKAIIVLLMVVTSNADRICTGITSSNSPHVVKTATQGEVNVTGVIPLTTTPTKSYFANLKGTRTRGKLCPDCLNCTDLDVALGRPMCVGTTPSAKASILHEVRPVTSGCFPIMHDRTKIRQLPNLLRGYEKIRLSTQNVIDAEKAPGGPYRLGTSGSCPNATSKIGFFATMAWAVPKDNYKNATNPQTVEVPYICTEGEDQITVWGFHSDNKTQMKSLYGDSNPQKFTSSANGVTTHYVSQIGDFPDQTEDGGLPQSGRIVVDYMMQKPGKTGTIVYQRGVLLPQKVWCASGRSKVIKGSLPLIGEADCLHEEYGGLNKSKPYYTGKHAKAIGNCPIWVKTPLKLANGTKYRPPAKLLKERGFFGAIAGFLEGGWEGMIAGWHGYTSHGAHGVAVAADLKSTQEAINKITKNLNSLSELEVKNLQRLSGAMDELHNEILELDEKVDDLRADTISSQIELAVLLSNEGIINSEDEHLLALERKLKKMLGPSAVDIGNGCFETKHKCNQTCLDRIAAGTFNAGEFSLPTFDSLNITAASLNDDGLDNHTILLYYSTAASSLAVTLMLAIFIVYMVSRDNVSCSICL

SEQ ID NO: 28290 - protein, 585 aa, Artificial Sequence; identical to SEQ ID NO: 27865
  derived and/or modified protein sequence (wt) from hemagglutinin__InfluenzaB__AIC73845

SEQ ID NO: 28291 - protein, 585 aa, Artificial Sequence; identical to SEQ ID NO: 27865
  derived and/or modified protein sequence (wt) from hemagglutinin__InfluenzaB__AIC73846

SEQ ID NO: 28292 - protein, 585 aa, Artificial Sequence
  derived and/or modified protein sequence (wt) from hemagglutinin__InfluenzaB__AIC73847
MKAIIVLLMVVTSNADRICTGITSSNSPHVVKTATQGEVNVTGVIPLTTTPTKSHFANLKGTETRGKLCPKCLDCTDLDVALGRPKCTGKIPSARVSILHEVRPVTSGCFPIMHDRTKIRQLPNLLRGYEHIRLSTHNVINAEDAPGGPYKIGTSGSCPNVTNGNGFFATMAWAVPKNDKNKTATNPLTIEVPYICTEGEDQITVWGFHSDNETQMAKLYGDSKPQKFTSSANGVTTHYVSQIGGFPNQTEDGGLPQSGRIVVDYMVQKSGKTGTITYQRGILLPQKVWCASGRSKVIKGSLPLIGEADCLHEKYGGLNKSKPYYTGEHAKAIGNCPIWVKTPLKLANGTKYRPPAKLLKERGFFGAIAGFLEGGWEGMIAGWHGYTSHGAHGVAVAADLKSTQEAINKITKNLNSLSELEVKNLQRLSGAMDELHNEILELDEKVDDLRADTISSQIELAVLLSNEGIINSEDEHLLALERKLKKMLGPSAVEIGNGCFETKHKCNQTCLDRIAAGTFDAGEFSLPTFDSLNITAASLNDDGLDNHTILLYYSTAASSLAVTLMIAIFVVYMVSRDNVSCSICL

SEQ ID NO: 28293 - protein, 585 aa, Artificial Sequence; identical to SEQ ID NO: 27865
  derived and/or modified protein sequence (wt) from hemagglutinin__InfluenzaB__AIC73848

SEQ ID NO: 28294 - protein, 584 aa, Artificial Sequence; identical to SEQ ID NO: 28129
  derived and/or modified protein sequence (wt) from hemagglutinin__InfluenzaB__AIC73849

SEQ ID NO: 28295 - protein, 585 aa, Artificial Sequence
  derived and/or modified protein sequence (wt) from hemagglutinin__InfluenzaB__AIC73850
MKAIIVLLMVATSNADRICTGITSSNSPHVVKTATQGEVNVTGVIPLTTTPTKSHFANLKGTETRGKLCPKCLNCTDLDVALGRPKCTGKIPSARVSILHEVRPVTSGCFPIMHDRTKIRQLPNLLRGYEHIRLSTHNVINAEDAPGGPYKIGTSGSCPNVTNGNGFFATMAWAVPKNDKNKTATNPLTIEVPYICTEGEDQITVWGFHSDNETQMAKLYGDSKPQKFTSSANGVTTHYVSQIGGFPNQTEDGGLPQSGRIVVDYMVQKSGKTGTITYQRGILLPQKVWCASGRSKVIKGSLPLIGEADCLHEKYGGLNKSKPYYTGEHAKAIGNCPIWVKTPLKLANGTKYRPPAKLLKERGFFGAIAGFLEGGWEGMIAGWHGYTSHGAHGVAVAADLKSTQEAINKITKNLNSLSELEVKNLQRLSGAMDELHNEILELDEKVDDLRADTISSQIELAVLLSNEGIINSEDEHLLALERKLKKMLGPSAVEIGNGCFETKHKCNQTCLDRIAAGTFDAGEFSLPTFDSLNITAASLNDDGLDNHTILLYYSTAASSLAVTLMIAIFVVYMVSRDNVSCSICL

SEQ ID NO: 28296 - protein, 585 aa, Artificial Sequence; identical to SEQ ID NO: 26887
  derived and/or modified protein sequence (wt) from hemagglutinin__InfluenzaB__AIC73851

SEQ ID NO: 28297 - protein, 584 aa, Artificial Sequence; identical to SEQ ID NO: 28289
  derived and/or modified protein sequence (wt) from hemagglutinin__InfluenzaB__AIC73852

SEQ ID NO: 28298 - protein, 584 aa, Artificial Sequence; identical to SEQ ID NO: 28289
  derived and/or modified protein sequence (wt) from hemagglutinin__InfluenzaB__AIC73853

SEQ ID NO: 28299 - protein, 585 aa, Artificial Sequence
  derived and/or modified protein sequence (wt) from hemagglutinin__InfluenzaB__AIC73855
MKAIIVLLMVVTSNADRICTGITSSNSPHVVKTATQGEVNVTGVIPLTTTPTKSHFANLKGTETRGKLCPKCLNCTDLDVALGRPKCTGKIPSARVSILHEVRPVTSGCFPIMHDRTKIRQLPNLLRGYEHIRLSTHNVINAENAPGGPYIIGTSGSCPNVTNGNGFFATMAWAVPKNDKNKTATNPLTIEVPYICTEGEDQITVWGFHSDNETQMAKLYGDSNPQKFTSSANGVTTHYVSQIGGFPNQTEDGGLPQSGRIVVDYMVQKSGKTGTITYQRGILLPQKVWCASGRSKVIKGSLPLIGEADCLHEKYGGLNKSKPYYTGEHAKAIGNCPIWVKTPLKLANGTKYRPPAKLLKERGFFGAIAGFLEGGWEGMIAGWHGYTSHGAHGVAVAADLKSTQEAINKITKNLNSLSELEVKNLQRLSGAMDELHNEILELDEKVDDLRADTISSQIELAVLLSNEGIINSEDEHLLALERKLKKMLGPSAVEIGNGCFETKHKCNQTCLDRIAAGTFDAGEFSLPTFDSLNITAASLNDDGLDNHTILLYYSTAASSLAVTLMIAIFVVYMVSRDNVSCSICL

SEQ ID NO: 28300 - protein, 585 aa, Artificial Sequence; identical to SEQ ID NO: 27865
  derived and/or modified protein sequence (wt) from hemagglutinin__InfluenzaB__AIC73856

SEQ ID NO: 28301 - protein, 585 aa, Artificial Sequence; identical to SEQ ID NO: 27865
  derived and/or modified protein sequence (wt) from hemagglutinin__InfluenzaB__AIC73857

SEQ ID NO: 28302 - protein, 585 aa, Artificial Sequence; identical to SEQ ID NO: 27865
  derived and/or modified protein sequence (wt) from hemagglutinin__InfluenzaB__AIC73859

SEQ ID NO: 28303 - protein, 585 aa, Artificial Sequence
  derived and/or modified protein sequence (wt) from hemagglutinin__InfluenzaB__AIC73860
MKAIIVLLMVVTSNADRICTGITSSNSPHVVKTATQGEVNVTGVIPLTTTPTKSHFANLKGTETRGKLCPKCLNCTDLDVALGRPKCTGKIPSARVSILHEVRPVTSGCFPIMHDRTKIRQLPNLLRGYEHIRLSTHNVINAENAPGGPYKIGTSGSCPNVTNGNGFFATMAWAVPKNDKNKTATNPLTIEVPYICTEGEDQITVWGFHSDNETQMAKLYGDSNPQKFTSSANGVTTHYVSQIGGFPNQTEDGGLPQSGRIVVDYMVQKSGKTGTITYQRGILLPQKVWCASGRSKVIKGSLPLIGEADCLHEKYGGLNKSKPYYTGEHAKAIGNCPIWVKTPLKLANGTKYRPPAKLLKERGFFGAIAGFLEGGWEGMIAGWHGYTSHGAHGVAVAADLKSTQEAINKITKNLNSLSELEVKNLQRLSGAMDELHNEILELDEKVDDLRADTMSSQIELAVLLSNEGIINSEDEHLLALERKLKKMLGPSAVEIGNGCFETKHKCNQTCLDRIAAGTFDAGEFSLPTFDSLNITAASLNDDGLDNHTILLYYSTAASSLAVTLMIAIFVVYMVSRDNVSCSICL

SEQ ID NO: 28304 - protein, 585 aa, Artificial Sequence
  derived and/or modified protein sequence (wt) from hemagglutinin__InfluenzaB__AIC73861
MKAIIVLLMVVTSNADRICTGITSSNSPHVVKTATQGEVNVTGVIPLTTTPTKSHFANLKGTETRGKLCPKCLNCTDLDVALGRPKCTGKIPSARVSILHEVRPVTSGCFPIMHDRTKIRQLPNLLRGYEHIRLSTHNVINTENAPGGPYKIGTSGSCPNVTNGNGFFATMAWAVPKNDKNKTATNPLTIEVPYICTEGEDQITVWGFHSDNETQMAKLYGDSNPQKFTSSANGVTIHYVSQIGGFPNQTEDGGLPQSGRIVVDYMVQKSGKTGTITYQRGILLPQKVWCASGRSKVIKGSLPLIGEADCLHEKYGGLNKSKPYYTGEHAKAIGNCPIWVKTPLKLANGTKYRPPAKLLKERGFFGAIAGFLEGGWEGMIAGWHGYTSHGAHGVAVAADLKSTQEAINKITKNLNSLSELEVKNLQRLSGAMDELHNEILELDEKVDDLRADTISSQIELAVLLSNEGIINSEDEHLLALERKLKKMLGPSAVEIGNGCFETKHKCNQTCLDRIAAGTFDAGEFSLPTFDSLNITAASLNDDGLDNHTILLYYSTAASSLAVTLMIAIFVVYMVSRDNVSCSICL

SEQ ID NO: 28305 - protein, 585 aa, Artificial Sequence; identical to SEQ ID NO: 28303
  derived and/or modified protein sequence (wt) from hemagglutinin__InfluenzaB__AIC73862

SEQ ID NO: 28306 - protein, 585 aa, Artificial Sequence; identical to SEQ ID NO: 28303
  derived and/or modified protein sequence (wt) from hemagglutinin__InfluenzaB__AIC73863

SEQ ID NO: 28307 - protein, 585 aa, Artificial Sequence; identical to SEQ ID NO: 28303
  derived and/or modified protein sequence (wt) from hemagglutinin__InfluenzaB__AIC73864

SEQ ID NO: 28308 - protein, 584 aa, Artificial Sequence
  derived and/or modified protein sequence (wt) from hemagglutinin__InfluenzaB__AIC73865
MKAIIVLLMVVTSNADRICTGITSSNSPHVVKTATQGEVNVTGVIPLTTTPTKSYFANLKGTKTRGKLCPDCLNCTDLDVALGRPMCVGTTPSAKASILHEVRPVTSGCFPIMHDRTKIRQLANLLRGYENIRLSTQNVIDAEKAPGGPYRLGTSGSCPNATSKSGFFATMAWAVPKDNNKNATNPLTVEVPYICAEGEDQITVWGFHSDNKTQMKNLYGDSNPQKFTSSANGVTTHYVSQIGGFPDQREDGGLPQSGRIVVDYMMQKPGKTGTIVYQRGVLLPQKVWCASGRSKVIKGSLPLIGEADCLHEKYGGLNKSKPYYTGEHAKAIGNCPIWVKTPLKLANGTKYRPPAKLLKERGFFGAIAGFLEGGWEGMIAGWHGYTSHGAHGVAVAADLKSTQEAINKITKNLNSLSELEVKNLQRLSGAMDELHNEILELDEKVDDLRADTISSQIELAVLLSNEGIINSEDEHLLALERKLKKMLGPSAVDIGNGCFETKHKCNQTCLDRIAAGTFNAGEFSLPTFDSLNITAASLNDDGLDNHTILLYYSTAASSLAVTLMLAIFIVYMVSRDNVSCSICL

SEQ ID NO: 28309 - protein, 585 aa, Artificial Sequence
  derived and/or modified protein sequence (wt) from hemagglutinin__InfluenzaB__AIC73867
MKAIIVLLMVVTSNADRICTGITSSNSPHVVKTATQGEVNVTGVIPLTTTPTKSHFANLKGTETRGKLCPKCLNCTDLDVALGRPKCTGKIPSARVSILHEVRPVTSGCFPIMHDRTKIRQLPNLLRGYEHIRLSTHNVIDAENAPGGPYKIGTSGSCPNVTNGNGFFATMAWAVPKNDKNKTATNPLTIEVPYICTEGEDQITVWGFHSDNETQMAKLYGDSNPQKFTSSANGVTTHYVSQIGGFPNQTEDGGLPQSGRIVVDYMVQKSGKTGTITYQRGILLPQKVWCASGRSKVIKGSLPLIGEADCLHEKYGGLNKSKPYYTGEHAKAIGNCPIWVKTPLKLANGTKYRPPAKLLKERGFFGAIAGFLEGGWEGMIAGWHGYTSHGAHGVAVAADLKSTQEAINKITKNLNSLSELEVKNLQRLSGAMDELHNEILELDEKVDDLRADTISSQIELAVLLSNEGIINSEDEHLLALERKLKKMLGPSAVEIGNGCFETKHKCNQTCLDRIAAGTFDAGEFSLPTFDSLNITAASLNDDGLDNHTILLYYSTAASSLAVTLMIAIFVVYMVSRDNVSCSICL

SEQ ID NO: 28310 - protein, 585 aa, Artificial Sequence; identical to SEQ ID NO: 26887
  derived and/or modified protein sequence (wt) from hemagglutinin__InfluenzaB__AIC73868

SEQ ID NO: 28311 - protein, 585 aa, Artificial Sequence; identical to SEQ ID NO: 28303
  derived and/or modified protein sequence (wt) from hemagglutinin__InfluenzaB__AIC73869

SEQ ID NO: 28312 - protein, 585 aa, Artificial Sequence; identical to SEQ ID NO: 28303
  derived and/or modified protein sequence (wt) from hemagglutinin__InfluenzaB__AIC73870

SEQ ID NO: 28313 - protein, 585 aa, Artificial Sequence; identical to SEQ ID NO: 27865
  derived and/or modified protein sequence (wt) from hemagglutinin__InfluenzaB__AIC73871

SEQ ID NO: 28314 - protein, 584 aa, Artificial Sequence; identical to SEQ ID NO: 28289
  derived and/or modified protein sequence (wt) from hemagglutinin__InfluenzaB__AIC73872

SEQ ID NO: 28315 - protein, 584 aa, Artificial Sequence; identical to SEQ ID NO: 28129
  derived and/or modified protein sequence (wt) from hemagglutinin__InfluenzaB__AIC73873

SEQ ID NO: 28316 - protein, 584 aa, Artificial Sequence; identical to SEQ ID NO: 28289
  derived and/or modified protein sequence (wt) from hemagglutinin__InfluenzaB__AIC73874

SEQ ID NO: 28317 - protein, 584 aa, Artificial Sequence; identical to SEQ ID NO: 28308
  derived and/or modified protein sequence (wt) from hemagglutinin__InfluenzaB__AIC73875

SEQ ID NO: 28318 - protein, 584 aa, Artificial Sequence
  derived and/or modified protein sequence (wt) from hemagglutinin__InfluenzaB__AIC73876
MKAIIVLLMVVTSNADRICTGITSSNSPHVVKTATQGEVNVTGVIPLTTTPTKSYFANLKGTKTRGKLCPDCLNCTDLDVALGRPMCVGTTPSAKASILHEVRPVTSGCFPIMHDRTKIRQLANLLRGYENIRLSTQNVIDAEKAPGGPYRLGTSGSCPNATSKSGFFATMAWAVPKDNNKNATNPLTVEVPYICAEGEDQITVWGFHSDNKTQMKNLYGDSNPQKFTSSANGVTTHYVSQIGGFPDQREDGGLPQSGRIVVDYMMQKPGKTGTIVYQRGVLLPQKVWCASGRSKVIKGSLPLIGEADCLHEKYGGLNKSKPYYTGEHAKAIGNCPIWVKTPLKLANGTKYRPPAKLLKERGFFGAIAGFLEGGWEGMIAGWHGYTSHGAHGVAVAADLKSTQEAINKITKNLNSLSELEVKNLQRLSGAMDELHNEILELDEKVDDLRADTISSQIELAVLLSNEGIINSEDEHLLALERKLKKMLGPSAVDIGNGCFETKHKCNQTCLNRIAAGTFNAGEFSLPTFDSLNITAASLNDDGLDNHTILLYYSTAASSLAVTLMLAIFIVYMVSRDNVSCSICL

SEQ ID NO: 28319 - protein, 584 aa, Artificial Sequence; identical to SEQ ID NO: 28308
  derived and/or modified protein sequence (wt) from hemagglutinin__InfluenzaB__AIC73877

SEQ ID NO: 28320 - protein, 584 aa, Artificial Sequence; identical to SEQ ID NO: 28308
  derived and/or modified protein sequence (wt) from hemagglutinin__InfluenzaB__AIC73878

SEQ ID NO: 28321 - protein, 584 aa, Artificial Sequence; identical to SEQ ID NO: 28308
  derived and/or modified protein sequence (wt) from hemagglutinin__InfluenzaB__AIC73879

SEQ ID NO: 28322 - protein, 584 aa, Artificial Sequence; identical to SEQ ID NO: 28308
  derived and/or modified protein sequence (wt) from hemagglutinin__InfluenzaB__AIC73880

SEQ ID NO: 28323 - protein, 584 aa, Artificial Sequence; identical to SEQ ID NO: 28308
  derived and/or modified protein sequence (wt) from hemagglutinin__InfluenzaB__AIC73881

SEQ ID NO: 28324 - protein, 584 aa, Artificial Sequence; identical to SEQ ID NO: 28308
  derived and/or modified protein sequence (wt) from hemagglutinin__InfluenzaB__AIC73882

SEQ ID NO: 28325 - protein, 584 aa, Artificial Sequence; identical to SEQ ID NO: 28129
  derived and/or modified protein sequence (wt) from hemagglutinin__InfluenzaB__AIC73883

SEQ ID NO: 28326 - protein, 584 aa, Artificial Sequence; identical to SEQ ID NO: 28308
  derived and/or modified protein sequence (wt) from hemagglutinin__InfluenzaB__AIC73884

SEQ ID NO: 28327 - protein, 585 aa, Artificial Sequence
  derived and/or modified protein sequence (wt) from hemagglutinin__InfluenzaB__AIC73885
MEAIIVLLMVVTSNADRICTGITSSNSPHVVKTATQGEVNVTGVIPLTTTPTKSHFANLKGTETRGKLCPKCLNCTDLDVALGRPKCTGKIPSARVSILHEVRPVTSGCFPIMHDRTKIRQLPNLLRGYEHIRLSTHNVINAEDAPGGPYKIGTSGSCPNVTNGNGFFATMAWAVPKNDKNKTATNPLTIEVPYICTEGEDQITVWGFHSDNETQMAKLYGDSKPQKFTSSANGVTTHYVSQIGGFPNQTEDGGLPQSGRIVVDYMVQKSGKTGTITYQRGILLPQKVWCASGRSKVIKGSLPLIGEADCLHEKYGGLNKSKPYYTGEHAKAIGNCPIWVKTPLKLANGTKYRPPAKLLKERGFFGAIAGFLEGGWEGMIAGWHGYTSHGAHGVAVAADLKSTQEAINKITKNLNSLSELEVKNLQRLSGAMDELHNEILELDEKVDDLRADTISSQIELAVLLSNEGIINSEDEHLLALERKLKKMLGPSAVEIGNGCFETKHKCNQTCLDRIAAGTFDAGEFSLPTFDSLNITAASLNDDGLDNHTILLYYSTAASSLAVTLMIAIFVVYMVSRDNVSCSICL

SEQ ID NO: 28328 - protein, 585 aa, Artificial Sequence; identical to SEQ ID NO: 27865
  derived and/or modified protein sequence (wt) from hemagglutinin__InfluenzaB__AIC73886

SEQ ID NO: 28329 - protein, 585 aa, Artificial Sequence; identical to SEQ ID NO: 28309
  derived and/or modified protein sequence (wt) from hemagglutinin__InfluenzaB__AIC73887

SEQ ID NO: 28330 - protein, 584 aa, Artificial Sequence; identical to SEQ ID NO: 28129
  derived and/or modified protein sequence (wt) from hemagglutinin__InfluenzaB__AIC73888

SEQ ID NO: 28331 - protein, 584 aa, Artificial Sequence; identical to SEQ ID NO: 28289
  derived and/or modified protein sequence (wt) from hemagglutinin__InfluenzaB__AIC73889

SEQ ID NO: 28332 - protein, 584 aa, Artificial Sequence; identical to SEQ ID NO: 28289
  derived and/or modified protein sequence (wt) from hemagglutinin__InfluenzaB__AIC73890

SEQ ID NO: 28333 - protein, 585 aa, Artificial Sequence
  derived and/or modified protein sequence (wt) from hemagglutinin__InfluenzaB__AIC73892
MKAIIVLLMVVTSNADRICTGITSSNSPHVVKTATQGEVNVTGVIPLTTTPTKSHFANLKGTETRGKLCPKCLNCTDLDVALGRPKCTGKIPSARVSILHEVRPVTSGCFPIMHDRTKIRQLPNLLRGYEHIRLSTHNVINAEDAPGGPYKIGTSGSCPNVTNGNGFFATMAWAVPKNDKNKTATNPLTIEVPYICTEGEDQITVWGFHSDNETQMAKLYGDSKPQKFTSSANGVTTHYVSQIGGFPNQTEDGGLPQSGRIVVDYMVQKSGKTGTITYQRGILLPQKVWCASGRSKVIKGSLPLIGEADCLHEKYGGLNKSKPYYTGEHAKAIGNCPIWVKTSLKLANGTKYRPPAKLLKERGFFGAIAGFLEGGWEGMIAGWHGYTSHGAHGVAVAADLKSTQEAINKITKNLNSLSELEVKNLQRLSGAMDELHNEILELDEKVDDLRADTISSQIELAVLLSNEGIINSEDEHLLALERKLKKMLGPSAVEIGNGCFETKHKCNQTCLDRIAAGTFDAGEFSLPTFDSLNITAASLNDDGLDNHTILLYYSTAASSLAVTLMIAIFVVYMVSRDNVSCSICL

SEQ ID NO: 28334 - protein, 584 aa, Artificial Sequence; identical to SEQ ID NO: 28129
  derived and/or modified protein sequence (wt) from hemagglutinin__InfluenzaB__AIC73893

SEQ ID NO: 28335 - protein, 584 aa, Artificial Sequence; identical to SEQ ID NO: 28289
  derived and/or modified protein sequence (wt) from hemagglutinin__InfluenzaB__AIC73894

SEQ ID NO: 28336 - protein, 584 aa, Artificial Sequence; identical to SEQ ID NO: 28289
  derived and/or modified protein sequence (wt) from hemagglutinin__InfluenzaB__AIC73895

SEQ ID NO: 28337 - protein, 584 aa, Artificial Sequence; identical to SEQ ID NO: 28289
  derived and/or modified protein sequence (wt) from hemagglutinin__InfluenzaB__AIC73896

SEQ ID NO: 28338 - protein, 584 aa, Artificial Sequence; identical to SEQ ID NO: 28289
  derived and/or modified protein sequence (wt) from hemagglutinin__InfluenzaB__AIC73897

SEQ ID NO: 28339 - protein, 584 aa, Artificial Sequence; identical to SEQ ID NO: 28289
  derived and/or modified protein sequence (wt) from hemagglutinin__InfluenzaB__AIC73898

SEQ ID NO: 28340 - protein, 584 aa, Artificial Sequence; identical to SEQ ID NO: 28289
  derived and/or modified protein sequence (wt) from hemagglutinin__InfluenzaB__AIC73899

SEQ ID NO: 28341 - protein, 584 aa, Artificial Sequence; identical to SEQ ID NO: 28289
  derived and/or modified protein sequence (wt) from hemagglutinin__InfluenzaB__AIC73900

SEQ ID NO: 28342 - protein, 584 aa, Artificial Sequence; identical to SEQ ID NO: 28289
  derived and/or modified protein sequence (wt) from hemagglutinin__InfluenzaB__AIC73902

SEQ ID NO: 28343 - protein, 584 aa, Artificial Sequence
  derived and/or modified protein sequence (wt) from hemagglutinin__InfluenzaB__AIC73903
MKAIIVLLMVVTSNADRICTGITSSNSPHVVKTATQGEVNVTGVIPLTTTPTKSYFANLKGTRTRGKLCPDCLNCTDLDVALGRPMCVGTTPSAKASILHEVRPVTSGCFPIMHDRTKIRQLPNLLRGYEKIRLSTQNVIDAEKAPGGPYRLGTSGSCPNATSKIGFFATMAWAVPKDNYKNATNPQTVEVPYICTEGEDQITVWGFHSDNKTQMKSLYGDSNPQKFTSSANGITTHYVSQIGDFPDQTEDGGLPQSGRIVVDYMMQKPGKTGTIVYQRGVLLPQKVWCASGRSKVIKGSLPLIGEADCLHEEYGGLNKSKPYYTGKHAKAIGNCPIWVKTPLKLANGTKYRPPAKLLKERGFFGAIAGFLEGGWEGMIAGWHGYTSHGAHGVAVAADLKSTQEAINKITKNLNSLSELEVKNLQRLSGAMDELHNEILELDEKVDDLRADTISSQIELAVLLSNEGIINSEDEHLLALERKLKKMLGPSAVDIGNGCFETKHKCNQTCLDRIAAGTFNAGEFSLPTFDSLNITAASLNDDGLDNHTILLYYSTAASSLAVTLMLAIFIVYMVSRDNVSCSICL

SEQ ID NO: 28344 - protein, 584 aa, Artificial Sequence
  derived and/or modified protein sequence (wt) from hemagglutinin__InfluenzaB__AIC73904
MKAIIVLLMVVTSNADRICTGITSSNSPHVVKTATQGEVNVTGVIPLTTTPTKSYFANLKGTRTRGKLCPDCLNCTDLDVALGRPMCVGITPSAKASILHEVRPVTSGCFPIMHDRTKIRQLPNLLRGYEKIRLSTQNVIDAEKAPGGPYRLGTSGSCPNATSKIGFFATMAWAVPKDNYKNATNPQTVEVPYICTEGEDQITVWGFHSDNKTQMKSLYGDSNPQKFTSSANGVTTHYVSQIGDFPDQTEDGGLPQSGRIVVDYMMQKPGKTGTIVYQRGVLLPQKVWCASGRSKVIKGSLPLIGEADCLHEEYGGLNKSKPYYTGKHAKAIGNCPIWVKTPLKLANGTKYRPPAKLLKERGFFGAIAGFLEGGWEGMIAGWHGYTSHGAHGVAVAADLKSTQEAINKITKNLNSLSELEVKNLQRLSGAMDELHNEILELDEKVDDLRADTISSQIELAVLLSNEGIINSEDEHLLALERKLKKMLGPSAVDIGNGCFETKHKCNQTCLDRIAAGTFNAGEFSLPTFDSLNITAASLNDDGLDNHTILLYYSTAASSLAVTLMLAIFIVYMVSRDNVSCSICL

SEQ ID NO: 28345 - protein, 584 aa, Artificial Sequence; identical to SEQ ID NO: 28289
  derived and/or modified protein sequence (wt) from hemagglutinin__InfluenzaB__AIC73905

SEQ ID NO: 28346 - protein, 584 aa, Artificial Sequence; identical to SEQ ID NO: 28289
  derived and/or modified protein sequence (wt) from hemagglutinin__InfluenzaB__AIC73906

SEQ ID NO: 28347 - protein, 584 aa, Artificial Sequence; identical to SEQ ID NO: 28289
  derived and/or modified protein sequence (wt) from hemagglutinin__InfluenzaB__AIC73907

SEQ ID NO: 28348 - protein, 584 aa, Artificial Sequence; identical to SEQ ID NO: 28289
  derived and/or modified protein sequence (wt) from hemagglutinin__InfluenzaB__AIC73908

SEQ ID NO: 28349 - protein, 584 aa, Artificial Sequence; identical to SEQ ID NO: 28289
  derived and/or modified protein sequence (wt) from hemagglutinin__InfluenzaB__AIC73909

SEQ ID NO: 28350 - protein, 584 aa, Artificial Sequence; identical to SEQ ID NO: 28289
  derived and/or modified protein sequence (wt) from hemagglutinin__InfluenzaB__AIC73910

SEQ ID NO: 28351 - protein, 584 aa, Artificial Sequence; identical to SEQ ID NO: 28289
  derived and/or modified protein sequence (wt) from hemagglutinin__InfluenzaB__AIC73911

SEQ ID NO: 28352 - protein, 584 aa, Artificial Sequence; identical to SEQ ID NO: 28289
  derived and/or modified protein sequence (wt) from hemagglutinin__InfluenzaB__AIC73912

SEQ ID NO: 28353 - protein, 584 aa, Artificial Sequence; identical to SEQ ID NO: 28289
  derived and/or modified protein sequence (wt) from hemagglutinin__InfluenzaB__AIC73913

SEQ ID NO: 28354 - protein, 584 aa, Artificial Sequence; identical to SEQ ID NO: 28289
  derived and/or modified protein sequence (wt) from hemagglutinin__InfluenzaB__AIC73914

SEQ ID NO: 28355 - protein, 584 aa, Artificial Sequence; identical to SEQ ID NO: 28289
  derived and/or modified protein sequence (wt) from hemagglutinin__InfluenzaB__AIC73915

SEQ ID NO: 28356 - protein, 584 aa, Artificial Sequence; identical to SEQ ID NO: 28289
  derived and/or modified protein sequence (wt) from hemagglutinin__InfluenzaB__AIC73916

SEQ ID NO: 28357 - protein, 584 aa, Artificial Sequence; identical to SEQ ID NO: 28289
  derived and/or modified protein sequence (wt) from hemagglutinin__InfluenzaB__AIC73917

SEQ ID NO: 28358 - protein, 584 aa, Artificial Sequence; identical to SEQ ID NO: 28289
  derived and/or modified protein sequence (wt) from hemagglutinin__InfluenzaB__AIC73918

SEQ ID NO: 28359 - protein, 584 aa, Artificial Sequence; identical to SEQ ID NO: 28129
  derived and/or modified protein sequence (wt) from hemagglutinin__InfluenzaB__AIC73919

SEQ ID NO: 28360 - protein, 584 aa, Artificial Sequence; identical to SEQ ID NO: 28289
  derived and/or modified protein sequence (wt) from hemagglutinin__InfluenzaB__AIC73920

SEQ ID NO: 28361 - protein, 585 aa, Artificial Sequence; identical to SEQ ID NO: 27865
  derived and/or modified protein sequence (wt) from hemagglutinin__InfluenzaB__AIC73921

SEQ ID NO: 28362 - protein, 584 aa, Artificial Sequence; identical to SEQ ID NO: 28289
  derived and/or modified protein sequence (wt) from hemagglutinin__InfluenzaB__AIC73922

SEQ ID NO: 28363 - protein, 585 aa, Artificial Sequence; identical to SEQ ID NO: 26887
  derived and/or modified protein sequence (wt) from hemagglutinin__InfluenzaB__AIC73924

SEQ ID NO: 28364 - protein, 585 aa, Artificial Sequence
  derived and/or modified protein sequence (wt) from hemagglutinin__InfluenzaB__AIC73925
MKATIVLLMVVTSNADRICTGITSSNSPHVVKTATQGEVNVTGVIPLTTTPTKSHFANLKGTETRGKLCPKCLNCTDLDVALGRPKCTGKIPSARVSILHEVRPVTSGCFPIMHDRTKIRQLPNLLRGYEHIRLSTHNVINAEDAPGGPYKIGTSGSCPNVTNGNGFFATMAWAVPKNDKNKTATNPLTIEVPYICTEGEDQITVWGFHSDNETQMAKLYGDSKPQKFTSSANGVTTHYVSQIGGFPNQTEDGGLPQSGRIVVDYMVQKSGKTGTITYQRGILLPQKVWCASGRSKVIKGSLPLIGEADCLHEKYGGLNKSKPYYTGEHAKAIGNCPIWVKTPLKLANGTKYRPPAKLLKERGFFGAIAGFLEGGWEGMIAGWHGYTSHGAHGVAVAADLKSTQEAINKITKNLNSLSELEVKNLQRLSGAMDELHNEILELDEKVDDLRADTISSQIELAVLLSNEGIINSEDEHLLALERKLKKMLGPSAVEIGNGCFETKHKCNQTCLDRIAAGTFDAGEFSLPTFDSLNITAASLNDDGLDNHTILLYYSTAASSLAVTLMIAIFVVYMVSRDNVSCSICL

SEQ ID NO: 28365 - protein, 584 aa, Artificial Sequence; identical to SEQ ID NO: 28289
  derived and/or modified protein sequence (wt) from hemagglutinin__InfluenzaB__AIC73926

SEQ ID NO: 28366 - protein, 584 aa, Artificial Sequence; identical to SEQ ID NO: 26567
  derived and/or modified protein sequence (wt) from hemagglutinin__InfluenzaB__AIL94977

SEQ ID NO: 28367 - protein, 584 aa, Artificial Sequence; identical to SEQ ID NO: 26567
  derived and/or modified protein sequence (wt) from hemagglutinin__InfluenzaB__AIL94988

SEQ ID NO: 28368 - protein, 584 aa, Artificial Sequence
  derived and/or modified protein sequence (wt) from hemagglutinin__InfluenzaB__AIL94999
MKAIIVLLMVVTSNADRICTGITSSNSPHVVKTATQGEVNVTGVIPLTTTPTKSYFANLKGTRTRGKLCPDCLNCTDLDVALGRPMCVGTTPSAKASILHEVRPVTSGCFPIMHDRTKIRQLPNLLRGYENIRLSTQNVIDAEKAPGGPYRLGTSGSCPNATSKTGFFATMAWAVPKDNYKNATNPLTVEVPYICTEGEDQITVWGFHSDNKTQMKNLYGDSNPQKFTSSANGVTTHYVSQIGDFPDQTEDGGLPQSGRIVVDYMMQKPGKTGTIVYQRGVLLPQKVWCASGRSKVIKGSLPLIGEADCLHEKYGGLNKSKPYYTGEHAKAIGNCPIWVKTPLKLANGTKYRPPAKLLKERGFFGAIAGFLEGGWEGMIAGWHGYTSHGAHGVAVAADLKSTQEAINKITKNLNSLSELEVKNLQRLSGAMDELHNEILELDEKVDDLRADTISSQIELAVLLSNEGIINSEDEHLLALERKLKKMLGPSAVDIGNGCFETKHKCNQTCLDRIAAGTFNAGEFSLPTFDSLNITAASLNDDGLDNHTILLYYSTAASSLAVTLMLAIFIVYMVSRDNVSCSICL

SEQ ID NO: 28369 - protein, 584 aa, Artificial Sequence; identical to SEQ ID NO: 26567
  derived and/or modified protein sequence (wt) from hemagglutinin__InfluenzaB__AIL95010

SEQ ID NO: 28370 - protein, 584 aa, Artificial Sequence; identical to SEQ ID NO: 26820
  derived and/or modified protein sequence (wt) from hemagglutinin__InfluenzaB__AIL95021

SEQ ID NO: 28371 - protein, 585 aa, Artificial Sequence; identical to SEQ ID NO: 26648
  derived and/or modified protein sequence (wt) from hemagglutinin__InfluenzaB__AIL95032

SEQ ID NO: 28372 - protein, 584 aa, Artificial Sequence; identical to SEQ ID NO: 26820
  derived and/or modified protein sequence (wt) from hemagglutinin__InfluenzaB__AIL95043

SEQ ID NO: 28373 - protein, 585 aa, Artificial Sequence; identical to SEQ ID NO: 26694
  derived and/or modified protein sequence (wt) from hemagglutinin__InfluenzaB__AIL95054

SEQ ID NO: 28374 - protein, 585 aa, Artificial Sequence; identical to SEQ ID NO: 26648
  derived and/or modified protein sequence (wt) from hemagglutinin__InfluenzaB__AIL95065

SEQ ID NO: 28375 - protein, 585 aa, Artificial Sequence; identical to SEQ ID NO: 26645
  derived and/or modified protein sequence (wt) from hemagglutinin__InfluenzaB__AIL95076

SEQ ID NO: 28376 - protein, 585 aa, Artificial Sequence; identical to SEQ ID NO: 26648
  derived and/or modified protein sequence (wt) from hemagglutinin__InfluenzaB__AIL95087

SEQ ID NO: 28377 - protein, 584 aa, Artificial Sequence; identical to SEQ ID NO: 26820
  derived and/or modified protein sequence (wt) from hemagglutinin__InfluenzaB__AIL95098

SEQ ID NO: 28378 - protein, 585 aa, Artificial Sequence; identical to SEQ ID NO: 28159
  derived and/or modified protein sequence (wt) from hemagglutinin__InfluenzaB__AIL95109

SEQ ID NO: 28379 - protein, 585 aa, Artificial Sequence
  derived and/or modified protein sequence (wt) from hemagglutinin__InfluenzaB__AIL95120
MKAIIVLLMVVTSNADRICTGITSSNSPHVVKTATQGEVNVTGVIPLTTTPTKSHFANLKGTETRGKLCPKCLNCTDLDVALGRPKCTGKIPSARVSILHEVRPVTSGCFPIMHDRTKIRQLPNLLRGYEHIRLSTHNVINAENAPGGPYKIGTSGSCPNVTNGNGFFATMAWAVPKNDKNKTATNPLTIEVPYICTEGEDQITVWGFHSDNETQMAKLYGDSKPQKFTSSANGVTTHYVSQIGGFPNQTEDGGLPQSGRIVVDYMVQKSGKTGTITYQRGILLPQKVWCASGRSKVIKGSLPLIGEADCLHEKYGGLNKSKPYYTGEHAKAIGNCPIWVKTPLKLANGTKYRPPAKLLKERGFFGAIAGFLEGGWEGMIAGWHGYTSHGAHGVAVAADLKSTQEAINKITKNLNSLSELEVKNLQRLSGAMDELHNEILELDEKVDDLRADTISSQIELAVLLSNEGIINSEDEHLLALERKLKKMLGPSAVEIGNGCFETKHKCNQTCLDKIAAGTFDAGEFSLPTFDSLNITAASLNDDGLDNHTILLYYSTAASSLAVTLMIAIFVVYMVSRDNVSCSICL

SEQ ID NO: 28380 - protein, 584 aa, Artificial Sequence; identical to SEQ ID NO: 28289
  derived and/or modified protein sequence (wt) from hemagglutinin__InfluenzaB__AKA54644

SEQ ID NO: 28381 - protein, 584 aa, Artificial Sequence
  derived and/or modified protein sequence (wt) from hemagglutinin__InfluenzaB__AKA54645
MKAITVLLMVVTSNADRICTGITSSNSPHVVKTATQGEVNVTGVIPLTTTPTKSYFANLKGTRTRGKLCPDCLNCTDLDVALGRPMCVGTTPSAKASILHEVRPVTSGCFPIMHDRTKIRQLPNLLRGYEKIRLSTQNVIDAEKAPGGPYRLGTSGSCPNATSKIGFFATMAWAVPKDNYKNATNPLTVEVPYICTEGEDQITVWGFHSDNKTQMKSLYGDSNPQKFTSSADGVTTHYVSQIGDFPDQTEDGGLPQSGRIVVDYMMQKPGKTGTIVYQRGVLLPQKVWCASGRSKVIKGSLPLIGEADCLHEEYGGLNKSKPYYTGKHAKAIGNCPIWVKTPLKLANGTKYRPPAKLLKERGFFGAIAGFLEGGWEGMIAGWHGYTSHGAHGVAVAADLKSTQEAINKITKNLNSLSELEVKNLQRLSGAMDELHNEILELDEKVDDLRADTISSQIELAVLLSNEGIINSEDEHLLALERKLKKMLGPSAVDIGNGCFETKHKCNQTCLDRIAAGTFNAGEFSLPTFDSLNITAASLNDDGLDNHTILLYYSTAASSLAVTLMLAIFIVYMVSRDNVSCSICL

SEQ ID NO: 28382 - protein, 584 aa, Artificial Sequence; identical to SEQ ID NO: 28289
  derived and/or modified protein sequence (wt) from hemagglutinin__InfluenzaB__AKA54646

SEQ ID NO: 28383 - protein, 584 aa, Artificial Sequence; identical to SEQ ID NO: 28289
  derived and/or modified protein sequence (wt) from hemagglutinin__InfluenzaB__AKA54647

SEQ ID NO: 28384 - protein, 585 aa, Artificial Sequence; identical to SEQ ID NO: 26887
  derived and/or modified protein sequence (wt) from hemagglutinin__InfluenzaB__AKA54648

SEQ ID NO: 28385 - protein, 584 aa, Artificial Sequence
  derived and/or modified protein sequence (wt) from hemagglutinin__InfluenzaB__AKA54649
MKAIIVLLMVVTSNADRICTGITSSNSPHVVKTATQGEVNVTGVIPLTTTPTKSYFANLKGTRTRGKLCPDCLNCTDLDVALGRPMCVGTTPSAKASILHEVRPVTSGCFPIMHDRTKIRQLPNLLRGYEKIRLSTQNVIDAEKAPGGPYRLGTSGSCPNTTSKIGFFATMAWAVPKDNYKNATNPLTVEVPYICTEGEDQITVWGFHSDNKTQMKSLYGDSNPQKFTSSANGVTTHYVSQIGDFPDQTEDGGLPQSGRIVVDYMMQKPGKTGTIVYQRGVLLPQKVWCASGRSKVIKGSLPLIGEADCLHEEYGGLNKSKPYYTGKHAKAIGNCPIWVKTPLKLANGTKYRPPAKLLKERGFFGAIAGFLEGGWEGMIAGWHGYTSHGAHGVAVAADLKSTQEAINKITKNLNSLSELEVKNLQRLSGAMDELHNEILELDEKVDDLRADTISSQIELAVLLSNEGIINSEDEHLLALERKLKKMLGPSAVDIGNGCFETKHKCNQTCLDRIAAGTFNAGEFSLPTFDSLNITAASLNDDGLDNHTILLYYSTAASSLAVTLMLAIFIVYMVSRDNVSCSICL

SEQ ID NO: 28386 - protein, 584 aa, Artificial Sequence; identical to SEQ ID NO: 28289
  derived and/or modified protein sequence (wt) from hemagglutinin__InfluenzaB__AKU40581

SEQ ID NO: 28387 - protein, 584 aa, Artificial Sequence; identical to SEQ ID NO: 28289
  derived and/or modified protein sequence (wt) from hemagglutinin__InfluenzaB__AKU40592

SEQ ID NO: 28388 - protein, 584 aa, Artificial Sequence; identical to SEQ ID NO: 28129
  derived and/or modified protein sequence (wt) from hemagglutinin__InfluenzaB__AKU40603

SEQ ID NO: 28389 - protein, 584 aa, Artificial Sequence; identical to SEQ ID NO: 28289
  derived and/or modified protein sequence (wt) from hemagglutinin__InfluenzaB__AKU40614

SEQ ID NO: 28390 - protein, 584 aa, Artificial Sequence; identical to SEQ ID NO: 28129
  derived and/or modified protein sequence (wt) from hemagglutinin__InfluenzaB__AKU40625

SEQ ID NO: 28391 - protein, 584 aa, Artificial Sequence
  derived and/or modified protein sequence (wt) from hemagglutinin__InfluenzaB__AKU40636
MKAIIVLLMVVTSNADRICTGITSSNSPHVVKTATQGEVNVTGVIPLTTTPAKSYFANLKGTRTRGKLCPDCLNCTDLDVALGRPMCVGTTPSAKASILHEVRPVTSGCFPIMHDRTKIRQLPNLLRGYENIRLSTKNVIDAEKAPGGPYRLGTSGSCPNATSKIGFFATMAWAVPKDNYKNATNPLTVEVPYICKEGEDQITVWGFHSDNKTQMKNLYGDSNPQKFTSSANGVTTHYVSQIGDFPDQTEDGGLPQSGRIVVDYMMQKPGKTGTIVYQRGVLLPQKVWCASGRSKVIKGSLPLIGEADCLHEEYGGLNKSKPYYTGKHAKAIGNCPIWVKTPLKLANGTKYRPPAKLLKERGFFGAIAGFLEGGWEGMIAGWHGYTSHGAHGVAVAADLKSTQEAINKITKNLNSLSELEVKNLQRLSGAMDELHNEILELDEKVDDLRADTISSQIELAVLLSNEGIINSEDEHLLALERKLKKMLGPSAVDIGNGCFETKHKCNQTCLDRIAAGTFNAGEFSLPTFDSLNITAASLNDDGLDNHTILLYYSTAASSLAVTLMLAIFIVYMVSRDNVSCSICL

SEQ ID NO: 28392 - protein, 584 aa, Artificial Sequence
  derived and/or modified protein sequence (wt) from hemagglutinin__InfluenzaB__AKU40647
MKAIIVLLMVVTSNADRICTGITSSNSPHVVKTATQGEVNVTGVIPLTTTPTKSYFANLKGTRTRGKLCPDCLNCTDLDVALGRPMCVGTTPSAKASILHEVRPVTSGCFPIMHDRTKIRQLPNLLRGYEKIRLSTQNVIDAEKAPGGPYRLGTSGSCPNATSKIGFFATMAWAVPKDNYKNATNPQTVEIPYICTEGEDQITVWGFHSDNKTQMKSLYGDSNPQKFTSSANGVTTHYVSQIGDFPDQTEDGGLPQSGRIVVDYMMQKPGKTGTIVYQRGVLLPQKVWCASGRSKVIKGSLPLIGEADCLHEEYGGLNKSKPYYTGKHAKAIGNCPIWVKTPLKLANGTKYRPPAKLLKERGFFGAIAGFLEGGWEGMIAGWHGYTSHGAHGVAVAADLKSTQEAINKITKNLNSLSELEVKNLQRLSGAMDELHNEILELDEKVDDLRADTISSQIELAVLLSNEGIINSEDEHLLALERKLKKMLGPSAVDIGNGCFETKHKCNQTCLDRIAAGTFNAGEFSLPTFDSLNITAASLNDDGLDNHTILLYYSTAASSLAVTLMLAIFIVYMVSRDNVSCSICL

SEQ ID NO: 28393 - protein, 584 aa, Artificial Sequence; identical to SEQ ID NO: 28289
  derived and/or modified protein sequence (wt) from hemagglutinin__InfluenzaB__AKU40658

SEQ ID NO: 28394 - protein, 584 aa, Artificial Sequence; identical to SEQ ID NO: 28289
  derived and/or modified protein sequence (wt) from hemagglutinin__InfluenzaB__AKU40669

SEQ ID NO: 28395 - protein, 584 aa, Artificial Sequence; identical to SEQ ID NO: 28289
  derived and/or modified protein sequence (wt) from hemagglutinin__InfluenzaB__AKU40680

SEQ ID NO: 28396 - protein, 584 aa, Artificial Sequence
  derived and/or modified protein sequence (wt) from hemagglutinin__InfluenzaB__AKU40691
MKAIIVLLMVVTSNADRICTGITSSNSPHVVKTATQGEVNVTGVIPLTTTPTKSYFANLKGTRTRGKLCPDCLNCTDLDVALGRPMCVGTTPSAKASILHEVRPVTSGCFPIMHDRTKIRQLPNLLRGYEKIRLSTQNVIDAEKAPGGPYRLGTSGSCPNATSKIGFFATMAWAVPKDNYKNATNPQTVEVPYICTEGEDQITVWGFHSDNKTQMKSLYGDSNPQKFTSSANGVTTHYVSQIGDFPDQTEDGGLPQSGRIVVDYMMQKPGKTGTIVYQRGVLLPQKVWCASGRSKVIKGSLPLIGEADCLHEEYGGLNKSKPYYTGKHAKAIGNCPIWVKTPLKLANGTKYRPPAKLLKERGFFGAIAGFLEGGWEGMIAGWHGYTSHGAHGVAVAADLKSTQEAINKITKNLNSLSELEVKNLQRLSGAMDEFHNEILELDEKVDDLRADTISSQIELAVLLSNEGIINSEDEHLLALERKLKKMLGPSAVDIGNGCFETKHKCNQTCLDRIAAGTFNAGEFSLPTFDSLNITAASLNDDGLDNHTILLYYSTAASSLAVTLMLAIFIVYMVSRDNVSCSICL

SEQ ID NO: 28397 - protein, 584 aa, Artificial Sequence; identical to SEQ ID NO: 28289
  derived and/or modified protein sequence (wt) from hemagglutinin__InfluenzaB__AKU40702

SEQ ID NO: 28398 - protein, 584 aa, Artificial Sequence; identical to SEQ ID NO: 28289
  derived and/or modified protein sequence (wt) from hemagglutinin__InfluenzaB__AKU40713

SEQ ID NO: 28399 - protein, 584 aa, Artificial Sequence; identical to SEQ ID NO: 28129
  derived and/or modified protein sequence (wt) from hemagglutinin__InfluenzaB__AKU40724

SEQ ID NO: 28400 - protein, 584 aa, Artificial Sequence; identical to SEQ ID NO: 28392
  derived and/or modified protein sequence (wt) from hemagglutinin__InfluenzaB__AKU40735

SEQ ID NO: 28401 - protein, 584 aa, Artificial Sequence; identical to SEQ ID NO: 28289
  derived and/or modified protein sequence (wt) from hemagglutinin__InfluenzaB__AKU40746

SEQ ID NO: 28402 - protein, 584 aa, Artificial Sequence; identical to SEQ ID NO: 28289
  derived and/or modified protein sequence (wt) from hemagglutinin__InfluenzaB__AKU40757

SEQ ID NO: 28403 - protein, 584 aa, Artificial Sequence; identical to SEQ ID NO: 28289
  derived and/or modified protein sequence (wt) from hemagglutinin__InfluenzaB__AKU40768

SEQ ID NO: 28404 - protein, 584 aa, Artificial Sequence; identical to SEQ ID NO: 28289
  derived and/or modified protein sequence (wt) from hemagglutinin__InfluenzaB__AKU40779

SEQ ID NO: 28405 - protein, 584 aa, Artificial Sequence; identical to SEQ ID NO: 28129
  derived and/or modified protein sequence (wt) from hemagglutinin__InfluenzaB__AKU40790

SEQ ID NO: 28406 - protein, 584 aa, Artificial Sequence; identical to SEQ ID NO: 28289
  derived and/or modified protein sequence (wt) from hemagglutinin__InfluenzaB__AKU40801

SEQ ID NO: 28407 - protein, 584 aa, Artificial Sequence
  derived and/or modified protein sequence (wt) from hemagglutinin__InfluenzaB__AKU40812
MKAIIVLLMVVTSNADRICTGITSSNSPHVVKTATQGEVNVTGVIPLTTTPTKSYFANLKGTRTRGKLCPDCLNCTDLDVALGRPMCVGTTPSAKASILHEVRPVTSGCFPIMHDRTKIRQLPNLLRGYEKIRLSTQNVIDAEKAPGGPYRLGTSGSCPNATSKIGFFATMAWAVPKDNYKNATNPQTVEVPYICTEGEDQITVWGFHSDNKTQMKSLYGDSNPQKFTSSANGVTTHYVSQIGDFPDQTEDGGLPQSGRIVVDYMMQKPGKTGTIVYQRGVLLPQKVWCASGRSKVIKGSLPLIGEADCLHEEYGGLNKSKPYYTGKHAKAIGNCPIWVKTPLKLANGTKYRPPAKLLKERGFFGAIAGFLEGGWEGMIAGWHGYTSHGAHGVAVAADLKSTQEAINKITKNLNSLSELEVKNLQRLSGAMDELHNEILELDEKVDDLRADTISSQIELAVLLSNEGIINSEDEHLLALERKLKKMLGPSAVDIGNGCFETKHKCNQTCLDRIAAGTFNAGEFSLPTFDSLNITAASLNDDGLDSHTILLYYSTAASSLAVTLMLAIFIVYMVSRDNVSCSICL

SEQ ID NO: 28408 - protein, 584 aa, Artificial Sequence; identical to SEQ ID NO: 28289
  derived and/or modified protein sequence (wt) from hemagglutinin__InfluenzaB__AKU40823

SEQ ID NO: 28409 - protein, 584 aa, Artificial Sequence; identical to SEQ ID NO: 28289
  derived and/or modified protein sequence (wt) from hemagglutinin__InfluenzaB__AKU40834

SEQ ID NO: 28410 - protein, 584 aa, Artificial Sequence; identical to SEQ ID NO: 28289
  derived and/or modified protein sequence (wt) from hemagglutinin__InfluenzaB__AKU40845

SEQ ID NO: 28411 - protein, 584 aa, Artificial Sequence; identical to SEQ ID NO: 28289
  derived and/or modified protein sequence (wt) from hemagglutinin__InfluenzaB__AKU40856

SEQ ID NO: 28412 - protein, 584 aa, Artificial Sequence; identical to SEQ ID NO: 28289
  derived and/or modified protein sequence (wt) from hemagglutinin__InfluenzaB__AKU40867

SEQ ID NO: 28413 - protein, 584 aa, Artificial Sequence; identical to SEQ ID NO: 28289
  derived and/or modified protein sequence (wt) from hemagglutinin__InfluenzaB__AKU40878

SEQ ID NO: 28414 - protein, 585 aa, Artificial Sequence
  derived and/or modified protein sequence (wt) from hemagglutinin__InfluenzaB__AKU40889
MKAIIVLLMVVTSNADRICTGITSSNSPHVVKTATQGEVNVTGVIPLTTTPTKSHFANLKGTETRGKLCPKCLNCTDLDVALGRPKCTGKIPSARVSILHEVRPVTSGCFPIMHDRTKIRQLPNLLRGYEHIRLSTHNVINAEDAPGGPYKIGTSGSCPNVTNGNGFFATMAWAVPKNDKNKTATNPLTTEVPYICTEGEDQITVWGFHSDNETQMAKLYGDSKPQKFTSSANGVTTHYVSQIGGFPNQTEDGGLPQSGRIVVDYMVQKSGKTGTITYQRGILLPQKVWCASGRSKVIKGSLPLIGEADCLHEKYGGLNKSKPYYTGEHAKAIGNCPIWVKTPLKLANGTKYRPPAKLLKERGFFGAIAGFLEGGWEGMIAGWHGYTSHGAHGVAVAADLKSTQEAINKITKNLNSLSELEVKNLQRLSGAMDELHNEILELDEKVDDLRADTISSQIELAVLLSNEGIINSEDEHLLALERKLKKMLGPSAVEIGNGCFETKHKCNQTCLDRIAAGTFDAGEFSLPTFDSLNITAASLNDDGLDNHTILLYYSTAASSLAVTLMIAIFVVYMVSRDNVSCSICL

SEQ ID NO: 28415 - protein, 584 aa, Artificial Sequence; identical to SEQ ID NO: 28289
  derived and/or modified protein sequence (wt) from hemagglutinin__InfluenzaB__AKU40900

SEQ ID NO: 28416 - protein, 584 aa, Artificial Sequence; identical to SEQ ID NO: 28129
  derived and/or modified protein sequence (wt) from hemagglutinin__InfluenzaB__AKU40911

SEQ ID NO: 28417 - protein, 584 aa, Artificial Sequence
  derived and/or modified protein sequence (wt) from hemagglutinin__InfluenzaB__AKU40922
MKAIIVLLMVVTSNADRICTGITSSNSPHVVKTVTQGEVNVTGVIPLTTTPTKSYFANLKGTRTRGKLCPDCLNCTDLDVALGRPMCVGTTPSAKASILHEVRPVTSGCFPIMHDRTKIRQLPNLLRGYEKIRLSTQNVIDAEKAPGGPYRLGTSGSCPNATSKIGFFATMAWAVPKDNYKNATNPQTVEVPYICTEGEDQITVWGFHSDNKTQMKSLYGDSNPQKFTSSANGVTTHYVSQIGDFPDQTEDGGLPQSGRIVVDYMMQKPGKTGTIVYQRGVLLPQKVWCASGRSKVIKGSLPLIGEADCLHEEYGGLNKSKPYYTGKHAKAIGNCPIWVKTPLKLANGTKYRPPAKLLKERGFFGAIAGFLEGGWEGMIAGWHGYTSHGAHGVAVAADLKSTQEAINKITKNLNSLSELEVKNLQRLSGAMDELHNEILELDEKVDDLRADTISSQIELAVLLSNEGIINSEDEHLLALERKLKKMLGPSAVDIGNGCFETKHKCNQTCLDRIAAGTFNAGEFSLPTFDSLNITAASLNDDGLDNHTILLYYSTAASSLAVTLMLAIFIVYMVSRDNVSCSICL

SEQ ID NO: 28418 - protein, 584 aa, Artificial Sequence; identical to SEQ ID NO: 28392
  derived and/or modified protein sequence (wt) from hemagglutinin__InfluenzaB__AKU40933

SEQ ID NO: 28419 - protein, 584 aa, Artificial Sequence; identical to SEQ ID NO: 28289
  derived and/or modified protein sequence (wt) from hemagglutinin__InfluenzaB__AKU40944

SEQ ID NO: 28420 - protein, 584 aa, Artificial Sequence; identical to SEQ ID NO: 28289
  derived and/or modified protein sequence (wt) from hemagglutinin__InfluenzaB__AKU40955

SEQ ID NO: 28421 - protein, 584 aa, Artificial Sequence; identical to SEQ ID NO: 28289
  derived and/or modified protein sequence (wt) from hemagglutinin__InfluenzaB__AKU40966

SEQ ID NO: 28422 - protein, 584 aa, Artificial Sequence; identical to SEQ ID NO: 28289
  derived and/or modified protein sequence (wt) from hemagglutinin__InfluenzaB__AKU40977

SEQ ID NO: 28423 - protein, 584 aa, Artificial Sequence; identical to SEQ ID NO: 28289
  derived and/or modified protein sequence (wt) from hemagglutinin__InfluenzaB__AKU40987

SEQ ID NO: 28424 - protein, 584 aa, Artificial Sequence; identical to SEQ ID NO: 28289
  derived and/or modified protein sequence (wt) from hemagglutinin__InfluenzaB__AKU40998

SEQ ID NO: 28425 - protein, 584 aa, Artificial Sequence; identical to SEQ ID NO: 28289
  derived and/or modified protein sequence (wt) from hemagglutinin__InfluenzaB__AKU41009

SEQ ID NO: 28426 - protein, 584 aa, Artificial Sequence; identical to SEQ ID NO: 28289
  derived and/or modified protein sequence (wt) from hemagglutinin__InfluenzaB__AKU41020

SEQ ID NO: 28427 - protein, 584 aa, Artificial Sequence; identical to SEQ ID NO: 28289
  derived and/or modified protein sequence (wt) from hemagglutinin__InfluenzaB__ALA08485

SEQ ID NO: 28428 - protein, 584 aa, Artificial Sequence; identical to SEQ ID NO: 28289
  derived and/or modified protein sequence (wt) from hemagglutinin__InfluenzaB__ALA08486

SEQ ID NO: 28429 - protein, 584 aa, Artificial Sequence; identical to SEQ ID NO: 28289
  derived and/or modified protein sequence (wt) from hemagglutinin__InfluenzaB__ALA08487

SEQ ID NO: 28430 - protein, 584 aa, Artificial Sequence; identical to SEQ ID NO: 28289
  derived and/or modified protein sequence (wt) from hemagglutinin__InfluenzaB__ALA08564

SEQ ID NO: 28431 - protein, 584 aa, Artificial Sequence; identical to SEQ ID NO: 28289
  derived and/or modified protein sequence (wt) from hemagglutinin__InfluenzaB__ALA08565

SEQ ID NO: 28432 - protein, 584 aa, Artificial Sequence; identical to SEQ ID NO: 28289
  derived and/or modified protein sequence (wt) from hemagglutinin__InfluenzaB__ALA08566

SEQ ID NO: 28433 - protein, 584 aa, Artificial Sequence; identical to SEQ ID NO: 28289
  derived and/or modified protein sequence (wt) from hemagglutinin__InfluenzaB__ALA08567

SEQ ID NO: 28434 - protein, 584 aa, Artificial Sequence; identical to SEQ ID NO: 28289
  derived and/or modified protein sequence (wt) from hemagglutinin__InfluenzaB__ALA08568

SEQ ID NO: 28435 - protein, 584 aa, Artificial Sequence; identical to SEQ ID NO: 28289
  derived and/or modified protein sequence (wt) from hemagglutinin__InfluenzaB__ALA08569

SEQ ID NO: 28436 - protein, 585 aa, Artificial Sequence
  derived and/or modified protein sequence (wt) from hemagglutinin__InfluenzaB__ALA08689
MKAIIVLLMVVTSNADRICTGITSSNSPHVVKTATQGEVNVTGVIPLTTTPTKSHFANLKGTETRGKLCPKCPNCTDLDVALGRPKCTGKIPSARVSILHEVRPVTSGCFPIMHDRTKIRQLPNLLRGYEHIRLSTHNVINAENAPGGPYKIGTSGSCPNVTNGNGFFATMAWAVPKNDKNKTATNPLTIEVPYICTEGEDQITVWGFHSDNETQMAKLYGDSNPQKFTSSANGVTTHYVSQIGGFPNQTEDGGLPQSGRIVVDYMVQKSGKTGTITYQRGILLPQKVWCASGRSKVIKGSLPLIGEADCLHEKYGGLNKSKPYYTGEHAKAIGNCPIWVKTPLKLANGTKYRPPAKLLKERGFFGAIAGFLEGGWEGMIAGWHGYTSHGAHGVAVAADLKSTQEAINKITKNLNSLSELEVKNLQRLSGAMDELHNEILELDEKVDDLRADTISSQIELAVLLSNEGIINSEDEHLLALERKLKKMLGPSAVEIGNGCFETKHKCNQTCLDRIAAGTFDAGEFSLPTFDSLNITAASLNDDGLDNHTILLYYSTAASSLAVTLMIAIFVVYMVSRDNVSCSICL

SEQ ID NO: 28437 - protein, 585 aa, Artificial Sequence
  derived and/or modified protein sequence (wt) from hemagglutinin__InfluenzaB__ALA08690
MKAIIVLLMVVTSNADRICTGITSSNSPHVVKTATQGEVNVTGVIPLTTTPTKSHFANLKGTETRGKLCPKCLNCTDLDVALGRPKCTGKIPSARVSILHEVRPVTSGCFPIMHDRTKIRQLPNLLRGYEHIRLSTHNVINAEDAPGGPYKIGTSGSCPNITNGNGFFATMAWAVQKNDKNKTATNPLTIEVPYICTEGEDQITVWGFHSDNETQMAKLYGDSKPQKFTSSANGVTTHYVSQIGGFPNQTEDGGLPQSGRIVVDYMVQKSGKTGTITYQRGILLPQKVWCASGRSKVIKGSLPLIGEADCLHEKYGGLNKSKPYYTGEHAKAIGNCPIWVKTPLKLANGTKYRPPAKLLKERGFFGAIAGFLEGGWEGMIAGWHGYTSHGAHGVAVAADLKSTQEAINKITKNLNSLSELEVKNLQRLSGAMDELHNEILELDEKVDDLRADTISSQIELAVLLSNEGIINSEDEHLLALERKLKKMLGPSAVEIGNGCFETKHKCNQTCLDRIAAGTFDAGEFSLPTFDSLNITAASLNDDGLDDHTILLYYSTAASSLAVTLMIAIFVVYMVSRDNVSCSICL

SEQ ID NO: 28438 - protein, 584 aa, Artificial Sequence; identical to SEQ ID NO: 28289
  derived and/or modified protein sequence (wt) from hemagglutinin__InfluenzaB__ALE31766

SEQ ID NO: 28439 - protein, 585 aa, Artificial Sequence
  derived and/or modified protein sequence (wt) from hemagglutinin__InfluenzaB__ALE31768
MKAIIVLLMVVTSNADRICTGITSSNSPHVVKTATQGEVNVTGVIPLTTTPTKSHFANLKGTETRGKLCPKCLNCTDLDVALGRPKCTGKIPSARVSILHEVRPVTSGCFPIMHDRTKIRQLPNLLRGYEHIRLSTHNVINAEDAPGGPYKIGTSGSCPNITNGNGFFATMAWAVPKNDKNKTATNPLTIEVPYICTEGEDQITVWGFHSDNETQMAKLYGDSKPQKFTSSANGVTTHYVSQIGGFPNQTEDGGLPQSGRIVVDYMVQKSGKTGTITYQRGILLPQKVWCASGRSKVIKGSLPLIGEADCLHEKYGGLNKSKPYYTGEHAKAIGNCPIWVKTPLKLANGTKYRPPAKLLKERGFFGAIAGFLEGGWEGMIAGWHGYTSHGAHGVAVAADLKSTQEAINKITKNLNSLSELEVKNLQRLSGAMDELHNEILELDEKVDDLRADTISSQIELAVLLSNEGIINSEDEHLLALERKLKKMLGPSAVEIGNGCFETKHKCNQTCLDRIAAGTFDAGEFSLPTFDSLNITAASLNDDGLDNHTILLYYSTAASSLAVTLMIAIFVVYMVSRDNVSCSICL

SEQ ID NO: 28440 - protein, 585 aa, Artificial Sequence
  derived and/or modified protein sequence (wt) from hemagglutinin__InfluenzaB__ALE31770
MKAIIVLLMVVTSNADRICTGITSSNSPHVVKTATQGEVNVTGVIPLTTTPTKSHFANLKGTETRGKLCPKCLNCTDLDVALGRPKCTGKIPSARVSILHEVRPVTSGCFPIMHDRTKIRQLPNLLRGYEHISLSTHNVINAEDAPGGPYKIGTSGSCPNVTNGNGFFATMAWAVPKNDKNKTATNPLTIEVPYICTEGEDQITVWGFHSDNETQMAKLYGDSKPQKFTSSANGVTTHYVSQIGGFPNQTEDGGLPQSGRIVVDYMVQKSGKTGTITYQRGILLPQKVWCASGRSKVIKGSLPLIGEADCLHEKYGGLNKSKPYYTGEHAKAIGNCPIWVKTPLKLANGTKYRPPAKLLKERGFFGAIAGFLEGGWEGMIAGWHGYTSHGAHGVAVAADLKSTQEAINKITKNLNSLSELEVKNLQRLSGAMDELHNEILELDEKVDDLRADTISSQIELAVLLSNEGIINSEDEHLLALERKLKKMLGPSAVEIGNGCFETKHKCNQTCLDRIAAGTFDAGEFSLPTFDSLNITAASLNDDGLDNHTILLYYSTAASSLAVTLMIAIFVVYMVSRDNVSCSICL

SEQ ID NO: 28441 - protein, 584 aa, Artificial Sequence; identical to SEQ ID NO: 28289
  derived and/or modified protein sequence (wt) from hemagglutinin__InfluenzaB__ALE31772

SEQ ID NO: 28442 - protein, 584 aa, Artificial Sequence; identical to SEQ ID NO: 28289
  derived and/or modified protein sequence (wt) from hemagglutinin__InfluenzaB__ALE31773

SEQ ID NO: 28443 - protein, 584 aa, Artificial Sequence
  derived and/or modified protein sequence (wt) from hemagglutinin__InfluenzaB__ALE31884
MKAIIVLLMVVTSNADRICTGITSSNSPHVVKTATQGEVNVTGVIPLTTTPTKSYFANLKGTRTRGKLCPDCLNCTDLDVALGRPMCVGTTPSAKASILHEVRPVTSGCFPIMHDRTKIRQLPNLLRGYEKIRLSTQNVIDAEKAPGGPYRLGTSGSCPNATSKIGFFATMAWAVPKDNYKNATNPQTVEVPYICTEGEDQITVWGFHSDNKTQMKSLYGDSNPQKFTSSANGVTTHYVSQIGDFPDQTEDGGLPQSGRIVVDYMMQKPGKTGTIVYQRGVLLPQKVWCASGRSKVIKGSLPLIGEADCLHEEYGGLNKSKPYYTGKHAKAIGNCPIWVKTPLKLANGTKYRPPAKLLKERGFFGAIAGFLEGGWEGMIAGWHGYTSHGAHGVAVAADLKSTQEAINKITKNLNSLSELEVKNLQRLSGAMDELHNEILELDEKVDDLRADTISSQIELAVLLSNEGIINSEDEHLLALERKLKKMLGPSAVDIGNGCFETKHKCNQTCLDRIAAGTFNAGEFSLPTFDSLNITAASLNDDGLDNHTILLYYSTAASSLAVTLMLAIFIVYMVSRDNVSCSVCL

SEQ ID NO: 28444 - protein, 584 aa, Artificial Sequence
  derived and/or modified protein sequence (wt) from hemagglutinin__InfluenzaB__ALE31885
MKAIIVLLMVVTSNADRICTGITSSNSPHVVKTATQGEVNVTGVIPLTTTPTKSYFANLKGTRTRGKLCPDCLNCTDLDVALGRPMCVGTTPSAKASILHEVRPVTSGCFPIMHDRTKIRQLPNLLRGYEKIRLSTQNVIDAEKAPGGPYRLGTSGSCPNATSKIGFFATMAWAVPKDNYKNATNPQTVEVPYICTEGEDQITVWGFHSDNKTQMKSLYGDSNPQKFTSSANGVTTHYVSQIGDFPDQTEDGGLPQSGRIVVDYMMQKPGKTGTIVYQRGVLLPQKVWCASGRSKVIKGSLPLIGEADCLHEEYGGLNKSKPYYTGKHAKAIGNCPIWVKTPLKLANGTKYRPPAKLLKERGFFGAIAGFLEGGWEGMIAGWHGYTSHGAHGVAVAADLKSTQEAINKITKNLNSLSELEVKNLQRLSGAMDELHNEILELDEKVDDLRADTISSQIELAVLLSNEGIINSEDEHLLALERKLKKMLGPSAVDIGNGCFETKHKCNQTCLDRIAAGTFNAGEFSLPTFDSLNITAASLNDDGLDNHTILLYYSTAASSLAVTLMLAIFVVYMVSRDNVSCSICL

SEQ ID NO: 28445 - protein, 584 aa, Artificial Sequence; identical to SEQ ID NO: 28289
  derived and/or modified protein sequence (wt) from hemagglutinin__InfluenzaB__ALE31886

SEQ ID NO: 28446 - protein, 584 aa, Artificial Sequence
  derived and/or modified protein sequence (wt) from hemagglutinin__InfluenzaB__ALE31887
MKAIIVLLMVVTSNADRICTGITSSNSPHVVKTATQGEINVTGVIPLTTTPTKSYFANLKGTRTRGKLCPDCLNCTDLDVALGRPMCVGTTPSAKASILHEVRPVTSGCFPIMHDRTKIRQLPNLLRGYEKIRLSTQNVIDAEKAPGGPYRLGTSGSCPNATSKIGFFATMAWAVPKDNYKNATNPQTVEVPYICTEGEDQITVWGFHSDNKTQMKSLYGDSNPQKFTSSANGVTTHYVSQIGDFPDQTEDGGLPQSGRIVVDYMMQKPGKTGTIVYQRGVLLPQKVWCASGRSKVIKGSLPLIGEADCLHEEYGGLNKSKPYYTGKHAKAIGNCPIWVKTPLKLANGTKYRPPAKLLKERGFFGAIAGFLEGGWEGMIAGWHGYTSHGAHGVAVAADLKSTQEAINKITKNLNSLSELEVKNLQRLSGAMDELHNEILELDEKVDDLRADTISSQIELAVLLSNEGIINSEDEHLLALERKLKKMLGPSAVDIGNGCFETKHKCNQTCLDRIAAGTFNAGEFSLPTFDSLNITAASLNDDGLDNHTILLYYSTAASSLAVTLMLAIFIVYMVSRDNVSCSICL

SEQ ID NO: 28447 - protein, 584 aa, Artificial Sequence; identical to SEQ ID NO: 28289
  derived and/or modified protein sequence (wt) from hemagglutinin__InfluenzaB__ALE31982

SEQ ID NO: 28448 - protein, 584 aa, Artificial Sequence
  derived and/or modified protein sequence (wt) from hemagglutinin__InfluenzaB__ALE31983
MKAIIVLLMVVTSNADRICTGITSSNSPHVVKTATQGEVNVTGVIPLTTTPTKSYFANLKGTRTRGKLCPDCLNCTDLDVALGRPMCVGTTPSAKASILHEVRPVTSGCFPIMHDRTKIRQLPNLLRGYEKIRLSTQNVIDAEKAPGGPYRLGTSGSCPNATSKIGFFATMAWAVPKDNYKNATNPQTVEVPYICTEGEDQITVWGFHSDNKTQMKSLYGDSNPQKFTSSANGVTTHYVSQIGDFPDQTEDGGLPQSGRIVVDYMMQKPGKTGTIVYQRGVLLPQKVWCASGRSKVIKGSLPLIGEADCLHEEYGGLNKSKPYYTGKHAKAIGNCPIWVKTPLKLANGTKYRPPAKLLKERGFFGAIAGFLEGGWEGMIAGWHGYTSHGAHGVAVAADLKSTQEAINKITKNLNSLSELEVKNLQRLSGAMDELHNEILELDEKVDDLRADTISSQIELAVLLSNEGIINSEDEHLLALERKLKKMLGPSAVDIGNGCFETKHKCNQTCLDRIAAGTFNAGEFSLPTFDSLNITAASLNDDGLDNHTILLYYSTAASSLAVTLMLALFIVYMVSRDNVSCSICL

SEQ ID NO: 28449 - protein, 584 aa, Artificial Sequence
  derived and/or modified protein sequence (wt) from hemagglutinin__InfluenzaB__ALE31984
MKAIIVLLMVVTSNADRICTGITSSNSPHVVKTATQGEVNVTGVIPLTTTPTKSYFANLKGTRTRGKLCPDCLNCTDLDVALGRPMCVGTTPSAKASILHEVRPVTSGCFPIMHDRTKIRQLPNLLRGYEKIRLSTQNVIDAEKAPGGPYRLGTSGSCPNATSKIGFFATMAWAVPKDNYKNATNPQTVEVPYICTEEEDQITVWGFHSDNKTQMKSLYGDSNPQKFTSSANGVTTHYVSQIGDFPDQTEDGGLPQSGRIVVDYMVQKPGKTGTIVYQRGVLLPQKVWCASGRSKVIKGSLPLIGEADCLHEEYGGLNKSKPYYTGKHAKAIGNCPIWVKTPLKLANGTKYRPPAKLLKERGFFGAIAGFLEGGWEGMIAGWHGYTSHGAHGVAVAADLKSTQEAINKITKNLNSLSELEVKNLQRLSGAMDELHNEILELDEKVDDLRADTISSQIELAVLLSNEGIINSEDEHLLALERKLKKMLGPSAVDIGNGCFETKHKCNQTCLDRIAAGTFNAGEFSLPTFDSLNITAASLNDDGLDNHTILLYYSTAASSLAVTLMLAIFIVYMVSRDNVSCSICL

SEQ ID NO: 28450 - protein, 584 aa, Artificial Sequence; identical to SEQ ID NO: 28289
  derived and/or modified protein sequence (wt) from hemagglutinin__InfluenzaB__ALE31985

SEQ ID NO: 28451 - protein, 585 aa, Artificial Sequence
  derived and/or modified protein sequence (wt) from hemagglutinin__InfluenzaB__ALE31986
MKAIIVLLMVVTSNADRICTGITSSNSPHVVKTATQGEVNVTGVIPLTTTPTKSHFANLKGTETRGKLCPKCLNCTDLDVALGRPKCTGKIPSARVSILHEVRPVTSGCFPIMHDRTKIRQLPNLLRGYEHIRLSTHNVINAEDAPGGPYKIGTSGSCPNITNGNGFFATMAWAVPKNDKNKTATNPLTIEVPYICTEGEDQITVWGFHSDNETQMAKLYGDSKPQKFTSSANGVTTHYVSQIGGFPNQTEDGGLPQSGRIVIDYMVQKSGKTGTITYQRGILLPQKVWCASGRSKVIKGSLPLIGEADCLHEKYGGLNKSKPYYTGEHAKAVGNCPIWVKTPLKLANGTKYRPPAKLLKERGFFGAIAGFLEGGWEGMIAGWHGYTSHGAHGVAVAADLKSTQEAINKITKNLNSLSELEVKNLQRLSGAMDELHNEILELDEKVDDLRADTISSQIELAVLLSNEGIINSEDEHLLALERKLKKMLGPSAVEIGNGCFETKHKCNQTCLDRIAAGTFDAGEFSLPTFDSLNITAASLNDDGLDNHTILLYYSTAASSLAVTLMIAIFVVYMVSRDNVSCSICL

SEQ ID NO: 28452 - protein, 584 aa, Artificial Sequence
  derived and/or modified protein sequence (wt) from hemagglutinin__InfluenzaB__ALE31988
MKAIIVLLMVVTSNADRICTGITSSNSPHVVKTATQGEVNVTGVIPLTTTPTKSYFANLKGTRTRGKLCPDCLNCTDLDVALGRPMCVGTTPSAKASILHEVRPVTSGCFPIMHDRTKIRQLPNLLRGYEKIRLSTQNVIDAEKAPGGPYRLGTSGSCPNATSKIGFFATMAWAVPKDNYKNATNPQTVEVPYICTEGEDQITVWGFHSDNKTQMKSLYGDSNPQKFTSSANGVTTHYVSQIGDFPDQTEDGGLPQSGRIVVDYMVQKPGKTGTIVYQRGVLLPQKVWCASGRSKVIKGSLPLIGEADCLHEEYGGLNKSKPYYTGKHAKAIGNCPIWVKTPLKLANGTKYRPPAKLLKERGFFGAIAGFLEGGWEGMIAGWHGYTSHGAHGVAVAADLKSTQEAINKITKNLNSLSELEVKNLQRLSGAMDELHNEILELDEKVDDLRADTISSQIELAVLLSNEGIINSEDEHLLALERKLKKMLGPSAVDIGNGCFETKHKCNQTCLDRIAAGTFNAGEFSLPTFDSLNITAASLNDDGLDNHTILLYYSTAASSLAVTLMLAIFIVYMVSRDNVSCSICL

SEQ ID NO: 28453 - protein, 585 aa, Artificial Sequence; identical to SEQ ID NO: 28451
  derived and/or modified protein sequence (wt) from hemagglutinin__InfluenzaB__ALE31989

SEQ ID NO: 28454 - protein, 585 aa, Artificial Sequence; identical to SEQ ID NO: 28451
  derived and/or modified protein sequence (wt) from hemagglutinin__InfluenzaB__ALE31990

SEQ ID NO: 28455 - protein, 584 aa, Artificial Sequence; identical to SEQ ID NO: 28289
  derived and/or modified protein sequence (wt) from hemagglutinin__InfluenzaB__ALE31991

SEQ ID NO: 28456 - protein, 585 aa, Artificial Sequence
  derived and/or modified protein sequence (wt) from hemagglutinin__InfluenzaB__ALE31992
MKAIIVLLMVVTSNADRICTGITSSNSPHVVKTATQGEVNVTGVIPLTTTPTKSHFANLKGTETRGKLCPKCLNCTDLDVALGRPKCTGKIPSARVSILHEVRPVTSGCFPIMHDRTKIRQLPNLLRGYEHVRLSTHNVINAEDAPGGPYKIGTSGSCPNITNGNGFFATMAWAVPKNDKNKTATNPLTIEVPYICTEREDQITVWGFHSDNETQMAKLYGDSKPQKFTSSANGVTTHYVSQIGGFPNQTEDGGLPQSGRIVVDYMVQKSGKTGTITYQRGILLPQKVWCASGRSKVIKGSLPLIGEADCLHEKYGGLNKSKPYYTGEHAKAIGNCPIWVKTPLKLANGTKYRPPAKLLKERGFFGAIAGFLEGGWEGMIAGWHGYTSHGAHGVAVAADLKSTQEAINKITKNLNSLSELEVKNLQRLSGAMDELHNEILELDEKVDDLRADTISSQIELAVLLSNEGIINSEDEHLLALERKLKKMLGPSAVEIGNGCFETKHKCNQTCLDRIAAGTFDAGEFSLPTFDSLNITAASLNDDGLDNHTILLYYSTAASSLAVTLMIAIFVVYMVSRDNVSCSICL

SEQ ID NO: 28457 - protein, 585 aa, Artificial Sequence; identical to SEQ ID NO: 27865
  derived and/or modified protein sequence (wt) from hemagglutinin__InfluenzaB__ALE31993

SEQ ID NO: 28458 - protein, 585 aa, Artificial Sequence
  derived and/or modified protein sequence (wt) from hemagglutinin__InfluenzaB__ALE31994
MKAIIVLLMVVTSNADRICTGITSSNSPHVVKTATQGEVNVTGVIPLTTTPTKSHFANLKGTETRGKLCPKCLNCTDLDVALGRPKCTGKIPSARVSILHEVRPVTSGCFPIMHDRTKIRQLPNLLRGYEHVRLSTHNVINAEDAPGGPYKIGTSGSCPNITNGNGFFATMAWAVPKNDKNKTATNPLTIEVPYICTEGEDQITVWGFHSDNETQMAKLYGDSKPQKFTSSANGVTTHYVSQIGGFPNQTEDGGLPQSGRIVVDYMVQKSGKTGTITYQRGILLPQKVWCASGRSKVIKGSLPLIGEADCLHEKYGGLNKSKPYYTGEHAKAIGNCPIWVRTPLKLANGTKYRPPAKLLKERGFFGAIAGFLEGGWEGMIAGWHGYTSHGAHGVAVAADLKSTQEAINKITKNLNSLSELEVKNLQRLSGAMDELHNEILELDEKVDDLRADTISSQIELAVLLSNEGIINSEDEHLLALERKLKKMLGPSAVEIGNGCFETKHKCNQTCLDRIAAGTFDAGEFSLPTFDSLNITAASLNDDGLDNHTILLYYSTAASSLAVTLMIAIFVVYMVSRDNVSCSICL

SEQ ID NO: 28459 - protein, 584 aa, Artificial Sequence; identical to SEQ ID NO: 28448
  derived and/or modified protein sequence (wt) from hemagglutinin__InfluenzaB__ALN39719

SEQ ID NO: 28460 - protein, 584 aa, Artificial Sequence; identical to SEQ ID NO: 28289
  derived and/or modified protein sequence (wt) from hemagglutinin__InfluenzaB__ALN39720

SEQ ID NO: 28461 - protein, 584 aa, Artificial Sequence; identical to SEQ ID NO: 28289
  derived and/or modified protein sequence (wt) from hemagglutinin__InfluenzaB__ALN39721

SEQ ID NO: 28462 - protein, 584 aa, Artificial Sequence; identical to SEQ ID NO: 28289
  derived and/or modified protein sequence (wt) from hemagglutinin__InfluenzaB__ALN39723

SEQ ID NO: 28463 - protein, 584 aa, Artificial Sequence; identical to SEQ ID NO: 28289
  derived and/or modified protein sequence (wt) from hemagglutinin__InfluenzaB__ALN39724

SEQ ID NO: 28464 - protein, 584 aa, Artificial Sequence; identical to SEQ ID NO: 28452
  derived and/or modified protein sequence (wt) from hemagglutinin__InfluenzaB__ALN39725

SEQ ID NO: 28465 - protein, 584 aa, Artificial Sequence
  derived and/or modified protein sequence (wt) from hemagglutinin__InfluenzaB__ALN39726
MKAIIVLLMVVTSNADRICTGITSSNSPHVVKTATQGEVNVTGVIPLTTTPTKSYFANLKGTRTRGKLCPDCLNCTDLDVALGRPMCVGTTPSAKASILHEVRPVTSGCFPIMHDRTKIRQLPNLLRGYEKIRLSTQNVIDAEKAPGGPYRLGTSGSCPNATSKIGFFATMAWAVPKDNYKNATNPQTVEVPYICTEGEDQITVWGFHSDNKTQMKSLYGDSNPQKFTSSADGVTTHYVSQIGDFPDQTEDGGLPQSGRIVVDYMMQKPGKTGTIVYQRGVLLPQKVWCASGRSKVIKGSLPLIGEADCLHEEYGGLNKSKPYYTGKHAKAIGNCPIWVKTPLKLANGTKYRPPAKLLKERGFFGAIAGFLEGGWEGMIAGWHGYTSHGAHGVAVAADLKSTQEAINKITKNLNSLSELEVKNLQRLSGAMDELHNEILELDEKVDDLRADTISSQIELAVLLSNEGIINSEDEHLLALERKLKKMLGPSAVDIGNGCFETKHKCNQTCLDRIAAGTFNAGEFSLPTFDSLNITAASLNDDGLDNHTILLYYSTAASSLAVTLMLAIFIVYMVSRDNVSCSICL

SEQ ID NO: 28466 - protein, 584 aa, Artificial Sequence; identical to SEQ ID NO: 28452
  derived and/or modified protein sequence (wt) from hemagglutinin__InfluenzaB__ALN39727

SEQ ID NO: 28467 - protein, 584 aa, Artificial Sequence; identical to SEQ ID NO: 28289
  derived and/or modified protein sequence (wt) from hemagglutinin__InfluenzaB__ALN39728

SEQ ID NO: 28468 - protein, 584 aa, Artificial Sequence; identical to SEQ ID NO: 28289
  derived and/or modified protein sequence (wt) from hemagglutinin__InfluenzaB__ALN39729

SEQ ID NO: 28469 - protein, 585 aa, Artificial Sequence
  derived and/or modified protein sequence (wt) from hemagglutinin__InfluenzaB__ALN39730
MKAIIVLLMVVTSNADRICTGITSSNSPHVVKTATQGEVNVTGVIPLTTTPTKSHFANLKGTETRGKLCPKCLNCTDLDVALGRPKCTGKIPSARVSILHEVRPVTSGCFPIMHDRTKIRQLPNLLRGYEHVRLSTHNVINAEDAPGGPYKIGTSGSCPNITNGNGFFATMAWAVPKNDKNKTATNPLTIEVPYICTEGEDQITVWGFHSDNETQMAKLYGDSKPQKFTSSANGVTTHYVSQIGGFPNQTEDGGLPQSGRIVVDYMVQKSGKTGTITYQRGILLPQKVWCASGRSKVIKGSLPLIGEADCLHEKYGGLNKSKPYYTGEHAKAIGNCPIWVKTPLKLANGTKYRPPAKLLKERGFFGAIAGFLEGGWEGMIAGWHGYTSHGAHGVAVAADLKSTQEAINKITKNLNSLSELEVKNLQRLSGAMDELHNEILELDEKVDDLRADTISSQIELAVLLSNEGIINSEDEHLLALERKLKKMLGPSAVEIGNGCFETKHKCNQTCLDRIAAGTFDAGEFFLPTFDSLNITAASLNDDGLDNHTILLYYSTAASSLAVTLMIAIFVVYMVSRDNVSCSICL

SEQ ID NO: 28470 - protein, 584 aa, Artificial Sequence; identical to SEQ ID NO: 28289
  derived and/or modified protein sequence (wt) from hemagglutinin__InfluenzaB__ALN39732

SEQ ID NO: 28471 - protein, 584 aa, Artificial Sequence
  derived and/or modified protein sequence (wt) from hemagglutinin__InfluenzaB__ALN39733
MKAIIVLLMVVTSNADRICTGITSSNSPHVVKTATQGEVNVTGVIPLTTTPTKSYFANLKGTRTRGKLCPDCLNCTDLDVALGRPMCVGTTPSAKASILHEVRPVTSGCFPIMHDRTKIRQLPNLLRGYEKIRLSTQNVIDAEKAPGGPYRLGTSGSCPNATSKIGFFATMAWAVPKDNYKNATNPQTVEVPYICTEGEDQITVWGFHSDNKTQMKSLYGDSNPQKFTSSANGVTTHYVSQIGDFPDQTEDGGLPQSGRIVVDYMMQKPGKTGTIVYQRGVLLPQKVWCASGRSKVIKGSLPLIGEADCLHEEYGGLNKSKPYYTGKHAKAIGNCPIWVKTPLKLANGTKYRPPAKLLKERGFFGAIAGFLEGGWEGMIAGWHGYTSHGAHGVAVAADLKSTQEAINKITKNLNSLSELEVKNLQRLSGAMDELHNEILELDEKVDDLRADTISSQIELAVLLSNEGIINSEDEHLLALERKLKKMLGPSAVDIGNGCFETKHRCNQTCLDRIAAGTFNAGEFSLPTFDSLNITAASLNDDGLDNHTILLYYSTAASSLAVTLMLAIFIVYMVSRDNVSCSICL

SEQ ID NO: 28472 - protein, 584 aa, Artificial Sequence
  derived and/or modified protein sequence (wt) from hemagglutinin__InfluenzaB__ALN39751
MKAIIVLLMVVTSNADRICTGITSSNSPHVVKTATQGEVNVTGVIPLTTTPTKSYFANLKGTRTRGKLCPDCLNCTDLDVALGRPMCVGTTPSAKASILHEVRPVTSGCFPIMHDRTKIRQLPNLLRGYEKIRLSTQNVIDAEKAPGGPYRLGTSGSCPNATSKIGFFATMAWAVPKDNYKNATNPQTVEVPYICTEGEDQITVWGFHSDNKTQMKSLYGDSNPQKFTSSANGVTTHYVSQIGDFPDQTEDGGLPQSGRIVVDYMMQKPGKTGTIVYQRGVLLPQKVWCASGRSKVIKGSLPLIGEADCLHEEYGGLNKSKPYYTGKHAKAIGNCPIWVKTPLKLANGTKYRPPAKLLKERGFFGAIAGFLEGGWEGMVAGWHGYTSHGAHGVAVAADLKSTQEAINKITKNLNSLSELEVKNLQRLSGAMDELHNEILELDEKVDDLRADTISSQIELAVLLSNEGIINSEDEHLLALERKLKKMLGPSAVDIGNGCFETKHKCNQTCLDRIAAGTFNAGEFSLPTFDSLNITAASLNDDGLDNHTILLYYSTAASSLAVTLMLALFIVYMVSRDNVSCSICL

SEQ ID NO: 28473 - protein, 584 aa, Artificial Sequence; identical to SEQ ID NO: 28448
  derived and/or modified protein sequence (wt) from hemagglutinin__InfluenzaB__ALN39752

SEQ ID NO: 28474 - protein, 584 aa, Artificial Sequence; identical to SEQ ID NO: 28289
  derived and/or modified protein sequence (wt) from hemagglutinin__InfluenzaB__ALN39753

SEQ ID NO: 28475 - protein, 585 aa, Artificial Sequence
  derived and/or modified protein sequence (wt) from hemagglutinin__InfluenzaB__ALN39754
MKAIIVLLMVVTSNADRICTGITSSNSPHVVKTATQGEVNVTGVIPLTTTPTKSHFANLKGTETRGKLCPKCLNCTDLDVALGRPKCTGKIPSARVSILHEVRPVTSGCFPIMHDRTKIRQLPNLLRGYEHVRLSTHNVINAEDAPGGPYKIGTSGSCPNITNGNGFFATMAWAVPKNDKNKTATNPLTIEVPYICTEGEDQITVWGFHSDNETQMAKLYGDSKPQKFTSSANGVTTHYVSQIGGFPNQTEDGGLPQSGRIVVDYMVQKSGKTGTITYQRGILLPQKVWCASGRSKVIKGSLPLIGEADCLHEKYGGLNKSKPYYTGEHAKAIGNCPIWVKTPLKLANGTKYRPPAKLLKERGFFGAIAGFLEGGWEGMIAGWHGYTSHGAHGVAVAADLKSTQEAINKITKNLNSLSELEVKNLQRLSGAMDELHNEILELDEKVDDLRADTISSQIELAVLLSNEGIINSEDEHLLALERKLKKMLGPSAVEIGNGCFETKHKCNQTCLDRIAAGTFDAGEFSLPTFDSLNITAASLNDDGLDNHTILLYYSTAASSLAVTLMIAIFVVYMVSRDNVSCSICL

SEQ ID NO: 28476 - protein, 585 aa, Artificial Sequence
  derived and/or modified protein sequence (wt) from hemagglutinin__InfluenzaB__ALN39755
MKAIIVLLLVVTSNADRICTGITSSNSPHVVKTATQGEVNVTGVIPLTTTPTKSHFANLKGTETRGKLCPKCLNCTDLDVALGRPKCTGKIPSARVSILHEVRPVTSGCFPIMHDRTKIRQLPNLLRGYEHVRLSTHNVINAEDAPGGPYKIGTSGSCPNITNGNGFFATMAWAVPKNDKNKTATNPLTIEVPYICTEGEDQITVWGFHSDNETQMAKLYGDSKPQKFTSSANGVTTHYVSQIGGFPNQTEDGGLPQSGRIVVDYMVQKSGKTGTITYQRGILLPQKVWCASGRSKVIKGSLPLIGEADCLHEKYGGLNKSKPYYTGEHAKAIGNCPIWVKTPLKLANGTKYRPPAKLLKERGFFGAIAGFLEGGWEGMIAGWHGYTSHGAHGVAVAADLKSTQEAINKITKNLNSLSELEVKNLQRLSGAMDELHNEILELDEKVDDLRADTISSQIELAVLLSNEGIINSEDEHLLALERKLKKMLGPSAVEIGNGCFETKHKCNQTCLDRIAAGTFDAGEFSLPTFDSLNITAASLNDDGLDNHTILLYYSTAASSLAVTLMIAIFVVYMVSRDNVSCSICL

SEQ ID NO: 28477 - protein, 584 aa, Artificial Sequence
  derived and/or modified protein sequence (wt) from hemagglutinin__InfluenzaB__ALN39756
MKAIIVLLMVVTSNADRICTGITSSNSPHVVKTATQGEVNVTGVIPLTTTPTKSYFANLKGTRTRGKLCPDCLNCTDLDVALGRPMCVGTTPSAKASILHEVRPVTSGCFPIMHDRTKIRQLPNLLRGYEKIRLSTQNVIDAEKAPGGPYRLGTSGSCPNATSKIGFFATMAWAVPKDNYKNATNPQTVEVPYICTEGEDQITVWGFHSDNKTQMKSLYGDSNPQKFTSSANGVTTHYVSQIGDFPDQTEDGGLPQSGRIVVDYMMQKPGKTGTIVYQRGVLLPQKVWCASGRSKVIKGSLPLIGEADCLHEEYGGLNKSKPYYTGKHAKAIGNCPIWVKTPLKLANGTKYRPPAKLLKERGFFGAIAGFLEGGWEGMIAGWHGYTSHGAHGVAVAADLKSTQEAINKITKNLNSLSELEVKNLQRLSGAMDELHNEILELDEKVDDLRADTISSQIELAVLLSNEGIINSEDEHLLALERKLKKMLGPSAVDIGNGCFETKHKCNQTCLDRIAAGTFNVGEFSLPTFDSLNITAASLNDDGLDNHTILLYYSTAASSLAVTLMLAIFIVYMVSRDNVSCSICL

SEQ ID NO: 28478 - protein, 585 aa, Artificial Sequence; identical to SEQ ID NO: 28475
  derived and/or modified protein sequence (wt) from hemagglutinin__InfluenzaB__ALN39757

SEQ ID NO: 28479 - protein, 584 aa, Artificial Sequence; identical to SEQ ID NO: 28289
  derived and/or modified protein sequence (wt) from hemagglutinin__InfluenzaB__ALN39758

SEQ ID NO: 28480 - protein, 584 aa, Artificial Sequence
  derived and/or modified protein sequence (wt) from hemagglutinin__InfluenzaB__ALN39759
MKTIIVLLMVVTSNADRICTGITSSNSPHVVKTATQGEVNVTGVIPLTTTPTKSYFANLKGTRTRGKLCPDCLNCTDLDVALGRPMCVGTTPSAKASILHEVRPVTSGCFPIMHDRTKIRQLPNLLRGYEKIRLSTQNVIDAEKAPGGPYRLGTSGSCPNATSKIGFFATMAWAVPKDNYKNATNPQTVEVPYICTEGEDQITVWGFHSDNKTQMKSLYGDSNPQKFTSSANGVTTHYVSQIGDFPDQTEDGGLPQSGRIVVDYMMQKPGKTGTIVYQRGVLLPQKVWCASGRSKVIKGSLPLIGEADCLHEEYGGLNKSKPYYTGKHAKAIGNCPIWVKTPLKLANGTKYRPPAKLLKERGFFGAIAGFLEGGWEGMIAGWHGYTSHGAHGVAVAADLKSTQEAINKITKNLNSLSELEVKNLQRLSGAMDELHNEILELDEKVDDLRADTISSQIELAVLLSNEGIINSEDEHLLALERKLKKMLGPSAVDIGNGCFETKHKCNQTCLDRIAAGTFNAGEFSLPTFDSLNITAASLNDDGLDNHTILLYYSTAASSLAVTLMLAIFIVYMVSRDNVSCSICL

SEQ ID NO: 28481 - protein, 585 aa, Artificial Sequence; identical to SEQ ID NO: 28439
  derived and/or modified protein sequence (wt) from hemagglutinin__InfluenzaB__ALN39760

SEQ ID NO: 28482 - protein, 584 aa, Artificial Sequence; identical to SEQ ID NO: 28289
  derived and/or modified protein sequence (wt) from hemagglutinin__InfluenzaB__ALN39761

SEQ ID NO: 28483 - protein, 584 aa, Artificial Sequence; identical to SEQ ID NO: 28289
  derived and/or modified protein sequence (wt) from hemagglutinin__InfluenzaB__ALN39762

SEQ ID NO: 28484 - protein, 584 aa, Artificial Sequence; identical to SEQ ID NO: 28289
  derived and/or modified protein sequence (wt) from hemagglutinin__InfluenzaB__ALN39763

SEQ ID NO: 28485 - protein, 585 aa, Artificial Sequence; identical to SEQ ID NO: 28475
  derived and/or modified protein sequence (wt) from hemagglutinin__InfluenzaB__ALN39764

SEQ ID NO: 28486 - protein, 584 aa, Artificial Sequence
  derived and/or modified protein sequence (wt) from hemagglutinin__InfluenzaB__ALN39765
MKAIIVLLMVVTSNADRICTGITSSNSPHVVKTATQGEVNVTGVIPLTTTPTKSYFANLKGTRTRGKLCPDCLNCTDLDVALGRPMCVGTTPSAKASILHEVRPVTSGCFPIMHDRTKIRQLPNLLRGYEKIRLSTQNVIDAEKAPGGPYRLGTSGSCPNATSKIGFFATMAWAVPKDNYKNATNPQTVEVPYICTEGEDQITVWGFHSDNKTQMKSLYGDSNPQKFTSSANGVTTHYVSQIGDFPDQTEDGGLPQSGRIVVDYMMQKPGKTGTIVYQRGVLLPQKVWCASGRSKVIKGSLPLIGEADCLHEEYGGLNKSKPYYTGKHAKAIGNCPIWVKTPLKLANGTKYRPPAKLLKERGFFGAIAGFLEGGWEGMIAGWHGYTSHGAHGVAVAADLKSTQEAINKITKNLNSLSELEVNNLQRLSGAMDELHNEILELDEKVDDLRADTISSQIELAVLLSNEGIINSEDEHLLALERKLKKMLGPSAVDIGNGCFETKHKCNQTCLDRIAAGTFNAGEFSLPTFDSLNITAASLNDDGLDNHTILLYYSTAASSLAVTLMLALFIVYMVSRDNVSCSICL

SEQ ID NO: 28487 - protein, 584 aa, Artificial Sequence; identical to SEQ ID NO: 28452
  derived and/or modified protein sequence (wt) from hemagglutinin__InfluenzaB__ALN39766

SEQ ID NO: 28488 - protein, 584 aa, Artificial Sequence; identical to SEQ ID NO: 28289
  derived and/or modified protein sequence (wt) from hemagglutinin__InfluenzaB__ALN39767

SEQ ID NO: 28489 - protein, 584 aa, Artificial Sequence; identical to SEQ ID NO: 28452
  derived and/or modified protein sequence (wt) from hemagglutinin__InfluenzaB__ALN39768

SEQ ID NO: 28490 - protein, 584 aa, Artificial Sequence
  derived and/or modified protein sequence (wt) from hemagglutinin__InfluenzaB__ALN39769
MKAIIVLLMVVTSNADRICTGITSSNSPHVVKTATQGEVNVTGVIPLTTTPTKSYFANLKGTRTRGKLCPDCLNCTDLDVALGRPMCVGTTPSAKASILHEVRPVTSGCFPIMHGRTKIRQLPNLLRGYEKIRLSTQNVIDAEKAPGGPYRLGTSGSCPNATSKIGFFATMAWAVPKDNYKNATNPQTVEVPYICTEGEDQITVWGFHSDNKTQMKSLYGDSNPQKFTSSANGVTTHYVSQIGDFPDQTEDGGLPQSGRIVVDYMMQKPGKTGTIVYQRGVLLPQKVWCASGRSKVIKGSLPLIGEADCLHEEYGGLNKSKPYYTGKHAKAIGNCPIWVKTPLKLANGTKYRPPAKLLKERGFFGAIAGFLEGGWEGMIAGWHGYTSHGAHGVAVAADLKSTQEAINKITKNLNSLSELEVKNLQRLSGAMDELHNEILELDEKVDDLRADTISSQIELAVLLSNEGIINSEDEHLLALERKLKKMLGPSAVDIGNGCFETKHKCNQTCLDRIAAGTFNAGEFSLPTFDSLNITAASLNDDGLDNHTILLYYSTAASSLAVTLMLAIFIVYMVSRDNVSCSICL

SEQ ID NO: 28491 - protein, 584 aa, Artificial Sequence; identical to SEQ ID NO: 28448
  derived and/or modified protein sequence (wt) from hemagglutinin__InfluenzaB__ALN39770

SEQ ID NO: 28492 - protein, 584 aa, Artificial Sequence; identical to SEQ ID NO: 28448
  derived and/or modified protein sequence (wt) from hemagglutinin__InfluenzaB__ALN39771

SEQ ID NO: 28493 - protein, 584 aa, Artificial Sequence; identical to SEQ ID NO: 28289
  derived and/or modified protein sequence (wt) from hemagglutinin__InfluenzaB__ALN39773

SEQ ID NO: 28494 - protein, 584 aa, Artificial Sequence; identical to SEQ ID NO: 28289
  derived and/or modified protein sequence (wt) from hemagglutinin__InfluenzaB__ALN39774

SEQ ID NO: 28495 - protein, 585 aa, Artificial Sequence
  derived and/or modified protein sequence (wt) from hemagglutinin__InfluenzaB__ALN39775
MQAIIVLLMVVTSNADRICTGITSSNSPHVVKTATQGEVNVTGVIPLTTTPTKSHFANLKGTETRGKLCPKCLNCTDLDVALGRPKCTGKIPSARVSILHEVRPVTSGCFPIMHDRTKIRQLPNLLRGYEHIRLSTHNVINAEDAPGGPYKIGTSGSCPNITNGNGFFATMAWAVPKNDKNKTATNPLTIEVPYICTEGEDQITVWGFHSDNETQMAKLYGDSKPQKFTSSANGVTTHYVSQIGGFPNQTEDGGLPQSGRIVIDYMVQKSGKTGTITYQRGILLPQKVWCVSGRSKVIKGSLPLIGEADCLHEKYGGLNKSKPYYTGEHAKAVGNCPIWVKTPLKLANGTKYRPPAKLLKERGFFGAIAGFLEGGWEGMIAGWHGYTSHGAHGVAVAADLKSTQEAINKITKNLNSLSELEVKNLQRLSGAMDELHNEILELDEKVDDLRADTISSQIELAVLLSNEGIINSEDEHLLALERKLKKMLGPSAVEIGNGCFETKHKCNQTCLDRIAAGTFDAGEFSLPTFDSLNITAASLNDDGLDNHTILLYYSTAASSLAVTLMIAIFVVYMVSRDNVSCSICL

SEQ ID NO: 28496 - protein, 584 aa, Artificial Sequence
  derived and/or modified protein sequence (wt) from hemagglutinin__InfluenzaB__ALN39776
MKAIIILLMVVTSNADRICTGITSSNSPHVVKTATQGEVNVTGVIPLTTTPTKSYFANLKGTRTRGKLCPDCLNCTDLDVALGRPMCVGTTPSAKASILHEVRPVTSGCFPIMHDRTKIRQLPNLLRGYEKIRLSTQNVIDAEKAPGGPYRLGTSGSCPNATSKIGFFATMAWAVPKDNYKNATNPQTVEVPYICTEGEDQITVWGFHSDNKTQMKSLYGDSNPQKFTSSANGVTTHYVSQIGDFPDQTEDGGLPQSGRIVVDYMMQKPGKTGTIVYQRGVLLPQKVWCASGRSKVIKGSLPLIGEADCLHEEYGGLNKSKPYYTGKHAKAIGNCPIWVKTPLKLANGTKYRPPAKLLKERGFFGAIAGFLEGGWEGMIAGWHGYTSHGAHGVAVAADLKSTQEAINKITKNLNSLSELEVKNLQRLSGAMDELHNEILELDEKVDDLRADTISSQIELAVLLSNEGIINSEDEHLLALERKLKKMLGPSAVDIGNGCFETKHKCNQTCLDRIAAGTFNAGEFSLPTFDSLNITAASLNDDGLDNHTILLYYSTAASSLAVTLMLAIFIVYMVSRDNVSCSICL

SEQ ID NO: 28497 - protein, 584 aa, Artificial Sequence; identical to SEQ ID NO: 28452
  derived and/or modified protein sequence (wt) from hemagglutinin__InfluenzaB__ALN39778

SEQ ID NO: 28498 - protein, 585 aa, Artificial Sequence; identical to SEQ ID NO: 28475
  derived and/or modified protein sequence (wt) from hemagglutinin__InfluenzaB__ALN39779

SEQ ID NO: 28499 - protein, 584 aa, Artificial Sequence; identical to SEQ ID NO: 28289
  derived and/or modified protein sequence (wt) from hemagglutinin__InfluenzaB__ALN39780

SEQ ID NO: 28500 - protein, 585 aa, Artificial Sequence; identical to SEQ ID NO: 28475
  derived and/or modified protein sequence (wt) from hemagglutinin__InfluenzaB__ALN39781

SEQ ID NO: 28501 - protein, 585 aa, Artificial Sequence; identical to SEQ ID NO: 28439
  derived and/or modified protein sequence (wt) from hemagglutinin__InfluenzaB__ALN39782

SEQ ID NO: 28502 - protein, 584 aa, Artificial Sequence
  derived and/or modified protein sequence (wt) from hemagglutinin__InfluenzaB__ALN39783
MKAIIVLLMVVTSNADRICTGITSSNSPHVVKTATQGEVNVTGVIPLTTTPTKSYFANLKGTRTRGKLCPDCLNCTDLDVALGRPMCVGTTPSAKASILHEVRPVTSGCFPIMHDRTKIRQLPNLLRGYEKIRLSTQNVIDAEKAPGGPYRLGTSGSCPNATSKIGFFATMAWAVPKDNYKNATNLQTVEVPYICTEGEDQITVWGFHSDNKTQMKSLYGDSNPQKFTSSANGVTTHYVSQIGDFPDQTEDGGLPQSGRIVVDYMVQKPGKTGTIVYQRGVLLPQKVWCASGRSKVIKGSLPLIGEADCLHEEYGGLNKSKPYYTGKHAKAIGNCPIWVKTPLKLANGTKYRPPAKLLKERGFFGAIAGFLEGGWEGMIAGWHGYTSHGAHGVAVAADLKSTQEAINKITKNLNSLSELEVKNLQRLSGAMDELHNEILELDEKVDDLRADTISSQIELAVLLSNEGIINSEDEHLLALERKLKKMLGPSAVDIGNGCFETKHKCNQTCLDRIAAGTFNAGEFSLPTFDSLNITAASLNDDGLDNHTILLYYSTAASSLAVTLMLAIFIVYMVSRDNVSCSICL

SEQ ID NO: 28503 - protein, 585 aa, Artificial Sequence; identical to SEQ ID NO: 28451
  derived and/or modified protein sequence (wt) from hemagglutinin__InfluenzaB__ALN39784

SEQ ID NO: 28504 - protein, 585 aa, Artificial Sequence; identical to SEQ ID NO: 28475
  derived and/or modified protein sequence (wt) from hemagglutinin__InfluenzaB__ALN39785

SEQ ID NO: 28505 - protein, 584 aa, Artificial Sequence; identical to SEQ ID NO: 28289
  derived and/or modified protein sequence (wt) from hemagglutinin__InfluenzaB__ALN39786

SEQ ID NO: 28506 - protein, 585 aa, Artificial Sequence; identical to SEQ ID NO: 28475
  derived and/or modified protein sequence (wt) from hemagglutinin__InfluenzaB__ALN39787

SEQ ID NO: 28507 - protein, 585 aa, Artificial Sequence; identical to SEQ ID NO: 28475
  derived and/or modified protein sequence (wt) from hemagglutinin__InfluenzaB__ALN39788

SEQ ID NO: 28508 - protein, 584 aa, Artificial Sequence
  derived and/or modified protein sequence (wt) from hemagglutinin__InfluenzaB__ALN39790
MKAIIVLLMVVTSDADRICTGITSSNSPHVVKTATQGEVNVTGVIPLTTTPTKSYFANLKGTRTRGKLCPDCLNCTDLDVALGRPMCVGTTPSAKASILHEVRPVTSGCFPIMHDRTKIRQLPNLLRGYEKIRLSTQNVIDAEKAPGGPYRLGTSGSCPNATSKIGFFATMAWAVPKDNYKNATNPQTVEVPYICTEGEDQITVWGFHSDNKTQMKSLYGDSNPQRFTSSANGVTTHYVSQIGDFPDQTEDGGLPQSGRIVVDYMVQKPGKTGTIVYQRGVLLPQKVWCASGRSKVIKGSLPLIGEADCLHEEYGGLNKSKPYYTGKHAKAIGNCPIWVKTPLKLANGTKYRPPAKLLKERGFFGAIAGFLEGGWEGMIAGWHGYTSHGAHGVAVAADLKSTQEAINKITKNLNSLSELEVKNLQRLSGAMDELHNEILELDEKVDDLRADTISSQIELAVLLSNEGIINSEDEHLLALERKLKKMLGPSAVDIGNGCFETKHKCNQTCLDRIAAGTFNAGEFSLPTFDSLNITAASLNDDGLDNHTILLYYSTAASSLAVTLMLAIFIVYMVSRDNVSCSICL

SEQ ID NO: 28509 - protein, 584 aa, Artificial Sequence
  derived and/or modified protein sequence (wt) from hemagglutinin__InfluenzaB__ALN39791
MKAIIVLLMVVMSNADRICTGITSSNSPHVVKTATQGEVNVTGVIPLTTTPTKSYFANLKGTRTRGKLCPDCLNCTDLDVALGRPMCVGTTPSAKASILHEVRPVTSGCFPIMHDRTKIRQLPNLLRGYEKIRLSTQNVIDAEKAPGGPYRLGTSGSCPNATSKIGFFATMAWAVPKDNYKNATNPQTVEVPYICTEGEDQITVWGFHSDNKTQMKSLYGDSNPQKFTSSANGVTTHYVSQIGDFPDQTEDGGLPQSGRIVVDYMVQKPGKTGTIVYQRGVLLPQKVWCASGRSKVIKGSLPLIGEADCLHEEYGGLNKSKPYYTGKHAKAIGNCPIWVKTPLKLANGTKYRPPAKLLKERGFFGAIAGFLEGGWEGMIAGWHGYTSHGAHGVAVAADLKSTQEAINKITKNLNSLSELEVKNLQRLSGAMDELHNEILELDEKVDDLRADTISSQIELAVLLSNEGIINSEDEHLLALERKLKKMLGPSAVDIGNGCFETKHKCNQTCLDRIAAGTFNAGEFSLPTFDSLNITAASLNDDGLDNHTILLYYSTAASSLAVTLMLAIFIVYMVSRDNVSCSICL

SEQ ID NO: 28510 - protein, 585 aa, Artificial Sequence; identical to SEQ ID NO: 28475
  derived and/or modified protein sequence (wt) from hemagglutinin__InfluenzaB__ALN39792

SEQ ID NO: 28511 - protein, 585 aa, Artificial Sequence; identical to SEQ ID NO: 28475
  derived and/or modified protein sequence (wt) from hemagglutinin__InfluenzaB__ALN39793

SEQ ID NO: 28512 - protein, 584 aa, Artificial Sequence
  derived and/or modified protein sequence (wt) from hemagglutinin__InfluenzaB__ALN39794
MKAIIILLMVVTSNADRICTGITSSNSPHVVKTATQGEVNVTGVIPLTTTPTKSYFANLKGTRTRGKLCPDCLNCTDLDVALGRPMCVGTTPSAKASILHEVRPVTSGCFPIMHDRTKIRQLPNLLRGYEKIRLSTQNVIDAEKAPGGPYRLGTSGSCPNATSKIGFFATMAWAVPKDNYKNATNPQTVEVPYICTEGEDQITVWGFHSDNKTQMKSLYGDSNPQKFTSSADGVTTHYVSQIGDFPDQTEDGGLPQSGRIVVDYMMQKPGKTGTIVYQRGVLLPQKVWCASGRSKVIKGSLPLIGEADCLHEEYGGLNKSKPYYTGKHAKAIGNCPIWVKTPLKLANGTKYRPPAKLLKERGFFGAIAGFLEGGWEGMIAGWHGYTSHGAHGVAVAADLKSTQEAINKITKNLNSLSELEVKNLQRLSGAMDELHNEILELDEKVDDLRADTISSQIELAVLLSNEGIINSEDEHLLALERKLKKMLGPSAVDIGNGCFETKHKCNQTCLDRIAAGTFNAGEFSLPTFDSLNITAASLNDDGLDNHTILLYYSTAASSLAVTLMLAIFIVYMVSRDNVSCSICL

SEQ ID NO: 28513 - protein, 584 aa, Artificial Sequence; identical to SEQ ID NO: 28452
  derived and/or modified protein sequence (wt) from hemagglutinin__InfluenzaB__ALN39795

SEQ ID NO: 28514 - protein, 585 aa, Artificial Sequence
  derived and/or modified protein sequence (wt) from hemagglutinin__InfluenzaB__ALN39796
MKAIIVLLMVVTSNADRICTGITSSNSPHVVKTATQGEVNVTGVIPLTTTPTKSHFANLKGTETRGKLCPKCLNCTDLDVALGRPKCTGKIPSARVSILHEVRPVTSGCFPIMHDRTKIRQLPNLLRGYEHIRLSTHNVINAEDAPGGPYKIGTSGSCPNATNGNGFFATMAWAVPKNDKNKTATNPLTIEVPYICTEGEDQITVWGFHSDNETQMAKLYGDSKPQKFTSSANGVTTHYVSQIGGFPNQTEDGGLPQSGRIVVDYMVQKSGKTGTITYQRGILLPQKVWCASGRSKVIKGSLPLIGEADCLHEKYGGLNKSKPYYTGEHAKAIGNCPIWVKTPLKLANGTKYRPPAKLLKERGFFGAIAGFLEGGWEGMIAGWHGYTSHGAHGVAVAADLKSTQEAINKITKNLNSLSELEVKNLQRLSGAMDELHNEILELDEKVDDLRADTISSQIELAVLLSNEGIINSEDEHLLALERKLKKMLGPSAVEIGNGCFETKHKCNQTCLDRIAAGTFDAGEFSLPTFDSLNITAASLNDDGLDNHTILLYYSTAASSLAVTLMIAIFVVYMVSRDNVSCSICL

SEQ ID NO: 28515 - protein, 584 aa, Artificial Sequence; identical to SEQ ID NO: 28452
  derived and/or modified protein sequence (wt) from hemagglutinin__InfluenzaB__ALN39797

SEQ ID NO: 28516 - protein, 584 aa, Artificial Sequence
  derived and/or modified protein sequence (wt) from hemagglutinin__InfluenzaB__ALN39798
MKAIIVLLMVVTSNADRICTGITSSSSPHVVKTATQGEVNVTGVIPLTTTPTKSYFANLKGTRTRGKLCPDCLNCTDLDVALGRPMCVGTTPSAKASILHEVRPVTSGCFPIMHDRTKIRQLPNLLRGYEKIRLSTQNVIDAEKAPGGPYRLGTSGSCPNATSKIGFFATMAWAVPKDNYKNATNPQTVEVPYICTEGEDQITVWGFHSDNKTQMKSLYGDSNPQKFTSSANGVTTHYVSQIGDFPDQTEDGGLPQSGRIVVDYMMQKPGKTGTIVYQRGVLLPQKVWCASGRSKVIKGSLPLIGEADCLHEEYGGLNKSKPYYTGKHAKAIGNCPIWVKTPLKLANGTKYRPPAKLLKERGFFGAIAGFLEGGWEGMIAGWHGYTSHGAHGVAVAADLKSTQEAINKITKNLNSLSELEVKNLQRLSGAMDELHNEILELDEKVDDLRADTISSQIELAVLLSNEGIINSEDEHLLALERKLKKMLGPSAVDIGNGCFETKHKCNQTCLDRIAAGTFNAGEFSLPTFDSLNITAASLNDDGLDNHTILLYYSTAASSLAVTLMLAIFIVYMVSRDNVSCSICL

SEQ ID NO: 28517 - protein, 584 aa, Artificial Sequence; identical to SEQ ID NO: 28289
  derived and/or modified protein sequence (wt) from hemagglutinin__InfluenzaB__ALN39799

SEQ ID NO: 28518 - protein, 584 aa, Artificial Sequence
  derived and/or modified protein sequence (wt) from hemagglutinin__InfluenzaB__ALN39800
MKAIIVLLMVVTSNADRICTGITSSNSPHVVKTATQGEVNVTGVIPLTTTPTKSYFANLKGTRTRGKLCPDCLNCTDLDVALGRPMCVGTTPSAKASILHEVRPVTSGCFPIMHDRTKIRQLPNLLRGYEKIRLSTQNVIDAEKAPGGPYRLGTSGSCPNATSKIGFFATMAWAVPKDNYKNATNPQTVEVPYICTEGEDQITVWGFHSDNKTQMKSLYGDSNPQKFTSSANGVTTHYVSQIGDFPDQTEDGGLPQSGRIVVDYMMQKPGKTGTIVYQRGVLLPQKVWCASGRSKVIKGSLPLIGEADCLHEEYGGLNKSKPYYTGKHAKAIGNCPIWVKTPLKLANGTKYRPPAKLLKERGFFGAIAGFLEGGWEGMIAGWHGYTSHGAHGVAVAADLKSTQEAINKITKNLNSLSELEVKNLQRLSGAMDELHNEILELDEKVDDLRADTISSQIELAVLLSNEGIINSEDEHLLALEKKLKKMLGPSAVDIGNGCFETKHKCNQTCLDRIAAGTFNAGEFSLPTFDSLNITAASLNDDGLDNHTILLYYSTAASSLAVTLMLAIFIVYMVSRDNVSCSICL

SEQ ID NO: 28519 - protein, 584 aa, Artificial Sequence; identical to SEQ ID NO: 28509
  derived and/or modified protein sequence (wt) from hemagglutinin__InfluenzaB__ALN39801

SEQ ID NO: 28520 - protein, 584 aa, Artificial Sequence; identical to SEQ ID NO: 28452
  derived and/or modified protein sequence (wt) from hemagglutinin__InfluenzaB__ALN39802

SEQ ID NO: 28521 - protein, 584 aa, Artificial Sequence; identical to SEQ ID NO: 28509
  derived and/or modified protein sequence (wt) from hemagglutinin__InfluenzaB__ALN39803

SEQ ID NO: 28522 - protein, 584 aa, Artificial Sequence; identical to SEQ ID NO: 28448
  derived and/or modified protein sequence (wt) from hemagglutinin__InfluenzaB__ALN39804

SEQ ID NO: 28523 - protein, 585 aa, Artificial Sequence; identical to SEQ ID NO: 28475
  derived and/or modified protein sequence (wt) from hemagglutinin__InfluenzaB__ALN39805

SEQ ID NO: 28524 - protein, 585 aa, Artificial Sequence; identical to SEQ ID NO: 26989
  derived and/or modified protein sequence (wt) from hemagglutinin__InfluenzaB__ACN29380

SEQ ID NO: 28525 - protein, 585 aa, Artificial Sequence; identical to SEQ ID NO: 27321
  derived and/or modified protein sequence (wt) from hemagglutinin__InfluenzaB__EPI498048

SEQ ID NO: 28526 - protein, 585 aa, Artificial Sequence
  derived and/or modified protein sequence (wt) from hemagglutinin__InfluenzaB__ANC28539
MKAIIVLLMVVTSNADRICTGITSSNSPHVVKTATQGEVNVTGVIPLTTTPTKSHFANLKGTETRGKLCPKCLNCTDLDVALGRPKCTGKIPSARVSILHEVRPVTSGCFPIMHDRTKIRQLPNLLRGYEHIRLSTHNVINAENAPGGPYKIGTSGSCPNITNGNGFFATMAWAVPKNDKNKTATNPLTIEVPYICTEGEDQITVWGFHSDNEAQMAKLYGDSKPQKFTSSANGVTTHYVSQIGGFPNQTEDGGLPQSGRIVVDYMVQKSGKTGTITYQRGILLPQKVWCASGRSKVIKGSLPLIGEADCLHEKYGGLNKSKPYYTGEHAKAIGNCPIWVKTPLKLANGTKYRPPAKLLKERGFFGAIAGFLEGGWEGMIAGWHGYTSHGAHGVAVAADLKSTQEAINKITKNLNSLSELEVKNLQRLSGAMDELHNEILELDEKVDDLRADTISSQIELAVLLSNEGIINSEDEHLLALERKLKKMLGPSAVEIGNGCFETKHKCNQTCLDRIAAGTFDAGEFSLPTFDSLNITAASLNDDGLDNHTILLYYSTAASSLAVTLMIAIFVVYMVSRDNVSCSICL

SEQ ID NO: 28527 - protein, 585 aa, Artificial Sequence
  derived and/or modified protein sequence (wt) from hemagglutinin__InfluenzaB__EPI827073
MKAIIVLLMVVTSNADRICTGITSSNSPHVVKTATQGEVNVTGVIPLTTTPTKSHFANLKGTETRGKLCPKCLNCTDLDVALGRPKCTGKIPSARVSILHEVRPVTSGCFPIMHDRTKIRQLPNLLRGYEHIRLSTHNVINAENAPGGPYKIGTSGSCPNITNGNGFFATMAWAVPKNDKNKTATNPLTIEVPYICTEGEDQITVWGLHSDNEIQMAKLYGDSKPQKFTSSANGVTTHYVSQIGGFPNQTEDGGLPQSGRIVVDYMVQKSGKTGTITYQRGILLPQKVWCASGRSKVIKGSLPLIGEADCLHEKYGGLNKSKPYYTGEHAKAIGNCPIWVKTPLKLANGTKYRPPAKLLKERGFFGAIAGFLEGGWEGMIAGWHGYTSHGAHGVAVAADLKSTQEAINKITKNLNSLSELEVKNLQRLSGAMDELHNEILELDEKVDDLRADTISSQIELAVLLSNEGIINSEDEHLLALERKLKKMLGPSAVEIGNGCFETKHKCNQTCLDRIAAGTFDAGEFSLPTFDSLNITAASLNDDGLDNHTILLYYSTAASSLAVTLMIAIFVVYMVSRDNVSCSICL

SEQ ID NO: 28528 - protein, 585 aa, Artificial Sequence; identical to SEQ ID NO: 26747
  derived and/or modified protein sequence (wt) from hemagglutinin__InfluenzaB__EPI244699

SEQ ID NO: 28529 - protein, 585 aa, Artificial Sequence; identical to SEQ ID NO: 26740
  derived and/or modified protein sequence (wt) from hemagglutinin__InfluenzaB__EPI244702

SEQ ID NO: 28530 - protein, 584 aa, Artificial Sequence; identical to SEQ ID NO: 28129
  derived and/or modified protein sequence (wt) from hemagglutinin__InfluenzaB__EPI540671

SEQ ID NO: 28531 - protein, 584 aa, Artificial Sequence
  derived and/or modified protein sequence (wt) from hemagglutinin__InfluenzaB__EPI573303
MKAIIVLLMVVTSNADRICTGITSSNSPHVVKTATQGEVNVTGVIPLTTTPTKSYFANLKGTRTRGKLCPDCLNCTDLDVALGRPMCVGTTPSAKASILHEVRPVTSGCFPIMHDRTKIRQLPNLLRGYEKIRLSTQNVIDAEKAPGGPYRLGTSGSCPNATSKIGFFATMAWAVPKDNYKNATNPLTVEVPYICTEGEDQITVWGFHSDDKTQMKSLYGDSNPQKFTSSANGVTTHYVSQIGDFPDQTEDGGLPQSGRIVVDYMMQKPGKTGTIVYQRGVLLPQKVWCASGRSKVIKGSLPLIGEADCLHEEYGGLNKSKPYYTGKHAKAIGNCPIWVKTPLKLANGTKYRPPAKLLKERGFFGAIAGFLEGGWEGMIAGWHGYTSHGAHGVAVAADLKSTQEAINKITKNLNSLSELEVKNLQRLSGAMDELHNEILELDEKVDDLRADTISSQIELAVLLSNEGIINSEDEHLLALERKLKKMLGPSAVDIGNGCFETKHKCNQTCLDRIAAGTFNAGEFSLPTFDSLNITAASLNDDGLDNHTILLYYSTAASSLAVTLMLAIFIVYMVSRDNVSCSICL

SEQ ID NO: 28532 - protein, 584 aa, Artificial Sequence
  derived and/or modified protein sequence (wt) from hemagglutinin__InfluenzaB__EPI829466
MKAIIVLLMVVTSNADRICTGITSSNSPHVVKTATQGEVNVTGVIPLTTTPTKSYFANLKGTRTRGKLCPDCLNCTDLDVALGRPMCVGTTPSAKASILHEVRPVTSGCFPIMHDRTKIRQLPNLLRGYEKIRLSTQNVIDAEKAPGGPYRLGTSGSCPNATSKIGFFATMAWAVPKDNYKNATNPLTVEVPYICTEGEDQITVWGFHSDDKTQMKSLYGDSNPQKFTSSANGVTTHYVSQIGDFPDQTEDEGLPQSGRIVVDYMMQKPGKTGTIVYQRGVLLPQKVWCASGRSKVIKGSLPLIGEADCLHEEYGGLNKSKPYYTGKHAKAIGNCPIWVKTPLKLANGTKYRPPAKLLKERGFFGAIAGFLEGGWEGMIAGWHGYTSHGAHGVAVAADLKSTQEAINKITKNLNSLSELEVKNLQRLSGAMDELHNEILELDEKVDDLRADTISSQIELAVLLSNEGIINSEDEHLLALERKLKKMLGPSAVDIGNGCFETKHKCNQTCLDRIAAGTFNAGEFSLPTFDSLNITAASLNDDGLDNHTILLYYSTAASSLAVTLMLAIFIVYMVSRDNVSCSICL

SEQ ID NO: 28533 - protein, 584 aa, Artificial Sequence
  derived and/or modified protein sequence (wt) from hemagglutinin__InfluenzaB__EPI684429
MKAIIVLLMVVMSNADRICTGITSSNSPHVVKTATQGEVNVTGVIPLTTTPTKSYFANLKGTRTRGKLCPDCLNCTDLDVALGRPMCVGTTPSAKASILHEVRPVTSGCFPIMHDRTKIRQLPNLLRGYEKIRLSTQNVIDAEKAPGGPYRLGTSGSCPNATSKIGFFATMAWAVPKDNYKNATNPQTVEVPYICTEGEDQITVWGFHSDNKTQMKSLYGDSNPQKFTSSANGVTTHYVSQIGDFPDQTEDGGLPQSGRIVVDYMVQKPGKTGTIVYQRGVLLPQKVWCVSGRSKVIKGSLPLIGEADCLHEEYGGLNKSKPYYTGKHAKAIGNCPIWVKTPLKLANGTKYRPPAKLLKERGFFGAIAGFLEGGWEGMIAGWHGYTSHGAHGVAVAADLKSTQEAINKITKNLNSLSELEVKNLQRLSGAMDELHNEILELDEKVDDLRADTISSQIELAVLLSNEGIINSEDEHLLALERKLKKMLGPSAVDIGNGCFETKHKCNQTCLDRIAAGTFNAGEFSLPTFDSLNITAASLNDDGLDNHTILLYYSTAASSLAVTLMLAIFIVYMVSRDNVSCSICL

SEQ ID NO: 28534 - protein, 585 aa, Artificial Sequence; identical to SEQ ID NO: 26752
  derived and/or modified protein sequence (wt) from hemagglutinin__InfluenzaB__AFH58447

SEQ ID NO: 28535 - protein, 585 aa, Artificial Sequence
  derived and/or modified protein sequence (wt) from hemagglutinin__InfluenzaB__EPI173279
MKAIIVILMVVTSNADRICTGITSSNSPHVVKTATQGEVNVTGVIPLTTTPTKSHFANLKGTETRGKLCPKCLNCTDLDVALGRPKCTGKIPSARVSILHEVRPVTSGCFPIMHDRTKIRQLPNLLRGYEHIRLSTHNVINAENAPGGPYKIGTSGSCPNITNGNGFFATMAWAVPKNDKNKTATNPLTIEVPYICTEGEDQITVWGFHSDSETQMAKLYGDSKPQKFTSSANGVTTHYVSQIGGFPNQTEDGGLPQSGRIVVDYMVQKSGKTGTITYQRGILLPQKVWCASGRSKVIKGSLPLIGEADCLHEKYGGLNKSKPYYTGEHAKAIGNCPIWVKTPLKLANGTKYRPPAKLLKERGFFGAIAGFLEGGWEGMIAGWHGYTSHGAHGVAVAADLKSTQEAINKITKNLNSLSELEVKNLQRLSGAMDELHNEILELDEKVDDLRADTISSQIELAVLLSNEGIINSEDEHLLALERKLKKMLGPSAVEIGNGCFETKHKCNQTCLDRIAAGTFDAGEFSLPTFDSLNITAASLNDDGLDNHTILLYYSTAASSLAVTLMIAIFVVYMVSRDNVSCSICL

SEQ ID NO: 28536 - protein, 585 aa, Artificial Sequence; identical to SEQ ID NO: 27321
  derived and/or modified protein sequence (wt) from hemagglutinin__InfluenzaB__EPI163726

SEQ ID NO: 28537 - protein, 585 aa, Artificial Sequence; identical to SEQ ID NO: 28475
  derived and/or modified protein sequence (wt) from hemagglutinin__InfluenzaB__EPI636340

SEQ ID NO: 28538 - protein, 585 aa, Artificial Sequence
  derived and/or modified protein sequence (wt) from hemagglutinin__InfluenzaB__EPI645995
MKAIIVLLMVVTSNADRICTGITSSNSPHVVKTATQGEVNVTGVIPLTTTPTKSHFANLKGTETRGKLCPKCLNCTDLDVALGRPKCTGKIPSARVSILHEVRPVTSGCFPIMHDRTKIRQLPNLLRGYEHVRLSTHNVINAEDAPGGPYKIGTSGSCPNITNGNGFFATMAWAVPKNDKNKTATNPLTIEVPYICTEGEDQITVWGFHSDDETQMAKLYGDSKPQKFTSSANGVTTHYVSQIGGFPNQTEDGGLPQSGRIVVDYMVQKSGKTGTITYQRGILLPQKVWCASGRSKVIKGSLPLIGEADCLHEKYGGLNKSKPYYTGEHAKAIGNCPIWVKTPLKLANGTKYRPPAKLLKERGFFGAIAGFLEGGWEGMIAGWHGYTSHGAHGVAVAADLKSTQEAINKITKNLNSLSELEVKNLQRLSGAMDELHNEILELDEKVDDLRADTISSQIELAVLLSNEGIINSEDEHLLALERKLKKMLGPSAVEIGNGCFETKHKCNQTCLDRIAAGTFDAGEFSLPTFDSLNITAASLNDDGLDNHTILLYYSTAASSLAVTLMIAIFVVYMVSRDNVSCSICL

SEQ ID NO: 28539 - protein, 584 aa, Artificial Sequence; identical to SEQ ID NO: 28129
  derived and/or modified protein sequence (wt) from hemagglutinin__InfluenzaB__EPI539769

SEQ ID NO: 28540 - protein, 584 aa, Artificial Sequence; identical to SEQ ID NO: 28531
  derived and/or modified protein sequence (wt) from hemagglutinin__InfluenzaB__EPI551249

SEQ ID NO: 28541 - protein, 584 aa, Artificial Sequence
  derived and/or modified protein sequence (wt) from hemagglutinin__InfluenzaB__EPI544259
MKAIIVLLMVVTSNADRICTGITSSNSPHVVKTATQGEVNVTGVIPLTTTPTKSYFANLKGTRTRGKLCPDCLNCTDLDVALGRPMCVGTTPSAKASILHEVRPVTSGCFPIMHDRTKIRQLPNLLRGYEKIRLSTQNVIDAEKAPGGPYRLGTSGSCPNATSKIGFFATMAWAVPKDNYKNATNPLTVEVPYICTEGEDQITVWGFHSDNKNQMKSLYGDSNPQKFTSSANGVTTHYVSQIGDFPDQTEDGGLPQSGRIVVDYMMQKPGKTGTIVYQRGVLLPQKVWCASGRSKVIKGSLPLIGEADCLHEEYGGLNKSKPYYTGKHAKAIGNCPIWVKTPLKLANGTKYRPPAKLLKERGFFGAIAGFLEGGWEGMIAGWHGYTSHGAHGVAVAADLKSTQEAINKITKNLNSLSELEVKNLQRLSGAMDELHNEILELDEKVDDLRADTISSQIELAVLLSNEGIINSEDEHLLALERKLKKMLGPSAVDIGNGCFETKHKCNQTCLDRIAAGTFNAGEFSLPTFDSLNITAASLNDDGLDNHTILLYYSTAASSLAVTLMLAIFIVYMVSRDNVSCSICL

SEQ ID NO: 28542 - protein, 584 aa, Artificial Sequence
  derived and/or modified protein sequence (wt) from hemagglutinin__InfluenzaB__EPI592699
MKAIIVLLMVVTSNADRICTGITSSNSPHVVKTATQGEVNVTGVIPLTTTPTKSYFANLKGTRTRGKLCPDCLNCTDLDVALGRPMCVGTTPSAKASILHEVRPVTSGCFPIMHDRTKIRQLPNLLRGYEKIRLSTQNVIDAEKAPGGPYRLGTSGSCPNATSKIGFFATMAWAVPKDNYKNATNPQTVEVPYICTEGEDQITVWGFHSDNKIQMKSLYGDSNPQKFTSSANGVTTHYVSQIGDFPDQTEDGGLPQSGRIVVDYMVQKPGKTGTIVYQRGVLLPQKVWCASGRSKVIKGSLPLIGEADCLHEEYGGLNKSKPYYTGKHAKAIGNCPIWVKTPLKLANGTKYRPPAKLLKERGFFGAIAGFLEGGWEGMIAGWHGYTSHGAHGVAVAADLKSTQEAINKITKNLNSLSELEVKNLQRLSGAMDELHNEILELDEKVDDLRADTISSQIELAVLLSNEGIINSEDEHLLALERKLKKMLGPSAVDIGNGCFETKHKCNQTCLDRIAAGTFNAGEFSLPTFDSLNITAASLNDDGLDNHTILLYYSTAASSLAVTLMLAIFIVYMVSRDNVSCSICL

SEQ ID NO: 28543 - protein, 584 aa, Artificial Sequence; identical to SEQ ID NO: 28452
  derived and/or modified protein sequence (wt) from hemagglutinin__InfluenzaB__EPI592707

SEQ ID NO: 28544 - protein, 584 aa, Artificial Sequence
  derived and/or modified protein sequence (wt) from hemagglutinin__InfluenzaB__EPI693094
MKAIIVLLMVVTSNADRICTGITSSNSPHVVKTATQGEVNVTGVIPLTTTPTKSYFANLKGTRTRGKLCPDCLNCTDLDVALGRPMCVGTTPSAKASILHEVRPVTSGCFPIMHDRTKIRQLPNLLRGYEKIRLSTQNVIDAEKAPGGPYRLGTSESCPNATSKIGFFATMAWAVPKDNYKNATNPQTVEVPYICTEGEDQITVWGFHSDNKIQMKSLYGDSNPQKFTSSANGVTTHYVSQIGDFPDQTEDGGLPQSGRIVVDYMVQKPGKTGTIVYQRGVLLPQKVWCASGRSKVIKGSLPLIGEADCLHEEYGGLNKSKPYYTGKHAKAIGNCPIWVKTPLKLANGTKYRPPAKLLKERGFFGAIAGFLEGGWEGMIAGWHGYTSHGAHGVAVAADLKSTQEAINKITKNLNSLSELEVKNLQRLSGAMDELHNEILELDEKVDDLRADTISSQIELAVLLSNEGIINSEDEHLLALERKLKKMLGPSAVDIGNGCFETKHKCNQTCLDRIAAGTFNAGEFSLPTFDSLNITAASLNDDGLDNHTILLYYSTAASSLAVTLMLAIFIVYMVSRDNVSCSICL

SEQ ID NO: 28545 - protein, 585 aa, Artificial Sequence; identical to SEQ ID NO: 28475
  derived and/or modified protein sequence (wt) from hemagglutinin__InfluenzaB__EPI678796

SEQ ID NO: 28546 - protein, 585 aa, Artificial Sequence
  derived and/or modified protein sequence (wt) from hemagglutinin__InfluenzaB__EPI721064
MKAIIVLLMVVTSNADRICTGITSSNSPHVVKTATQGEVNVTGVIPLTTTPTKSHFANLKGTETRGKLCPKCLNCTDLDVALGRPKCTGKIPSARVSILHEVRPVTSGCFPIMHDRTKIRQLPNLLRGYEHVRLSTHNVINAEDAPGGPYKIGTSRSCPNITNGNGFFATMAWAVPKNDKNKTATNPLTIEVPYICTEGEDQITVWGFHSDNETQMAKLYGDSKPQKFTSSANGVTTHYVSQIGGFPNQTEDGGLPQSGRIVVDYMVQKSGKTGTITYQRGILLPQKVWCASGRSKVIKGSLPLIGEADCLHEKYGGLNKSKPYYTGEHAKAIGNCPIWVKTPLKLANGTKYRPPAKLLKERGFFGAIAGFLEGGWEGMIAGWHGYTSHGAHGVAVAADLKSTQEAINKITKNLNSLSELEVKNLQRLSGAMDELHNEILELDEKVDDLRADTISSQIELAVLLSNEGIINSEDEHLLALERKLKKMLGPSAVEIGNGCFETKHKCNQTCLDRIAAGTFDAGEFSLPTFDSLNITAASLNDDGLDNHTILLYYSTAASSLAVTLMIAIFVVYMVSRDNVSCSICL

SEQ ID NO: 28547 - protein, 585 aa, Artificial Sequence; identical to SEQ ID NO: 26756
  derived and/or modified protein sequence (wt) from hemagglutinin__InfluenzaB__EPI328904

SEQ ID NO: 28548 - protein, 584 aa, Artificial Sequence
  derived and/or modified protein sequence (wt) from hemagglutinin__InfluenzaB__EPI543191
MKAIIVLLMVVTSNADRICTGITSSNSPHVVKTATQGEVNVTGVIPLTTTPTKSYFANLKGTRTRGKLCPDCLNCTDLDVALGRPMCVGTTPSAKASILHEVRPVTSGCFPIMHDRTKIRQLPNLLRGYEKIRLSTQNVIDAEKAPGGPYRLGTSGSCPNATSKIGFFATMAWAVPKDNYKNATNPLTVEVPYICTEGEDQITVWGFHSDKKTQMKSLYGDSNPQKFTSSANGVTTHYVSQIGDFPDQTEDGGLPQSGRIVVDYMMQKPGKTGTIVYQRGVLLPQKVWCASGRSKVIKGSLPLIGEADCLHEEYGGLNKSKPYYTGKHAKAIGNCPIWVKTPLKLANGTKYRPPAKLLKERGFFGAIAGFLEGGWEGMIAGWHGYTSHGAHGVAVAADLKSTQEAINKITKNLNSLSELEVKNLQRLSGAMDELHNEILELDEKVDDLRADTISSQIELAVLLSNEGIINSEDEHLLALERKLKKMLGPSAVDIGNGCFETKHKCNQTCLDRIAAGTFNAGEFSLPTFDSLNITAASLNDDGLDNHTILLYYSTAASSLAVTLMLAIFIVYMVSRDNVSCSICL

SEQ ID NO: 28549 - protein, 584 aa, Artificial Sequence; identical to SEQ ID NO: 28129
  derived and/or modified protein sequence (wt) from hemagglutinin__InfluenzaB__EPI500359

SEQ ID NO: 28550 - protein, 584 aa, Artificial Sequence
  derived and/or modified protein sequence (wt) from hemagglutinin__InfluenzaB__EPI543185
MKAIIVLLMVVTSNADRICTGITSSNSPHVVKTATQGEVNVTGVIPLTTTPTKSYFANLKGTRTRGKLCPDCLNCTDLDVALGRPMCVGTTPSAKASILHEVRPVTSGCFPIMHDRTKIRQLPNLLRGYEKIRLSTQNVIDAEKAPGGPYRLGTSGSCPNATSKIGFFATMAWAVPKDNYKNATNPQTVEVPYICTEGEDQITVWGFHSDNKNQMKSLYGDSNPQKFTSSANGVTTHYVSQIGDFPDQTEDGGLPQSGRIVVDYMMQKPGKTGTIVYQRGVLLPQKVWCASGRSKVIKGSLPLIGEADCLHEEYGGLNKSKPYYTGKHAKAIGNCPIWVKTPLKLANGTKYRPPAKLLKERGFFGAIAGFLEGGWEGMIAGWHGYTSHGAHGVAVAADLKSTQEAINKITKNLNSLSELEVKNLQRLSGAMDELHNEILELDEKVDDLRADTISSQIELAVLLSNEGIINSEDEHLLALERKLKKMLGPSAVDIGNGCFETKHKCNQTCLDRIAAGTFNAGEFSLPTFDSLNITAASLNDDGLDNHTILLYYSTAASSLAVTLMLAIFIVYMVSRDNVSCSICL

SEQ ID NO: 28551 - protein, 584 aa, Artificial Sequence; identical to SEQ ID NO: 28289
  derived and/or modified protein sequence (wt) from hemagglutinin__InfluenzaB__EPI536447

SEQ ID NO: 28552 - protein, 584 aa, Artificial Sequence; identical to SEQ ID NO: 26758
  derived and/or modified protein sequence (wt) from hemagglutinin__InfluenzaB__NP_056660

SEQ ID NO: 28553 - protein, 584 aa, Artificial Sequence
  derived and/or modified protein sequence (wt) from hemagglutinin__InfluenzaB__ABG85167
MKAIIVLLMVVTSNADRICTGITSSNSPHVVKTATQGEVNVTGVIPLTTTPTRSHFANLKGTQTRGKLCPNCFNCTDLDVALGRPKCMGNIPSAKVSILHEVKPVTSGCFPIMHDRTKIRQLPNLLRGYENIRLSTSNVINAETAPGGPYKVGTSGSCPNVANRNGFFNTMAWVIPKDNNKTAINPVTVEVPYICSEGEDQITVWGFHSDDKTQMERLYGDSNPQKFTSSANGVTTHYVSQIGGFPNQTEDEGLKQSGRIVVDYMVQKPGKTGTIVYQRGILLPQKVWCASGRSKVIKGSLPLIGEADCLHEKYGGLNKSKPYYTGEHAKAIGNCPIWVKTPLKLANGTKYRPPAKLLKERGFFGAIAGFLEGGWEGMIAGWHGYTSHGAHGVAVAADLKSTQEAINKITKNLNSLSELEVKNLQRLSGAMNGLHDEILELDEKVDDLRADTISSQIELAVLLSNEGIINSEDEHLLALERKLKKMLGPSAVEIGNGCFETKHKCNQTCLDRIAAGTFNAGDFSLPTFDSLNITAASLNDDDLDNHTILLYYSTAASSLAVTLMIAIFIVYMVSRDNVSCSICL

SEQ ID NO: 28554 - protein, 584 aa, Artificial Sequence
  derived and/or modified protein sequence (wt) from hemagglutinin__InfluenzaB__EPI376346
MKAIIVLLMVVTSNADRICTGITSSNSPHVVKTATQGEVNVTGVIPLTTTPTKSYFANLKGTKTRGKLCPDCLNCTDLDVALGRPMCVGTTPSAKASILHEVRPVTSGCFPIMHDRTKIRQLANLLRGYENIRLSTQNVIDAEKAPGGPYRLGTSGSCPNATSKSGFFATMAWAVPKDNNKNATNPLTVEVPYICAEGEDQITVWGFHSDDKTQMKNLYGDSNPQKFTSSANGVTTHYVSQIGGFPDQTEDGGLPQSGRIVVDYMMQKPGKTGTIVYQRGVLLPQKVWCASGRSKVIKGSLPLIGEADCLHEKYGGLNKSKPYYTGEHAKAIGNCPIWVKTPLKLANGTKYRPPAKLLKERGFFGAIAGFLEGGWEGMIAGWHGYTSHGAHGVAVAADLKSTQEAINKITKNLNSLSELEVKNLQRLSGAMDELHNEILELDEKVDDLRADTISSQIELAVLLSNEGIINSEDEHLLALERKLKKMLGPSAVDIGNGCFETKHKCNQTCLDRIAAGTFNAGEFSLPTFDSLNITAASLNDDGLDNHTILLYYSTAASSLAVTLMLAIFIVYMVSRDNVSCSICL

SEQ ID NO: 28555 - protein, 584 aa, Artificial Sequence; identical to SEQ ID NO: 26854
  derived and/or modified protein sequence (wt) from hemagglutinin__InfluenzaB__EPI368425

SEQ ID NO: 28556 - protein, 584 aa, Artificial Sequence; identical to SEQ ID NO: 26820
  derived and/or modified protein sequence (wt) from hemagglutinin__InfluenzaB__ACH53430

SEQ ID NO: 28557 - protein, 585 aa, Artificial Sequence; identical to SEQ ID NO: 26645
  derived and/or modified protein sequence (wt) from hemagglutinin__InfluenzaB__EPI331151

SEQ ID NO: 28558 - protein, 585 aa, Artificial Sequence
  derived and/or modified protein sequence (wt) from hemagglutinin__InfluenzaB__EPI356777
MKAIIVLLMVVTSNADRICTGITSSNSPHVVKTATQGEVNVTGVIPLTTTPTKSHFANLKGTETRGKLCPKCLNCTDLDVALGRPKCTGKIPSARVSILHEVRPVTSGCFPIMHDRTKIRQLPNLLRGYEHIRLSTHNVINAENAPGGPYKIGTSGSCPNVTNGNGFFATMAWAVPKNDKNKTATNPLTIEVPYICTEGEDQITVWGFHSDDETQMAKLYGDSKPQKFTSSANGVTTHYVSQIGGFPNQTEDGGLPQSGRIVVDYMVQKSGKTGTITYQRGILLPQKVWCASGRSKVIKGSLPLIGEADCLHEKYGGLNKSKPYYTGEHAKAIGNCPIWVKTPLKLANGTKYRPPAKLLKERGFFGAIAGFLEGGWEGMIAGWHGYTSHGAHGVAVAADLKSTQEAINKITKNLNSLSELEVKNLQRLSGAMDELHNEILELDEKVDDLRADTISSQIELAVLLSNEGIINSEDEHLLALERKLKKMLGPSAVEIGNGCFETKHKCNQTCLDRIAAGTFDAGEFSLPTFDSLNITAASLNDDGLDNHTILLYYSTAASSLAVTLMIAIFVVYMVSRDNVSCSICL

SEQ ID NO: 28559 - protein, 583 aa, Artificial Sequence; identical to SEQ ID NO: 26427
  derived and/or modified protein sequence (wt) from hemagglutinin__InfluenzaB__CY018349

SEQ ID NO: 28560 - protein, 583 aa, Artificial Sequence
  derived and/or modified protein sequence (wt) from hemagglutinin__InfluenzaB__AY581945
MKAIIVLLMVVTSNADRICTGITSSNSPHVVKTATQGEVNVTGVIPLTTTPTKSHFANLKGTKTRGKLCPNCLNCTDLDVALARPMCVGTTPSAKASILHEVRPVTSGCFPIMHDRTKIRQLPNLLRGYENIRLSTQNVINAERAPGGPYRLGTSGSCPNVTSRDGFFATMAWAVPRDNKTATNPLTVEVPYICTKGEDQITVWGFHSDNKTQMKNLYGDSNPQKFTSSANGVTTHYVSQIGGFPNQTEDGGLPQSGRIVVDYMVQKPGKTGTIVYQRGVLLPQKVWCASGRSKVIKGSLPLIGEADCLHEKYGGLNKSKPYYTGEHAKAIGNCPIWVKTPLKLANGTKYRPPAKLLKERGFFGAIAGFLEGGWEGMIAGWHGYTSHGAHGVAVAADLKSTQEAINKITKNLNSLSELEVKNLQRLSGAMDELHNEILELDEKVDDLRADTISSQIELAVLLSNEGIINSEDEHLLALERKLKKMLGPSAVDIGNGCFETKHKCNQTCLDRIAAGTFNAGEFSLPTFDSLNITAASLNDDGLDNHTILLYYSTAASSLAVTLMIAIFIVYMVSRDNVSCSICL

SEQ ID NO: 28561 - protein, 584 aa, Artificial Sequence; identical to SEQ ID NO: 28308
  derived and/or modified protein sequence (wt) from hemagglutinin__InfluenzaB__EPI541351

SEQ ID NO: 28562 - protein, 584 aa, Artificial Sequence
  derived and/or modified protein sequence (wt) from hemagglutinin__InfluenzaB__EPI541760
MKAVIVLLMVVTSNADRICTGITSSNSPHVVKTATQGEVNVTGVIPLTTTPTKSYFANLKGTRTRGKLCPDCLNCTDLDVALGRPMCVGTTPSAKASILHEVRPVTSGCFPIMHDRTKIRQLPNLLRGYEKIRLSTQNVIDAEKAPGGPYRLGTSGSCPNATSKIGFFATMAWAVPKDNYKNATNPLTVEVPYICTEGEDQITVWGFHSDNKTQMKSLYGDSNPQKFTSSANGVTTHYVSQIGDFPDQTEDGGLPQSGRIVVDYMMQKPGKTGTIVYQRGVLLPQKVWCASGRSKVIKGSLPLIGEADCLHEEYGGLNKSKPYYTGKHAKAIGNCPIWVKTPLKLANGTKYRPPAKLLKERGFFGAIAGFLEGGWEGMIAGWHGYTSHGAHGVAVAADLKSTQEAINKITKNLNSLSELEVKNLQRLSGAMDELHNEILELDEKVDDLRADTISSQIELAVLLSNEGIINSEDEHLLALERKLKKMLGPSAVDIGNGCFETKHKCNQTCLDRIAAGTFNAGEFSLPTFDSLNITAASLNDDGLDNHTILLYYSTAASSLAVTLMLAIFIVYMVSRDNVSCSICL

SEQ ID NO: 28563 - protein, 585 aa, Artificial Sequence; identical to SEQ ID NO: 26887
  derived and/or modified protein sequence (wt) from hemagglutinin__InfluenzaB__EPI477397

SEQ ID NO: 28564 - protein, 585 aa, Artificial Sequence
  derived and/or modified protein sequence (wt) from hemagglutinin__InfluenzaB__EPI492571
MKAIIVLLMVVTSNADRICTGITSSNSPHVVKTATQGEVNVTGVIPLTTTPTKSHFANLKGTETRGKLCPKCLNCTDLDVALGRPKCTGKIPSARVSILHEVRPVTSGCFPIMHDRTKIRQLPNLLRGYEHIRLSTHNVINAEDAPGGPYKIGTSGSCPNVTNGNGFFATMAWAVPKNDKNKTATNPLTIEVPYICTEGEDQITVWGFHSDIETQMAKLYGDSKPQKFTSSANGVTTHYVSQIGGFPNQTEDGGLPQSGRIVVDYMVQKSGKTGTITYQRGILLPQKVWCASGRSKVIKGSLPLIGEADCLHEKYGGLNKSKPYYTGEHAKAIGNCPIWVKTPLKLANGTKYRPPAKLLKERGFFGAIAGFLEGGWEGMIAGWHGYTSHGAHGVAVAADLKSTQEAINKITKNLNSLSELEVKNLQRLSGAMDELHNEILELDEKVDDLRADTISSQIELAVLLSNEGIINSEDEHLLALERKLKKMLGPSAVEIGNGCFETKHKCNQTCLDRIAAGTFDAGEFSLPTFDSLNITAASLNDDGLDNHTILLYYSTAASSLAVTLMIAIFVVYMVSRDNVSCSICL

SEQ ID NO: 28565 - protein, 585 aa, Artificial Sequence
  derived and/or modified protein sequence (wt) from hemagglutinin__InfluenzaB__EPI498340
MKAIIVLLMVVTSNADRICTGITSSNSPHVVKTATQGEVNVTGVIPLTTTPTKSHFANLKGTETRGKLCPKCLNCTDLDVALGRPKCTGKIPSARVSILHEVRPVTSGCFPIMHDRTKIRQLPNLLRGYEHIRLSTHNVINTEDAPGGPYKIGTSGSCPNVTNGNGFFATMAWAVPKNDKNKTATNPLTIEVPYICTEGEDQITVWGFHSDIETQMAKLYGDSKPQKFTSSANGVTTHYVSQIGGFPNQTEDGGLPQSGRIVVDYMVQKSGKTGTITYQRGILLPQKVWCASGRSKVIKGSLPLIGEADCLHEKYGGLNKSKPYYTGEHAKAIGNCPIWVKTPLKLANGTKYRPPAKLLKERGFFGAIAGFLEGGWEGMIAGWHGYTSHGAHGVAVAADLKSTQEAINKITKNLNSLSELEVKNLQRLSGAMDELHNEILELDEKVDDLRADTISSQIELAVLLSNEGIINSEDEHLLALERKLKKMLGPSAVEIGNGCFETKHKCNQTCLDRIAAGTFDAGEFSLPTFDSLNITAASLNDDGLDNHTILLYYSTAASSLAVTLMIAIFVVYMVSRDNVSCSICL

SEQ ID NO: 28566 - protein, 585 aa, Artificial Sequence
  derived and/or modified protein sequence (wt) from hemagglutinin__InfluenzaB__EPI516490
MKAIIVLLMVVTSNADRICTGITSSNSPHVVKTATQGEVNVTGVIPLTTTPTKSHFANLKGTETRGKLCPKCLNCTDLDVALGRPKCTGKIPSARVSILHEVRPVTSGCFPIMHDRTKIRQLPNLLRGYEHIRLSTHNVINAEDAPGGPYKIGTSGSCPNVTNGNGFFATMAWAVPKNDKNKTATNPLTIEVPYICTEGEDQITVWGFHSDNEIQMAKLYGDSKPQKFTSSANGVTTHYVSQIGGFPNQTEDGGLPQSGRIVVDYMVQKSGKTGTITYQRGILLPQKVWCASGRSKVIKGSLPLIGEADCLHEKYGGLNKSKPYYTGEHAKAIGNCPIWVKTPLKLANGTKYRPPAKLLKERGFFGAIAGFLEGGWEGMIAGWHGYTSHGAHGVAVAADLKSTQEAINKITKNLNSLSELEVKNLQRLSGAMDELHNEILELDEKVDDLRADTISSQIELAVLLSNEGIINSEDEHLLALERKLKKMLGPSAVEIGNGCFETKHKCNQTCLDRIAAGTFDAGEFSLPTFDSLNITAASLNDDGLDNHTILLYYSTAASSLAVTLMIAIFVVYMVSRDNVSCSICL

SEQ ID NO: 28567 - protein, 584 aa, Artificial Sequence; identical to SEQ ID NO: 28129
  derived and/or modified protein sequence (wt) from hemagglutinin__InfluenzaB__EPI538119

SEQ ID NO: 28568 - protein, 584 aa, Artificial Sequence; identical to SEQ ID NO: 28548
  derived and/or modified protein sequence (wt) from hemagglutinin__InfluenzaB__EPI538125

SEQ ID NO: 28569 - protein, 584 aa, Artificial Sequence
  derived and/or modified protein sequence (wt) from hemagglutinin__InfluenzaB__EPI556422
MKAIIVLLMVVTSNADRICTGITSSNSPHVVKTATQGEVNVTGVIPLTTTPTKSYFANLKGTRTRGKLCPDCLNCTDLDVALGRPMCVGTTPSAKASILHEVRPVTSGCFPIMHDRTKIRQLPNLLRGYEKIRLSTQNVIDAEKAPGGPYRLGTSGSCPNATSKIGFFATMAWAVPKDNYKNATNPLTVEVPYICTEGEDQITVWGFHSDIKTQMKSLYGDSNPQKFTSSANGVTTHYVSQIGDFPDQTEDGGLPQSGRIVVDYMMQKPGKTGTIVYQRGVLLPQKVWCASGRSKVIKGSLPLIGEADCLHEEYGGLNKSKPYYTGKHAKAIGNCPIWVKTPLKLANGTKYRPPAKLLKERGFFGAIAGFLEGGWEGMIAGWHGYTSHGAHGVAVAADLKSTQEAINKITKNLNSLSELEVKNLQRLSGAMDELHNEILELDEKVDDLRADTISSQIELAVLLSNEGIINSEDEHLLALERKLKKMLGPSAVDIGNGCFETKHKCNQTCLDRIAAGTFNAGEFSLPTFDSLNITAASLNDDGLDNHTILLYYSTAASSLAVTLMLAIFIVYMVSRDNVSCSICL

SEQ ID NO: 28570 - protein, 584 aa, Artificial Sequence
  derived and/or modified protein sequence (wt) from hemagglutinin__InfluenzaB__EPI614608
MKAIIVLLMVVTSNADRICTGITSSNSPHVVKTATQGEVNVTGVIPLTTTPTKSYFANLKGTRTRGKLCPDCLNCTDLDVALGRPMCVGTTPSAKASILHEVRPITSGCFPIMHDRTKIRQLPNLLRGYEKIRLSTQNVIDAEKAPGGPYRLGTSGSCPNATSKIGFFATMAWAVPKDNYKNATNPLTVEVPYICTEGEDQITVWGFHSDEKTQMKSLYGDSNPQKFTSSANGVTTHYVSQIGDFPDQTEDGGLPQSGRIVVDYMMQKPGKTGTIVYQRGVLLPQKVWCASGRSKVIKGSLPLIGEADCLHEEYGGLNKSKPYYTGKHAKAIGNCPIWVKTPLKLANGTKYRPPAKLLKERGFFGAIAGFLEGGWEGMIAGWHGYTSHGAHGVAVAADLKSTQEAINKITKNLNSLSELEVKNLQRLSGAMDELHNEILELDEKVDDLRADTISSQIELAVLLSNEGIINSEDEHLLALERKLKKMLGPSAVDIGNGCFETKHKCNQTCLDRIAAGTFNAGEFSLPTFDSLNITAASLNDDGLDNHTILLYYSTAASSLAVTLMLAIFIVYMVSRDNVSCSICL

SEQ ID NO: 28571 - protein, 584 aa, Artificial Sequence
  derived and/or modified protein sequence (wt) from hemagglutinin__InfluenzaB__EPI614610
MKAIIVLLMVVTSNADRICTGITSSNSPHVVKTATQGEVNVTGVIPLTTTPTKSYFANLKGTRTRGKLCPDCLNCTDLDVALGRPMCVGTTPSAKASILHEVRPVTSGCFPIMHDRTKIRQLPNLLRGYEKIRLSTQNVIDAEKAPGGPYRLGTSGSCPNATSKIGFFATMAWAVPKDNYKNATNPLTVEVPYICTEGEDQITVWGFHSDEKTQMKSLYGDSNPQKFTSSANGVTTHYVSQIGDFPDQTEDGGLPQSGRIVVDYMMQKPGKTGTIVYQRGVLLPQKVWCASGRSKVIKGSLPLIGEADCLHEEYGGLNKSKPYYTGKHAKAIGNCPIWVKTPLKLANGTKYRPPAKLLKERGFFGAIAGFLEGGWEGMIAGWHGYTSHGAHGVAVAADLKSTQEAINKITKNLNSLSELEVKNLQRLSGAMDELHNEILELDEKVDDLRADTISSQIELAVLLSNEGIINSEDEHLLALERKLKKMLGPSAVDIGNGCFETKHKCNQTCLDRIAAGTFNAGEFSLPTFDSLNITAASLNDDGLDNHTILLYYSTAASSLAVTLMLAIFIVYMVSRDNVSCSICL

SEQ ID NO: 28572 - protein, 585 aa, Artificial Sequence
  derived and/or modified protein sequence (wt) from hemagglutinin__InfluenzaB__AAA43697
MKAIIVLLMVVTSNADRICTGITSSNSPHVVKTATQGEVNVTGVIPLTTTPTKSHFANLKGTKTRGKLCPKCLNCTDLDVALARPKCMGTIPSAKASILHEVKPVTSGCFPIMHDRTKIRQLPNLLRGYEHIRLSTHNVINAETAPGGPYKVGTSGSCPNVTNGNGFFATMAWAVPKNDNNKTATNPLTVEVPYICTEGEDQITVWGFHSDSETQMVKLYGDSKPQKFTSSANGVTTHYVSQIGGFPNQAEDGGLPQSGRIVVDYMVQKSGKTGTITYQRGILLPQKVWCASGRSKVIKGSLPLIGEADCLHEKYGGLNKSKPYYTGEHAKAIGNCPIWVKTPLKLANGTKYRPPAKLLKERGFFGAIAGFLEGGWEGMIAGWHGYTSHGAHGVAVAADLKSTQEAINKITKNLNSLSELEVKNLQRLSGAMDELHNEILELDEKVDDLRADTISSQIELAVLLSNEGIINSEDEHLLALERKLKKMLGPSAVEIGNGCFETKHKCNQTCLDRIAAGTFNAGEFSLPTFDSLNITAASLNDDGLDNHTILLYYSTAASSLAVTLMIAIFIVYMVSRDNVSCSICL

SEQ ID NO: 28573 - protein, 584 aa, Artificial Sequence
  derived and/or modified protein sequence (wt) from hemagglutinin__InfluenzaB__EPI271545
MKAIIVLLMVVTSNADRICTGITSSNSPHVVKTATQGEVNVTGVIPLTTTPTKSYFANLKGTRTRGKLCPDCLNCTDLDVALGRPMCVGTTPSAKASILHEVRPVTSGCFPIMHDRTKIRQLPNLLRGYENIRLSTQNVIDAEKAPGGPYRLGTSGSCPNATSKIGFFATMAWAVPKDNYKNATNPLTVEVPYICTEGEDQITVWGFHSDNKTQMKSLYGDSNPQKFTSSANGVTTHYVSQIGDFPDQTEDGGLPQSGRIVVDYMMQKPGKTGTIVYQRGVLLPQKVWCASGRSKVIKGSLPLIGEADCLHEKYGGLNKSKPYYTGEHAKAIGNCPIWVKTPLKLANGTKYRPPAKLLKERGFFGAIAGFLEGGWEGMIAGWHGYTSHGAHGVAVAADLKSTQEAINKITKNLNSLSELEVKNLQRLSGAMDELHNEILELDEKVDDLRADTISSQIELAVLLSNEGIINSEDEHLLALERKLKKMLGPSAVDIGNGCFETKHKCNQTCLDRIAAGTFNAGEFSLPTFDSLNITAASLNDDGLDNHTILLYYSTAASSLAVTLMLAIFIVYMVSRDNVSCSICL

SEQ ID NO: 28574 - protein, 584 aa, Artificial Sequence
  derived and/or modified protein sequence (wt) from hemagglutinin__InfluenzaB__AGB08329
MKAIIVLLMVVTSNADRICTGITSSNSPHVVKTATQGEVNVTGVIPLTTTPTKSYFANLKGTRTRGKLCPDCLNCTDLDVALGRPMCVGTTPSAKASILHEVRPVTSGCFPIMHDRTKIRQLPNLLRGYENIRLSTQNVIDAEKAPGGPYRLGTSGSCPNATSKIGFFATMAWAVPKDNYKNATNPLTVEVPYICTEGEDQITVWGFHSDNKIQMKSLYGDSNPQKFTSSANGVTTHYVSQIGDFPDQTEDGGLPQSGRIVVDYMMQKPGKTGTIVYQRGVLLPQKVWCASGRSKVIKGSLPLIGEADCLHEKYGGLNKSKPYYTGEHAKAIGNCPIWVKTPLKLANGTKYRPPAKLLKERGFFGAIAGFLEGGWEGMIAGWHGYTSHGAHGVAVAADLKSTQEAINKITKNLNSLSELEVKNLQRLSGAMDELHNEILELDEKVDDLRADTISSQIELAVLLSNEGIINSEDEHLLALERKLKKMLGPSAVDIGNGCFETKHKCNQTCLDRIAAGTFNAGEFSLPTFDSLNITAASLNDDGLDNHTILLYYSTAASSLAVTLMLAIFIVYMVSRDNVSCSICL

SEQ ID NO: 28575 - protein, 584 aa, Artificial Sequence; identical to SEQ ID NO: 26755
  derived and/or modified protein sequence (wt) from hemagglutinin__InfluenzaB__EPI294880

SEQ ID NO: 28576 - protein, 583 aa, Artificial Sequence; identical to SEQ ID NO: 26466
  derived and/or modified protein sequence (wt) from hemagglutinin__InfluenzaB__CY018765

SEQ ID NO: 28577 - protein, 466 aa, Artificial Sequence
  derived and/or modified protein sequence (wt) from neuraminidase__InfluenzaB__AAN39743
MLPSTIQTLTLFLTSGGVLLSLYVSALLSYLLYSDILLKFSPTKVIAPTMSLDCANASNVQAVNHSATEEMTFLLPEPEWTYPRLSCQGSTFQKALLISPHRFGEAKGNSAPLIIREPFIACGPKECIHFALTHYAAQPGGYYNGTREDRNKLRHLISVNLGKIPTVENSIFHMAAWSGSACHDGREWTYIGVDGPDSNALIKIKYGEAYTDTYHSYANNILRTQESACNCIGGDCYLMITDGSASGISRCRFLKIREGRIIKEIFPTGRVEHTEECTCGFASNKTIECVCRDNSYTAKRPFVKLNVETDTAEIRLMCTETYLDTPRPDDGSITGPCESNGDKGNGGIKGGFVHQRMASRIGRWYSRTMSKTKRMGMELYVKYDGDPWTDSDALAPSGVMVSMEEPGWYSFGFEIKDKKCDVPCIGIEMVHDGGKKTWHSAATAIYCLMGSGQLLWDTVTGVDMAL

SEQ ID NO: 28578 - protein, 466 aa, Artificial Sequence
  derived and/or modified protein sequence (wt) from neuraminidase__InfluenzaB__AAN39747
MLPSTIQTLILFLTSGGVLLSLYVSALLSYLLYSDILLKFSPTKIIAPTMSLDCANASNVQAVNHSATKEMTFLLPEPEWTYPRLSCQGSTFQKALLISPHRFGEAKGNSAPLIIREPFIACGPKECKHFALTHYAAQPGGYYNGTREDRNKLRHLISVNLGKIPTVENSIFHMAAWSGSACHDGREWTYIGVDGPDSNALIKIKYGEAYTDTYHSYANNILRTQESACNCIGGDCYLMITDGSASGISKCRFLKIREGRIIKEIFPTGRVEHTEECTCGFASNKTIECACRDNSYTAKRPFVKLNVETDTAEIRLMCTKTYLDTPRPDDGSITGPCESNGDKGSGGIKGGFVHQRMASKIGRWYSRTMSKTKRMGMELYVKYDGDPWTDSDALAPSGVMVSIEEPGWYSFGFEIKDKKCDVPCIGIEMVHDGGKKTWHSAATAIYCLMGSGQLLWDTVTGVDMAL

SEQ ID NO: 28579 - protein, 466 aa, Artificial Sequence
  derived and/or modified protein sequence (wt) from neuraminidase__InfluenzaB__AAN39749
MLPSTIQTLTLFLTSGGVLLSLYVSALLSYLLYSDILLKFSPTKVIAPTMSLDCANASNVQAVNHSATEEMTFLLPEPEWTYPRLSCQGSTFQKALLISPHRFGEAKGNSAPLIIREPFIACGPKECKHFALTHYAAQPGGYYNGTREDRNKLRHLISVNLGKIPTVENSIFHMAAWSGSACHDGREWTYIGVDGPDSNALIKIKYGEAYTDTYHSYANNILRTQESACNCIGGDCYLMITDGSASGISRCRFLKIREGRIIKEIFPTGRVEHTEECTCGFASNKTIECACRDNSYTAKRPFVKLNVETDTAEIRLMCTETYLDTPRPDDGSITGPCESNGDKGNGGIKGGFVHQRMASRIGRWYSRTMSKTKRMGMELYVKYDGDPWTDSDALAPSGVMVSMEEPGWYSFGFEIKDKKCDVPCIGIEMVHDGGKKTWHSAATAIYCLMGSGQLLWDTVTGVDMAL

SEQ ID NO: 28580 - protein, 466 aa, Artificial Sequence
  derived and/or modified protein sequence (wt) from neuraminidase__InfluenzaB__AAN39751
MLPSTIQTLTLFLTSGGVLLSLYVSALLSYLLYSDILLKFSPTKVIAPTMSLDCANASNVQAVNHSATEEMTFLLPEPEWTYPRLSCQGSTFQKALLISPHRFGEAKGNSAPLIIREPFIACGPKECKHFALTHYAAQPGGYYNGTREDRNKLRHLISVNLGKIPTVENSIFHMAAWSGSACHDGREWTYIGVDGPDSNALIKIKYGEAYTDTYHSYANNILRTQESACNCIGGDCYLMITDGSASGISRCRFLKIREGRILKEIFPTGRVEHTEECTCGFASNKTIECACRDNSYTAKRPFVQLNVETDTAEIRLMCTETYLDTPRPDDGSITGPCESNGDKGNGGIKGGFVHQRMASRIGRWYSRTMSKTKRMGMDLYVKYDGDPWTDSDALAPSGVMVSMEEPGWYSFGFEIKDKKCDVPCIGIEMVHDGGKKTWHSAATAIYCLMGSGQLLWDTVTGVDMAL

SEQ ID NO: 28581 - protein, 466 aa, Artificial Sequence
  derived and/or modified protein sequence (wt) from neuraminidase__InfluenzaB__AAN39753
MLPSTIQTLTLFLTSGGVLLSLYVSALLSYLLYSDILLKFSPTKVIAPTMSLDCANASNVQAVNHSATEEMTFLLPEPEWTYPRLSCQGSTFQKALLISPHRFGEAKGNSAPLIIREPFIACGPKECKHFALTHYAAQPGEYYNGTREDRNKLRHLISVNLGKIPTVENSIFHMAAWSGSACHDGREWTYIGVDGPDSNALIKIKYGEAYTDTYHSYANNILRTQESACNCIGGDCYLMITDGSASGISRCRFLKIREGRIIKEIFPTGRVEHTEECTCGFASNKTIECACRDNSYTAKRPFVKLNVETDTAEIRLMCTETYLDTPRPDDGSITGPCESNGDKGNGGIKGGFVHQRMASRIGRWYSRTMSKTKRMGMELYVKYDGDPWTDSDALAPSGVMVSMEEPGWYSFGFEIKDKKCDVPCIGIEMVHDGGKKTWHSAATAIYCLMGSGQLLWDTVTGVDMAL

SEQ ID NO: 28582 - protein, 466 aa, Artificial Sequence
  derived and/or modified protein sequence (wt) from neuraminidase__InfluenzaB__AAN39759
MLPSTIQTLTLFLTSGGVLLSLYVSASLSYLLYSDILLKLSPTEITAPTMPLDCANASNVQAVNRSATKGVTLLLPEPEWTYPRLSCPGSTFQKALLISPHRFGETKGNSAPLIIREPFIACGPKECKHFALTHYAAQPGGYYNGTREDRNKLRHLISVKLGKIPTVENSIFHMAAWSGSACHDGKEWTYIGVDGPDSNALLKIKYGEAYTDTYHSYANNILRTQESACNCIGGNCYLMITDGSASGISECRFLKIREGRIIKEIFPTGRVKHTEECTCGFASNKTIECACRDNSYTAKRPFVKLNVETDTAEIRLMCTETYLDTPRPDDGSITGPCESNGDKGSGGIKGGFVHQRMESKIGRWYSRTMSKTKRMGMGLYVKYDGDPWTDSDALALSGVMVSIEEPGWYSFGFEIKDKKCDVPCIGIEMVHDGGKETWHSAATAIYCLMGSGQLLWDTVTGVDMAL

SEQ ID NO: 28583 - protein, 466 aa, Artificial Sequence
  derived and/or modified protein sequence (wt) from neuraminidase__InfluenzaB__AAN39761
MLPSTIQTLTLFLTSGGVLLSLYVSASLSYLLYSDILLKFSQTEITAPTMPLDCANASNVQAVNRSATKGVTLLLPEPEWTYPRLSCPGSTFQKALLISPHRFGETKGNSAPLIIREPFIACGPKECKHFALTHYAAQPGGYYNGTREDRNKLRHLISVKLGKIPTVENSIFHMAAWSGSACHDGREWTYIGVDGPDSNALLKIKYGEAYTDTYHSYAKNILRTQESACNCIGGDCYLMITDGSASGISECRFLKIREGRIIKEIFPTGRIKHTEECTCGFASNKTIECACRDNSYTAKRPFVKLNVETDTAEIRLMCTETYLDTPRPDDGSITGPCESNGDKGSGGIKGGFVHQRMASKIGRWYSRTMSKTKRMGMGLYVKYDGDPWTDSEALALSGVMVSMEEPGWYSFGFEIKDKKCDVPCIGIEMVHDGGKTTWHSAATAIYCLMGSGQLLWDTVTGVDMAL

SEQ ID NO: 28584 - protein, 466 aa, Artificial Sequence
  derived and/or modified protein sequence (wt) from neuraminidase__InfluenzaB__AAN39769
MLPSTIQTLTLFLTSGGVLLSLYVSALLSYLLYSDILLKFSPTKIIAPTTSLDSANASNFQAVNHSATKEMTFLLPEPEWTYPRLSCQGSTFQKALLISPHRFGEAKGNSAPLIIREPFIACGPKECKHFALTHYAAQPGGYYNGTREDRNKLRHLISVNLGKIPTVENSIFHMAAWSGSACHDGREWTYIGVDGPDSNALIKIKYGEAYTDTYHSYANNILRTQESACNCIGGDCYLMITDGSASGISKCRFLKIREGRIIKEIFPTGRVEHTEECTCGFASNKTIECACRDNSYTAKRPFVKLNVETDTAEIRLMCTETYLDTPRPDDGSITGPCESNGDKGSGGIKGGFVHQRMASKIGRWYSRTMSKTKRMGMELYVKYDGDPWTDSDALAPSGVMVSIEEPGWYSFGFEIKDKKCDVPCIGIEMVHDGGKTTWHSAATAIYCLMGSGQLLWDTVTGVDMAL

SEQ ID NO: 28585 - protein, 466 aa, Artificial Sequence
  derived and/or modified protein sequence (wt) from neuraminidase__InfluenzaB__AAN39771
MLPSTIQTLTLFLTSGGVLLSLYVSALLSYLLYSDILLKFSPTKIIAPTTSLDSANASNFQAVNHSATKEMTFLLPEPEWTYPRLSCQGSTFQKALLISPHRFGEAKGNSAPLIIREPFIACGPKECKHFALTHYAAQPGGYYNGTREDRNKLRHLISVNLGKIPTVENSIFHMAAWSGSACHDGREWTYIGVDGPDSNALIKIKYGEAYTDTYHSYANNILRTQESACNCIGGDCYLMITDGSASGISKCRFLKIREGRIVKEIFPTGRVEHTEECTCGFASNKTIECACRDNSYTAKRPFVKLNVETDTAEIRLMCTETYLDTPRPDDGSITGPCESNGDKGSGGIKGGFVHQRMASKIGRWYSRTMSKTKRMGMELYVKYDGDPWTDSDALDPSGVMVSIEEPGWYSFGFEIKDKKCDVPCIGIEMVHDGGKTTWHSAATAIYCLMGSGQLLWDTITGVDMAL

SEQ ID NO: 28586 - protein, 466 aa, Artificial Sequence
  derived and/or modified protein sequence (wt) from neuraminidase__InfluenzaB__AAN39773
MLPSTIQTLTLFLTSGGVLLSLYVSALLSYLLYSDILLKFSPTKIIAPTTSLDSANASNFQAVNHSATKEMTFLLPEPEWTYPRLSCQGSTFQKALLISPHRFGEAKGNSAPLIIREPFIACGPKECKHFALTHYAAQPGGYYNGTREDRNKLRHLISVNFGKIPTVENSIFHMAAWSGSACHDGREWTYIGVDGPDSNALIKIKYGEAYTDTYHSYANNILRTQESACNCIGGDCYLMITDGSASGISKCRFLKIREGRIVKEIFPTGRVEHTEECTCGFASNKTIECACRDNSYTAKRPFVKLNVETDTAEIRLMCTETYLDTPRPDDGSITGPCESNGDKGSGGIKGGFVHQRMASKIGRWYSRTMSKTKRMGMELYVKYDGDPWTDSDALAPSGVMVSIEEPGWYSFGFEIKDKKCDVPCIGIEMVHDGGKTTWHSAATAIYCLMGSGQLLWDTITGVDMAL

SEQ ID NO: 28587 - protein, 466 aa, Artificial Sequence
  derived and/or modified protein sequence (wt) from neuraminidase__InfluenzaB__AAN39775
MLPSTIQTLTLFLTSGGVLLSLYVSALLSYLLYSDILLKFSPTKIIAPTTSLDSANASNFQAVNHSATKEMTFLLPEPEWTYPRLSCQGSTFQKALLISPHRFGEAKGNSAPLIIREPFIACGPKECKHFALTHYAAQPGGYYNGTREDRNKLRHLISVNLGKIPTVENSIFHMAAWSGSACHDGKEWTYIGVDGPDSNALIKIKYGEAYTDTYHSYANNILRTQESACNCIGGDCYLMITDGSASGISKCRFLKIREGRIIKEIFPTGRVEHTEECTCGFASNKTIECACRDNSYTAKRPFVKLNVETDTAEIRLMCTETYLDTPRPDDGSITGPCESNGDKGSGGIKGGFVHQRMASKIGRWYSRTMSKTKRMGMELYVKYDGDPWTDSDALAPSGVMVSIEEPGWYSFGFEIKDKKCDVPCIGIEMVHDGGKTTWHSAATAIYCLMGSGQLLWDTVTGVDMAL

SEQ ID NO: 28588 - protein, 466 aa, Artificial Sequence
  derived and/or modified protein sequence (wt) from neuraminidase__InfluenzaB__AAN39777
MLPSTIQTLTLFLTSGGVLLSLYVSASLSYLLYSDILLKFSQTEITAPTMPLDCANASNVQAVNRSATKGVTLLPPEPEWTYPRLSCPGSTFQKALLISPHRFGETKGNSAPLIIREPFIACGPKECKHFALTHYAAQPGGYYNGTREDRNKLRHLISVKLGKIPTVENSIFHMAAWSGSACHDGREWTYIGVDGPDSNALLKIKYGEAYTDTYHSYAKNILRTQESACNCIGGDCYLMITDGSASGISECRFLKIREGRIIKEIFPTGRVKHTEECTCGFASNKTIECACRDNSYTAKRPFVKLNVETDTAEIRLMCTETYLDTPRPDDGSITGPCESNGNKGSGGIKGGFVHQRMASKIGRWYSRTMSKTKRMGMGLYVKYDGDPWTDSEALALSGVMVSMEEPGWYSFGFEIKDKKCDVPCIGIEMVHDGGKTTWHSAATAIYCLMGSGQLLWDTVTGVDMAL

SEQ ID NO: 28589 - protein, 466 aa, Artificial Sequence; identical to SEQ ID NO: 28584
  derived and/or modified protein sequence (wt) from neuraminidase__InfluenzaB__AAN39779

SEQ ID NO: 28590 - protein, 466 aa, Artificial Sequence
  derived and/or modified protein sequence (wt) from neuraminidase__InfluenzaB__AAN39781
MLPSTIQTLTLFLTSGGVLLSLYVSASLSYLLYSDILLKFSSTEITAPTMPLNCANASNVQAVNHSATKGVTLPLPEPEWTYPRLSCPGSTFQKALLISPHRFGETKGNSAPLIIREPFIACGPKECKHFALTHYAAQPGGYYNGTREDRNKLRHLISVKLGKIPTVENSIFHMAAWSGSACHDGREWTYIGVDGPDSNALLKIKYGEAYTDTYHSYANNILRTQESACNCIGGDCYLMITDGSASGVSECRFLKIREGRIIKEIFPTGRVEHTEECTCGFASNKTIECACRDNSYTAKRPFVKLNVETDTAEIRLMCTETYLDTPRPDDGSITGPCESNGDKGSGGIKGGFVHQRMASKIGRWYSRTMSKNKRMGMGLYVKYDGDPWIDSDALTLSGVMVSMEEPGWYSFGFEIKDKKCDVPCIGIEMVHDGGKETWHSAATAIYCLMGSGQLLWDTVTGVNMAL

SEQ ID NO: 28591 - protein, 466 aa, Artificial Sequence
  derived and/or modified protein sequence (wt) from neuraminidase__InfluenzaB__AAN39783
MLPSTIQTLTLFLTSGGVLLSLYVSASLSYLLYSDILLKFSQTEITAPTMPLDCANASNVQAVNRSATKGVTLLLPEPEWTYPRLSCPGSTFQKALLISPHRFGETKGNSAPLIIREPFIACGPKECKHFALTHYAAQPGGYYNGTREDRNKLRHLISVKLGKIPTVENSIFHMAAWSGSACHDGREWTYIGVDGPDSNALLKIKYGEAYTDTYHSYAKNILRTQESACNCIGGDCYLMITDGSASGISECRFLKIREGRIIKEIFPTGRVKHTEECTCGFASNKTIECACRDNSYTAKRPFVKLNVETDTAEIRLMCTETYLDTPRPNDGSITGPCESNGDKGSGGIKGGFVHQRMASKIGRWYSRTMSKTKRMGMGLYVKYDGDPWTDSEALALSGVMVSMEEPGWYSFGFEIKDKKCDVPCIGIEMVHDGGKTTWHSAATAIYCLMGSGQLLWDTVTGVDMAL

SEQ ID NO: 28592 - protein, 466 aa, Artificial Sequence
  derived and/or modified protein sequence (wt) from neuraminidase__InfluenzaB__AAN39785
MLPSTIQTLTLFLTSGGVLLSLYVSALLSYLLYSDILLKFSPTKVIAPTMSLDYANASNVQAVNHSATEEMTFLLPEPEWTYPRLSCQGSTFQKALLISPHRFGEAKGNSAPLIIREPFIACGPKECKHFALTHYAAQPGGYYNGTREDRNKLRHLISVNLGKIPTVENSIFHMAAWSGSACHDGREWTYIGVDGPDSNALIKIKYGEAYTDTYHSYANNILRTQESACNCIGGDCYLMITDGSASGISRCRFLKIREGRIIKEIFPTGRVEHTEECTCGFASNKTIECACRDNSYTAKRPFVKLNVETDTAEIRLMCTETYLDTPRPDDGSITGPCESNGDKGSGGIKGGFVHQRMTSRIGRWYSRTMSKTKRMGMELYVKYDGDPWTDSDALAPSGVMVSMEEPGWYSFGFEIKDKKCDVPCIGIEMVHDGGKKTWHSAATAIYCLMGSGQLLWDTVTGVDMAL

SEQ ID NO: 28593 - protein, 466 aa, Artificial Sequence
  derived and/or modified protein sequence (wt) from neuraminidase__InfluenzaB__AAN39787
MLPSTIQTLTLFLTSGGVLLSLYVSALLSYLLYSDILLKFSPTKVIAPTMSLDYANASNVQAVNHSATEEMTFLLPEPEWTYPRLSCQGSTFQKALLISPHRFGEAKGNSAPLIIREPFIACGPKECKHFALTHYAAQPGGYYNGTREDRNKLRHLISVNLGKIPTVENSIFHMAAWSGSACHDGREWTYIGVDGPDSNALIKIKYGEAYTDTYHSYANNILRTQESACNCIGGDCYLMITDGSASGISRCRFLKIREGRIIKEIFPTGRVEHTEECTCGFASNKTIECACRDNSYTAKRPFVKLNVETDTAEIRLMCTETYLDTPRPDDGSITGPCESNGDKGNGGIKGGFVHQRMASRIGRWYSRTMSKTKRMGMELYVKYDGDPWTDSDALAPSGVMVSMEEPGWYSFGFEIKDKKCDVPCIGIEMVHDGGKKTWHSAATAIYCLMGSGQLLWDTVTGVDMAL

SEQ ID NO: 28594 - protein, 466 aa, Artificial Sequence
  derived and/or modified protein sequence (wt) from neuraminidase__InfluenzaB__AAN39795
MLPSTIQTLTLFLTSGGVLLSLYVSASLSYLLYSDILLKFSPTEITAPTMPLDCANASNVQAVNRSATKGVTLLLPEPEWTYPRLSCPGSTFQKALLISPHRFGETRGNSAPLIIREPFIACGPKECKHFALTHYAAQPGGYYNGTREDRNKLRHLISVKLGKIPTVENSIFHMAAWSGSACHDGREWTYIGVDGPDSNALLKIKYGEAYTDTYHSYANNILRTQESACNCIGGDCYLMITDGSASGTSKCRFLKIREGRIIKEIFPTGRVEHTEECTCGFASNKTIECACRDNNYTAKRPFVKLNVETDAAEIRLMCTETYLDTPRPDDGSITGPCESNGDKGRGGIKGGFVHQRMASKIGRWYSRTMSKTERMGMELYVKYDGDPWTDSDALALSGVMVSMEEPGWYSFGFEIKDKKCDVPCIGIEMVHDGGKKTWHSAATAIYCLMGSGQLLWDTVTGVDMAL

SEQ ID NO: 28595 - protein, 466 aa, Artificial Sequence; identical to SEQ ID NO: 28579
  derived and/or modified protein sequence (wt) from neuraminidase__InfluenzaB__AAN39797

SEQ ID NO: 28596 - protein, 466 aa, Artificial Sequence
  derived and/or modified protein sequence (wt) from neuraminidase__InfluenzaB__AAN39799
MLPSTIQTLTLFLTSGGVLLSLYVSALLSYLLYSDVLLKFSPTKIIAPTMSLDCANASNVQAVNHSATEEMTFLLPEPEWTYPRLSCQGSTFQKALLISPHRFGEAKGNSAPLIIREPFIACGPKECKHFALTHYAAQPGGYYNGTREDRNKLRHLISVNLGKIPTVENSIFHMAAWSGSACHDGREWTYIGVDGPDSNALIKIEYGEAYTDTYHSYAYNILRTQESACNCIGGDCYLMITDGSASGISKCRFLKIREGRIIKEIFPTGRVEHTEECTCGFASNKTIECACRDNSYTAKRPFVKLNVETDTAEIRLMCTETYLDTPRPDDGSITGPCESNGDKGSGGIKGGFVHQRMASKIGRWYSRTMSKTKRMGMELYVKYDGDPWTDSDALAPSGVMVSMEEPGWYSFGFEIKDKKCDVPCIGIEMVHDGGKKTWHSAATAIYCLMGSGQLLWDTVTGVDMAL

SEQ ID NO: 28597 - protein, 466 aa, Artificial Sequence
  derived and/or modified protein sequence (wt) from neuraminidase__InfluenzaB__AAN39801
MLPSTIQTLTLFLTSGGVLLSLYVSASLSYLLYSDILLKFSPTEITAPTMPLDCANASNAQAVNRSATKGVTLLLPEPEWTYPRLSCPGSTFQKALLISPHRFGETKGNSAPLIIREPFIACGPKECKHFALTHYAAQPGGYYNGTREDRNKLRHLISVKLGKIPTVENSIFHMAAWSGSACHDGKEWTYIGVDGPDSNALLKIKYGEAYTDTYHSYANNILRTQESACNCIGGNCYLMITDGSASGISECRFLKIREGRIIKEIFPTGRVKHTEECTCGFASNKTIECACRDNSYTAKRPFVKLNVETDTAEIRLMCTETYLDTPRPDDGSITGPCESNGDKGSGGIKGGFVHQRMASKIGRWYSRTMSKTKRMGMGLYVKYDGDPWTDSDALALSGVMVSMEEPGWYSFGFEIKDKKCDVPCIGIEMVHDGGKETWHSAATAIYCLMGSGQLLWDTVTGVDMAL

SEQ ID NO: 28598 - protein, 466 aa, Artificial Sequence
  derived and/or modified protein sequence (wt) from neuraminidase__InfluenzaB__AAN39803
MLPSTIQTLTLFLTSGGVLLSLYVSASLSYLLYSDILLKFSPTEITAPKVPLDCANASNVQAVNRSATKGMTLLLSEPEWTYPRLSCQGSTFQKALLISPHRFGETRGNSAPLIIREPFIACGPKECKHFALTHYAAQPGGYYNGTREDRNKLRHLISVKLGKIPTVENSIFHMAAWSGSACHDGREWTYIGLDGPDSNALIKIKYGEAYTDTYHSYANNILRTQESACNCIGGDCYLMITDGSASGISKCRFLKIREGRIIKEIFPTGRVEHTEECTCGFASNKTIECACRDNSYTAKRPFVKLNVETDTAEIRLMCTETYLDTPRPDDGSITGPCESNGDKGRGGIKGGFVHQRMASKIGRWYSRTMSKTERMGMELYVKYDGDPWTDSDALAPSGVMVSMKEPGWYSFGFEIKDKKCDVPCIGIEMVHDGGKETWHSAATAIYCLMGSGQLLWDTVTGVDMAL

SEQ ID NO: 28599 - protein, 466 aa, Artificial Sequence
  derived and/or modified protein sequence (wt) from neuraminidase__InfluenzaB__ABA02232
MLPSTIQTLTLFLTSGGVLLSLYVSASLSYLLYSDILLKFSPTEITAPTMPLDCANASNVQAVNRSATKGVTLLLPEPEWTYPRLSCPGSTFQKALLISPHRFGETKGNSAPLIIREPFIACGPKECKHFALTHYAAQPGGYYNGTRGDRNKLRHLISVKLGKIPTVENSIFHMAAWSGSACHDGKEWTYIGVDGPENNALLKIKYGEAYTDTYHSYANNILRTQESACNCIGGNCYLMITDGSASGISECRFLKIREGRIIKEIFPTGRVKHTEECTCGFASNKTIECACRDNSYTAKRPFVKLNVETDTAEIRLMCTETYLDTPRPDDGSITGPCESNGDKGSGGIKGGFVHQRMASKIGRWYSRTMSKTKRMGMGLYVKYDGDPWTDSDALALSGVMVSMEEPGWYSFGFEIKDKKCDVPCIGIEMVHDGGKETWHSAATAIYCLMGSGQLLWDTVTGVDMAL

SEQ ID NO: 28600 - protein, 466 aa, Artificial Sequence
  derived and/or modified protein sequence (wt) from neuraminidase__InfluenzaB__ABI84039
MLPSTIQTLTLFLTSGGVLLSLYVSASLSYLLYSDILLKFSPTEITAPTMPLDCANASNVQAVNRSATKGVTLLLPEPEWTYPRLSCPGSTFQKALLISPHRFGETKGNSAPLIIREPFIACGPNECKHFALTHYAAQPGGYYNGTRGDRNKLRHLISVKLGKIPTVENSIFHMAAWSGSACHDGKEWTYIGVDGPDNNALLKIKYGEAYTDTYHSYANNILRTQESACNCIGGNCYLMITDGSASGVSECRFLKIREGRIIKEIFPTGRVKYTEECTCGFASNKTIECACRDNSYTAKRPFVKLNVETDTAEIRLMCTDTYLDTPRPDDGSITGPCESNGDKGSGGIKGGFVHQRMASKIGRWYSRTMSKTERMGMGLYVKYDGDPWADSDALAFSGVMVSMKEPGWYSFGFEIKDKKCDVPCIGIEMVHDGGKETWHSAATAIYCLMGSGQLLWDTVTGVDMAL

SEQ ID NO: 28601 - protein, 466 aa, Artificial Sequence
  derived and/or modified protein sequence (wt) from neuraminidase__InfluenzaB__ABI84051
MLPSTIQTLTLFLTSGGVLLSLYVSASLSYLLYSDILLRFSQTEITAPIMPLDCANASNVQAVNHSATKGVTLLLPEPEWTYPRLSCPGSTFQKALLISPHRFGETKGNSAPLIIREPFIACGPKECKHFALTHYAAQPGGYYNGTREDRNKLRHLISVKLGKIPTVENSIFHMAAWSGSACHDGREWTYIGVDGPDSNALLKIKYGEAYTDTYHSYAKNILRTQESACNCIGGDCYLMITDGPASGISECRFLKIREGRIIKEIFPTGRVKHTEECTCGFASNKTIECACRDNSYTAKRPFVKLNVETDTAEIRLMCTETYLDTPRPNDGSITGPCESNGDKGSGGIKGGFVHQRMASKIGRWYSRTMSKTKRMGMGLYVKYDGDPWTDSEALALSGVMVSMEEPGWYSFGFEIKDKKCDVPCIGIEMVHDGGKTTWHSAATAIYCLMGSGQLLWDTVTGVDMAL

SEQ ID NO: 28602 - protein, 466 aa, Artificial Sequence
  derived and/or modified protein sequence (wt) from neuraminidase__InfluenzaB__ABI84062
MLPSTIQTLTLFLTSGGVLLSLYVSASLSYLLYSDILLKFSPTEIIAPIMPLDCANASNVQAVNRSTTKGVTLLLPEPEWTYPRLSCPGSTFQKALLISPHRFGETKGNSAPLIIREPFIACGPKECKHFALTHYAAQPGGYYNGTRGDRNKLRHLISVKLGKIPTVENSIFHMAAWSGSACHDGKEWTYIGVDGPDNNALLKIKYGEAYTDTYHSYANNILRTQESACNCIGGNCYLMITDGPASGISECRFLKIREGRIIKEIFPTGRVKHTEECTCGFASNKTIECACRDNSYTAKRPFVKLNVETDTAEIRLMCTETYLDTPRPDDGSITGPCESNGDKGSGGIKGGFVHQRMASKIGRWYSRTMSKTERMGMGLYVKYDGDPWADSDALALSGVMVSMEEPGWYSFGFEIKDKKCDVPCIGIEMVHDGGKETWHSAATAIYCLMGSGQLLWDTVTGVDMAL

SEQ ID NO: 28603 - protein, 466 aa, Artificial Sequence
  derived and/or modified protein sequence (wt) from neuraminidase__InfluenzaB__ABL76280
MLPSTIQTLTLFLTSGGVLLSLYVSASLSYLLYSDILLKFSPTEITAPTMPLNCANASNVQAVNRSATKGVTLLLPEPEWTYPRLSCPGSTFQKALLISPHRFGETKGNSAPLIIREPFIACGPKECKHFALTHYAAQPGGYYNGTREDRNKLRHLISVKLGKIPTVENSIFHMAAWSGSACHDGREWTYIGVDGPDSNALLKIKYGEAYTDTYHSYANNILRTQESACNCIGGDCYLMITDGSASGISECRFLKIREGRIIKEIFPTGRVEHTEECTCGFASNKTIECACRDNSYTAKRPFVKLNVETDTAEIRLMCTETYLDTPRPDDGSITGPCESNGDKGSGGIKGGFVHQRMASKIGRWYSRTMSKTKRMGMGLYVKYDGDPWIDSDALTLSGVMVSMEEPGWYSFGFEIKDKKCDVPCIGIEMVHDGGKKTWHSAATAIYCLMGSGQLLWDTVTGVDMAL

SEQ ID NO: 28604 - protein, 466 aa, Artificial Sequence
  derived and/or modified protein sequence (wt) from neuraminidase__InfluenzaB__ABL76302
MLPSTIQTLTLFLTSGGVLLSLYVSASLSYLLYSDILLKFPPTEITAPTMPLDCANASNVQAVNRSATKGVTLLLPEPEWTYPRLSCPGSTFQKALLISPHRFGETKGNSAPLIIREPFIACGPKECKHFALTHYAAQPGGYYNGTREDRNKLRHLISVKLGKIPTVENSIFHMAAWSGSACHDGREWTYIGVDGPDSNALLKIKYGEAYTDTYHSYANNILRTQESACNCIGGNCYLMITDGSASGISECRFLKIREGRIIKEIFPTGRVKHTEECTCGFASNKTIECACRDNSYTAKRPFVKLNVETDTAEIRLMCTETYLDTPRPDDGSITGPCESNGDKGSGGIKGGFVHQRMASKIGRWYSRTMSKTKRMGMGLYVKYDGDPWTDSDPLALSGVMVSMEEPGWYSFGFEIKDKKCDVPCIGIEMVHDGGKETWHSAATAIYCLMGSGQMLWDTVTGVDMAL

SEQ ID NO: 28605 - protein, 466 aa, Artificial Sequence
  derived and/or modified protein sequence (wt) from neuraminidase__InfluenzaB__ABL76313
MLPSTIQTLTLFLTSGGVLLSLYVSASLSYLLYSDILLKFSPKEITAPTMPLNCANASNVQAVNRSATKGVTFPLPEPEWTYPRLSCPGSTFQKALLISPHRFGETKGNSAPLIIREPFIACGPKECKHFALTHYAAQPGGYYNGTREDRNKLRHLISVKLGKIPTVENSIFHMAAWSGSACHDGREWTYIGVDGPDSNALLKIKYGEAYTDTYHSYANNILRTQESACNCIGGDCYLMITDGSASGISECRFLKIREGRIIKEIFPTGRVEHTEECTCGFASNKTIECACRDNSYTAKRPFVKLNVETDTAEIRLMCTETYLDTPRPDDGSITGPCESNGDKGSGGIKGGFVHQRMASKIGRWYSRTMSKTKRMGMGLYVKYDGDPWIDSDALTLSGVMVSVEEPGWYSFGFEIKDKKCDVPCIGIEMVHDGGKTTWHSAATAIYCLMGSGQLLWDTVTGVDMAL

SEQ ID NO: 28606 - protein, 466 aa, Artificial Sequence
  derived and/or modified protein sequence (wt) from neuraminidase__InfluenzaB__ABL76335
MLPSTIQTLTLFLTSGGVLLSLYVSASLSYLLYSDILLKFSPTEITAPTMPLNCANASNVQAVNRSATKGVTLPLPEPEWTYPRLSCPGSTFQKALLISPHRFGETKGNSAPLIIREPFIACGPKECKHFALTHYAAQPGGYYNGTREDRNKLRHLISVKLGKIPTVENSIFHMAAWSGSACHDGREWTYIGVDGPDSNALLKIKYGEAYTDTYHSYANNILRTQESACNCIGGDCYLMITDGSASGISECRFLKIREGRIIKEIFPTGRVEHTEECTCGFASNKTIECACRDNSYTAKRPFVKLNVETDTAEIRLMCTETYLDTPRPDDGSITGPCESNGDKGSGGIKGGFVHQRMASKIGRWYSRTMSKTKRMGMGLYVKYDGDPWIDSDALTLSGVMVSMEEPGWYSFGFEIKDKKCDVPCIGIEMVHDGGKTTWHSAATAIYCLMGSGQLLWDTVTGVDMAL

SEQ ID NO: 28607 - protein, 466 aa, Artificial Sequence
  derived and/or modified protein sequence (wt) from neuraminidase__InfluenzaB__ABL76346
MLPSTIQTLTLFLTSGGVLLSLYVSASLSYLLYSDILLKFSPKEITTPTMPLNCANASNVQAVNRSATKGVTLLLPEPEWTYPRLSCPGSTFQKALLISPHRFGETKGNSAPLIIREPFIACGPKECKHFALTHYAAQPGGYYNGTREDRNKLRHLISVKLGKIPTVENSIFHMAAWSGSACHDGREWTYIGVDGPDSNALLKIKYGEAYTDTYHSYANNILRTQESACNCIGGDCYLMITDGSASGISECRFLKIREGRIIKEIFPTGRVEHTEECTCGFASNKTIECACRDNSYTAKRPFVKLNVETDTAEIRLMCTETYLDTPRPDDGSITGPCESNGDKGSGGIKGGFVHQRMASKIGRWYSRTMSKTKRMGMGLYVKYDGDPWIDSDALTLSGVMVSMEEPGWYSFGFEIKDKKCDVPCIGIEMVHDGGKTTWHSAATAIYCLMGSGQLLWDTVTGVDMAL

SEQ ID NO: 28608 - protein, 466 aa, Artificial Sequence; identical to SEQ ID NO: 28607
  derived and/or modified protein sequence (wt) from neuraminidase__InfluenzaB__ABL76357

SEQ ID NO: 28609 - protein, 466 aa, Artificial Sequence
  derived and/or modified protein sequence (wt) from neuraminidase__InfluenzaB__ABL76368
MLPSTIQTLTLFLTSGGVLLSLYVSASLSYLLYSDILLKFSPTEITAPTMPLDCANASNVQAVNRSATKGVTLLLPEPEWTYPRLSCPGSTFQKALLISPHRFGETKGNSAPLIIREPFIACGPKECKHFALTHYAAQPGGYYNGTREDRNKLRHLISVKLGKIPTVENSIFHMAAWSGSACHDGKEWTYIGVDGPDSNALLKIKYGEAYTDTYHSYANNILRTQESACNCIGGNCYLMITDGSASGISECRFLKIREGRIIKEIFPTGRVKHTEECTCGFASNKTIECACRDNSYTAKRPFVKLNVETDTAEIRLMCTETYLDTPRPDDGSITGPCESNGDKGSGGIKGGFVHQRMASKIGRWYSRTMSKTKRMGMGLYVKYDGDPWTDSGALALSGVMVSMEEPGWYSFGFEIKDKKCDVPCIGIEMVHDGGKETWHSAATAIYCLMGSGQLLWDTVTGVDMAL

SEQ ID NO: 28610 - protein, 467 aa, Artificial Sequence
  derived and/or modified protein sequence (wt) from neuraminidase__InfluenzaB__ABL76379
MLPSTIQTLTLFLTSGGVLLSLYVSASLSYLLYSDILLKFSPTEITAPTMPLDCANASNVQAVNRSATKGVTFLLLPEPEWTYPRLSCPGSTFQKALLISPHRFGETKGNSAPLIIREPFIACGPKECKHFALTHYAAQPGGYYNGTRGDRNKLRHLISVKLGKIPTVENSIFHMAAWSGSACHDGKEWTYIGVDGPDSNALLKIKYGEAYTDTYHSYANNILRTQESACNCIGGNCYLMITDGSASGISECRFLKIREGRIIKEIFPTGRVKHTEECTCGFASNKTIECACRDNSYTAKRPFVKLNVETDTAEIRLMCTETYLDTPRPDDGSITGPCESNGDKGSGGIKGGFVHQRMASKIGRWYSRTMSKTKRMGMGLYVKYDGDPWTDSDALALSGVMVSMEEPGWYSFGFEIKDKKCDVPCIGIEMVHDGGKETWHSAATAIYCLMGSGQLLWDTVTGVDMAL

SEQ ID NO: 28611 - protein, 466 aa, Artificial Sequence
  derived and/or modified protein sequence (wt) from neuraminidase__InfluenzaB__ABL76390
MLPSTIQTLTLFLTSGGVLLSLYVSASLSYLLYSDILLKFSPTEITAPTMPLDCANASNVQAVNRSSTKGVTFLLPEPEWTYPRLSCPGSTFQKALLISPHRFGETKGNSAPLIIREPFIACGPKECKHFALTHYAAQPGGYYNGTREDRNKLRHLISVKLGKIPTVENSIFHMAAWSGSACHDGKEWTYIGVDGPDSNALLKIKYGEAYTDTYHSYANNILRTQESACNCIGGNCYLMITDGSASGISECRFLKIREGRIIKEIFPTGRVKHTEECTCGFASNKTIECACRDNSYTAKRPFVKLNVETDTAEIRLMCTETYLDTPRPDDGSITGSCESDGDKGSGGIKGGFVHQRMASKIGRWYSRTMSKTKRMGMGLYVRYDGDPWTDSSALALSGVMVSMEEPGWYSFGFEIKDKKCDVPCIGIEMVHDGGKETWHSAATAIYCLMGSGQLLWDTVTGVDMAL

SEQ ID NO: 28612 - protein, 466 aa, Artificial Sequence
  derived and/or modified protein sequence (wt) from neuraminidase__InfluenzaB__ABL76412
MLPSTIQTLTLFLTSGGVLLSLYVSASLSYLLYSDILLKFSPTEITAPTMPLDCANASNVQAVNRSATKGVTLLIPEPEWTYPRLSCPGSTFQKALLISPHRFGETKGNSAPLIIREPFIACGPKECKHFALTHYTAQPGGYYNGTRGDRNKLRHLISVKLGKIPTVENSIFHMAAWSGSACHDGKEWTYIGVDGPDSNALLKIKYGEAYTDTYHSYANNILRTQESACNCIGGNCYLMITDGSASGISECRFLKIREGRIIKEIFPTGRVKHTEECTCGFASNKTIECACRDNSYTAKRPFVKLNVETDTAEIRLMCTETYLDTPRPDDGSITGPCESNGDKGSGGIKGGFVHQRMASKIGRWYSRTMSKTKRMGMGLYVKYDGDPWTDSDALALSGVMVSMEEPGWYSFGFEIKDKKCDVPCIGIEMVHDGGKETWHSAATAIYCLMGSGQLLWDTVTGVDMAL

SEQ ID NO: 28613 - protein, 466 aa, Artificial Sequence
  derived and/or modified protein sequence (wt) from neuraminidase__InfluenzaB__ABL76423
MLPSTIQTLTLFLTSGGVLLSLYVSASLSYLLYSDILLKFSPTEITAPTMPLDCANASNVQAVNHSATKGVTLLLPEPEWTYPRLSCPGSTFQKALLISPHRFGETKGNSAPLIIREPFIACGPKECKHFALTHYAAQPGGYYNGTRGDRNKLRHLISVKLGKIPTVENSIFHMAAWSGSACHDGKEWTYIGVDGPDSNALLKIKYGEAYTDTYHSYANNILRTQESACNCIGGNCYLMITDGSASGISECRFLKIREGRIIKEIFPTGRVKHTEECTCGFASNKTIECACRDNSYTAKRPFVKLNVETDTAEIRLMCTETYLDTPRPDDGSITGPCESNGDKGSGGIKGGFVHQRMASKIGRWYSRTMSKTKRMGMGLYVKYDGDPWTDSDALAFSGVMVSMEEPGWYSFGFEIKDKKCDVPCIGIEMVHDGGKETWHSAATAIYCLMGSGQLLWDTVTGVDMAL

SEQ ID NO: 28614 - protein, 466 aa, Artificial Sequence
  derived and/or modified protein sequence (wt) from neuraminidase__InfluenzaB__ABL76434
MLPSTIQTLTLFLTSGGVLLSLYVSASLSYLLYSDILLKFSPTEITAPTMPLDCANASNVQAVNRSATKGVTLLLPEPEWTYPRLSCPGSTFQKALLISPHRFGETKGNSAPLIIREPFIACGPKECKHFALTHYAAQPGGYYNGTRGDRNKLRHLISVKLGKIPTVENSIFHMAAWSGSACHDGKEWTYIGVDGPDNNALLKIKYGEAYTDTYHSYANNILRTQESACNCIGGNCYLMITDGSASGISECRFLKIREGRIIKEIFPTGRVKHTEECTCGFASNKTIECACRDNSYTAKRPFVKLNVETDTAEIRLMCTETYLDTPRPDDGSITGPCESNGDKGSGGIKGGFVHQRMASKIGRWYSRTMSKTKRMGMGLYVKYDGDPWADSDALALSGVMVSMEEPGWYSFGFEIRDKKCDVPCIGIEMVHDGGKETWHSAATAIYCLMGSGQLLWDTVTGVDMAL

SEQ ID NO: 28615 - protein, 466 aa, Artificial Sequence
  derived and/or modified protein sequence (wt) from neuraminidase__InfluenzaB__ABL76456
MLPSTIQTLTLFLTSGGVLLSLYVSASLSYLLYSDILLKFSPTEITAPTMPLDCANASNVQAVNRSATKGVKLLLPEPEWTYPRLSCPGSTFQKALLISPHRFGETKGNSAPLIIREPFIACGPKECKHFALTHYAAQPGGYYNGTRGDRNKLRHLISVKLGKIPTVENSIFHMAAWSGSACHDGKEWTYIGVDGPDNNALLKIKYGEAYTDTYHSYANNILRTQESACNCIGGNCYLMITDGSASGVSECRFLKIREGRIIKEIFPTGRVKHTEECTCGFASNKTIECACRDNSYTAKRPFVKLNVETDTAEIRLMCTETYLDTPRPDDGSITGPCESNGDKGSGGIKGGFVHQRMASKIGRWYSRTMSKTKRMGMGLYVKYDGDPWADSDALALSGVMVSMEEPGWYSFGFEIKDKKCDVPCIGIEMVHDGGKETWHSAATAIYCLMGSGQLLWDTVTGVDMAL

SEQ ID NO: 28616 - protein, 466 aa, Artificial Sequence
  derived and/or modified protein sequence (wt) from neuraminidase__InfluenzaB__ABL76467
MLPSTIQTLTLFLTSGGVLLSLYVSASLSYLLYSDILLKFSPTEITAPTMPLDCANASNVQAVNRSATKGVTLLLPEPEWTYPRLSCPGSTFQKALLISPHRFGETKGNSAPLIIREPFIACGPKECKHFALTHYAAQPGGYYNGTRGDRNKLRHLISVKLGKIPTVENSIFHMAAWSGSACHDGKEWTYIGVDGPDNNALLKIKYGEAYTDTYHSYANNILRTQESACNCIGGNCYLMITDGSASGISECRFLKIREGRIIKEIFPTGRVKHTEECTCGFASNKTIECACRDNSYTAKRPFVKLNVETDTAEIRLMCTETYLDTPRPDDGSITGPCESNGDKGSGGIKGGFVHQRMASKIGRWYSRTMSKTKRMGMGLYVKYDGDPWADSDALALSGVMVSMEEPGWYSFGFEIKDKKCDVPCIGIEMVHDGGKETWHSAATAIYCLMGSGQLLWDTVTGVDMAL

SEQ ID NO: 28617 - protein, 466 aa, Artificial Sequence
  derived and/or modified protein sequence (wt) from neuraminidase__InfluenzaB__ABL76478
MLPSTIQTLTLFLTSGGVLLSLYVSASLSYLLYSDILLKFSPTEITAPTMPLDCANASNVQAVNRSATKGVKLLLPEPEWTYPRLSCPGSTFQKALLISPHRFGETKGNSAPLIIREPFIACGPKECKHFALTHYAAQPGGYYNGTRGDRNKLRHLISVKLGKIPTVENSIFHMAAWSGSACHDGKEWTYIGVDGPDNNALLKIKYGEAYTDTYHSYANNILRTQESACNCIGGNCYLMITDGSASGVSECRFLKIREGRIIKEIFPTGRVKHTEECTCGFASNKTIECACRDNSYTAKRPFVKLNVETDTAEIRLMCTKTYLDTPRPDDGSITGPCESNGDKGSGGIKGGFVHQRMASKIGRWYSRTMSKTKRMGMGLYVKYDGDPWADSDALALSGVMVSMEEPGWYSFGFEIKDKKCDVPCIGIEMVHDGGKETWHSAATAIYCLMGSGQLLWDTVTGVDMAL

SEQ ID NO: 28618 - protein, 466 aa, Artificial Sequence
  derived and/or modified protein sequence (wt) from neuraminidase__InfluenzaB__ABL76522
MLPSTIQTLTLFLTSGGVLLSLYVSASLSYLLYSDILLKFSPTEITAPTMPLDCANASNVQAVNRSATKGVTLLLPEPEWTYPRLSCPGSTFQKALLISPHRFGETKGNSAPLIIREPFIACGPNECKHFALTHYAAQPGGYYNGTRGDRNKLRHLISVKLGKIPTVENSIFHMAAWSGSACHDGKEWTYIGVDGPDNNALLKIKYGEAYTDTYHSYANNILRTQESACNCIGGNCYLMITDGSASGVSECRFLKIREGRIIKEIFPTGRVKHTEECTCGFASNKTIECACRDNSYTAKRPFVKLNVETDTAEIRLMCTETYLDTPRPDDGSITGPCESNGDKGSGGIKGGFVHQRMASKIGRWYSRTMSKTERMGMGLYVKYDGDPWADSDALALSGVMVSMEEPGWYSFGFEIKDKKCDVPCIGIEMVHDGGKETWHSAATAIYCLMGSGQLLWDTVTGVDMAL

SEQ ID NO: 28619 - protein, 466 aa, Artificial Sequence
  derived and/or modified protein sequence (wt) from neuraminidase__InfluenzaB__ABL76533
MLPSTIQTLTLFLTSGGVLLSLYVSASLSYLLYSDILLKFSPTEITAPTMPLDCANASNVQAVNRSATKGVTLLLPEPEWTYPRLSCPGSTFQKALLISPHRFGETKGNSAPLIIREPFIACGPNECKHFALTHYAAQPGGYYNGKRGDRNKLRHLISVKLGKIPTVENSIFHMAAWSGSACHDGKEWTYIGVDGPDNNALLKIKYGEAYTDTYHSYANNILRTQESACNCIGGNCYLMITDGSASGVSECRFLKIREGRIIKEIFPTGRVKHTEECTCGFASNKTIECACRDNSYTAKRPFVKLNVETDTAEIRLMCTETYLDTPRPDDGSITGPCESNGDKGSGGIKGGFVHQRMASKIGRWYSRTMSKTERMGMGLYVKYDGDPWADSDALALSGVMVSMEEPGWYSFGFEIKDKKCDVPCIGIEMVHDGGKETWHSAATAIYCLMGSGQLLWDTVTGVDMAL

SEQ ID NO: 28620 - protein, 466 aa, Artificial Sequence
  derived and/or modified protein sequence (wt) from neuraminidase__InfluenzaB__ABL76544
MLPSTIQTLTLFLTSGGVLLSLYVSASLSYLLYSDILLKFSPTEITAPTMPLDCANASNVQAVNRSATKGVTLLLPEPEWTYPRLSCPGSTFQKALLISPHRFGETKGNSAPLIIREPFIACGPNECKHFALTHYAAQPGGYYNGTRGERNKLRHLISVKLGKIPTVENSIFHMAAWSGSACHDGKEWTYIGVDGPDNNALLKIKYGEAYTDTYHSYANNILRTQESACNCIGGNCYLMITDGSASGVSECRFLKIREGRIIKEIFPTGRVKHTEECTCGFASNKTIECACRDNSYTAKRPFVKLNVETDTAEIRLMCTETYLDTPRPDDGSITGPCESNGDKGSGGIKGGFVHQRMASKIGRWYSRTMSKTERMGMGLYVKYDGDPWADSDALALSGVMVSMEEPGWYSFGFEIKDKKCDVPCIGIEMVHDGGKETWHSAATAIYCLMGSGQLLWDTVTGVDMAL

SEQ ID NO: 28621 - protein, 466 aa, Artificial Sequence; identical to SEQ ID NO: 28619
  derived and/or modified protein sequence (wt) from neuraminidase__InfluenzaB__ABL76566

SEQ ID NO: 28622 - protein, 466 aa, Artificial Sequence
  derived and/or modified protein sequence (wt) from neuraminidase__InfluenzaB__ABL76588
MLPSTIQTLTLFLTSGGVLLSLYVSASLSYLLYSDILLKFSPTEITAPTMPLDYANASNVQAVNRSATKGVTLLLPEPEWTYPRLSCPGSTFQKALLISPHRFGETKGNSAPLIIREPFIACGPNECKHFALTHYAAQPGGYYNGTRGDRNKLRHLISVKLGKIPTVENSIFHMAAWSGSACHDGKEWTYIGVDGPDNNALLKIKYGEAYTDTYHSYANNILRTQESACNCIGGNCYLMITDGSASGVSECRFLKIREGRIIKEIFPTGRVKHTEECTCGFASNKTIECACRDNSYTAKRPFVKLNVETDTAEIRLMCTETYLDTPRPDDGSITGPCESNGDKGSGGIKGGFVHQRMASKIGRWYSRTMSKTERMGMGLYVKYDGDPWADSDALALSGVMVSMEEPGWYSFGFEIKDKKCDVPCIGIEMVHDGGKETWHSAATAIYCLMGSGQLLWDTVTGVDMAL

SEQ ID NO: 28623 - protein, 466 aa, Artificial Sequence; identical to SEQ ID NO: 28618
  derived and/or modified protein sequence (wt) from neuraminidase__InfluenzaB__ABL76599

SEQ ID NO: 28624 - protein, 466 aa, Artificial Sequence; identical to SEQ ID NO: 28618
  derived and/or modified protein sequence (wt) from neuraminidase__InfluenzaB__ABL76610

SEQ ID NO: 28625 - protein, 466 aa, Artificial Sequence
  derived and/or modified protein sequence (wt) from neuraminidase__InfluenzaB__ABL76621
MLPSTIQTLTLFLTSGGVLLSLYVSASLSYLLYSDILLKFSPTEITAPTMPLDCANASNVQAVNRSATKGVTLLLPEPEWTYPRLSCPGSTFQKALLISPHRFGETKGNSAPLIIREPFIACGPKECKHFALTHYAAQPGGYYNGTRGDRNKLRHLISVKLGKIPTVENSIFHMAAWSGSACHDGKEWTYIGVDGPDNNALLKIKYGEAYTDTYHSYANNILRTQESACNCIGGNCYLMITDGSASGVSECRFLKIREGRIIKEIFPTGRVKHTEECTCGFASNKTIECACRDNSYTAKRPFVKLNVETDTAEIRLMCTETYLDTPRPDDGSITGPCESNGEKGSGGIKGGFVHQRMASKIGRWYSRTMSKTKRMGMGLYVKYDGDPWADSDALALSGVMVSMEEPGWYSFGFEIKDKKCDIPCIGIEMVHDGGKETWHSAATAIYCLMGSGQLLWDTVTGVDMAL

SEQ ID NO: 28626 - protein, 466 aa, Artificial Sequence
  derived and/or modified protein sequence (wt) from neuraminidase__InfluenzaB__ABL76632
MLPSTIQTLTLFLTSGGVLLSLYVSASLSYLLYSDILLKFSQTEITAPIMPLDCANASNVQAVNRSATKGVTLLLPEPEWTYPRLSCPGSTFQKALLISPHRFGETKGNSAPLIIREPFIACGPTECKHFALTHYAAQPGGYYNGTREDRNKMRHLISVKLGKIPTVENSIFHMAAWSGSACHDGKEWTYIGVDGPDSNALLKIKYGEAYTDTYHSYAKNILRTQESACNCIGGDCYLMITDGPASGISECRFLKIREGRIIKEIFPTGRVKHTEECTCGFASNKTIECACRDNSYTAKRPFVKLNVETDTAEIRLMCTETYLDTPRPNDGSITGPCESDGDKGSGGIKGGFVHQRMASKIGRWYSRTMSKTKRMGMGLYVKYDGDPWTDSEALALSGVMVSMEEPGWYSFGFEIKDKKCDVPCIGIEMVHDGGKTTWHSAATAVYCLMGSGQLLWDTVTGVDMAL

SEQ ID NO: 28627 - protein, 466 aa, Artificial Sequence
  derived and/or modified protein sequence (wt) from neuraminidase__InfluenzaB__ABL76643
MLPSTIQTLTLFLTSGGVLLSLYVSASLSYLLYSDILLKFSQTEITAPIMPLDCANASNVQAVNRSATKGVTLLLPEPEWTYPRLSCPGSTFQKALLISPHRFGETKGNSAPLIIREPFIACGPTECKHFALTHYAAQPGGYYNGTREDRNKLRHLISVKLGKIPTVENSIFHMAAWSGSACHDGKEWTYIGVDGPDSNALLKIKYGEAYTDTYHSYAKNILRTQESACNCIGGDCYLMITDGPASGISECRFLKIREGRIIKEIFPTGRVKHTEECTCGFASNKTIECACRDNSYTAKRPFVKLNVETDTAEIRLMCTETYLDTPRPNDGSITGPCESDGDKGSGGIKGGFVHQRMASKIGRWYSRTMSKTKRMGMGLYVKYDGDPWTDSEALALSGVMVSMEEPGWYSFGFEIKDKKCDVPCIGIEMVHDGGKTTWHSAATAIYCLMGSGQLLWDTVTGVDMAL

SEQ ID NO: 28628 - protein, 466 aa, Artificial Sequence
  derived and/or modified protein sequence (wt) from neuraminidase__InfluenzaB__ABL76654
MLPSTIQTLTLFLTSGGVLLSLYVSASLSYLLYSDILLKFSQTEITAPIMPLDCANASNVQAVNRSTTKGVTLLLPEPEWTYPRLSCPGSTFQKALLISPHRFGETKGNSAPLIIREPFIACGPTECKHFALTHYAAQPGGYYNGTREDRNKLRHLISVKLGKIPTVENSIFHMAAWSGSACHDGKEWTYIGVDGPDSNALLKIKYGEAYTDTYHSYAKNILRTQESACNCIGGDCYLMITDGPASGISECRFLKIREGRIIKEIFPTGRVKHTEECTCGFASNKTIECACRDNSYTAKRPFVKLNVETDTAEIRLMCTETYLDTPRPNDGSITGPCESDGDKGSGGIKGGFVHQRMASKIGRWYSRTMSKTKRMGMGLYVKYDGDPWTDSEALALSGVMVSMEEPGWYSFGFEIKDKKCDVPCIGIEMVHDGGKTTWHSAATAIYCLMGSGQLLWDTVTGVDMAL

SEQ ID NO: 28629 - protein, 466 aa, Artificial Sequence
  derived and/or modified protein sequence (wt) from neuraminidase__InfluenzaB__ABL76665
MLPSTIQTLTLFLTSGGVLLSLYVSASLSYLLYSDILLKFSQTEITAPIMPLDCANASNVQAVNRSATKGVTLLLPEPEWTYPRLSCPGSTFQKALLISPHRFGETKGNSAPLIIREPFIACGPTECKHFALTHYAAQPGGYYNGTREDRNKLRHLISVKLGKIPTVENSIFHMAAWSGSACHDGKEWTYIGVDGPDSNALLKIKYGEAYTDTYHSYAKNILRTQESACNCIGGDCYLMITDGPASGISECRFLKIREGRIIKEIFPTGRVKHTEECTCGFASNKTIECACRDNSYTAKRPFVKLNVETDTAEIRLMCTETYLDTPRPNDGSITGPCEFDGDKGSGGIKGGFVHQRMASKIGRWYSRTMSKTKRMGMGLYVKYDGDPWTDSEALALSGVMVSMEEPGWYSFGFEIKDKKCDVPCIGIEMVHDGGKTTWHSAATAIYCLMGSGQLLWDTVTGVDMAL

SEQ ID NO: 28630 - protein, 466 aa, Artificial Sequence
  derived and/or modified protein sequence (wt) from neuraminidase__InfluenzaB__ABL76676
MLPSTIQTLTLFLTSGGVLLSLYVSASLSYLLYSDILLKFSQTGITAPIMPLDCANASNVQAVNRSATKGVTLLLPEPEWTYPRLSCPGSTFQKALLISPHRFGETKGNSAPLIIREPFIACGPKECKHFALTHYAAQPGGYYNGTREDRNKLRHLISVKLGKIPTVENSIFHMAAWSGSACHDGREWTYIGVDGPDSNALLKIKYGEAYTDTYHSYAKNILRTQESACNCIGGDCYLMITDGPASGISECRFLKIREGRIIKEIFPTGRVKHTEECTCGFASNKTIECACRDNSYTAKRPFVKLNVETDTAEIRLMCTETYLDTPRPNDGSITGPCESNGDKGSGGIKGGFVHQRMASKIGRWYSRTMSKTKRMGMGLYVKYDGDPWTDSEALALSGVMVSMEEPGWYSFGFEIKDKKCDVPCIGIEMVHDGGKTTWHSAATAIYCLMGSGQLLWDTVTGVDMAL

SEQ ID NO: 28631 - protein, 466 aa, Artificial Sequence
  derived and/or modified protein sequence (wt) from neuraminidase__InfluenzaB__ABL76687
MLPSTIQTLTLFLTSGGVLLSLYVSASLSYLLYSDILLKFSQTEITAPIMPLDCANASNVQAVNRSATKGVTLLLPEPEWTYPRLSCPGSTFQKALLISPHRFGETKGNSAPLIIREPFIACGPTECKHFALTHYAAQPGGYYNGTREDRNKLRHLISVKLGKIPTVENSIFHMAAWSGSACHDGKEWTYIGVDGPDSNALLKIKYGEAYTDTYHSYAKNILRTQESACNCIGGDCYLMITDGPASGISECRFLKIREGRIIKEIFPTGRVKHTEECTCGFASNKTIECACRDNSYTAKRPFVKLNVETDTAEIRLMCTETYLDTPRPNDGSITGPCEFDGDKGSGGIKGGFVHQRMASKIGRWYSRTMSKTKRMGMGLYVKYDGDPWTDSEALALSGVMVPMEEPGWYSFGFEIKDKKCDVPCIGIEMVHDGGKTTWHSAATAIYCLMGSGQLLWDTVTGVDMAL

SEQ ID NO: 28632 - protein, 466 aa, Artificial Sequence
  derived and/or modified protein sequence (wt) from neuraminidase__InfluenzaB__ABL76698
MLPSTIQTLTLFLTSGGVLLSLYVSASLSYLLYSDILLKFSPTEITAPTMPLDCANASNVQAVNRSATKGMTLLLPEPEWTYPRLSCPGSTFQKALLISPHRFGETRGNSAPLTIREPFIACGPKECKHFALTHYAAQPGGYYNGTREDRNKLRHLISVKLGKIPTVENSIFHMAAWSGSACHDGREWTYIGVDGPDSNALIKIKYGEAYTDTYHSYANNILRTQESACNCIGGDCYLMITDGSASGISKCRFLKIREGRIIKEIFPTGRVEHTEECTCGFASNKTIECACRDNSYTAKRPFVKLNVETDTAEIRLMCTETYLDTPRPDDGSITGPCESNGDKGRGGIKGGFVHQRMASKIGRWYSRTMSKTERMGMELYVKYDGDPWTDSEALAPSGVMVSMEEPGWYSFGFEIKDKKCDVPCIGIEMVHDGGKKTWHSAATAIYCLMGSGQLLWDTVTGVDMAL

SEQ ID NO: 28633 - protein, 466 aa, Artificial Sequence
  derived and/or modified protein sequence (wt) from neuraminidase__InfluenzaB__ABL76720
MLPSTIQTLTLFLTSGGVLLSLYVSASLSYLLYSDILLKFSPTEITAPTMPLDCANASNVQAVNRSATKGVTLLLPEPEWTYPRLSCPGSTFQKALLISPHRFGETKGNSAPLIIREPFIACGPNECKHFALTHYAAQPGGYYNGTRGDRNKLRHLISVKLGKIPTVENSIFHMAAWSGSACHDGKEWTYIGVDGPDNNALLKIKYGEAYTDTYHSYANKILRTQESACNCIGGNCYLMITDGSASGVSECRFLKIREGRIIKEIFPTGRVKHTEECTCGFASNKTIECACRDNSYTAKRPFVKLNVETDTAEIRLMCTDTYLDTPRPDDGSITGPCESNGDKGSGGIKGGFVHQRMASKIGRWYSRTMSKTERMGMGLYVKYDGDPWADSDALAFSGVMVSMKEPGWYSFGFEIKDKKCDVPCIGIEMVHDGGKETWRSAATAIYCLMGSGQLLWDTVTGVDMAL

SEQ ID NO: 28634 - protein, 466 aa, Artificial Sequence
  derived and/or modified protein sequence (wt) from neuraminidase__InfluenzaB__ABL76731
MLPSTIQTLTLFLTSGGVLLSLYVSASLSYLLYSDILLKFSPTEITAPTMPLDCANASNVHAVNRSATKGVTLLLPEPEWTYPRLSCPGSTFQKALLISPHRFGETKGNSAPLIIREPFIACGPNECKHFAITHYAAQPGGYYNGTRGDRNKLRHLISVKLGKIPTVENSIFHMAAWSGSACHDGKEWTYIGVDGPDNNALLKIKYGEAYTDTYHSYANNILRTQESACNCIGGNCYLMITDGSASGVSECRFLKIREGRIIKEIFPTGRVKHTEECTCGFASNKTIECACRDNSYTAKRPFVKLNVETDTAEIRLMCTDTYLDTPRPDDGSITGPCESNGDKGSGGIKGGFVHQRMASKIGRWYSRTMSKTERMGMGLYVKYDGDPWADSDALAFSGVMVSMKEPGWYSFGFEIKDKKCDVPCIGIEMVHDGGKETWHSAATAIYCLMGSGQLLWDTVTGVDMAL

SEQ ID NO: 28635 - protein, 466 aa, Artificial Sequence
  derived and/or modified protein sequence (wt) from neuraminidase__InfluenzaB__ABL76742
MLPSTIQTLTLFLTSGGVLLSLYVSASLSYLLYSDILLKFSPTEITAPTMPLDCANASNVQAVNRSATKGVTLLLPEPEWTYPRLSCPGSTFQKALLISPHRFGETKGNSAPLIIREPFIACGPNECKHFALTHYAAQPGGYYNGTRGDRNKLRHLISVKLGKIPTVENSIFHMAAWSGSACHDGKEWTYIGVDGPDNNALLKIKYGEAYTDTYHSYANKILRTQESACNCIGGNCYLMITDGSASGVSECRFLKIREGRIIKEIFPTGRVKHTEECTCGFASNKTIECACRDNSYTAKRPFVKLNVETDTAEIRLMCTDTYLDTPRPDDGSITGPCESNGDKGSGGIKGGFVHQRMASKIGRWYSRTMSKTERMGMGLYVKYDGDPWADSDALAFSGVMVSMKEPGWYSFGFEIKDKKCDVPCIGIEMVHDGGKETWHSAATAIYCLMGSGQLLWDTVTGVDMAL

SEQ ID NO: 28636 - protein, 466 aa, Artificial Sequence
  derived and/or modified protein sequence (wt) from neuraminidase__InfluenzaB__ABL76753
MLPSTIQTLTLFLTSGGVLLSLYVSASLSYLLYSDILLKFSQTEITAPIMPLDCANASNVQAVNRSATKGVTLLLPEPEWTYPRLSCPGSTFQKALLISPHRFGETTGNSAPLIIREPFIACGPKECKHFALTHYAAQPGGYYNGTREDRNKLRHLISVKLGKIPTVENSIFHMAAWSGSACHDGREWTYIGVDGPDNNALLKIKYGEAYTDTYHSYAKNILRTQESACNCIGGDCYLMITDGPASGISECRFLKIREGRIIKEIFPTGRVKHTEECTCGFASNKTIECACRDNSYTAKRPFVKLNVETDTAEIRLMCTETYLDTPRPNDGSITGPCESNGDKGSGGIKGGFVHQRMASKIGRWYSRTMSKTKRMGMGLYVKYDGDPWTDSEALALSGVMVSMEEPGWYSFGFEIKDKKCDVPCIGIEMVHDGGKTTWHSAATAIYCLMGSGQLLWDTVTGVDMAL

SEQ ID NO: 28637 - protein, 466 aa, Artificial Sequence; identical to SEQ ID NO: 28606
  derived and/or modified protein sequence (wt) from neuraminidase__InfluenzaB__ABL76764

SEQ ID NO: 28638 - protein, 466 aa, Artificial Sequence; identical to SEQ ID NO: 28606
  derived and/or modified protein sequence (wt) from neuraminidase__InfluenzaB__ABL76775

SEQ ID NO: 28639 - protein, 466 aa, Artificial Sequence
  derived and/or modified protein sequence (wt) from neuraminidase__InfluenzaB__ABL76797
MLPSTIQTLTLFLTSGGVLLSLYVSASLSYLLYSDILLKFSPTEITAPTMPLDCANASNVQAVNRSATKGVTLLLPEPEWTYPRLSCPGSTFQKALLISPHRFGETKGNSAPLIIREPFIACGPKECKHFALTHYAAQPGGYYNGTREDRNKLRHLISVKLGKIPTVENSIFHMAAWSGSACHDGKEWTYIGVDGPDSNALLKIKYGEAYTDTYHSYANNILRTQESACNCIGGNCYLMITDGSASGISECRFLKIREGRIIKEIFPTGRVEHTEECTCGFASNKTIECACRDNSYTAKRPFVKLNVETDTAEIRLMCTETYLDTPRPDDGSITGPCESNGDKGSGGIKGGFVHQRMASKIGRWYSRTMSKTKRMGMGLYVKYDGDPWTDSDALALSGVMVSMEEPGWYSFGFEIKDKKCDVPCIGIEMVHDGGKETWHSAATAIYCLMGSGQLLWDTVTGVNMAL

SEQ ID NO: 28640 - protein, 466 aa, Artificial Sequence
  derived and/or modified protein sequence (wt) from neuraminidase__InfluenzaB__ABL76819
MLPSTIQTLTLFLTSGGVLLSLYVSASLSYLLYSDILLKFSPTEITAPTMPLDCANASNVQAVNRSATKGVTLLLPEPEWTYPRLSCPGSTFQKALLISPHRFGETKGNSAPLIIREPFIACGPKECKHFALTHYAAQPGGYYNGTREDRNKLRHLISVKLGKIPTVENSIFHMAAWSGSACHDGKEWTYIGVDGPDSNALLKIKYGEAYTDTYHSYANNILRTQESACNCIGGNCYLMITDGSASGISECRFLKIREGRIIKEIFPTGRVKHTEECTCGFASNKTIECACRDNSYTAKRPFVKLNVETDTAEIRLMCTETYLDTPRPDDGSITGPCESNGDKGSGGIKGGFVHQRMASKIGRWYSRTMSKTKRMGMGLYVKYDGDPWTDSDALALSGVMVSMEEPGWYSFGFEIKDKKCDVPCIGIEMVHDGGKETWHSAATAIYCLMGSGQLLWDTVTGVDMAL

SEQ ID NO: 28641 - protein, 466 aa, Artificial Sequence
  derived and/or modified protein sequence (wt) from neuraminidase__InfluenzaB__ABL76830
MLPSTIQTLTLFLTSGGVLLSLYVSASLSYLLYSDILLKFSPTKITAPTMPLDCANASNVQAVNRSATKGVTLLLPEPEWTYPRLSCPGSTFQKALLISPHRFGETKGNSAPLIIREPFIACGPKECKHFALTHYAAQPGGYYNGTRGDRNKLRHLISVKLGKIPTVENSIFHMAAWSGSACHDGKEWTYIGVDGPDNNALLKIKYGEAYTDTYHSYANNILRTQESACNCIGGNCYLMITDGSASGVSECRFLKIREGRIIKEIFPTGRVKHTEECTCGFASNKTIECACRDNSYTAKRPFVKLNVETDTAEIRLMCTKTYLDTPRPDDGSITGPCESNGDKGSGGIKGGFVHQRMASKIGRWYSRTMSKTKRMGMGLYVKYDGDPWADSDALALSGVMVSMEEPGWYSFGFEIKDKKCDVPCIGIEMVHDGGKETWHSAATAIYCLMGSGQLLWDTVTGVDMAL

SEQ ID NO: 28642 - protein, 466 aa, Artificial Sequence
  derived and/or modified protein sequence (wt) from neuraminidase__InfluenzaB__ABL76852
MLPSTIQTLTLFLTSGGVLLSLYVSASLSYLLYSDILLKFSPTEITAPTMPLDCANASNVQAVNRSATKGVTLLLPEPEWTYPRLSCPGSTFQKALLISPHRFGETKGNSAPLIIREPFIACGPKECKHFALTHYAAQPGGYYNGTREDRNKLRHLISVKLGKIPTVENSIFHMAAWSGSACHDGKEWTYIGVDGPDSNALLKIKYGEAYTDTYHSYANNILRTQESACNCIGGNCYLMITDGSASGISECRFLKIREGRIIKEIFPTGRVKHTEECTCGFASNKTIECACRDNSYTAKRPFVKLNVETDTAEIRLMCTETYLDTPRPDDGSITGPCESNGDKGSGGIKGGFVHQRMESKIGRWYSRTMSKTKRMGMGLYVKYDGDPWTDSDALALSGVMVSIEEPGWYSFGFEIKDKKCDVPCIGIEMVHDGGKETWHSAATAIYCLMGSGQLLWDTVTGVDMAL

SEQ ID NO: 28643 - protein, 466 aa, Artificial Sequence
  derived and/or modified protein sequence (wt) from neuraminidase__InfluenzaB__ABL76863
MLPSTIQTLTLFLTSGGVLLSLYVSASLSYLLYSDILLKFSPTEITAPTMPLDCANASNVQAVNRSATKGVTLLLPEPEWTYPRLSCPGSTFQKALLISPHRFGETKGNSAPLIIREPFIACGPKECKHFALTHYAAQPGGYYNGTREDRNKLRHLISVKLGKIPTVENSIFHMAAWSGSACHDGKEWTYIGVDGPDSNALLKIKYGEAYTDTYHSYANNILRTQESACNCIGGNCYLMITDGSASGISECRFLKIREGRIIKEIFPTGRVKHTEECTCGFASNKTIECACRDNSYTAKRPFVKLNVETDTAEIRLMCTETYLDTPRPDDGSITGPCESNGDKGSGGIKGGFVHQRMASKIGRWYSRTMSKTKRMGMGLYVKYDGDPWTDSDALALSGVMVSMEEPGWYSFGFEIKDKKCDVPCIGIEMVHDGGKETWHSAATAIYCLMGSGQLLWDTVTGVDMAM

SEQ ID NO: 28644 - protein, 466 aa, Artificial Sequence
  derived and/or modified protein sequence (wt) from neuraminidase__InfluenzaB__ABL76874
MLPSTIQTLTLFLTSGGVLLSLYVSASLSYLLYSDILLKFSPTEITAPTMPLDCANASNVQAVNSSATKGVTLLLPEPEWTYPRLSCPGSTFQKALLISPHRFGETKGNSAPLIIREPFIACGPKECKHFALTHYAAQPGGYYNGTRGDRNKLRHLISVKLGKIPTVENSIFHMAAWSGSACHDGKEWTYIGVDGPDSNALLKIKYGEAYTDTYHSYANNILRTQESACNCIGGNCYLMITDGSASGISECRFLKIREGRIIKEIFPTGRVKHTEECTCGFASNKTIECACRDNSYTAKRPFVKLNVETDTAEIKLMCTETYLDTPRPDDGSITGPCESNGDKGSGGIKGGFVHQRMASKIGRWYSRTMSKTKRMGMGLYVKYDGDPWTDSDALALSGVMVSMEEPGWYSFGFEIKDKKCDVPCIGIEMVHDGGKETWHSAATAIYCLMGSGQLLWDTVTGVDMAL

SEQ ID NO: 28645 - protein, 466 aa, Artificial Sequence
  derived and/or modified protein sequence (wt) from neuraminidase__InfluenzaB__ABL76885
MLPSTIQTLTLFLTSGGVLLSLYVSASLSYLLYSDILLKFSQTEITAPTMPLDYANASNVQAVNRSATKGVTLLLPEPEWTYPRLSCPGSTFQKALLISPHRFGETKGNSAPLIIREPFIACGPKECKHFALTHYAAQPGGYYNGTREDRNKLRHLISVKLGKIPTVENSIFHMAAWSGSACHDGREWTYIGVDGPDSNALLKIKYGEAYTDTYHSYAKNILRTQESACNCIGGDCYLMITDGSASGISECRFLKIREGRIIKEIFPTGRVKHTEECTCGFASNKTIECACRDNSYTAKRPFVKLNVETDTAEIRLMCTETYLDTPRPDDGSITGPCESNGDKGSGGIKGGFVHQRMASKIGRWYSRTMSKTKRMGMGLYVKYDGDPWTDSEALALSGVMVSMEEPGWYSFGFEIKDKKCDVPCIGIEMVHDGGKTTWHSAATAIYCLMGSGQLLWDTVTGVDMAL

SEQ ID NO: 28646 - protein, 466 aa, Artificial Sequence
  derived and/or modified protein sequence (wt) from neuraminidase__InfluenzaB__ABL76896
MLPSTIQTLTLFLTSGGVLLSLYVSASLSYLLYSDILLKFSQTEITAPTMPLDCANASNVQAVNRSATKGVTLLLPEPEWMYPRLSCPGSTFQKALLISPHRFGETKGNSAPLIIREPFIACGPKECKHFALTHYAAQPGGYYNGTREDRNKLRHLISVKLGKIPTVENSIFHMAAWSGSACHDGREWTYIGVDGPDSNALLKIKYGEAYTDTYHSYAKNILRTQESACNCIGGDCYLMITDGSASGISECRFLKIREGRIIKEIFPTGRVKHTEECTCGFASNKTIECACRDNSYTAKRPFVKLNVETDTAEIRLMCTETYLDTPRPDDGSITGPCESNGDKGSGGIKGGFVHQRMASKIGRWYSRTMSKTKRMGMGLYVKYDGDPWTDSEALALSGVMVSMEEPGWYSFGFEIKDKKCDVPCIGIEMVHDGGKTTWHSAATAIYCLMGSGQLLWDAVTGVDMAL

SEQ ID NO: 28647 - protein, 466 aa, Artificial Sequence
  derived and/or modified protein sequence (wt) from neuraminidase__InfluenzaB__ABL76918
MLPSTIQTLTLFLTSGGVLLSLYVSASLSYLLYSDILLKFSPTEITAPTMPLDCANASNVQAVNRSATKGVTLLLPEPEWTYPRLSCPGSTFQKALLISPHRFGETKGNSAPLIIREPFIACGPNECKHFALTHYAAQPGGYYNGTRGDRNKLRHLISVKLGKIPTVENSIFHMAAWSGSACHDGKEWTYIGVDGPDNNALLKIKYGEAYTDTYHSYANNILRTQESACNCIGGNCYLMITDGSASGVSECRFLKIREGRIIKEIFPTGRVKHTEECTCGFASNKTIECACRDNSYTAKRPFVKLNVETDTAEIRLMCTETYLDTPRPDDGSITGPCESNGDKGSGGIKGGFVHQRMASKIGRWYSRTMSKTERMGMGLYVKYDGDPWADSDALALIGVMVSMEEPGWYSFGFEIKDKKCDVPCIGIEMVHDGGKETWHSAATAIYCLMGSGQLLWDTVTGVNMAL

SEQ ID NO: 28648 - protein, 466 aa, Artificial Sequence
  derived and/or modified protein sequence (wt) from neuraminidase__InfluenzaB__ABL76962
MLPSTIQTLTLFLTSGGVLLSLYVSALLSYLLYSDILLKFSPTKIIAPTMSLDCANASNVQAVNHSATEEMTFLLPEPEWTYPRLSCQGSTFQKALLISPHRFGEAKGNSAPLIIREPFIACGPKECKHFALTHYAAQPGGYYNGTREDRNKLRHLISVNLGKIPTVENSIFHMAAWSGSACHDGREWTYIGVDGPDSNALIKIKYGEAYTDTYHSYANNILRTQESACNCIGGDCYLMITDGSASGISKCRFLKIREGRIIKEIFPTGRVEHTEECTCGFASNKTIECACRDNSYTAKRPFVKLNVETDTAEIRLMCTETYLDTPRPDDGSITGPCESNGDKGSGGIKGGFVHQRMASKIGRWYSRTMSKTKRMGMELYVKYDGDPWTDSDALAPSGVMVSMEEPGWYSFGFEIKDKKCDVPCIGIEMVHDGGKKTWHSAATAIYCLMGSGQLLWDTVTGVDMAL

SEQ ID NO: 28649 - protein, 466 aa, Artificial Sequence; identical to SEQ ID NO: 28579
  derived and/or modified protein sequence (wt) from neuraminidase__InfluenzaB__ABL76973

SEQ ID NO: 28650 - protein, 466 aa, Artificial Sequence
  derived and/or modified protein sequence (wt) from neuraminidase__InfluenzaB__ABL76984
MLPSTIQTLTLFLTSGGVLLSLYVSASLSYLLYSDILLKFSQTEITAPTMPLDCANASNVQAVNLSATKGVTLLLPEPEWTYPRLSCPGSTFQKALLISPHRFGETKGNSAPLIIREPFIACGPKECKHFALTHYAAQPGGYYNGTREDRNKLRHLISVKLGKIPTVENSIFHMAAWSGSACHDGREWTYIGVDGPDSNALLKIKYGEAYTDTYHSYANNILRTQESACNCIGGNCYLMITDGSASGISECRFLKIREGRIIKEIFPTGRVEHTEECTCGFASNKTIECACRDNSYTAKRPFVKLNVETDTAEIRLMCTETYLDTPRPDDGSITGPCESNGDKGSGGIKGGFVHQRMASKIGRWYSRTMSKTKRMGMGLYVKYDGDPWTDSDALALSGVMVSMEEPGWYSFGFEIKDKKCDVPCIGIEMVHDGGKRTWHSAATAIYCLMGSGQLLWDTVTGVDMAL

SEQ ID NO: 28651 - protein, 466 aa, Artificial Sequence; identical to SEQ ID NO: 28606
  derived and/or modified protein sequence (wt) from neuraminidase__InfluenzaB__ABL77006

SEQ ID NO: 28652 - protein, 466 aa, Artificial Sequence; identical to SEQ ID NO: 28650
  derived and/or modified protein sequence (wt) from neuraminidase__InfluenzaB__ABL77017

SEQ ID NO: 28653 - protein, 466 aa, Artificial Sequence
  derived and/or modified protein sequence (wt) from neuraminidase__InfluenzaB__ABL77028
MLPSTIQTLTLFLTSGGVLLSLYVSASLSYLLYSDILLKFSPTEITAPTMPLDCANASNVQAVNRSATKGVTLLLPEPEWTYPRLSCPGSTFQKALLISPHRFGETKGNSAPLIIREPFIACGPKECKHFALTHYAAQPGGYYNGTREDRNKLRHLISVKLGKIPTVENSIFHMAAWSGSACHDGKEWTYIGVDGPDSNALLKIKYGEAYTDTYHSYANNILRTQESACNCIGGNCYLMITDGSASGISECRFLKIREGRIIKEIFPTGRVEHTEECTCGFASNKTIECACRDNSYTAKRPFVKLNVETDTAEIRLMCTETYLDTPRPDDGSITGPCESNGDKGSGGIKGGFVHQRMASKIGRWYSRTMSKTKRMGMGLYVKYDGDPWTDSDALALSGVMVSMEEPGWYSFGFEIKDKKCDVPCIGIEMVHDGGKETWHSAATAIYCLMGSGQLLWDTVTGVDMAL

SEQ ID NO: 28654 - protein, 466 aa, Artificial Sequence
  derived and/or modified protein sequence (wt) from neuraminidase__InfluenzaB__ABL77039
MLPSTIQTLTLFLTSGGVLLSLYVSASLSYLLYSDILLKFSPTETTAPTMPLDCANASNVQAVNCSATKGVTLLLPEPEWTYPRLSCPGSTFQKALLISPHRFGETKGNSAPLIIREPFIACGPKECKHFALTHYAAQPGGYYNGTREDRNKLRHLISVKLGKIPTVENSIFHMAAWSGSACHDGKEWTYIGVDGPDSNALLKIKYGEAYTDTYHSYANNILRTQESACNCIGGNCYLMITDGSASGISECRFLKIREGRIIKEIFPTGRVEHTEECTCGFASNKTIECACRDNSYTAKRPFVKLNVETDTAEIRLMCTETYLDTPRPDDGSITGPCESNGDKGSGGIKGGFVHQRMASKIGRWYSRTMSKTKRMGMGLYVKYDGDPWTDSDALALSGVMVSMEEPGWYSFGFEIKDKKCDVPCIGIEMVHDGGKETWHSAATAIYCLMGSGQLLWDTVTGVDMAL

SEQ ID NO: 28655 - protein, 466 aa, Artificial Sequence
  derived and/or modified protein sequence (wt) from neuraminidase__InfluenzaB__ABL77050
MLPSTIQTLTLFLTSGGVLLSLYVSASLSYLLYSDILLKFSPTEITAPAMPLDCANASNVQAVNRSATKGVTLLLPEPEWTYPRLSCPGSTFQKALLISPHRFGETKGNSAPLIIREPFIACGPKECKHFALTHYAAQPGGYYNGTREDRNKLRHLISVKLGKIPTVENSIFHMAAWSGSACHDGKEWTYIGVDGPDSNALLKIKYGEAYTDTYHSYANNILRTQESACNCIGGNCYLMITDGSASGISECRFLKIREGRIIKEIFPTGRVKHTEECTCGFASNKTIECACRDNSYTAKRPFVKLNVETDTAEIRLMCTETYLDTPRPDDGSITGPCESNGDKGSGGIKGGFVHQRMASKIGRWYSRTMSKTKRMGMGLYVKYDGDPWTDSDALALSGVMVSMEEPGWYSFGFEIKDKKCDVPCIGIEMVHDGGKETWHSAATAIYCLMGSGQLLWDTVTGVDMAL

SEQ ID NO: 28656 - protein, 466 aa, Artificial Sequence
  derived and/or modified protein sequence (wt) from neuraminidase__InfluenzaB__ABL77072
MLPSTIQTLTLFLTSGGVLLSLYVSALLSYLLYSDILLKFSPTKIIAPTTSLDSANASNFQAVNHSATKEMTFLLPEPEWTYPRLSCQGSTFQKALLISPHRFGEAKGNSAPLIIREPFIACGPKECKHFALTHYAAQPGGYYNGTREDRNKLRHLISVNLGKIPTVENSIFHMAAWSGSACHDGREWTYIGVDGPDSNALIKIKYGEAYTDTYHSYANNILRTQESACNCIGGDCYLMITDGSASGISKCRFLKIREGRIIKEIFPTGRVEHTEECTCGFASNKTIECACRDNSYTAKRPFVKLNVETDTAEIRLMCTETYLDTPRPDDGSITGPCESNGDKGSGGIKGGFVHQRMASKIGRWYSRTMSKTKRMGMELYVKYDGDPWTDSDALAPSGVMVSIKESGWYSFGFEIKDKKCDVPCIGIEMVHDGGKTTWHSAATAIYCLMGSGQLLWDTVTGVDMAL

SEQ ID NO: 28657 - protein, 466 aa, Artificial Sequence; identical to SEQ ID NO: 28584
  derived and/or modified protein sequence (wt) from neuraminidase__InfluenzaB__ABL77083

SEQ ID NO: 28658 - protein, 466 aa, Artificial Sequence; identical to SEQ ID NO: 28584
  derived and/or modified protein sequence (wt) from neuraminidase__InfluenzaB__ABL77094

SEQ ID NO: 28659 - protein, 466 aa, Artificial Sequence
  derived and/or modified protein sequence (wt) from neuraminidase__InfluenzaB__ABL77105
MLPSTIQTLTLFLTSGGVLLSLYVSASLSYLLYSDILLKFSSTEITAPTMPLDCANASNVQAVNRSATEGVTLLLPEPEWTYPRLSCPGSTFQKALLISPHRFGETKGNSAPLIIREPFIACGPKECKHFALTHYAAQPGGYYNGTREDRNKLRHLISVKLGKIPTVENSIFHMAAWSGSACHDGKEWTYIGVDGPDSNALLKIKYGEAYTDTYHSYANNILRTQESACNCIGGNCYLMITDGSASGISECRFLKIREGRIIKEIFPTGRVEHTEECTCGFASNKTIECACRDNSYTAKRPFVKLNVETDTAEIRLMCTETYLDTPRPDDGSITGPCESNGDKGSGGIKGGFVHQRMASKIGRWYSRTMSKTKRMGMGLYVKYDGDPWTDSDALALSGVMVSMEEPGWYSFGFEIKDKKCDVPCIGIEMVHDGGKETWHSAATAIYCLMGSGQLLWDTVTGVDMAL

SEQ ID NO: 28660 - protein, 466 aa, Artificial Sequence; identical to SEQ ID NO: 28584
  derived and/or modified protein sequence (wt) from neuraminidase__InfluenzaB__ABL77127

SEQ ID NO: 28661 - protein, 466 aa, Artificial Sequence
  derived and/or modified protein sequence (wt) from neuraminidase__InfluenzaB__ABL77138
MLPSTIQTLTLFLTSGGVLLSLYVSALLSYLLYSDILLKFSPTKIIAPTTSLDSANASNFQAVNHSATKEMTFLLPEPEWTYPRLSCQGSTFQKALLISPHRFGEAKGNSAPLIIREPFIACGPKECKHFALTHYAAQPGGYYNGTREDRNKLRHLISVNLGKIPTVENSIFHMAAWSGSACHDGREWTYIGVDGPDSNALIKIKYGEAYTDTYHSYANNILRTQESACNCIGGDCYLMITDGSASGISKCRFLKIREGRIIKEIFPTGRVEHTEECTCGFASNKTIECACRDNSYTAKRPFVKLNVETDTAEIRLMCTETYLDTPRPDDGSITGPCESNGDKGSGGIKGGFVHQRMASKIGRWYSRTMSKTKRMGMELYVKYDGDPWTDSDALAPSGVMVSIEEPGWYSFGFEIKDKKCDVPCIGIEMVHDGGKTTWYSAATAIYCLMGSGQLLWDTVTGVDMAL

SEQ ID NO: 28662 - protein, 466 aa, Artificial Sequence; identical to SEQ ID NO: 28584
  derived and/or modified protein sequence (wt) from neuraminidase__InfluenzaB__ABL77149

SEQ ID NO: 28663 - protein, 466 aa, Artificial Sequence
  derived and/or modified protein sequence (wt) from neuraminidase__InfluenzaB__ABL77160
MLPSTIQTLTLFLTSGGVLLSLYVSASLSYLLYSDILLKFSQTKITAPTMPLDCANASNVQAVNRSATKGVTLLLPEPEWTYPRLSCPGSTFQKALLISPHRFGETKGNSAPLIIREPFIACGPKECKHFALTHYAAQPGGYYNGTREDRNKLRHLISVKLGKIPTVENSIFHMAAWSGSACHDGREWTYIGVDGPDSNALLKIKYGEAYTDTYHSYAKNILRTQESACNCIGGDCYLMITDGSASGISECRFLKIREGRIIKEIFPTGRVKHTEECTCGFASNKTIECACRDNSYTAKRPFVKLNVETDTAEIRLMCTETYLDTPRPNDGSITGPCESDGDRGSGGIKGGFVHQRMESKIGRWYSRTMSKTKRMGMGLYVKYDGDPWTDSEALALSGVMVSMEEPGWYSFGFEIKDKKCDVPCIGIEMVHDGGKTTWHSAATTIYCLMGSGQLLWDTVTGVDMAL

SEQ ID NO: 28664 - protein, 466 aa, Artificial Sequence; identical to SEQ ID NO: 28616
  derived and/or modified protein sequence (wt) from neuraminidase__InfluenzaB__ABL77171

SEQ ID NO: 28665 - protein, 466 aa, Artificial Sequence
  derived and/or modified protein sequence (wt) from neuraminidase__InfluenzaB__ABL77182
MLPSTIQTLTLFLTSGGVLLSLYVSALLSYLLYSDILLKFSPTKIIAPTTSLDSANASNFQAVNHSATKEMTFLLPEPEWTYPRLSCQGSTFQKALLISPHRFGEAKGNSAPLIIREPFIACGPKECKHFALTHYAAQPGGYYNGTREDRNKLRHLISVNLGKIPTVENSIFHMAAWSGSACHDGREWTYIGVDGPDSNALIKIKYGEAYTDTYHSYANNILRTQESACNCIGGDCYLMITDGSASGISKCRFLKIREGRIVKEIFPTGRVEHTEECTCGFASNKTIECACRDNSYTAKRPFVKLNVETDTAEIRLMCTETYLDTPRPDDGSITGPCESNGDKGSGGIKGGFVHQRMASKIGRWYSRTMSKTKRMGMELYVKYDGDPWTDSDALAPSGVMVSIEEPGWYSFGFEIKDKKCDVPCIGIEMVHDGGKTTWHSAATAIYCLMGSGQLLWDTITGVDMAL

SEQ ID NO: 28666 - protein, 466 aa, Artificial Sequence; identical to SEQ ID NO: 28591
  derived and/or modified protein sequence (wt) from neuraminidase__InfluenzaB__ABL77193

SEQ ID NO: 28667 - protein, 466 aa, Artificial Sequence
  derived and/or modified protein sequence (wt) from neuraminidase__InfluenzaB__ABL77204
MLPSTIQTLTLFLTSGGVLLSLYVSASLSYLLYSDILLKFSPTEITAPTMPLDCANASNVQAVNRSATKGVTLLIPEPEWTYPRLSCPGSTFQKALLISPHRFGETKGNSAPLIIREPFIACGPKECKHFALTHYAAQPGGYYNGTRGDRNKLRHLISVKLGKIPTVENSIFHMAAWSGSACHDGKEWTYIGVDGPDNSALLKIKYGEAYTDTYHSYANNILRTQESACNCIGGNCYLMITDGSASGVSECRFLKIREGRIIKEIFPTGRVKHTEECTCGFASNKTIECACRDNSYTAKRPFVKLNVETDTAEIRLMCTETYLDTPRPDDGSITGPCESNGDKGSGGIKGGFVHQRMASKIGRWYSRTMSKTKRMGMGLYVKYDGDPWADSDALALSGVMVSMEEPGWYSFGFEIKDKKCDVPCIGIEMVHDGGKETWHSAATAIYCLMGSGQLLWDTVTGVDMAL

SEQ ID NO: 28668 - protein, 466 aa, Artificial Sequence
  derived and/or modified protein sequence (wt) from neuraminidase__InfluenzaB__ABL77215
MLPSTIQTLTLFLTSGGVLLSLYVSASLSYLLYSDILLKFPSTEITAPTMPLDCANASNVQAVNRSATKGVTLLLPEPEWTYPRLSCPGSTFQKALLISPHRFGETKGNSAPLIIREPFIACGPKECKHFALTHYAAQPGGYYNGTRGDRNKLRHLISVKLGKIPTVENSIFHMAAWSGSACHDGKEWTYIGVDGPDNNALLKIKYGEAYTDTYHSYANNILRTQESACNCIGGNCYLMITDGSASGVSECRFLKIREGRIIKEIFPTGRIKHTEECTCGFASNKTIECACRDNSYTAKRPFVKLNVETDTAEIRLMCTETYLDTPRPDDGSITGPCESNGDKGSGGIKGGFVHQRMASKIGRWYSRTMSKTKRMGMGLYVKYDGDPWADSDALAFSGVMVSMEEPGWYSFGFEIKDKKCDVPCIGIEMVHDGGKETWHSAATAIYCLMGSGQLLWDTVTGVNMAL

SEQ ID NO: 28669 - protein, 466 aa, Artificial Sequence; identical to SEQ ID NO: 28627
  derived and/or modified protein sequence (wt) from neuraminidase__InfluenzaB__ABL77226

SEQ ID NO: 28670 - protein, 466 aa, Artificial Sequence
  derived and/or modified protein sequence (wt) from neuraminidase__InfluenzaB__ABL77237
MLPSTIQTLTLFLTSGGVLLSLYVSASLSYLLYSDILLKFSPTEITAPTMPLDCANASNVQAVNRSATKGVTLLLPEPEWTYPRLSCPGSTFQKALLISPHRFGETKGNSAPLIIREPFIACGPNECKHFALTHYAAQPGGYYNGTRGDRNKLRHLISVKLGKIPTVENSIFHMAAWSGSACHDGKEWTYIGVDGPDNNALLKIKYGEAYTDTYHSYANNILRTQESACNCIGGNCYLMITDGSASGVSECRFLKIREGRIIKEIFPTGRVKHTEECTCGFASNKTIECACRDNSYTAKRPFVKLNVETDTAEIRLMCTDTYLDTPRPDDGSITGPCESNGDKGSGGIKGGFVHQRMASKIGRWYSRTMSKTERMGMGLYVKYDGDPWADSDALAFSGVMVSMKEPGWYSFGFEIKDKKCDVPCIGIEMVHDGGKETWHSAATAIYCLMGSGQLLWDTVTGVDMAL

SEQ ID NO: 28671 - protein, 466 aa, Artificial Sequence
  derived and/or modified protein sequence (wt) from neuraminidase__InfluenzaB__ABL77248
MLPSTIQTLTLFLTSGGVLLSLYVSALLSYLLYSDILLKFSPTKIIAPTMSLDCANASNVQAANHSATKEMTFLLPEPEWTYPRLSCQGSTFQKALLISPHRFGEAKGNSAPLIIREPFIACGPKECKHFALTHYAAQPGGYYNGTREDRNKLRHLISVNLGKIPTVENSIFHMAAWSGSACHDGREWTYIGVDGPDSNALIKIKYGEAYTDTYHSYANNILRTQESACNCIGGDCYLMITDGSASGISKCRFLKIREGRIIKEIFPTGRVEHTEECTCGFASNKTIECACRDNSYTAKRPFVKLNVETDTAEIRLMCTETYLDTPRPDDGSITGPCESNGEKGRGGIKGGFVHQRMASKIGRWYSRTMSKTERMGMELYVKYDGDPWTDSDALAPSGVMVSMKEPGWYSFGFEIKDKKCDVPCIGIEMVHDGGKKTWHSAATAIYCLMGSGQLLWDTVTGVDMAL

SEQ ID NO: 28672 - protein, 466 aa, Artificial Sequence
  derived and/or modified protein sequence (wt) from neuraminidase__InfluenzaB__ABL77259
MLPSTIQTLTLFLTSGGVLLSLYVSASLSYLLYSDILLKFSPTEITAPKVPLDCANASNVQAVNRSATKGMTLLLSEPEWTYPRLSCQGSTFQKALLISPHRFGETRGNSAPLIIREPFIACGPKECKHFALTHYAAQPGGYYNGTREDRNKLRHLISVKLGKIPTVENSIFHMAAWSGSACHDGREWTYIGVDGPDSNALIKIKYGEAYTDTYHSYANNILRTQESACNCIGGDCYLMITDGSASGISKCRFLKIREGRIIKEIFPTGRVEHTEECTCGFASNKTIECACRDNSYTAKRPFVKLNVETDTAEIRLMCTETYLDTPRPDDGSITGPCESNGDKGRGGIKGGFVHQRMASKIGRWYSRTMSKTERMGMELYVKYDGDPWTDSDALAPSGVMVSMKEPGWYSFGFEIKDKKCDVPCIGIEMVHDGGKKTWHSAATAIYCLMGSGQLLWDTVTGVDMAL

SEQ ID NO: 28673 - protein, 466 aa, Artificial Sequence
  derived and/or modified protein sequence (wt) from neuraminidase__InfluenzaB__ABL77270
MLPSTIQTLTLFLTSGGVLLSLYVSASLSYLLYSDILLKFSPTEITAPTMPLDCANASNVQAVNRSATKGMTLLLPEPEWTYPRLSCPGSTFQKALLISPHRFGETRGNSAPLIIREPFIACGPKECKHFALTHYAAQPGGYYNGTREDRNKLRHLISVKLGKIPTVENSIFHMAAWSGSACHDGREWTYIGVDGPDSNALIKIKYGEAYTDTYHSYANNILRTQESACNCIGGDCYLMITDGSASGISKCRFLKIREGRIIKEIFPTGRVEHTEECTCGFASNKTIECACRDNSYTAKRPFVKLNVETDTAEIRLMCTETYLDTPRPDDGSITGPCESNGDKGRGGIKGGFVHQRMASKIGRWYSRTMSKTERMGMELYVKYDGDPWTDSEALAPSGVMVSMEEPGWYSFGFEIKDKKCDVPCIGIEMVHDGGKKTWHSAATAIYCLMGSGQLLWDTVTGVDMAL

SEQ ID NO: 28674 - protein, 466 aa, Artificial Sequence
  derived and/or modified protein sequence (wt) from neuraminidase__InfluenzaB__ABL77281
MLPSTIQTLTLFLTSGGVLLSLYVSVSLSYLLYSDILLRFSPTEITAPTMPLDCANASNVQAVNRSATKGMTLRLPEPEWTYPRLSCPGSTFQKALLISPHRFGETRGNSAPLIIREPFIACGPKECKHFALTHYAAQPGGYYNGTREDRNKLRHLISVKLGKIPTVENSIFHMAAWSGSACHDGREWTYIGVDGPDSNALIKIKYGEAYTDTYHSYANNILRTQESACNCIGGDCYLMITDGSASEISKCRFLKIREGRIIKEIFPTGRVEHTEECTCGFASNKTIECACRDNSYTAKRPFVKLNVETDTAEIRLMCTETYLDTPRPDDGSITGPCESNGDKGRGGIKGGFVHQRMASKIGRWYSRTMSKTERMGMELYVKYDGDPWTDSEALAPSGVMVSMEEPGWYSFGFEIKDKKCDVPCIGIEMVHDGGKKTWHSAATAIYCLMGSGQLLWDTVTGVDMAL

SEQ ID NO: 28675 - protein, 466 aa, Artificial Sequence
  derived and/or modified protein sequence (wt) from neuraminidase__InfluenzaB__ABL77292
MLPSTIQTLTLFLTSGGVLLSLYVSASLSYLLYSGVLLKFSPTEITAPTMPLDCANASNVQAVNRSATKGVTLLLPEPEWTYPRLSCPGSTFQKALLISPHRFGETRGNSAPLIIREPFIACGPKECKHFALTHYAAQPGGYYNGTREDRNKMRHLISVKLGKIPTVENSIFHMAAWSGSACHDGREWTYIGVDGPDSNALIKIKYGEAYTDTYHSYANNILRTQESACNCIGGDCYLMITDGSASGISKCRFLKIREGRIIKEIFPTGRVEHTEECTCGFASNKTIECACRDNSYTAKRPFVKLNVETDTAEIRLMCTETYLDTPRPDDGSITGPCESNGDKGLGGIKGGFVHQRMASKIGRWYSRTMSKTERMGMELYVKYDGDPWTDSDALALSGVMVSMEEPGWYSFGFEIKDKKCDVPCIGIEMVHDGGKKTWHSAATAIYCLMGSGQLLWDTVTGVDMAL

SEQ ID NO: 28676 - protein, 465 aa, Artificial Sequence
  derived and/or modified protein sequence (wt) from neuraminidase__InfluenzaB__ABL77303
MLPSTIQTLTLFLTSGGVLLSLYVSALLSYLLYSDILLKFSPKIIAPTISLDCANASNVQAVNHSATKEMTFLLPEPEWTYPRLSCQGSIFQKALLISPHRFGEAKGNSAPLIIREPFIACGPKECKHFALTHYAAQPGGYYNGTREDRNKLRHLISVNLGKIPTVENSIFHMAAWSGSACHDGREWTYIGVDGPDSNALIKIKYGEAYTDTYHSYANNILRTQESACNCIGGDCYLMITDGSASGISKCRFLKIREGRIIKEIFPTGRVEHTEECTCGFASNKTIECACRDNSYTAKRPFVKLNVETDTAEIRLMCTETYLDTPRPDDGSITGPCESNGDKGRGGVKGGFVHQRIASKIGRWYSRTMSKTERMGMELYVKYDGDPWTDSDALAPSGVMVSMEEPGWYSFGFEIKDKKCDVPCIGIEMVHDGGKKTWHSAATAIYCLMGSGQLLWDTVTGVDMAL

SEQ ID NO: 28677 - protein, 465 aa, Artificial Sequence
  derived and/or modified protein sequence (wt) from neuraminidase__InfluenzaB__ABL77314
MLPSTIQTLTLFLTSGGVLLSLYVSALLSYLLYSDVLLKFSPKIIAPTMSLDCANASNVQAVNHSATEEMTFLLPEPEWTYPRLSCQGSTFQKALLISPHRFGEAKGNSAPLIIREPFIACGPKECKHFALTHYAAQPGGYYNGTREDRNKLRHLISVNLGKIPTVENSIFHMAAWSGSACHDGREWTYIGVDGPDSNALIKIKYGEAYTDTYHSYANNILRTQESACNCIGGDCYLMITDGSASGISKCRFLKIREGRIIKEIFPTGRVEHTEECTCGFASNKTIECACRDNSYTAKRPFVKLNVETDTAEIRLMCTETYLDTPRPDDGSITGPCESNGDKGHGGIKGGFVHQRMASKIGRWYSRTMSKTKRMGMELYVKYDGDPWTDSDALAPSGVMVSMEEPGWYSFGFEIRDKKCDVPCIGIEMVHDGGKKTWHSAATAIYCLMGSGQLLWDTVTGVDMAL

SEQ ID NO: 28678 - protein, 466 aa, Artificial Sequence
  derived and/or modified protein sequence (wt) from neuraminidase__InfluenzaB__ABL77325
MLPSTIQTLTLFLTSGGVLLSLYVSALLSYSLYSDILLKFSPTKTIAPTMSLDCANASNVQAVNHSATKGMTLLLPEPEWTYPRLSCQGSTFQKALLISPHRFGETKGNSAPLIIREPFIACGPKECKHFALTHYAAQPGGYYNGTREDRNKLRHLISVSLGKIPTVENSIFHMAAWSGSACHDGREWTYIGVDGPDSNALIKIKYGEAYTDTYHSYANNILRTQESACNCIGGDCYLMITDGSASGISKCRFLKIREGRIIKEIFPTGRVDHTEECTCGFASNKTIECACRDNSYTAKRPFVKLNVETDTAEIRLMCTETYLDTPRPDDGSITGPCESNGDKGRGGIKGGFVHQRMASKIGRWYSRTMSKTERLGMELYVKYDGDPWTDSDALAPSGVMVSAEEPGWYSFGFEIKDKKCDVPCIGIEMVHDGGKKTWHSAATAIYCLMGSGQLLWDTVTGVDMAL

SEQ ID NO: 28679 - protein, 466 aa, Artificial Sequence
  derived and/or modified protein sequence (wt) from neuraminidase__InfluenzaB__ABL77336
MLPSTIQTLTLFLTSGGVLLSLYVSASLSYLLYSDILLKFSPTEITAPPMPLDCANASNVQAVNRSATKGVTLLLPEPEWTYPRLSCPGSTFQKALLISPHRFGETRGNSAPLIIREPFIACGPKECKHFAITHYAAQPGGYYNGTREDRNKLRHLISVKLGKIPTVENSIFHMAAWSGSACHDGREWTYIGVDGPDSNALLKIKYGEAYTDTYHSYANNILRTQESACNCIGGDCYLMITDGSASGISKCRFLKIREGRIIKEIFPTGRVEHTEECTCGFASNKTIECACRDNSYTAKRPFVKLNVETDTAEIRLMCTETYLDTPRPDDGSITGPCESNGDKGRGGIKGGFVHQRMASKIGRWYSRTMSKTDRMGMELYVKYDGDPWTDSDALALSGVMVSMEEPGWYSFGFEIKDKKCDVPCIGIEMVHDGGKKTWHSAATTIYCLMGSGQLLWDTVTGVDMAL

SEQ ID NO: 28680 - protein, 466 aa, Artificial Sequence
  derived and/or modified protein sequence (wt) from neuraminidase__InfluenzaB__ABL77347
MLPSTIQTLTLFLTSGGVLLSLYVSASLSYLLYSDILLKFSPTKITAPTMPLDCANASNVQAVNHSATKGVTLLLPEPEWTYPRLSCPGSTFQKALLISPHRFGETRGNSAPLIIREPFIACGPKECKHFALTHYAAQPGGYYNGTREDRNKLRHLISVKLGKIPTVENSIFHMAAWSGSACHDGREWTYIGVDGPDSNALLKIKYGEAYTDTYHSYANNILRTQESACNCIGGDCYLMITDGSASGISECRFLKIREGRIIKEIFPTGRVEHTEECTCGFASNKTIECACRDNSYTAKRPFVKLNVETDTAEIRLMCTETYLDTPRPDDGSITGPCESNGDKGSGGIKGGFVHQRMASKIGRWYSRTMSKTKRMGMGLYVKYDGDPWTDSDALALSGVMVSMEEPGWYSFGFEIKDKKCDVPCIGIEMVHDGGKKTWHSAATAIYCLMGSGQLLWDTVTGVDMAL

SEQ ID NO: 28681 - protein, 465 aa, Artificial Sequence
  derived and/or modified protein sequence (wt) from neuraminidase__InfluenzaB__ABL77380
MLPSTIQTLTLFLTSGGVLLSLYVSALLSYLLYSDILLKFSPKIIAPTTSLDCANASNVQAVNHSATKEMKFLPPEPEWTYPRLSCQGSTFQKALLISPHRFGEAKGNSAPLIIREPFIACGPKECKHFALTHYAAQPGGYYNGTREDRNKLRHLISVNLGKIPTVENSIFHMAAWSGSACHDGREWTYIGVDGPDSNALIKIKYGEAYTDTYHSYANNILRTQESACNCIGGDCYLMITDGSASGISKCRFLKIREGRIIKEIFPTGRVEHTEECTCGFASNKTIECACRDNSYTAKRPFVKLNVETDTAEIRLMCTETYLDTPRPDDGSITGPCESNGDKGSGGVKGGFVHQRMASKIGRWYSRTMSKTKRMGMELYVKYDGDPWTDSDALAPSGVMVSMEEPGWYSFGFEIKDKKCDVPCIGIEMVHDGGKRTWHSAATAIYCLMGSGQLLWDTVTGVNMAL

SEQ ID NO: 28682 - protein, 466 aa, Artificial Sequence
  derived and/or modified protein sequence (wt) from neuraminidase__InfluenzaB__ABL77391
MLPSTIQTLTLFLTSGGVLLSLYVSASLSYLLYSDILLKFSPTEITAPTMPLDCANASNVQAVNRSATKGVTLLLPEPEWTYPRLSCPGSTFQKALLISPHRFGETKGNSAPLIIREPFIACGPKECKHFALTHYAAQPGGYYNGTRGDRNKLRHLISVKLGKIPTVENSIFHMAAWSGSACHDGKEWTYIGVDGPDNNALLKIKYGEAYTDTYHSYANNILRTQESACNCIGGNCYLMITDGSASGVSECRFLKIREGRIIKEIFPTGRVKHTEECTCGFASNKTIECACRDNSYTAKRPFVKLNVETDTAEIRLMCTETYLDTPRPDDGSITGPCESNGDKGSGGIKGGFVHQRMASKIGRWYSRTMSKTKRMGMGLYVKYDGDPWADSDALALSGVMVSMEEPGWYSFGFEIKDKKCDVPCIGIEMVHDGGKETWHSAATAIYCLMGSGQLLWDTVTGVDMAL

SEQ ID NO: 28683 - protein, 466 aa, Artificial Sequence
  derived and/or modified protein sequence (wt) from neuraminidase__InfluenzaB__ABL84344
MLPSTIQTLTLFLTSGGVLLSLYVSASLSYLLYSDILLKFSSTEITAPTMPLNCANASNVQAVNHSATKGVTLPLPEPEWTYPRLSCPGSTFQKALLISPHRFGETKGNSAPLIIREPFIACGPKECKHFALTHYAAQPGGYYNGTREDRNKLRHLISVKLGKIPTVENSIFHMAAWSGSACHDGREWTYIGVDGPDSNALLKIKYGEAYTDTYHSYANNILRTQESACNCIGGDCYLMITDGSASGVSECRFLKIREGRIIKEIFPTGRVEHTEECTCGFASNKTIECACRDNSYTAKRPFVKLNVETDTAEIRLMCTETYLDTPRPDDGSITGPCESNGDKGSGGIKGGFVHQRMASKIGRWYSRTMSKTKRMGMGLYVKYDGDPWIDSDALTLSGVMVSMEEPGWYSFGFEIKDKKCDVPCIGIEMVHDGGKETWHSAATAIYCLMGSGQLLWDTVTGVDMAL

SEQ ID NO: 28684 - protein, 466 aa, Artificial Sequence
  derived and/or modified protein sequence (wt) from neuraminidase__InfluenzaB__ABN50397
MLPSTIQTLTLFLTSGGVLLSLYVSASLSYLLYSDILLKFSPTEITAPTMPLNCANASNVQAVNRSATKGVTLLLPEPEWTYPRLSCPGSTFQKALLISPHRFGETKGNSAPLIIREPFIACGPKECKHFALTHYAAQPGGYYNGTREDRNKLRHLISVKLGKIPTVENSIFHMAAWSGSACHDGREWTYIGVDGPDSNALLKIKYGEAYTDTYHSYANNILRTQESACNCIGGDCYLMITDGSASGISECRFLKIREGRIIKEIFPTGRVEHTEECTCGFASNKTIECACRDNSYTAKRPFVKLNVETDTAEIRLMCTETYLDTPRPDDGSITGPCESNGDKGSGGIKGGFVHQRMASKIGRWYSRTMSKTKRMGMGLYVKYDGDPWIDSDALTLSGVMVSMEEPGWYSFGFEIKDKKCDVPCIGIEMVHDGGKKTWHSAATAIYCLMGSGQLLWDTVTGVDMDL

SEQ ID NO: 28685 - protein, 466 aa, Artificial Sequence
  derived and/or modified protein sequence (wt) from neuraminidase__InfluenzaB__ABN50408
MLPSTIQTLTLFLTSGGVLLSLYVSASLSYLLYSDILLKFSPTEITAPTMPLNCANASNVQAVNRSATKGVTLPLPEPEWTYPRLSCPGSTFQKALLISPHRFGETKGNSAPLIIREPFIACGPKECKHFALTHYAAQPGGYYNGTREDRNKLRHLISVKLGKIPTVENSIFHMAAWSGSACHDGREWTYIGVDGPDSNALLKIKYGEAYTDTYHSYANNILRTQESACNCIGGDCYLMITDGSASGISECRFLKIREGRIIKEIFPTGRVEHTEECTCGFASNKTIECACRDNSYTAKRPFVKLNVETDTAEIRLMCTETYLDTPRPDDGSITGPCESNGDKGSGGIKGGFVHQRMASKIGRWYSRTMSKTKRMGMGLYVKYDGDPWIDSDALTLSGVMVSMEEPGWYSFGFEIKDKKCDVPCIGIEMVHDGGKKTWHSAATAIYCLMGSGQLLWDTVTGVDMAL

SEQ ID NO: 28686 - protein, 466 aa, Artificial Sequence
  derived and/or modified protein sequence (wt) from neuraminidase__InfluenzaB__ABN50419
MLPSTIQTLTLFLTSGGVLLSLYVSASLSYLLYSDILLKFSPTEITAPTMPLDCANASNVQAVNRSATKGVTLLLPEPEWTYPRLSCPGSTFQKALLISPHRFGETKGNSAPLIIREPFIACGPKECKHFALTHYAAQPGGYYNGTRGDRNKLRHLISVKLGKIPTVENSIFHMAAWSGSACHDGKEWTYIGVDGPDSNALLKIKYGEAYTDTYHSYANNILRTQESACNCIGGNCYLMITDGSASGISECRFLKIREGRIIKEIFPTGRVKHTEECTCGFASNKTIECACRDNSYTAKRPFVKLNVETDTAEIRLMCTETYLDTPRPDDGSITGLCESNGDKGSGGIKGGFVHQRMASKIGRWYSRTMSKTKRMGMGLYVKYDGDPWTDSDALALSGVMVSMEEPGWYSFGFEIKDKKCDVPCIGIEMVHDGGKETWHSAATAIYCLMGSGQLLWDTVTGVDMAL

SEQ ID NO: 28687 - protein, 466 aa, Artificial Sequence
  derived and/or modified protein sequence (wt) from neuraminidase__InfluenzaB__ABN50430
MLPSTIQTLTLFLTSGGVLLSLYVSASLSYLLYSDILLKFSPTEITAPTMPLDCANASNVQAVNRSATKGVTLLLPEPEWTYPRLSCPGSTFQKALLISPHRFGETKGNSAPLIIREPFIACGPKECKHFALTHYAAQPGGYYNGTRGDRNKLRHLISVKLGKIPTVENSIFHMAAWSGSACHDGKEWTYIGVDGPDSNALLKIKYGEAYTDTYHSYANNILRTQESACNCIGGNCYLMITDGSASGISECRFLKIREGRIIKEIFPTGRVKHTEECTCGFASNKTIECACRDNSYTAKRPFVKLNVETDTAEIRLMCTETYLDTPRPDDGSITGPCESNGDKGSGGIKGGFVHQRMASKIGRWYSRTMSKTKRMGMGLYVKYDGDPWTDSDALALSGVMVSMEEPGWYSFGFEIKDKKCDVPCIGIEMVHDGGKETWHSAATAIYCLMGSGQLLWDTVTGVDMAL

SEQ ID NO: 28688 - protein, 466 aa, Artificial Sequence; identical to SEQ ID NO: 28670
  derived and/or modified protein sequence (wt) from neuraminidase__InfluenzaB__ABN50463

SEQ ID NO: 28689 - protein, 466 aa, Artificial Sequence; identical to SEQ ID NO: 28584
  derived and/or modified protein sequence (wt) from neuraminidase__InfluenzaB__ABN50474

SEQ ID NO: 28690 - protein, 466 aa, Artificial Sequence
  derived and/or modified protein sequence (wt) from neuraminidase__InfluenzaB__ABN50485
MLPSTIQTLTLFLTSGGVLLSLYVSASLSYLLYSDILLKFSPTEITAPTMPLDCANASNVQAVNRSATKGVTLLLPEPEWTYPRLSCPGSTFQKALLISPHRFGETKGNSAPLIIREPFIACGPKECKHFALTHYAAQPGGYYNGTRGDRNKLRHLISVKLGKIPTVENSIFHMAAWSGSACHDGKEWTYIGVDGPDSNALLKIKYGEAYTDTYHSYANNILRTQESACNCIGGNCYLMITDGSASGISECRFLKIREGRIIKEIFPTGRVKHTEECTCGFASNKTIECACRDNSYTAKRPFVKLNVETDTAEIRLMCTETYLDTPRPDDGSITGPCEFNGDKGSGGIKGGFVHQRMASKIGRWYSRTMSKTKRMGMGLYVKYDGDPWTDSDALALSGVMVSMEEPGWYSFGFEIKDKKCDVPCIGIEMVHDGGKETWHSAATAIYCLMGSGQLLWDTVTGVDMAL

SEQ ID NO: 28691 - protein, 466 aa, Artificial Sequence
  derived and/or modified protein sequence (wt) from neuraminidase__InfluenzaB__ABN50496
MLPSTIQTLTLFLTSGGVLLSLYVSASLSYLLYSDILLKFPSTEITAPTMPLDCANASNVQAVNRSATKRVTLLLPEPEWTYPRLSCPGSTFQKALLISPHRFGETKGNSAPLIIREPFIACGPKECKHFALTHYAAQPGGYYNGTRGDRNKLRHLISVKLGKIPTVENSIFHMAAWSGSACHDGKEWTYIGVDGPDNNALLKIKYGEAYTDTYHSYANNILRTQESACNCIGGNCYLMITDGSASGVSECRFLKIREGRIIKEIFPTGRIKHTEECTCGFASNKTIECACRDNSYTAKRPFVKLNVETDTAEIRLMCTETYLDTPRPDDGSITGPCESNGDKGSGGIKGGFVHQRMASKIGRWYSRTMSKTKRMGMGLYVKYDGDPWADSDALAFSGVMVSMEEPGWYSFGFEIKDKKCDVPCIGIEMVHDGGKETWHSAATAIYCLMGSGQLLWDTVTGVNMAL

SEQ ID NO: 28692 - protein, 466 aa, Artificial Sequence
  derived and/or modified protein sequence (wt) from neuraminidase__InfluenzaB__ABN50507
MLPSTIQTLTLFLTSGGVLLSLYVSASLSYLLYSDILLKFSPTEITAPTMPLNCANASNVQAVNRSATKGVTLPLPEPEWTYPRLSCPGSTFQKALLISPHRFGETKGNSAPLIIREPFIACGPKECRHFALTHYAAQPGGYYNGTREDRNKLRHLISVKLGKIPTVENSIFHMAAWSGSACHDGREWTYIGVDGPDSNALLKIKYGEAYTDTYHSYANNILRTQESACNCIGGDCYLMITDGSASGISECRFLKIREGRIIKEIFPTGRVEHTEECTCGFASNKTIECACRDNSYTAKRPFVKLNVETDTAEIRLMCTETYLDTPRPDDGSITGPCESNGDKGSGGIKGGFVHQRMASKIGRWYSRTMSKTKRMGMGLYVKYDGDPWIDSDALTLSGVMVSMEEPGWYSFGFEIKDKKCDVPCIGIEMVHDGGKKTWHSAATAIYCLMGSGQLLWDTVTGVDMAL

SEQ ID NO: 28693 - protein, 466 aa, Artificial Sequence; identical to SEQ ID NO: 28591
  derived and/or modified protein sequence (wt) from neuraminidase__InfluenzaB__ABN50518

SEQ ID NO: 28694 - protein, 466 aa, Artificial Sequence; identical to SEQ ID NO: 28591
  derived and/or modified protein sequence (wt) from neuraminidase__InfluenzaB__ABN50529

SEQ ID NO: 28695 - protein, 466 aa, Artificial Sequence; identical to SEQ ID NO: 28584
  derived and/or modified protein sequence (wt) from neuraminidase__InfluenzaB__ABN50540

SEQ ID NO: 28696 - protein, 466 aa, Artificial Sequence; identical to SEQ ID NO: 28616
  derived and/or modified protein sequence (wt) from neuraminidase__InfluenzaB__ABN50551

SEQ ID NO: 28697 - protein, 466 aa, Artificial Sequence
  derived and/or modified protein sequence (wt) from neuraminidase__InfluenzaB__ABN50562
MLPSTIQTLTLFLTSGGALLSLYVSALLSYLLYSDILLKFSPTKVIAPTMSLDYTNASNVQAVNHSATEEMTFLLPEPEWTYPRLSCQGSTFQKALLISPHRFGEAKGNSAPLIIREPFIACGPKECKHFALTHYAAQPGGYYNGTREDRNKLRHLISVNLGKIPTVENSIFHMAAWSGSACHDGREWTYIGVDGPDSNALIKIKYGEAYTDTYHSYANNILRTQESACNCIGGDCYLMITDGSASGISRCRFLKIREGRIIKEIFPTGRVEHTEECTCGFASNKTIECACRDNSYTAKRPFVKLNVETDTAEIRLMCTETYLDTPRPDDGSITGPCESNGDKGNGGIKGGFVHQRMASRIGRWYSRTMSKTKRMGMELYVKYDGDPWTDSDALAPSGVMVSMEEPGWYSFGFEIKDKKCDVPCIGIEMVHDGGKKTWHSAATAIYCLMGSGQLLWDTVTGVDMAL

SEQ ID NO: 28698 - protein, 466 aa, Artificial Sequence; identical to SEQ ID NO: 28687
  derived and/or modified protein sequence (wt) from neuraminidase__InfluenzaB__ABN50573

SEQ ID NO: 28699 - protein, 466 aa, Artificial Sequence
  derived and/or modified protein sequence (wt) from neuraminidase__InfluenzaB__ABN50584
MLPSTIQTLTLFLTSGGVLLSLYVSASLSYLLYSDILLKFSPTEITASTMPLDCANASNVQAVNRSATKGVTLLLPEPEWTYPRLSCPGSTFQKALLISPHRFGETKGNSAPLIIREPFIACGPNECKHFALTHYAAQPGGYYNGTRGDRNKLRHLISVKLGKIPTVENSIFHMAAWSGSACHDGKEWTYIGVDGPDNNALLKIKYGEAYTDTYHSYANNILRTQESACNCIGGNCYLMITDGSASGVSECRFLKIREGRIIKEIFPTGRVKHTEECTCGFASNKTIECACRDNSYTAKRPFVKLNVESDTAEIRLMCTETYLDTPRPDDGSITGPCESNGDKGSGGIKGGFVHQRMASKIGRWYSRTMSKTERMGMGLYVKYDGDPWADSDALALSGVMVSMEEPGWYSFGFEIKDKKCDVPCIGIEMVHDGGKETWHSAATAIYCLMGSGQLLWDTVTGVDMAL

SEQ ID NO: 28700 - protein, 466 aa, Artificial Sequence; identical to SEQ ID NO: 28584
  derived and/or modified protein sequence (wt) from neuraminidase__InfluenzaB__ABN50595

SEQ ID NO: 28701 - protein, 465 aa, Artificial Sequence
  derived and/or modified protein sequence (wt) from neuraminidase__InfluenzaB__ABN50606
MLPSTIQTLTLFLTSGGVLLSLYVSASLSYLLYSDILLRFSSKITAPTMTLDCANASNVQAVNRSATKEMTFLLPEPEWTYPRLSCQGSTFQKALLISPHRFGEARGNSAPLIIREPFIACGPKECKHFALTHYAAQPGGYYNGTREDRNKLRHLISVKLGKIPTVENSIFHMAAWSGSACHDGREWTYIGVDGPDSNALIKIKYGEAYTDTYHSYANNILRTQESACNCIGGDCYLMITDGSASGISECRFLKIREGRIIKEIFPTGRVEHTEECTCGFASNKTIECACRDNSYTAKRPFVKLNVETDTAEIRLMCTETYLDTPRPDDGSITGPCESDGDKGRGGIKGGFVHQRMASKIGRWYSRTMSKTERMGMELYVKYDGDPWTDSDALAPSGVMVSMKEPGWYSFGFEIKDKKCDVPCIGIEMVHDGGKKTWHSAATAIYCLMGSGQLLWDTVTGVDMAL

SEQ ID NO: 28702 - protein, 465 aa, Artificial Sequence
  derived and/or modified protein sequence (wt) from neuraminidase__InfluenzaB__ABN50628
MLPSTIQTLTLFLTSGGVLLSLYVSALLSYLLYSDILLKFSPKIIAPTMSLDCANASNVQAVNHSATKEMTFLLPEPEWTYPRLSCQGSTFQKALLISPHRFGEAKGNSAPLIIREPFIACGPKECKHFALTHYAAQPGGYYNGTREDRNKLRHLISVNLGKIPTVENSIFHMAAWSGSACHDGREWTYIGVDGPDSNALIKIKYGEAYTDTYHSYANNILRTQESACNCIGGDCYLMITDGSASGISKCRFLKIREGRIIKEIFPTGRVEHTEECTCGFASNKTIECACRDNSYTAKRPFVKLNVETDTAEIRLMCTETYLDTPRPDDGSITGPCESNGDKGRGGVKGGFVHQRMASKIGRWYSRTMSKTERMGMELYVKYDGDPWTDSDALAPSGVMVSMEEPGWYSFGFEIKDKKCDVPCIGIEMVHDGGKKTWHSAATAIYCLMGSGQLLWDTVTGVDMAL

SEQ ID NO: 28703 - protein, 465 aa, Artificial Sequence
  derived and/or modified protein sequence (wt) from neuraminidase__InfluenzaB__ABN50639
MLPSTIQTLTLFLTSGGVLLSLYVSALLSYLLYSDILLKFSPKIIAPTMSLDCANASNVQAVNHSATKEMTFLLPEPEWTYPRLSCQGSTFQKALLISPHRFGEAKGNSAPLIIREPFIACGPKECKHFALTHYAAQPGGYYNGTREDRNKLRHLISVKLGKIPTVENSIFHMAAWSGSACHDGREWTYIGVDGPDSNALVKIKYGEAYTDTYHSYANNILRTQESACNCIGGDCYLMITDGSASGISKCRFLKIREGRIIKEIFPTGRVEHTEECTCGFASNKTIECACRDNSYTAKRPFVKLNVETDTAEIRLMCTETYLDTPRPDDGSITGPCESNGDKGRGGVKGGFVHQRMASKIGRWYSRTMSKTERMGMELYVKYDGDPWTDSDALAPSGVMVSMEEPGWYSFGFEIKDKKCDVPCIGIEMVHDGGKKTWHSAATAIYCLMGSGQLLWDTVTGVDMAL

SEQ ID NO: 28704 - protein, 465 aa, Artificial Sequence
  derived and/or modified protein sequence (wt) from neuraminidase__InfluenzaB__ABN50650
MLPSTIQTLTLFLTSGGVLLSLYVSALLSYLLYSDVLLKFSPKIIAPTMSLDCANASNVQAVNHSATEEMTFLLPEPEWTYPRLSCQGSTFQKALLISPHRFGEAKGNSAPLIIREPFIACGPKECKHFALTHYAAQPGGYYNGTREDRNKLRHLISVNLGKIPTVENSIFHMAAWSGSACHDGREWTYIGVDGPDSNALIKIKYGEAYTDTYHSYANNILRTQESACNCIGGDCYLMITDGSASGISKCRFLKIREGRIIKEIFPTGRVEHTEECTCGFASNKTIECACRDNSYTAKRPFVKLNVETDTAEIRLMCTETYLDTPRPDDGSITGPCESNGDKGHGGIKGGFVHQRMASKIGRWYSRTMSKTKRMGMELYVKYDGDPWTDSDALAPSGVMVSMEEPGWYSFGFEIKDKKCDVPCIGIEMVHDGGKKTWHSAATAIYCLMGSGQLLWDTVTGVDMAL

SEQ ID NO: 28705 - protein, 465 aa, Artificial Sequence
  derived and/or modified protein sequence (wt) from neuraminidase__InfluenzaB__ABN50661
MLPSTIQTLTLFLTSGGVLLSLYVSALLSYLLYSDVLLKFSPKMIAPTMSLDCANASNVQAVNHSATEEMTFLLPEPEWTYPRLSCQGSTFQKALLISPHRFGEAKGNSAPLIIREPFIACGPKECKHFALTHYAAQPGGYYNGTREDRNKLRHLISVNLGKIPTVENSIFHMAAWSGSACHDGREWTYIGVDGPDSNALIKIKYGEAYTDTYHSYANNILRTQESACNCIGGDCYLMITDGSASGISKCRFLKIREGRIIKEIFPTGRVEHTEECTCGFASNKTIECACRDNSYTAKRPFVKLNVETDTAEIRLMCTETYLDTPRPDDGSITGPCESNGDKGHGGIKGGFVHQRMASKIGRWYSRTMSKTKRMGMELYVKYDGDPWTDSDALAPSGVMVSMEEPGWYSFGFEIKDKKCDVPCIGIEMVHDGGKKTWHSAATAIYCLMGSGQLLWDTVTGVDMAL

SEQ ID NO: 28706 - protein, 466 aa, Artificial Sequence
  derived and/or modified protein sequence (wt) from neuraminidase__InfluenzaB__ABN50683
MLPSTIQTLTLFLTSGGVLLSLYVSASLSYLLYSDILLKFSPTEITAPTMPLDCANASNVQAVNRSATKGVTLLLPEPEWTYPRLSCPGSTFQKALLISPHRFGETRGNSAPLIIREPFIACGPKECKHFALTHYAAQPGGYYNGTREDRNKLRHLISVKLGKIPTVENSIFHMAAWSGSACHDGREWTYIGVDGPDSNALLKIKYGEAYTDTYHSYANNILRTQESACNCIGGDCYLMITDGSASGISKCRFLKIREGRIIKEIFPTGRVEHTEECTCGFASNKTIECACRDNSYTAKRPFVKLNVETDTAEIRLMCTETYLDTPRPDDGSITGPCESNGDKGLGGIKGGFVHQRMASKIGRWYSRTMSKTKRMGMELYVKYDGDPWTDSDALALSGVMVPMEEPGWYSFGFEIKDKKCDVPCIGIEMVHDGGKKTWHSAATAIYCLMGSGQLLWDTVTGVDMAL

SEQ ID NO: 28707 - protein, 466 aa, Artificial Sequence
  derived and/or modified protein sequence (wt) from neuraminidase__InfluenzaB__ABN50694
MLPSTIQTLTLFLTSGGVLLSLYVSASLSYLLYSDILLKFSPTEITAPTMPLDCANASNVQAVNRSATKGVTLLLPEPEWTYPRLSCPGSTFQKALLISPHRFGETRGNSAPLIIREPFIACGPKECKHFALTHYAAQPGGYYNGTREDRNKLRHLISVKLGKIPTVENSIFHMAAWSGSACHDGREWTYIGVDGPDSNALLKIKYGEAYTDTYHSYANNILRTQESACNCIGGDCYLMITDGSASGISKCRFLKIREGRIIKEIFPTGRVEHTEECTCGFASNKTIECACRDNSYTAKRPFVKLNVETDTAEIRLMCTETYLDTPRPDDGSITGPCESNGDKGSGGIKGGFVHQRMASKIGRWYSRTMSKTKRMGMGLYVKYDGDPWTDSDALALSGVMVSMEEPGWYSFGFEIKDKKCDVPCIGIEMVHDGGKKTWHSAATAIYCLMGSGQLLWDTVTGVDMAL

SEQ ID NO: 28708 - protein, 465 aa, Artificial Sequence
  derived and/or modified protein sequence (wt) from neuraminidase__InfluenzaB__ABN50705
MLPSTIQTLTLFLTLGGVLLSLYVSALLSYLLYSDVLLKFSPKMIAPTMSLDCANASNVQAVNHSATEEMTFLLPEPEWTYPRLSCQGSTFQKALLISPHRFGEAKGNSAPLIIREPFIACGPKECKHFALTHYAAQPGGYYNGTREDRNKLRHLISVNLGKIPTVENSIFHMAAWSGSACHDGREWTYIGVDGPDSNALIKIKYGEAYTDTYHSYANNILRTQESACNCIGGDCYLMITDGSASGISKCRFLKIREGRIIKEIFPTGRVEHTEECTCGFASNKTIECACRDNSYTAKRPFVKLNVETDTAEIRLMCTETYLDTPRPDDGSITGPCESNGDKGHGGIKGGFVHQRMASKIGRWYSRTMSKTKRMGMELYVKYDGDPWTDSDALAPSGVMVSMEEPGWYSFGFEIKDKKCDVPCIGIEMVHDGGKKTWHSAATAIYCLMGSGQLLWDTVTGVDMAL

SEQ ID NO: 28709 - protein, 466 aa, Artificial Sequence
  derived and/or modified protein sequence (wt) from neuraminidase__InfluenzaB__ABN50716
MLPSTIQTLTLFLTSGGVLLSLYVSASLSYLLYSGILLKFSPTEITAPTMPLDCANASNVQAVNRSATKGVTLLLPEPEWTYPRLSCPGSTFQKALLISPHRFGETRGNSAPLIIREPFIACGPKECKHFALTHYAAQPGGYYNGTREDRNKLRHLISVKLGKIPTVENSIFHMAAWSGSACHDGREWTYIGVDGPDSNALLKIKYGEAYTDTYHSYANNILRTQESACNCIGGDCYLMITDGSASGISKCRFLKIREGRIIKEIFPTGRVEHTEECTCGFASNKTIECACRDNSYTAKRPFVKLNVETDTAEIRLMCTETYLDTPRPDDGSITGPCESNGDKGSGGIKGGFVHQRMASKIGRWYSRTMSKTKRMGMGLYVKYDGDPWTDSDALALSGVMVSMEEPGWYSFGFEIKDKKCDVPCIGIEMVHDGGKKTWHSAATAIYCLMGSGQLLWDTVTGVDMAL

SEQ ID NO: 28710 - protein, 466 aa, Artificial Sequence
  derived and/or modified protein sequence (wt) from neuraminidase__InfluenzaB__ABN50727
MLPSTIQTLTLFLTSGGVLLSLYVSASLSYLLYSDILLKFSPTEITAPTMPLDCANASNVQAVNRSATKGVTLLLPEPEWTYPRLSCPGSTFQKALLISPHRFGETKGNSAPLIIREPFIACGPKECKHFALTHYAAQPGGYYNGTREDRNKLRHLISVKLGKIPTVENSIFHMAAWSGSACHDGREWTYIGVDGPDSNALLKIKYGEAYTDTYHSYANNILRTQESACNCIGGDCYLMITDGSASGISECRFLKIREGRIIKEIFPTGRVEHTEECTCGFASNKTIECACRDNSYTAKRPFVKLNVETDTAEIRLMCTETYLDTPRPDDGSITGPCESNGDKGSGGIKGGFVHQRMASKIGRWYSRTMSKTKRMGMGLYVKYDGDPWTDSDALALSGVMVSMEEPGWYSFGFEIKDKKCDVPCIGIEMVHDGGKKTWHSAATAIYCLMGSGQLLWDTVTGVDMAL

SEQ ID NO: 28711 - protein, 466 aa, Artificial Sequence; identical to SEQ ID NO: 28653
  derived and/or modified protein sequence (wt) from neuraminidase__InfluenzaB__ABN50738

SEQ ID NO: 28712 - protein, 466 aa, Artificial Sequence
  derived and/or modified protein sequence (wt) from neuraminidase__InfluenzaB__ABN50749
MLPSTIQTLTLFLTSGGVLLSLYVSASLSYLLYSDILLKFSPTEITAPTMPLDCANASNVQAVNRSATKGVTLLLPEPEWTYPRLSCPGSTFQKALLISPHRFGETKGNSAPLIIREPFIACGPKECKHFALTHYAAQPGGYYNGTRGDRNKLRHLISVKLGKIPTVENSIFHMAAWSGSACHDGKEWTYIGVDGPDSNALLKIKYGEAYTDTYHSYANNILRTQESACNCIGGNCYLMITDGSASGISECRFLKIREGRIIKEIFPTGRVKHTEECTCGFASNKTIECACRDNSYTAKRPFVKLNVETDTAEIRLMCTETYLDTPRPDDGSITGPCESNGDKGSGGIKGGFVHQRMASKIGRWYSRTMSKTKRMGMGLYVKYDGDPWADSDALALSGVMVSMEEPGWYSFGFEIKDKKCDVPCIGIEMVHDGGKETWHSAATAIYCLMGSGQLLWDTVTGVDMAL

SEQ ID NO: 28713 - protein, 465 aa, Artificial Sequence
  derived and/or modified protein sequence (wt) from neuraminidase__InfluenzaB__ABN51188
MLPSTIQTLTLFLTSGGVLLSLYVSALLSYLLYSDILLKFSPKIIAPTMLLDCANASNVQAVNHSATKEMTFLLPEPEWTYPRLSCQGSTFQKALLISPHRFGEAKGNSAPLIIREPFIACGPKECKHFALTHYAAQPGGYYNGTREDRNKLRHLISVNLGKIPTVENSIFHMAAWSGSACHDGREWTYIGVDGPDSNALIKIKYGEAYTDTYHSYANNILRTQESACNCIGGDCYLMITDGSASGISKCRFLKIREGRIIKEIFPTGRVEHTEECTCGFASNKTIECACRDNSYTAKRPFVKLNVETDTAEIRLMCTETYLDTPRPDDGSITGPCESNGDKGRGGVKGGFVHQRMASKIGRWYSRTMSKTERMGMELYVKYDGDPWTDSDALAPSGVMVSMEEPGWYSFGFEIKDKKCDVPCIGIEMVHDGGKKTWHSAATAIYCLMGSGQLLWDTVTGVDMAL

SEQ ID NO: 28714 - protein, 465 aa, Artificial Sequence; identical to SEQ ID NO: 28702
  derived and/or modified protein sequence (wt) from neuraminidase__InfluenzaB__ABN51199

SEQ ID NO: 28715 - protein, 466 aa, Artificial Sequence
  derived and/or modified protein sequence (wt) from neuraminidase__InfluenzaB__ABN58665
MLPSTIQTLTLFLTSGGVLLSLYVSALLSYLLYSDILLKFSPTKIIAPTMSLDCANASNVQAVNHSATEEMTFLLPEPEWTYPRLSCQGSTFQKALLISPHRFGEAKGNSAPLIIREPFIACGPKECKHFALTHYAAQPGGYYNGTREDRNKLRHLISVNLGKIPTVENSIFHMAAWSGSACHDGREWTYIGVDGPDSNALIKIKYGEAYTDTYHSYANNILRTQESACNCIGGDCYLMITDGSASGISKCRFLKIREGRIIKEIFPTGRVEHTEECTCGFASNKTIECACRDNSYTAKRPFVKLNVETDTAEIRLMCTETYLDTPRPDDGSITGPCESNGGKGSGGIKGGFVHQRMASKIGRWYSRTMSKTKRMGMELYVKYDGDPWTDSDALAPSGVMVSMEEPGWYSFGFEIKDKKCDVPCIGIEMVHDGGKKTWHSAATAIYCLMGSGQLLWDTVTGVDMAL

SEQ ID NO: 28716 - protein, 466 aa, Artificial Sequence; identical to SEQ ID NO: 28603
  derived and/or modified protein sequence (wt) from neuraminidase__InfluenzaB__ABN59449

SEQ ID NO: 28717 - protein, 465 aa, Artificial Sequence; identical to SEQ ID NO: 28681
  derived and/or modified protein sequence (wt) from neuraminidase__InfluenzaB__ABR15999

SEQ ID NO: 28718 - protein, 466 aa, Artificial Sequence; identical to SEQ ID NO: 28710
  derived and/or modified protein sequence (wt) from neuraminidase__InfluenzaB__ABR16010

SEQ ID NO: 28719 - protein, 466 aa, Artificial Sequence
  derived and/or modified protein sequence (wt) from neuraminidase__InfluenzaB__ABR16021
MLPSTIQTLTLFLTSGGVLLSLYVSASLSYLLYSDILLKFSPTEITAPTMPLDCANASNVQAVNRSATKGVTLLLPEPEWTYPRLSCPGSTFQKALLISPHRFGETKGNSAPLIIREPFIACGPNECKHFALTHYAAQPGGYYNGTRGDRNKLRHLISVKLGKIPTVENSIFHMAAWSGSACHDGKEWTYIGVDGPDNNALLKIKYGEAYTDTYHSYANKILRTQESACNCIGGNCYLMITDGSASGVSECRFLKIRKGRIIKEIFPTGRVKHTEECTCGFASNKTIECACRDNSYTAKRPFVKLNVETDTAEIRLMCTDTYLDTPRPDDGSITGPCESNGDKGSGGIKGGFVHQRMASKIGRWYSRTMSKTERMGMGLYVKYDGDPWADSDALAFSGVMVSMKEPGWYSFGFEIKDKKCDVPCIGIEMVHDGGKETWHSAATAIYCLMGSGQLLWDTVTGVDMAL

SEQ ID NO: 28720 - protein, 466 aa, Artificial Sequence; identical to SEQ ID NO: 28635
  derived and/or modified protein sequence (wt) from neuraminidase__InfluenzaB__ACA64903

SEQ ID NO: 28721 - protein, 466 aa, Artificial Sequence
  derived and/or modified protein sequence (wt) from neuraminidase__InfluenzaB__ACA64914
MLPSTIQTLTLFLTSGGVLLSLYVSASLSYLLYSDILLKFSQTEITAPIMPLDCANASNVQAVNRSAAKGVTLLLPEPEWTYPRLSCPGSTFQKALLISPHRFGETKGNSAPLIIREPFIACGPTECKHFALTHYAAQPGGYYNGTREDRNKLRHLISVKLGKIPTVENSIFHMAAWSGSACHDGKEWTYVGVDGPDSNALLKIKYGEAYTDTYHSYAKNILRTQESACNCIGGDCYLMITDGPASGISECRFLKIREGRIIKEIFPTGRVKHTEECTCGFASNKTIECACRDNSYTAKRPFVKLNVETDTAEIRLMCTETYLDTPRPNDGSITGPCESDGDKGSGGIKGGFVHQRMASKIGRWYSRTMSKTKRMGMGLYVKYDGDPWTDSEALALSGVMVSMDEPGWYSFGFEIKDKKCDVPCIGIEMVHDGGKTTWHSAATAIYCLMGSGQLLWDTVTGVDMAL

SEQ ID NO: 28722 - protein, 466 aa, Artificial Sequence; identical to SEQ ID NO: 28635
  derived and/or modified protein sequence (wt) from neuraminidase__InfluenzaB__ACA64936

SEQ ID NO: 28723 - protein, 466 aa, Artificial Sequence
  derived and/or modified protein sequence (wt) from neuraminidase__InfluenzaB__ACA64969
MLPSTIQTLTLFLTSGGVLLSLYVSASLSYLLYSDILLKFSPTEITAPTMPLDCANASNVQAVNRSAAKGVTLLLPEPEWTYPRLSCPGSTFQKALLISPHRFGETKGNSAPLIIREPFIACGPNECKHFALTHYAAQPGGYYNGTRGDRNKLRHLISVKLGKIPTVENSIFHMAAWSGSACHDGKEWTYIGVDGPDNNALLKIKYGEAYTDTYHSYANKILRTQESACNCIGGNCYLMITDGSASGVSECRFLKIREGRIIKEIFPTGRVKHTEECTCGFASNKTIECACRDNSYTAKRPFVKLNVETDTAEIRLMCTDTYLDTPRPDDGSITGPCESNGDKGSGGIKGGFVHQRMASKIGRWYSRTMSKTERMGMGLYVKYDGDPWADSDALAFSGVMVSMKEPGWYSFGFEIKDKKCDVPCIGIEMVHDGGKETWHSAATAIYCLMGSGQLLWDTVTGVDMAL

SEQ ID NO: 28724 - protein, 466 aa, Artificial Sequence
  derived and/or modified protein sequence (wt) from neuraminidase__InfluenzaB__ACA64980
MLPSTIQTLTLFLTSGGVLLSLYVSASLSYLLYSDILLKFSPTEITAPTMSLDCANASNVQAVNRSATKGVTLLLPEPEWTYPRLSCPGSTFQKALLISPHRFGETKGNSAPLIIREPFIACGPNECKHFALTHYAAQPGGYYNGTRGDRNKLRHLISVKLGKIPTVENSIFHMAAWSGSACHDGKEWTYIGVDGPDNNALLKIKYGEAYTDTYHSYASKILRTQESACNCIGGNCYLMITDGSASGVSECRFLKIREGRIIKEIFPTGRVKHTEECTCGFASNKTIECACRDNSYTAKRPFVKLNVETDTAEIRLMCTDTYLDTPRPDDGSITGPCESNGDKGSGGIKGGFVHQRMASKIGRWYSRTMSKTERMGMGLYVKYDGDPWADSDALAFSGVMVSMKEPGWYSFGFEIKDKKCDVPCIGIEMVHDGGKETWHSAATAIYCLMGSGQLLWDTVTGVDMAL

SEQ ID NO: 28725 - protein, 466 aa, Artificial Sequence
  derived and/or modified protein sequence (wt) from neuraminidase__InfluenzaB__ACA64991
MLPSTIQTLTLFLTSGGVLLSLYVSASLSYLLYSDILLKFSPTEITAPTMPLDCANASNVHAVNRSATKGVTLLLPEPEWTYPRLSCPGSTFQKALLISPHRFGETKGNSAPLIIREPFIACGPNECKHFALTHYAAQPGGYYNGTRGDRNKLRHLISVKLGKIPTVENSIFHMAAWSGSACHDGKEWTYIGVDGPDNNALLKIKYGEAYTDTYHSYANNILRTQESACNCIGGNCYLMITDGSASGVSECRFLKIREGRIIKEIFPTGRVKHTEECTCGFASNKTIECACRDNSYTAKRPFVKLNVETDTAEIRLMCTDTYLDTPRPDDGSITGPCESNGDKGSGGIKGGFVHQRMASKIGRWYSRTMSKTERMGMGLYVKYDGDPWADSDALAFGGVMVSMKEPGWYSFGFEIKDKKCDVPCIGIEMVHDGGKETWHSAATAIYCLMGSGQLLWDTVTGVDMAL

SEQ ID NO: 28726 - protein, 466 aa, Artificial Sequence; identical to SEQ ID NO: 28635
  derived and/or modified protein sequence (wt) from neuraminidase__InfluenzaB__ACA65013

SEQ ID NO: 28727 - protein, 466 aa, Artificial Sequence; identical to SEQ ID NO: 28635
  derived and/or modified protein sequence (wt) from neuraminidase__InfluenzaB__ACA65024

SEQ ID NO: 28728 - protein, 466 aa, Artificial Sequence
  derived and/or modified protein sequence (wt) from neuraminidase__InfluenzaB__ACA65035
MLPSTIQTLTLFLTSGGVLLSLYVSASLSYLLYSDILLKFSPTEITAPTMPLDCANASNVQAVNRSATKGVTLLLPEPEWTYPRLSCPGSTFQKALLISPHRFGETKGNSAPLIIREPFIACGPNECKHFALTHYAAQPGGYYNGTRGDRNKLRHLISVKLGKIPTVENSIFHMAAWSGSACHDGKEWTYIGVDGPDNNALLKIKYGEAYTDTYHSYASKILRTQESACNCIGGNCYLMITDGSASGVSECRFLKIREGRIIKEIFPTGRVKHTEECTCGFASNKTIECACRDNSYTAKRPFVKLNVETDTAEIRLMCTDTYLDTPRPDDGSITGPCESNGDKGSGGIKGGFVHQRMASKIGRWYSRTMSKTERMGMGLYVKYDGDPWADSDALAFSGVMVSMKEPGWYSFGFEIKDKKCDVPCIGIEMVHDGGKETWHSAATAIYCLMGSGQLLWDTVTGVDMAL

SEQ ID NO: 28729 - protein, 466 aa, Artificial Sequence; identical to SEQ ID NO: 28635
  derived and/or modified protein sequence (wt) from neuraminidase__InfluenzaB__ACA65046

SEQ ID NO: 28730 - protein, 466 aa, Artificial Sequence
  derived and/or modified protein sequence (wt) from neuraminidase__InfluenzaB__ACA65057
MLPSTIQTLTLFLTSGGVLLSLYVSASLSYLLYSDILLKFSPTEITAPTMPLDCANASNVQAVNRSATKGVTLLLPEPEWTYPRLSCPGSTFQKALLISPHRFGETKGNSAPLIIREPFIACGPNECKHFALTHYAAQPGGYYNGTRGDRNKLRHLISVKLGKIPTVENSIFHMAAWSGSACHDGKEWTYIGVDGPDNNALLKIKYGEAYTDTYHSYANKILRTQESACNCIGGNCYLMITDGSASGVSECRFLKIREGRIIKEIFPTGRVKHTEECTCGFASNKTIECACRDNSYTAKRPFVKLNVEADTAEIRLMCTDTYLDTPRPDDGSITGPCEFNGDKGSGGIKGGFVHQRMASKIGRWYSRTMSKTERMGMGLYVKYDGDPWADSDALAFSGVMVSMKEPGWYSFGFEIKDKKCDVPCIGIEMVHDGGKETWHSAATAIYCLMGSGQLLWDTVTGVDMAL

SEQ ID NO: 28731 - protein, 466 aa, Artificial Sequence; identical to SEQ ID NO: 28635
  derived and/or modified protein sequence (wt) from neuraminidase__InfluenzaB__ACA65068

SEQ ID NO: 28732 - protein, 466 aa, Artificial Sequence; identical to SEQ ID NO: 28635
  derived and/or modified protein sequence (wt) from neuraminidase__InfluenzaB__ACA65079

SEQ ID NO: 28733 - protein, 466 aa, Artificial Sequence; identical to SEQ ID NO: 28635
  derived and/or modified protein sequence (wt) from neuraminidase__InfluenzaB__ACA65090

SEQ ID NO: 28734 - protein, 466 aa, Artificial Sequence; identical to SEQ ID NO: 28635
  derived and/or modified protein sequence (wt) from neuraminidase__InfluenzaB__ACA65101

SEQ ID NO: 28735 - protein, 466 aa, Artificial Sequence
  derived and/or modified protein sequence (wt) from neuraminidase__InfluenzaB__ACA96567
MLPSTIQTLTLFLTSGGVLLSLYVSASLSYLLYSDILLKFSPTEITAPTMPLDCANASNVHAVNRSATKGVTLLLPEPEWAYPRLSCPGSTFQKALLISPHRFGETKGNSAPLIIREPFIACGPNECKHFALTHYAAQPGGYYNGTRGDRNKLRHLISVKLGKIPTVENSIFHMAAWSGSACHDGKEWTYIGVDGPDNNALLKIKYGEAYTDTYHSYANNILRTQESACNCIGGNCYLMITDGSASGVSECRFLKIREGRIIKEIFPTGRVKHTEECTCGFASNKTIECACRDNSYTAKRPFVKLNVETDTAEIRLMCTDTYLDTPRPDDGSITGPCESNGDKGSGGIKGGFVHQRMASKIGRWYSRTMSKTERMGMGLYVKYDGDPWADSDALAFSGIMVSMKEPGWYSFGFEIKDKKCDVPCIGIEMVHDGGKETWHSAATAIYCLMGSGQLLWDTVTGVDMAL

SEQ ID NO: 28736 - protein, 466 aa, Artificial Sequence; identical to SEQ ID NO: 28635
  derived and/or modified protein sequence (wt) from neuraminidase__InfluenzaB__ACA96578

SEQ ID NO: 28737 - protein, 466 aa, Artificial Sequence; identical to SEQ ID NO: 28723
  derived and/or modified protein sequence (wt) from neuraminidase__InfluenzaB__ACA96589

SEQ ID NO: 28738 - protein, 466 aa, Artificial Sequence; identical to SEQ ID NO: 28635
  derived and/or modified protein sequence (wt) from neuraminidase__InfluenzaB__ACA96600

SEQ ID NO: 28739 - protein, 466 aa, Artificial Sequence
  derived and/or modified protein sequence (wt) from neuraminidase__InfluenzaB__ACA96611
MLPSTIQTLTLFLTSGGVLLSLYVSASLSYLLYSDILLKFSPTEITAPTMPLDYANASNVHAVNHSATKGVTLLLPEPEWTYPRLSCPGSTFQKALLISPHRFGETKGNSAPLIIREPFIACGPNECKHFALTHYAAQPGGYYNGTRGDRNKLRHLISVKLGKIPTVENSIFHMAAWSGSACHDGKEWTYIGVDGPDNNALLKIKYGEAYTDTYHSYANNILRTQESACNCIGGNCYLMITDGSASGVSECRFLKIREGRIIKEIFPTGRVKHTEECTCGFASNKTIECACRDNSYTAKRPFVKLNVETDTAEIRLMCTDTYLDTPRPDDGSITGPCESNGDKGSGGIKGGFVHQRMASKIGRWYSRTMSKTERMGMGLYVKYDGDPWADSDALAFSGVMVSMKEPGWYSFGFEIKDKKCDVPCIGIEMVHDGGKETWHSAATAIYCLMGSGRLLWDTVTGVDMAL

SEQ ID NO: 28740 - protein, 466 aa, Artificial Sequence
  derived and/or modified protein sequence (wt) from neuraminidase__InfluenzaB__ACA96622
MLPSTIQTLTLFLTSGGVLLSLYVSASLSYLLYSDILLKFSPTEITAPTMPLDCANASNVHAVNRSATKGVTLLLPEPEWTYPRLSCPGSTFQKALLISPHRFGETKGNSAPLIIREPFIACGPNECKHFALTHYAAQPGGYYNGTRGDRNKLRHLISVKLGKIPTVENSIFHMAAWSGSACHDGKEWTYIGVDGPDNNALLKIKYGEAYTDTYHSYANNILRTQESACNCIGGNCYLMITDGSASGVSECRFLKIREGRIIKEIFPTGRVKHTEECTCGFASNKTIECACRDNSYTAKRPFVKLNVETDTAEIRLMCTDTYLDTPRPDDGSIIGPCESNGDKGSGGIKGGFVHQRMASKIGRWYSRTMSKTERMGMGLYVKYDGDPWADSDALAFSGVMVSMKEPGWYSFGFEIKDKKCDVPCIGIEMVHDGGKETWHSAATAIYCLMGSGQLLWDTVTGVDMAL

SEQ ID NO: 28741 - protein, 466 aa, Artificial Sequence; identical to SEQ ID NO: 28723
  derived and/or modified protein sequence (wt) from neuraminidase__InfluenzaB__ACA96633

SEQ ID NO: 28742 - protein, 466 aa, Artificial Sequence
  derived and/or modified protein sequence (wt) from neuraminidase__InfluenzaB__ACA96644
MLPSTIQTLTLFLTSGGVLLSLYVSASLSYLLYSDILLKFSPTEITAPTMPLDCANASNVQAVNRSATKGVTLLLPEPEWTYPRLSCPGSTFQKALLISPHRFGETKGNSAPLIIREPFIACGPNECKHFALTHYAAQPGGYYNGTRGDRNKLRHLISIKLGKIPTVENSIFHMAAWSGSACHDGKEWTYIGVDGPDNNALLKIKYGEAYTDTYHSYANKILRTQESACNCIGGNCYLMITDGSASGVSECRFLKIREGRIIKEIFPTGRVKHTEECTCGFASNKTIECACRDNSYTAKRPFVKLNVETDTAEIRLMCTDTYLDTPRPDDGSITGPCESNGDKGSGGIKGGFVHQRMASKIGRWYSRTMSKTERMGMGLYVKYDGDPWADSDALAFSGVMISMKEPGWYSFGFEIKDKKCDVPCIGIEMVHDGGKETWHSAATAIYCLMGSGQLLWDTVTGVDMAL

SEQ ID NO: 28743 - protein, 466 aa, Artificial Sequence
  derived and/or modified protein sequence (wt) from neuraminidase__InfluenzaB__ACA96655
MLPSTIQTLTLFLTSGGVLLSLYVSASLSYLLYSDILLKFSQTEITAPIMPLDCANASNVQAVNRSATKGVTLLLPEPEWTYPRLSCPGSTFQKALLISPHRFGETKGNSAPLIIREPFIACGPKECKHFALTHYAAQPGGYYNGTREDRNKLRHLISVKLGKIPTVENSIFHMAAWSGSACHDGREWTYIGVDGPDSNALLKIKYGEAYTDTYHSYAKNILRTQESACNCIGGDCYLMITDGPASGISECRFLKIREGRIIKEIFPTGRVKHTEECTCGFASNKTIECACRDNSYTAKRPFVKLNVETDTAEIRLMCTETYLDTPRPNDGSITGPCESNGDKGSGGIKGGFVHQRMASKIGRWYSRTMSKTKRMGMGLYVKYDGDPWTDSEALALSGVMVSMEEPGWYSFGFEIKDKKCDVPCIGIEMVHDGGKTTWHSAATAIYCLMGSGQLLWDTVTGVDMAL

SEQ ID NO: 28744 - protein, 466 aa, Artificial Sequence
  derived and/or modified protein sequence (wt) from neuraminidase__InfluenzaB__ACA96666
MLPSTIQTLTLFLTSGGVLLSLYVSASLSYLLYSDILLKFSPTEITAPTMPLDCANASNVQAVNRSATKGVTLLLPEPEWTYPRLSCPGSTFQKALLISPHRFGETKGNSAPLIIREPFIACGPNECKHFALTHYAAQPGGYYNGTREDRNKLRHLISVKLGKIPTVENSIFHMAAWSGSACHDGKEWTYIGVDGPDNNALLKIKYGEAYTDTYHSYANKILRTQESACNCIGGNCYLMITDGSASGVSECRFLKIREGRIIKEIFPTGRVKHTEECTCGFASNKTIECACRDNSYTAKRPFVKLNVETDTAEIRLMCTDTYLDTPRPDDGSITGPCESNGDRGSGGIKGGFVHQRMASKIGRWYSRTMSKTERMGMGLYVKYDGDPWADSDALAFSGVMVSMKEPGWYSFGFEIKDKKCDVPCIGIEMVHDDGKETWHSAATAIYCLMGSGQLLWDTVTGVDMAL

SEQ ID NO: 28745 - protein, 466 aa, Artificial Sequence
  derived and/or modified protein sequence (wt) from neuraminidase__InfluenzaB__ACD56581
MLPSTIQTLTLFLTSGGVLLSLYVSASLSYLLYSDILLKFSTTEITAPTMPLDCANASNVQAVNRSATKGVTLLLPEPEWTYPRLSCPGSTFQKALLISPHRFGETKGNSAPLIIREPFIACGPKECKHFALTHYAAQPGGYYNGTREDRNKLRHLISVKLGKIPTVENSIFHMAAWSGSACHDGKEWTYIGVDGPDSNALLKIKYGEAYTDTYHSYANNILRTQESACNCIGGNCYLMITDGSASGISECRFLKIREGRIIKEIFPTGRVKHTEECTCGFASNKTIECACRDNSYTAKRPFVKLNVETDTAEIRLMCTETYLDTPRPDDGSITGPCESNGNKGSGGIKGGFVHQRMASKIGRWYSRTMSKTKRMGMGLYVKYDGDPWTDSDALALSGVMVSMEEPGWYSFGFEIKDKKCDVPCIGIEMVHDGGKETWHSAATAIYCLMGSGQLLWDTVTGVDMAL

SEQ ID NO: 28746 - protein, 466 aa, Artificial Sequence
  derived and/or modified protein sequence (wt) from neuraminidase__InfluenzaB__ACF33793
MLPSTIQTLTLFLTSGGVLLSLYVSASLSYLLYSDILLKFSPTEITAPTMPLDCANASNVQAVNRSATKGVTLLLPEPEWTYPRLSCPGSTFQKALLISPHRFGETKGNSAPLIIREPFIACGPNECKHFALTHYAAQPGGYYNGTRGDRNKLRHLISVKLGKIPTVENSIFHMAAWSGSACHDGKEWTYIGVDGPDNNALLKIKYGEAYTDTYHSYANNILRTQESACNCIGGNCYLMITDGSASGVSECRFLKIREGRIIKEIFPTGRVKHTEECTCGFASNKTIECACRDNSYTAKRPFVKLNVETDTAEIRLMCTDTYLDIPRPDDGSITGPCESNGDKGSGGIKGGFVHQRMASKIGRWYSRTMSKTERMGMGLYVKYDGDPWADSDALAFSGVMVSMKEPGWYSFGFEIKDKKCDVPCIGIEMVHDGGKETWHSAATAIYCLMGSGQLLWDTVTGVDMAL

SEQ ID NO: 28747 - protein, 466 aa, Artificial Sequence
  derived and/or modified protein sequence (wt) from neuraminidase__InfluenzaB__ACF33795
MLPSTIQTLTLFLTSGGVLLSLYVSASLSYLLYSDILLKFPSTEITAPTMPLDCANASNVQAVNRSATKGVTLLLPEPEWTYPRLSCPGSTFQKALLISPHRFGETKGNSAPLIIREPFIACGPKECKHFALTHYAAQPGGYYNGTRGDRNKLRHLISVKLGKIPTVENSIFHMAAWSGSACHDGKEWTYIGVDGPDNNALLKIKYGEAYTDTYHSYANNILRTQESACNCIGGNCYLMITDGSASGVSECRFLKIREGRIIKEIFPTGRIKHTEECTCGFASNKTIECACRDNSYTAKRPFVKLNVETDTAEIRLMCTETYLDTPRPDDGSITGPCESNGDKGSGGIKGGFVHQRMASKIGRWYSRTMSKTEKMGMGLYVKYDGEPWADSDALTFSGVMVSMEEPGWYSFGFEIKDKKCDVPCIGIEMVHDGGKETWHSAATAIYCLMGSGQLLWDTVTGVNMAL

SEQ ID NO: 28748 - protein, 466 aa, Artificial Sequence
  derived and/or modified protein sequence (wt) from neuraminidase__InfluenzaB__ACF33797
MLPSTIQTLTLFLTSGGVLLSLYVSASLSYLLYSDILLKFSPTEITAPTMPLDCANASNVQAVNRSATKGVTLLLPEPEWTYPRLSCPGSTFQKALLISPHRFGETKGNSAPLIIREPFIACGPNECKHFALTHYAAQPGGYYNGTRGDRNKLRHLISVKLGKIPTVENSIFHMAAWSGSACHDGKEWTYIGVDGPDNNALLKIKYGEAYTDTYHSYANNTLRTQESACNCIGGNCYLMITDGSASGVSECRFLKIREGRIIKEIFPTGRVKHTEECTCGFASNKTIECACRDNSYTAKRPFVKLNVETDTAEIRLMCTETYLDTPRPDDGSITGPCESNGDKGSGGIKGGFVHQRMASKIGRWYSRTMSKTERMGMGLYVKYDGDPWADSDALALIGVMVSMEEPGWYSFGFEIKDKKCDVPCIGIEMVHDGGKETWHSAATAIYCLMGSGQLLWDTVTGVNMAL

SEQ ID NO: 28749 - protein, 466 aa, Artificial Sequence; identical to SEQ ID NO: 28728
  derived and/or modified protein sequence (wt) from neuraminidase__InfluenzaB__ACF41662

SEQ ID NO: 28750 - protein, 466 aa, Artificial Sequence
  derived and/or modified protein sequence (wt) from neuraminidase__InfluenzaB__ACF54140
MLPSTIQTLTLFLTSGGVLLSLYVSASLSYLLYSDILLKFSPTEITAPTMPLDCANASNVQAVNRSATKGVTLLLPEPEWTYPRLSCPGSTFQKALLISPHRFGETKGNSAPLIIREPFIACGPNECKHFALTHYAAQPGGYYNGTKGDRNKLRHLISVKLGKIPTVENSIFHMAAWSGSACHDGKEWTYIGVDGPDNNALLKIKYGEAYTDTYHSYANKILRTQESACNCIGGNCYLMITDGSASGVSECRFLKIREGRIIKEIFPTGRVKHTEECTCGFASNKTIECACRDNSYTAKRPFVKLNVETDTAEIRLMCTDTYLDTPRPDDGSITGPCESNGDRGSGGIKGGFVHQRMASKIGRWYSRTMSKTERMGMGLYVKYDGDPWADSDALAFSGVMVSMKEPGWYSFGFEIKDKKCDVPCIGIEMVHDGGKETWHSAATAIYCLMGSGQLLWDTVTGVDMAL

SEQ ID NO: 28751 - protein, 466 aa, Artificial Sequence
  derived and/or modified protein sequence (wt) from neuraminidase__InfluenzaB__ACF54151
MLPSTIQTLTLFLTSGGVLLSLYVSASLSYLLYSDILLKFPSTEITAPTMPLDCANASNVQAVNRSATKGVTLLLPEPEWTYPRLSCPGSTFQKALLISPHRFGETKGNSAPLIIREPFIACGPKECKHFALTHYAAQPGGYYNGTRGNRNKLRHLISVKLGKIPTVENSIFHMAAWSGSACHDGKEWTYIGVDGPDNNALLKIKYGEAYTDTYHSYANNILRTQESACNCIGGNCYLMITDGSASGVSECRFLKIREGRIIKEIFPTGRIKHTEECTCGFASNKTIECACRDNSYTAKRPFVKLNVETDTAEIRLMCTETYLDTPRPDDGSITGPCESNGDKGSGGIKGGFVHQRMASKIGRWYSRTMSKTKRMGMGLYVKYDGDPWADSDALAFSGVMVSMEEPGWYSFGFEIKDKKCDVPCIGIEMVHDGGKETWHSAATAIYCLMGSGQLLWDTVTGVNMAL

SEQ ID NO: 28752 - protein, 466 aa, Artificial Sequence
  derived and/or modified protein sequence (wt) from neuraminidase__InfluenzaB__ACF54162
MLPSTIQTLTLFLTSGGVLLSLYVSASLSYLLYSDILLKFSQTEITAPIMPLDCANASNVQAVNRSATKGVTLLLPEPEWTYPRLSCPGSTFQKALLISPHRFGETKGNSAPLIIREPFIACGPKECKHFALTHYAAQPGGYYNGTREDRNKLRHLISVKLGKIPTVENSIFHMAAWSGSACHDGKEWTYIGVDGPDSNALLKIKYGEAYTDTYHSYAKNILRTQESACNCIGGDCYLMITDGPASGISECRFLKIREGRIIKEIFPTGRVKHTEECTCGFASNKTIECACRDNNYTAKRPFVKLNVETDTAEIRLMCTETYLDTPRPNDGSITGPCESDGDKGSGGIKGGFVHQRMASKIGRWYSRTMSKTKRMGMELYVKYDGDPWTDSEALALSGVMVSMEEPGWYSFGFEIKDKKCDVPCIGIEMVHDGGKTTWHSAATAIYCLMGSGQLLWDTVTGVDMAL

SEQ ID NO: 28753 - protein, 466 aa, Artificial Sequence
  derived and/or modified protein sequence (wt) from neuraminidase__InfluenzaB__ACF54184
MLPSTIQTLTLFLTSGGVLLSLYVSASLSYLLYSDILLKFSTTEITAPTMPLDCANASNVQAVNRSATKGVTLLLPEPEWTYPRLSCPGSTFQKALLISPHRFGETKGNSAPLIIREPFIACGPKECKHFALTHYAAQPGGYYNGTKEDRNKLRHLISVKLGKIPTVENSIFHMAAWSGSACHDGKEWTYIGVDGPDSNALLKIKYGEAYTDTYHSYANNILRTQESACNCIGGNCYLMITDGSASGISECRFLKIREGRIIKEIFPTGRVKHTEECTCGFASNKTIECACRDNSYTAKRPFVKLNVETDTAEIRLMCTETYLDTPRPDDGSITGPCESNGNKGSGGIKGGFVHQRMASKIGRWYSRTMSKTKRMGMGLYVKYDGDPWTDSDALALSGVMVSMEEPGWYSFGFEIKDKKCDVPCIGIEMVHDGGKETWHSAATAIYCLMGSGQLLWDTVTGVDMAL

SEQ ID NO: 28754 - protein, 466 aa, Artificial Sequence
  derived and/or modified protein sequence (wt) from neuraminidase__InfluenzaB__ACF54206
MLPSTIQTLTLFLTSGGVLLSLYVSASLSYLLYSDILLKFSTTETTAPTMPLDCANASNVQAVNRSATKGVTLLLPEPEWTYPRLSCPGSTFQKALLISPHRFGETKGNSAPLIIREPFIACGPKECKHFALTHYAAQPGGYYNGTREDRNKLRHLISVKLGKIPTVENSIFHMAAWSGSACHDGKEWTYIGVDGPDSNALLKIKYGEAYTDTYHSYANNILRTQESACNCIGGNCYLMITDGSASGISECRFLKIREGRIIKEIFPTGRVKHTEECTCGFASNKTIECACRDNSYTAKRPFVKLNVETDTAEIRLMCTETYLDTPRPDDGSITGPCESNGNKGSGGIKGGFVHQRMASKIGRWYSRTMSKTKRMGMGLYVKYDGDPWTDSDALALSGVMVSMEEPGWYSFGFEIKDKKCDVPCIGIEMVHDGGKETWHSAATAIYCLMGSGQLLWDTVTGVDMAL

SEQ ID NO: 28755 - protein, 466 aa, Artificial Sequence
  derived and/or modified protein sequence (wt) from neuraminidase__InfluenzaB__ACF54217
MLPSTIQTLTLFLTSGGVLLSLYVSASLSYLLYSDILLKFSQTEITAPIMPLDCANASNVQAVNHSATKGVTLLLPEPEWTYPRLSCPGSTFQKALLISPHRFGETKGNSAPLIIREPFIACGPKECKHFALTHYAAQPGGYYNGTREDRNKLRHLISVKLGKIPTVENSIFHMAAWSGSACHDGREWTYIGVDGPDSNALLKIKYGEAYTDTYHSYAKNILRTQESACNCIGGDCYLMITDGPASGISECRFLKIREGRIIKEIFPTGRVKHTEECTCGFASNKTIECACRDNSYTAKRPFVKLNVETDTAEIRLMCTETYLDTPRPNDGSITGPCESNGDKGSGGIKGGFVHQRMASKIGRWYSRTMSKTKRMGMGLYVKYDGDPWTDSEALALSGVMVSMEEPGWYSFGFEIKDKKCDVPCIGIEMVHDGGKTTWHSAATAIYCLMGSGQLLWDTVTGVDMAL

SEQ ID NO: 28756 - protein, 466 aa, Artificial Sequence; identical to SEQ ID NO: 28647
  derived and/or modified protein sequence (wt) from neuraminidase__InfluenzaB__ACF54228

SEQ ID NO: 28757 - protein, 466 aa, Artificial Sequence; identical to SEQ ID NO: 28668
  derived and/or modified protein sequence (wt) from neuraminidase__InfluenzaB__ACF54239

SEQ ID NO: 28758 - protein, 466 aa, Artificial Sequence
  derived and/or modified protein sequence (wt) from neuraminidase__InfluenzaB__ACF54261
MLPSTIQTLTLFLTSGGVLLSLYVSASLSYLLYSDILLKFSPTEITAPTMPLDCANASNVQAVNRSATKGVTLLLPEPEWTYPRLSCPGSTFQKALLISPHRFGETKGNSAPLIIREPFIACGPKECKHFALTHYAAQPGGYYNGTREDRNKLRHLVSVKLGKIPTVENSIFHMAAWSGSACHDGKEWTYIGVDGPDSNALLKIKYGEAYTDTYHSYANNILRTQESACNCIGGNCYLMITDGSASGISECRFLKIREGRIIKEIFPTGRVKHTEECTCGFASNKTIECACRDNSYTAKRPFVKLNVETDTAEIRLMCTETYLDTPRPDDGSITGPCESNGDKGSGGIKGGFVHQRMASKIGRWYSRTMSKTKRMGMGLYVKYDGDPWTDSDALALSGVMVSMEEPGWYSFGFEIKDKKCDVPCIGIEMVHDGGKETWHSAATAIYCLMGSGQLLWDTVTGVDMAL

SEQ ID NO: 28759 - protein, 466 aa, Artificial Sequence
  derived and/or modified protein sequence (wt) from neuraminidase__InfluenzaB__ACF54272
MLPSTIQTLTLFLTSGGVLLSLYVSASLSYLLYSDILLKFSTTEITAPTMPLDCANASNVQAVNRSATKGVTLLLPEPEWTYPRLSCPGSTFQKALLISPHRFGETKGNSAPLIIREPFIACGPKECKHFALTHYAAQPGGYYNGTREDRNKLRHLISVKLGKIPTVENSIFHMAAWSGSACHDGKEWTYIGVDGPDSNALLKIKYGEAYTDTYHSYANNILRTQESACNCIGGNCYLMITDGSASGISECRFLKIREGRIIKEIFPTGRVKHTEECTCGFASNKTIECACRDNSYTAKRPFVKLNVETDTAEIRLMCTETYLDTPRPDDGSITGPCESNGDKGSGGIKGGFVHQRMASKIGRWYSRTMSKTKRMGMGLYVKYDGDPWTDSDALALSGVMVSMEEPGWYSFGFEIKDKKCDVPCIGIEMVHDGGKETWHSAATAIYCLMGSGQLLWDTVTGVDMAL

SEQ ID NO: 28760 - protein, 466 aa, Artificial Sequence
  derived and/or modified protein sequence (wt) from neuraminidase__InfluenzaB__ACF54283
MLPSTIQTLTLFLTSGGVLLSLYVSASLSYLLYSDILLKFSTTEITAPTMPLDCANASNVQAVNRSATKGVTLLLPEPEWTYPRLSCPGSTFQKALLISPHRFGETKGNSAPLIIREPFIACGPKECKHFALTHYAAQPGGYYNGTREDRNKLRHLVSVKLGKIPTVENSIFHMAAWSGSACHDGKEWTYIGVDGPDSNALLKIKYGEAYTDTYHSYANNILRTQESACNCIGGNCYLMITDGSASGISECRFLKIREGRIIKEIFPTGRVKHTEECTCGFASNKTIECACRDNSYTAKRPFVKLNVETDTAEIRLMCTETYLDTPRPDDGSITGPCESNGDKGSGGIKGGFVHQRMASKIGRWYSRTMSKTKRMGMGLYVKYDGDPWTDSDALALSGVMVSMEEPGWYSFGFEIKDKKCDVPCIGIEMVHDGGKETWHSAATAIYCLMGSGQLLWDTVTGVDMAL

SEQ ID NO: 28761 - protein, 466 aa, Artificial Sequence
  derived and/or modified protein sequence (wt) from neuraminidase__InfluenzaB__ACF54294
MLPSTIQTLTLFLTSGGVLLSLYVSASLSYLLYSDILLKFSTTEITAPTIPLDCANASNVQAVNRSATKGVTFLLPEPEWTYPRLSCPGSTFQKALLISPHRFGETKGNSAPLIIREPFIACGPKECKHFALTHYAAQPGGYYNGTREDRNKLRHLISVKLGKIPTVENSIFHMAAWSGSACHDGKEWTYIGVDGPDSNALLKIKYGEAYTDTYHSYANNILRTQESACNCIGGNCYLMITDGSASGISECRFLKIREGRIIKEIFPTGRVKHTEECTCGFASNKTIECACRDNSYTAKRPFVKLNVETDTAEIRLMCTETYLDTPRPDDGSITGPCESNGNKGSGGIKGGFVHQRMASKIGRWYSRTMSKTKRMGMGLYVKYDGDPWTDSDALALSGVMVSMEEPGWYSFGFEIKDKKCDVPCIGIEMVHDGGKETWHSAATAIYCLMGSGQLLWDTVTGVDMAL

SEQ ID NO: 28762 - protein, 466 aa, Artificial Sequence
  derived and/or modified protein sequence (wt) from neuraminidase__InfluenzaB__ACF54305
MLPSTIQTLTLFLTSGGVLLSLYVSASLSYLLYSDILLKFSTTEITAPTMPLDCANASNVQAVNRSATKGVTFLLPEPEWTYPRLSCPGSTFQKALLISPHRFGETKGNSAPLIIREPFIACGPKECKHFALTHYAAQPGGYYNGTREDRNKLRHLISVELGKIPTVENSIFHMAAWSGSACHDGKEWTYIGVDGPDSNALLKIKYGEAYTDTYHSYANNILRTQESACNCIGGNCYLMITDGSASGISECRFLKIREGRIIKEIFPTGRVKHTEECTCGFASNKTIECACRDNSYTAKRPFVKLNVETDTAEIRLMCTETYLDTPRPDDGSITGPCESNGNKGSGGIKGGFVHQRMASKIGRWYSRTMSKTKRMGMGLYVKYDGDPWTDSDALALSGVMVSMEEPGWYSFGFEIKDKKCDVPCIGIEMVHDGGKETWHSAATAIYCLMGSGQLLWDTVTGVDMAL

SEQ ID NO: 28763 - protein, 466 aa, Artificial Sequence
  derived and/or modified protein sequence (wt) from neuraminidase__InfluenzaB__ACF54316
MLPSTIQTLTLFLTSGGVLLSLYVSASLSYLLYSDILLKFSPTEITAPTMPLDCANASNVQAVNRSATKGVTLLLPEPEWTYPRLSCPGSTFQKALLISPHRFGETKGNSAPLIIREPFIACGPNECKHFALTHYAAQPGGYYNGTRGDRNKLRHLISVKLGKIPTVENSIFHMAAWSGSACHDGKEWTYIGVDGPDNNALLKIKYGEAYTDTYHSYANNILRTQESACNCIGGNCYLMITDGSASGVSECRFLKIREGRIIKEIFPTGRVKHTEECTCGFASNKTIECACRDNSYTAKRPFVKLNVETDTAEIRLMCTETYLDTPRPDDGSITGPCESNGDKGSGGIKGGFVHQRMASKIGRWYSRTMSKTERMGMGLYVKYDGDPWADSDALALIGVMVSMEEPGWYSFGFEIKDKNCDVPCIGIEMVHDGGKETWHSAATAIYCLMGSGQLLWDTVTGVNMAL

SEQ ID NO: 28764 - protein, 467 aa, Artificial Sequence
  derived and/or modified protein sequence (wt) from neuraminidase__InfluenzaB__ACF54338
MLPSTIQTLTLFLTSGGVLLSLYVSASLSYLLYSDILLKFPSTEITAPTMPLDCANASNVQAVNRSATKGVTLLLLPEPEWTYPRLSCPGSTFQKALLISPHRFGETKGNSAPLIIREPFIACGPKECKHFALTHYAAQPGGYYNGTRGDRNKLRHLISVKLGKIPTVENSIFHMAAWSGSACHDGKEWTYIGVDGPDNNALLKIKYGEAYTDTYHSYANNILRTQESACNCIGGNCYLMITDGSASGVSECRFLKIREGRIIKEIFPTGRIKHTEECTCGFASNKTIECACRDNSYTAKRPFVKLNVETDTAEIRLMCTETYLDTPRPDDGSITGPCESNGGKGSGGIKGGFVHQRMASKIGRWYSRTMSKTERKGMGLYVKYDGDPWADSDALVFSGVMVSMEEPGWYSFGFEIKDKKCDVPCIGIEMVHDGGKETWHSAATAIYCLMGSGQLLWDTVTGVNMAL

SEQ ID NO: 28765 - protein, 466 aa, Artificial Sequence
  derived and/or modified protein sequence (wt) from neuraminidase__InfluenzaB__ACF54349
MLPSTIQTLTLFLTSGGVLLSLYVSASLSYLLYSDILLKFSQTEITAPIMPLDCANASNVQAVNRSAAKGVTLLLPEPEWTYPRLSCPGSTFQKALLINPHRFGETKGNSAPLIIREPFIACGPTECKHFALTHYAAQPGGYYNGTREDRNKLRHLISVKLGKIPTVENSIFHMAAWSGSACHDGKEWTYIGVDGPDSNALLKIKYGEAYTDTYHSYAKNILRTQESACNCIGGDCYLMITDGSASGISECRFLKIREGRIIKEIFPTGRVKHTEECTCGFASNKTIECACRDNSYTAKRPFVKLNVETDTAEIRLMCTETYLDTPRPNDGSITGPCESDGDKGSGGIKGGFVHQRMASKIGRWYSRTMSKTKRMGMGLYVKYDGDPWTDSEALALSGVMVSMEEPGWYSFGFEIKDKKCDVPCIGIEMVHDGGKTTWHSAATAIYCLMGSGQLLWDTVTGVDMAL

SEQ ID NO: 28766 - protein, 466 aa, Artificial Sequence
  derived and/or modified protein sequence (wt) from neuraminidase__InfluenzaB__ACF54371
MLPSTIQTLTLFLTSGGVLLSLYVSASLSYLLYSDILLKFSQTEITAPIMPLDCANASNVQAVNRSAAKGVTLLLPEPEWTYPRLSCPGSTFQKALLISPHRFGETKGNSAPLIIREPFIACGPTECKHFALTHYAAQPGGYYNGTREDRNKLRHLISVKLGKIPTVENSIFHMAAWSGSACHDGKEWTYIGVDGPDSNALLKIKYGEAYTDTYHSYAKNILRTQESACNCIGGDCYLMITDGPASGISECRFLKIREGRIIKEIFPTGRVKHTEECTCGFASNKTIECACRDNSYTAKRPFVKLNVETDTAEIRLMCTETYLDTPRPNDGSITGPCESDGDKGSGGIKGGFVHQRMASKIGRWYSRTMSKTKRMGMGLYVKYDGDPWTDSEALALSGVMVSMEEPGWYSFGFEIKDKKCDVPCIGIEMVHDGGKTTWHSAATAIYCLTGSGQLLWDTVTGVDMAL

SEQ ID NO: 28767 - protein, 466 aa, Artificial Sequence
  derived and/or modified protein sequence (wt) from neuraminidase__InfluenzaB__ACI22549
MLPSTIQTLTLFLTSGGVLLSLYVSASLSYLLYSDILLKFSPTEITARTMPLDCANASNVQAVNRSATKGVTLLLPEPEWTYPRLSCPGSTFQKALLISPHRFGETKGNSAPLIIREPFIACGPNECKHFALTHYAAQPGGYYNGTRGDRNKLRHLISVKLGKIPTVEDSIFHMAAWSGSACHDGKEWTYIGVDGPDNNALLKIKYGEAYTDTYHSYANNILRTQESACNCIGGNCYLMITDGSASGVSECRFLKIREGRIIKEIFPTGRVKHTEECTCGFASNKTIECACRDNSYTAKRPFVKLNVETDTAEIRLMCTETYLDTPRPDDGSITGPCESNGDKGSGGIKGGFVHQRMASKIGRWYSRTMSKTERMGMGLYVKYDGDPWADSDALALIGVMVSMEEPGWYSFGFEIKDKNCDVPCIGIEMVHDGGKETWHSAATAIYCLMGSGQLLWDTVTGVNMAL

SEQ ID NO: 28768 - protein, 466 aa, Artificial Sequence
  derived and/or modified protein sequence (wt) from neuraminidase__InfluenzaB__ACI22551
MLPSTIQTLTLFLTSGGVLLSLYVSASLSYLLYSDILLKFSPTEITALTMPLDCANASNVQAVNRSATKGVTLLLPEPEWTYPRLSCPGSTFQKALLISPHRFGETKGNSAPLIIREPFIACGPNECKHFALTHYAAQPGGYYNGTRGDRNKLRHLISVKLGKIPTVENSIFHMAAWSGSACHDGKEWTYIGVDGPDNNALLKIKYGEAYTDTYHSYANNILRTQESACNCIGGNCYLMITDGSASGVSECRFLKIREGRIIKEIFPTGRVKHTEECTCGFASNKTIECACRDNSYTAKRPFVKLNVETDTAEIRLMCTETYLDTPRPDDGSITGPCESNGDKGSGGIKGGFVHQRMASKIGRWYSRTMSKTERMGMGLYVKYDGDPWADSDALALIGVMVSMEEPGWYSFGFEIKDKNCDVPCIGIEMVHDGGKETWHSAATAIYCLMGSGQLLWDTVTGVNMAL

SEQ ID NO: 28769 - protein, 466 aa, Artificial Sequence; identical to SEQ ID NO: 28768
  derived and/or modified protein sequence (wt) from neuraminidase__InfluenzaB__ACI22555

SEQ ID NO: 28770 - protein, 466 aa, Artificial Sequence; identical to SEQ ID NO: 28635
  derived and/or modified protein sequence (wt) from neuraminidase__InfluenzaB__ACI22557

SEQ ID NO: 28771 - protein, 466 aa, Artificial Sequence
  derived and/or modified protein sequence (wt) from neuraminidase__InfluenzaB__ACI22559
MLPSTIQTLTLFLTSGGVLLSLYVSASLSYLLYSDILLKFPSTEITAPTMPLDCANASNVQAVNLSATKGVTLLLPEPEWTYPRLSCPGSTFQKALLISPHRFGETKGNSAPLIIREPFIACGPKECKHFALTHYAAQPGGYYNGTRGDRNKLRHLISVKLGKIPTVENSIFHMAAWSGSACHDGKEWTYIGVDGPDNNALLKIKYGEAYTDTYHSYANNILRTQESACNCIGGNCYLMITDGSASGVSECRFLKIREGRIIKEIFPTGRIKHTEECTCGFASNKTIECACRDNSYTAKRPFVKLNVETDTAEIRLMCTETYLDTPRPDDGSITGPCESNGGKGSGGIKGGFVHQRMASKIGRWYSRTMSKTERKGMGLYVKYDGDPWADSDALAFSGVMVSMEEPGWYSFGFEIKDKKCDVPCIGIEMVHDGGKETWHSAATAIYCLMGSGQLLWDTVTGVNMAL

SEQ ID NO: 28772 - protein, 466 aa, Artificial Sequence
  derived and/or modified protein sequence (wt) from neuraminidase__InfluenzaB__ACI22561
MLPSTIQTLTLFLTSGGVLLSLYVSASLSYLLYSDILLKFSPTEITAPTMPLDCANASNVQAVNRSATKGGTLLLPEPEWTYPRLSCPGSTFQKALLISPHRFGETKGNSAPLIIREPFIACGPNECKHFALTHYAAQPGGYYNGTRGDRNKLRHLISVKLGKIPTVENSIFHMAAWSGSACHDGKEWTYIGVDGPDNNALLKIKYGEAYTDTYHSYANKILRTQESACNCIGGNCYLMITDGSASGVSECRFLKIREGRIIKEIFPTGRVKHTEECTCGFASNKTIECACRDNSYTAKRPFVKLNVETDTAEIRLMCTDTYLDTPRPDDGSITGPCESNGDKGSGGIKGGFVHQRMASKIGRWYSRTMSKTERMGMGLYVKYDGDPWADSDALAFSGVMVSMKEPGWYSFGFEIKDKKCDVPCIGIEMVHDGGKETWHSAATAIYCLMGSGQLLWDTVTGVDMAL

SEQ ID NO: 28773 - protein, 466 aa, Artificial Sequence; identical to SEQ ID NO: 28635
  derived and/or modified protein sequence (wt) from neuraminidase__InfluenzaB__ACI22563

SEQ ID NO: 28774 - protein, 466 aa, Artificial Sequence
  derived and/or modified protein sequence (wt) from neuraminidase__InfluenzaB__ACI22565
MLPSTIQTLTLFLTSGGVLLSLYVSASLSYLLYSDILLKFPSTEITAPTMPLDCANASNVQAVNHSATKGVTLLLPEPEWTYPRLSCPGSTFQKALLISPHRFGETKGNSAPLIIREPFIACGPKECKHFALTHYAAQPGGYYNGTRGDRNKLRHLISVKLGKIPTVENSIFHMAAWSGSACHDGKEWTYIGVDGPDNNALLKIKYGEAYTDTYHSYANNILRTQESACNCIGGNCYLMITDGSASGVSECRFLKIREGRIIKEIFPTGRIKHTEECTCGFASNKTIECACRDNSYTAKRPFVKLNVETDTAEIRLMCTETYLDTPRPDDGSITGPCESNGGKGSGGIKGGFVHQRMASKIGRWYSRTMSKIERKGMGLYVKYDGDPWADSDALAFSGVMVSMEEPGWYSFGFEIRDKKCDVPCIGIEMVHDGGKETWHSAATAIYCLMGSGQLLWDTVTGVNMAL

SEQ ID NO: 28775 - protein, 466 aa, Artificial Sequence; identical to SEQ ID NO: 28635
  derived and/or modified protein sequence (wt) from neuraminidase__InfluenzaB__ACI22567

SEQ ID NO: 28776 - protein, 466 aa, Artificial Sequence; identical to SEQ ID NO: 28635
  derived and/or modified protein sequence (wt) from neuraminidase__InfluenzaB__ACI22569

SEQ ID NO: 28777 - protein, 466 aa, Artificial Sequence
  derived and/or modified protein sequence (wt) from neuraminidase__InfluenzaB__ACJ53908
MLHSTIQTLTLFLTSGGVLLSLYVSASLSYLLYSDILLKFSQTEITAPIMPLDCANASSVQAVNRSAAKGVTLLLPEPEWTYPRLSCPGSTFQKALLISPHRFGETKGNSAPLIIREPFIACGPTECKHFALTHYAAQPGGYYNGTREDRNKLRHLISVKLGKIPTVENSIFHMAAWSGSACHDGKEWTYIGVDGPDSNALLKIKYGEAYTDTYHSYAKNILRTQESACNCIGGDCYLMITDGPASGISECRFLKIREGRIIKEIFPTGRVKHTEECTCGFASNKTIECACRDNSYTAKRPFVKLNVETDTAEIRLMCTETYLDTPRPNDGSITGPCESDGDKGSGGIKGGFVHQRMASKIGRWYSRTMSKTKRMGMGLYVKYDGDPWTDSEALALSGVMVSMEEPGWYSFGFEIKDKKCDVPCIGIEMVHDGGKTTWHSAATAIYCLMGSGQLLWDTVTGVDMAL

SEQ ID NO: 28778 - protein, 466 aa, Artificial Sequence; identical to SEQ ID NO: 28653
  derived and/or modified protein sequence (wt) from neuraminidase__InfluenzaB__ACN32560

SEQ ID NO: 28779 - protein, 466 aa, Artificial Sequence; identical to SEQ ID NO: 28723
  derived and/or modified protein sequence (wt) from neuraminidase__InfluenzaB__ACN32582

SEQ ID NO: 28780 - protein, 466 aa, Artificial Sequence; identical to SEQ ID NO: 28635
  derived and/or modified protein sequence (wt) from neuraminidase__InfluenzaB__ACN32593

SEQ ID NO: 28781 - protein, 466 aa, Artificial Sequence
  derived and/or modified protein sequence (wt) from neuraminidase__InfluenzaB__ACN32604
MLPSTIQTLTLFLTSGGVLLSLYVSASLSYLLYSDILLKFSPTEITAPTMPLDCANASNVHAVNRSATKGVTLLLPEPEWTYPRLSCPGSTFQKALLISPHRFGETKGNSAPLIIREPFIACGPNECKHFALTHYAAQPGGYYNGTRGDRNKLRHLISVKLGKIPTVENSIFHMAAWSGSACHDGKEWTYIGVDGPDNNALLKIKYGEAYTDTYHSYANNILRTQESACNCIGGNCYLMITDGSASGVSECRFLKIREGRIIKEIFPTGRVKHTEECTCGFASNKTIECACRDNSYTAKRPFVKLNVETDTAEIRLMCTDTYLDTPRPDDGSITGPCEFNGDKGSGGIKGGFVHQRMASKIGRWYSRTMSKTERMGMGLYVKYDGDPWADSDALAFSGVMVSMKEPGWYSFGFEIKDKKCDVPCIGIEMVHDGGKETWHSAATAIYCLMGSGQLLWDTVTGVDMAL

SEQ ID NO: 28782 - protein, 466 aa, Artificial Sequence; identical to SEQ ID NO: 28635
  derived and/or modified protein sequence (wt) from neuraminidase__InfluenzaB__ACN32615

SEQ ID NO: 28783 - protein, 466 aa, Artificial Sequence
  derived and/or modified protein sequence (wt) from neuraminidase__InfluenzaB__ACN32775
MLPSTIQTLTLFLTSGGVLLSLYVSASLSYLLYSDILLKFSPTEINAPTMPLDCANASNVHAVNRSATKGVTLLLPEPEWTYPRLSCPGSTFQKALLISPHRFGETKGNSAPLIIREPFIACGPNECKHFALTHYAAQPGGYYNGTRGDRNKLRHLISVKLGKIPTVENSIFHMAAWSGSACHDGKEWTYIGVDGPDNNALLKIKYGEAYTDTYHSYANNILRTQESACNCIGGNCYLMITDGSASGISECRFLKIREGRIIKEIFPTGRVKHTEECTCGFASNKSIECACRDNSYTAKRPFVKLNVETDTAEIRLMCTDTYLDTPRPDDGSITGPCESNGDKGSGGIKGGFVHQRMASKIGRWYSRTMSKTERMGMGLYVKYDGDPWADSDALAFSGVMVSMKEPGWYSFGFEIKDKKCDVPCIGIEMVHDGGKETWHSAATAIYCLMGSGQLLWDTVTGVDMAL

SEQ ID NO: 28784 - protein, 466 aa, Artificial Sequence; identical to SEQ ID NO: 28635
  derived and/or modified protein sequence (wt) from neuraminidase__InfluenzaB__ACN32786

SEQ ID NO: 28785 - protein, 466 aa, Artificial Sequence
  derived and/or modified protein sequence (wt) from neuraminidase__InfluenzaB__ACO05928
MLPSTIQTLTLFLTSGGVLLSLYVSASLSYLLYSDILLKFPSTEITAPTMPLDCANASNVQAVNRSATKGVTLLLPEPEWTYPRLSCPGSTFQKALLISPHRFGETKGNSAPLIIREPFIACGPKECKHFALTHYAAQPGGYYNGTRGDRNKLRHLISVKLGKIPTVENSIFHMAAWSGSACHDGKEWTYIGVDGPDNNALLKIKYGEAYTDTYHSYANNILRTQESACNCIGGNCYLMITDGSASGVSECRFLKIREGRIIKEIFPTGRIKHTEECTCGFASNKTIECACRDNSYTAKRPFVKLNVETDTAEIRLMCTETYLDTPRPDDGSITGPCESNGDKGSGGIKGGFVHQRMASKIGRWYSRTMSKTKRMGMGLYVKYDGDPWADSDALAFSGVMVPMEEPGWYSFGFEIKDKKCDVPCIGIEMVHDGGKETWHSAATAIYCLMGSGQLLWDTVTGVNMAL

SEQ ID NO: 28786 - protein, 466 aa, Artificial Sequence; identical to SEQ ID NO: 28647
  derived and/or modified protein sequence (wt) from neuraminidase__InfluenzaB__ACO05950

SEQ ID NO: 28787 - protein, 466 aa, Artificial Sequence
  derived and/or modified protein sequence (wt) from neuraminidase__InfluenzaB__ACO05961
MLPSTIQTLTLFLTSGGVLLSLYVSASLSYLPYSDILLKFPSTEITAPTMPLDCANASNVQAVNRSATKGVTLLLPEPEWTYPRLSCPGSTFQKALLISPHRFGETKGNSAPLIIREPFIACGPKECKHFALTHYAAQPGGYYNGTRGDRNKLRHLISVKLGKIPTVENSIFHMAAWSGSACHDGKEWTYIGVDGPDNNALLKIKYGEAYTDTYHSYANNILRTQESACNCIGGNCYLMITDGSASGVSECRFLKIREGRIIKEIFPTGRIKHTEECTCGFASNKTIECACRDNSYTAKRPFVKLNVETDTAEIRLMCTETYLDTPRPDDGSITGPCESNGDKGSGGIKGGFVHQRMASKIGRWYSRTMSKTKRMGMGLYVKYDGDPWADSDALAFSGVMVSMEEPGWYSFGFEIKDKKCDVPCIGIEMVHDGGKETWHSAATAIYCLMGSGQLLWDTVTGVNMAL

SEQ ID NO: 28788 - protein, 466 aa, Artificial Sequence
  derived and/or modified protein sequence (wt) from neuraminidase__InfluenzaB__ACO05972
MLPSTIQTLTLFLTSGGVLLSLYVSASLSYLLYSDILLKFSQTEITAPIMPLDCANASNVQAVNRSAAKGVTLLLPEPEWTYPRLSCPGSTFQKALLISPHRFGETKGNSAPLIIREPFIACGPTECKHFALTHYAAQPGGYYNGTREDRNKLRHLISVKLGKIPTVENSIFHMAAWSGSACHDGKEWTYIGVDGPDSNALLKIKYGEAYTDTYHSYAKNILRTQESACNCIGGDCYLMITDGPASGISECRFLKIREGRIIKEIFPTGRVKHTEECTCGFASNKTIECACRDNSYTAKRPFVKLNVETDTAEIRLMCTETYLDTPRPNDGSITGPCESDGDKGSGGIKGGFVHQRMASKIGRWYSRTMSKTKRMGMGLYVKYDGDPWTDSEALALSGVMVSMEEPGWYSFGFEIKDKKCDVPCIGIEMVHDGGKTTWHSAATAIYCLMGSGQLLWDTVTGVDMAL

SEQ ID NO: 28789 - protein, 466 aa, Artificial Sequence; identical to SEQ ID NO: 28788
  derived and/or modified protein sequence (wt) from neuraminidase__InfluenzaB__ACO05983

SEQ ID NO: 28790 - protein, 466 aa, Artificial Sequence; identical to SEQ ID NO: 28788
  derived and/or modified protein sequence (wt) from neuraminidase__InfluenzaB__ACO05994

SEQ ID NO: 28791 - protein, 466 aa, Artificial Sequence
  derived and/or modified protein sequence (wt) from neuraminidase__InfluenzaB__ACO06005
MLPSTIQTLTLFLTSGGVLLSLYVSASLSYLLYSDILLKFSPTEITAPTMPLDCANASNVQAVNRSATKGVTLLLPEPEWTYPRLSCPGSTFQKALLISPHRFGETKGNSAPLIIREPFIACGPNECKHFALTHYAAQPGGYYNGTRGDRNKLRHLISVKLGKIPTVENSIFHMAAWSGSACHDGKEWTYIGVDGPDNNALLKIKYGEAYTDTYHSYANKILRTQESACNCIGGNCYLMITDGSASGVSECRFLKIREGRIIKEIFPTGRVKHTEECTCGFASNKTIECACRDNSYTAKRPFVKLNVETDTAEIRLMCTDTYLDTPRPDDGSITGPCESNGDRGSGGIKGGFVHQRMASKIGRWYSRTMSKTERMGMGLYVKYDGDPWADSDALAFSGVMVSMKEPGWYSFGFEIKDKKCDVPCIGIEMVHDGGKETWHSAATAIYCLMGSGQLLWDTVTGVDMAL

SEQ ID NO: 28792 - protein, 466 aa, Artificial Sequence
  derived and/or modified protein sequence (wt) from neuraminidase__InfluenzaB__ACO06027
MLPSTIQTLTLFLTSGGVLLSLYVSASLSYLLYSDILLKFSQTEITAPIMPLDCANASNVQAVNRSAAKGVTLLLPEPEWTYPRLSCPGSTFQKALLISPHRFGETKGNSAPLIIREPFIACGPTECKHFALTHYAAQPGGYYNGTREDRNKLRHLISVKLGKIPTVENSIFHMAAWSGSACHDGKEWTYIGVDGPDSNALLKIKYGEAYTDTYHSYAKNILRTQESACNCIGGDCYLMITDGPASGISECRFLKIREGRIIKEIFPTGRVKHTEECTCGFASNKTIECACRDNSYTAKRPFVKLNVETDTAEIRLMCTETYLDTPRPNDGSITGPCESDGDKGSGGIKGGFVHQRMASKIGRWYSRTMSKTKRMGMGLYVKYDGDPWTDSEALALSGVMVSMEEPGWYSFGFEIKDKKCDVPCIGIEMVHDGGKTTWHSAATAIYCLMGSGQLLWDTVTGVDMTL

SEQ ID NO: 28793 - protein, 466 aa, Artificial Sequence
  derived and/or modified protein sequence (wt) from neuraminidase__InfluenzaB__ACO06066
MLPSTIQTLTLFLTSGGVLLSLYVSASLSYLLYSDILLKFSQTEITAPIMPLDCANASNVQAVNRSVAKGVTLLLPEPEWTYPRLSCPGSTFQKALLISPHRFGETKGNSAPLIIREPFIACGPTECKHFALTHYAAQPGGYYNGTREDRNKLRHLISVKLGKIPTVENSIFHMAAWSGSACHDGKEWTYIGVDGPDSNALLKIKYGEAYTDTYHSYAKNILRTQESACNCIGGDCYLMITDGPASGISECRFLKIREGRIIKEIFPTGRVKHTEECTCGFASNKTIECACRDNSYTAKRPFVKLNVETDTAEIRLMCTETYLDTPRPNDGSITGPCESDGDKGSGGIKGGFVHQRMASKIGRWYSRTMSKTKRMGMGLYVKYDGDPWTDSEALALSGVMVSMEEPGWYSFGFEIKDKKCDVPCIGIEMVHDGGKTTWHSAATAIYCLMGSGQLLWDTVTGVDMTL

SEQ ID NO: 28794 - protein, 466 aa, Artificial Sequence
  derived and/or modified protein sequence (wt) from neuraminidase__InfluenzaB__ACO94665
MLPSTIQTLTLFLTSGGVLLSLYVSASLSYLLYSDILLKFSPTEITASTMPLDCANASNVQAVNRSATKGVTLLLPEPEWTYPRLSCPGSTFQKALLISPHRFGETKGNSAPLIIREPFIACGPNECKHFALTHYAAQPGGYYNGTRGDRNKLRHLISVKLGKIPTVENSIFHMAAWSGSACHDGKEWTYIGVDGPDNNALLKIKYGEAYTDTYHSYANKILRTQESACNCIGGNCYLMITDGSASGVSECRFLKIREGRIIKEIFPTGRVKHTEECTCGFASNKTIECACRDNSYTAKRPFVKLNVETDTAEIRLMCTDTYLDTPRPDDGSITGPCESNGDKGSGGIKGGFVHQRMASKIGRWYSRTMSKTERMGMGLYVKYDGDPWADSDALAFSGVMVSMKEPGWYSFGFEIKDKKCDVPCIGIEMVHDGGKETWHSAATAIYCLMGSGQLLWDTVTGVDMAL

SEQ ID NO: 28795 - protein, 466 aa, Artificial Sequence; identical to SEQ ID NO: 28635
  derived and/or modified protein sequence (wt) from neuraminidase__InfluenzaB__ACQ45607

SEQ ID NO: 28796 - protein, 466 aa, Artificial Sequence
  derived and/or modified protein sequence (wt) from neuraminidase__InfluenzaB__ACQ45610
MLPSTIQTLTLFLTSGGVLLSLYVSASLSYLLYSDILLKFSPTEITAPTVPLDCANASNVQAVNRSATKGVTLLLPEPEWTYPRLSCPGSTFQKALLISPHRFGETKGNSAPLIIREPFIACGPNECKHFALTHYAAQPGGYYNGTRGDRNKLRHLISVKLGKIPTVENSIFHMAAWSGSACHDGKEWTYIGVDGPDNNALLKIKYGEAYTDTYHSYANKILRTQESACNCIGGNCYLMITDGSASGVSECRFLKIREGRIIKEIFPTGRVKYTEECTCGFASNKTIECACRDNSYTAKRPFVKLNVETDTAEIRLMCTDTYLDTPRPDDGSITGPCESNGDKGSGGIKGGFVHQRMASKIGRWYSRTMSKTERMGMGLYVKYDGDPWADSDALAFSGVMVSMKEPGWYSFGFEIKDKKCDVPCIGIEMVHDGGKETWHSAATAIYCLMGSGQLLWDTVTGVDMAL

SEQ ID NO: 28797 - protein, 466 aa, Artificial Sequence; identical to SEQ ID NO: 28635
  derived and/or modified protein sequence (wt) from neuraminidase__InfluenzaB__ACQ45613

SEQ ID NO: 28798 - protein, 466 aa, Artificial Sequence; identical to SEQ ID NO: 28791
  derived and/or modified protein sequence (wt) from neuraminidase__InfluenzaB__ACR15626

SEQ ID NO: 28799 - protein, 466 aa, Artificial Sequence; identical to SEQ ID NO: 28791
  derived and/or modified protein sequence (wt) from neuraminidase__InfluenzaB__ACR15637

SEQ ID NO: 28800 - protein, 466 aa, Artificial Sequence; identical to SEQ ID NO: 28762
  derived and/or modified protein sequence (wt) from neuraminidase__InfluenzaB__ACR15648

SEQ ID NO: 28801 - protein, 466 aa, Artificial Sequence; identical to SEQ ID NO: 28791
  derived and/or modified protein sequence (wt) from neuraminidase__InfluenzaB__ACR15659

SEQ ID NO: 28802 - protein, 466 aa, Artificial Sequence; identical to SEQ ID NO: 28791
  derived and/or modified protein sequence (wt) from neuraminidase__InfluenzaB__ACR15670

SEQ ID NO: 28803 - protein, 466 aa, Artificial Sequence; identical to SEQ ID NO: 28616
  derived and/or modified protein sequence (wt) from neuraminidase__InfluenzaB__ACR15681

SEQ ID NO: 28804 - protein, 466 aa, Artificial Sequence
  derived and/or modified protein sequence (wt) from neuraminidase__InfluenzaB__ACR15692
MLPSTIQTLTLFLTSGGVLLSLYVSASLSYLLYSDILLKFSPTEITAPTMPLGCANASNVQAVNRSATKGVTLLLPEPEWTYPRLSCPGSTFQKALLISPHRFGETKGNSAPLIIREPFIACGPKECKHFALTHYAAQPGGYYNGTRGDRNKLRHLISVKLGKIPTVENSIFHMAAWSGSACHDGKEWTYIGVDGPDNNALLKIKYGEAYTDTYHSYANNILRTQESACNCIGGNCYLMITDGSASGISECRFLKIREGRIIKEIFPTGRVKHTEECTCGFASNKTIECACRDNSYTAKRPFVKLNVETDTAEIRLMCTETYLDTPRPDDGSITGPCESNGDKGSGGIKGGFVHQRMASKIGRWYSRTMSKTKRMGMGLYVKYDGDPWADNDALALSGVMVSMEEPGWYSFGFEIKDKKCDVPCIGIEMVHDGGKETWHSAATAIYCLMGSGQLLWDTVTGVDMAL

SEQ ID NO: 28805 - protein, 466 aa, Artificial Sequence; identical to SEQ ID NO: 28792
  derived and/or modified protein sequence (wt) from neuraminidase__InfluenzaB__ACR15703

SEQ ID NO: 28806 - protein, 466 aa, Artificial Sequence; identical to SEQ ID NO: 28792
  derived and/or modified protein sequence (wt) from neuraminidase__InfluenzaB__ACR15714

SEQ ID NO: 28807 - protein, 466 aa, Artificial Sequence; identical to SEQ ID NO: 28707
  derived and/or modified protein sequence (wt) from neuraminidase__InfluenzaB__ACR15725

SEQ ID NO: 28808 - protein, 466 aa, Artificial Sequence; identical to SEQ ID NO: 28668
  derived and/or modified protein sequence (wt) from neuraminidase__InfluenzaB__ACR15736

SEQ ID NO: 28809 - protein, 466 aa, Artificial Sequence; identical to SEQ ID NO: 28791
  derived and/or modified protein sequence (wt) from neuraminidase__InfluenzaB__ACR39340

SEQ ID NO: 28810 - protein, 466 aa, Artificial Sequence
  derived and/or modified protein sequence (wt) from neuraminidase__InfluenzaB__ADL28399
MLPSTIQTLTLFLTSGGVLLSLYVSASLSYLLYSDILLKFSPTEITAPTMPLDCANASNVQAVNRSATKGVTLLLPEPEWTYPRLSCPGSTFQKALLISPHRFGETKGNSAPLIIREPFIACGPNECKHFALTHYAAQPGGYYNGTRGDRNKLRHLISVKLGKIPTVENSIFHMAAWSGSACHDGKEWTYIGVDGPDNNALLKIKYGEAYTDTYHSYANNILRTQESACNCIGGNCYLMITDGSASGVSECRFLKIREGRIIKEIFPTGRVKHTEECTCGFASNKIIECACRDSSYTAKRPFVKLNVETDTAEIRLMCTETYLDTPRPNDGSITGPCESNGDKGSGGIKGGFVHQRMASKIGRWYSRTMSKTERMGMGLYVKYDGDPWADSDALALSGVMVSMEEPGWYSFGFEIKDKKCDVPCIGIEMVHDGGKETWHSAATAIYCLMGSGQLLWDTVTGVDMAL

SEQ ID NO: 28811 - protein, 466 aa, Artificial Sequence; identical to SEQ ID NO: 28788
  derived and/or modified protein sequence (wt) from neuraminidase__InfluenzaB__ADN32822

SEQ ID NO: 28812 - protein, 466 aa, Artificial Sequence
  derived and/or modified protein sequence (wt) from neuraminidase__InfluenzaB__ADR02756
MLPSTIQTLTLFLTSGGVLLSLYVSASLSYLLYSDILLKFSQTEITAPIIPLDCANASNVQAVNRSAAKGVTLLLPEPEWTYPRLSCPGSTFQKALLISPHRFGETKGNSAPLIIREPFIACGPTECKHFALTHYAAQPGGYYNGTREDRNKLRHLISVKLGKIPTVENSIFHMAAWSGSACHDGKEWTYIGVDGPDSNALLKIKYGEAYTDTYHSYAKNILRTQESACNCIGGDCYLMITDGPASGISECRFLKIREGRIIKEIFPTGRVKHTEECTCGFASNKTIECACRDNSYTAKRPFVKLNVETDTAEIRLMCTETYLDTPRPNDGSITGPCESDGDKGSGGIKGGFVHQRMASKIGRWYSRTMSKTKRMGMGLYVKYDGDPWTDSEALALSGVMVSMEEPGWYSFGFEIKDKKCDVPCIGIEMVHDGGKTTWHSAATAIYCLMGSGQLLWDTVTGVDMAL

SEQ ID NO: 28813 - protein, 466 aa, Artificial Sequence
  derived and/or modified protein sequence (wt) from neuraminidase__InfluenzaB__AEA51353
MLPSTIQTLTLFLTSGGVLLSLYVSASLSYLLYSDILLKFSRTEITAPIMPLDCANASNVQAVNRSATKGVTLLLPEPEWTYPRLSCPGSTFQKALLISPHRFGETKGNSAPLIIREPFIACGPKECKHFALTHYAAQPGGYYNGTREDRNKLRHLISVKLGKIPTVENSIFHMAAWSGSACHDGREWTYIGVDGPDSNALLKIKYGGAFTDTYHSYAKNILSPQESACNCIGGDCYLMITDGPASGISECRFLKIREGRIIKEIFPTGRVKHTEECTCGFASNKTIECACRDNSYTAKRPFVKLNVETDTAEIRLMCTETYLDTPRPNDGSITGPCESNGDKGSGGIKGGFVHQRMASKIGRWYSRTMSKTKRMGMGLYVKYDGDPWTDSEALALSGVMVSMEEPGWYSFGFEIKDKKCDVPCIGIEMVHDGGKTTWHSAATAIYCLMGSGQLLWDTVTGVNMTL

SEQ ID NO: 28814 - protein, 466 aa, Artificial Sequence
  derived and/or modified protein sequence (wt) from neuraminidase__InfluenzaB__AEA51355
MLPSTIQTLTLFLTSGGVLLSLYVSASLSYLLYSDILLKFSPTEITAPTMPLDCANTSNVQAVNRSATKGVTLLLPEPEWTYPRLSCPGSTFQKALLISPHRFGETKGNSAPLIIREPFIACGPNECKHFALTHYAAQPGGYYNGTRGDRNKLRHLISVKLGKIPTVENSIFHMAAWSGSACHDGKEWTYIGVDGPDNNALLKITYGEAYPGTYHSYAIKNPRTQESAPNCFGGHSFPIITHAPPSGVWEPRFLKIREGRIINEIFPTGRVKPPEECTCGFASNNTIECACRDNNCTAKRPFVKFHVESDPAEIRAMCTDTYLDSPRPDDGSITGPCDSNGDKGSGGIKGGFVHQRMESKIGRWYSRTMSKTERMGMGLYVKYDGDPWADSDALANSGVMVSMNEPGSSSFGFEIKDKKCDVPCIGIEMVHDGGKETWHSAATAIYCLMGSGQLLWDTVTGVDMAL

SEQ ID NO: 28815 - protein, 466 aa, Artificial Sequence
  derived and/or modified protein sequence (wt) from neuraminidase__InfluenzaB__AEA51357
MLPSTIQTLTLFLTSGGVLLSLYVSASLSYLLYSDILLKFSRTEITAPIMPLDCANASNVQAVNRSATKGVTLLLPEPEWTYPRLSCPGSTFQKALLISPHRFGETKGNSAPLIIREPFIACGPKECKHFALTHYAAQPGGYYNGTREDRNKLRHLISVKLGKIPTVENSIFHMAAWSGSACHDGREWTYIGVDGPDSNALLKIKFGEAYTDTYHSYAKNILGTQESACNCIGGDCNLMITDGPASGISESRFLKIGEGRIIKEIFPTGRVKHTEECTCGFASNKTIECACRDNSYTAKRPFVKLNVETDTAEIRLMCTETYLDTPRPNDGSITGPCESNGDKGSGGIKGGFVHQRMASKIGRWYSRTMSKTERMGMGLYVKYDGDPWADSDALAFSGVMVSMKEPGWYSFGFEIKDKKCDVPCIGIEMVHDGGKETWHSAATAIYCLMGSGQLLWDTVTGVNMAL

SEQ ID NO: 28816 - protein, 466 aa, Artificial Sequence
  derived and/or modified protein sequence (wt) from neuraminidase__InfluenzaB__AEA51359
MLPSTIQTLTLFLTSGGVLLSLYVSASLSYLLYSDILLKFSRTEITAPIMPLDCANASNVQAVNRSATKGVTLLLPEPEWTYPRLSCPGSTFQKALLISPHRFGETKGNSAPLIIREPFIACGPKECKHFALTHYAAQPGGYYNGTREDRNKLRHLISVKLGKIPTVENSIFHMAAWSGSACHDGREWTYIGVDGPDSNALLKIKYGEAYTDTYHSYAKNILRTQESACNCIGGDCYLMITDGPASGISECRFLKIREGRIIKEIFPTGRVKHTEECTCGFASNKTIECACRDNSYTAKRPFVKLNVETDTAEIRLMCTETYLDTPRPNDGSITGPCESDGDKGSGGIKGGFVHQRMASKIGRWYSRTMSKTKRMGMGLYVKYDGDPWTDSEALALSGVMVSMEEPGWYSFGFEIKDKKCDVPCIGIEMVHDGGKTTWHSAATAIYCLMGSGQLLWDTVTGVDMAL

SEQ ID NO: 28817 - protein, 466 aa, Artificial Sequence
  derived and/or modified protein sequence (wt) from neuraminidase__InfluenzaB__AEA51365
MLPSTIQTLTLFLTSGGVLLSLYVSASLSYLLYSDILLKFSRTEITAPIMPLDCANASNVQAVNRSATKGVTLLLPEPEWTYPRLSCPGSTFQKALLISPHRFGETKGNSAPLIIREPFIACGPKECKHFALTHYAAQPGGYYNGTREDRNKLRHLISVKLGKIPTVENSIFHMAAWSGSACHDGREWTYIGVDGPDSNALLKIKYGEAYTDTYHSYAKNILRTQESACNCIGGDCYLMITDGPASGISECRFLKIREGRIIKEIFPTGRVKHTEECTCGFASNKTIECACRDNSYTAKRPFVKLNVETDTAEIRLMCTETYLDTPRPNDGSITGPCESNGDKGSGGIKGGFVHQRMASKIGRWYSRTMSKTKRMGMGLYVKYDGDPWTDSEALALSGVMVSMEEPGWYSFGFEIKDKKCDVPCIGIEMVHDGGKTTWHSAATAIYCLMGSGQLLWDTVTGVNMTL

SEQ ID NO: 28818 - protein, 466 aa, Artificial Sequence; identical to SEQ ID NO: 28817
  derived and/or modified protein sequence (wt) from neuraminidase__InfluenzaB__AEA51367

SEQ ID NO: 28819 - protein, 466 aa, Artificial Sequence; identical to SEQ ID NO: 28817
  derived and/or modified protein sequence (wt) from neuraminidase__InfluenzaB__AEA51371

SEQ ID NO: 28820 - protein, 466 aa, Artificial Sequence
  derived and/or modified protein sequence (wt) from neuraminidase__InfluenzaB__AEA51373
MLPSTIQTLTLFLTSGGVLLSLYVSASLSYLLYSDILLKFSPTEITAPTMPLDCANASNVQAVNRSATKGVTLLLPEPEWTYPRLSCPGSTFQKALLISPHRFGETKGNSAPLIIREPFIACGPNECKHFALTHYAAQPGGYYNGTRGDRNKLRHLISVKLGKIPTVENSIFHMAAWSGSACHDGKEWTYIGVDGPDNNALLKVKYGEAYTDTYHSYANKILRTQESACNCIGGNCYLMITDGSASGVSECRFLKIREGRIIKEIFPTGRVKHTEECTCGFASNKTIECACRDNSYTAKRPFVKLNVETDTAEIRLMCTDTYLDTPRPDDGSITGPCESNGDKGSGGIKGGFVHQRMASKIGRWYSRTMSKTKRMGMGLYVKYDGDPWTDSEALALSGVMVSMEEPGWYSFGFEIKDKKCDVPCIGIEMVHDGGKETWHSAATAIYCLMGSGQLLWDTVTGVNMTL

SEQ ID NO: 28821 - protein, 466 aa, Artificial Sequence
  derived and/or modified protein sequence (wt) from neuraminidase__InfluenzaB__AEA51377
MLPSTIQTLTLFLTSGGVLLSLYVSASLSYLLYSDILLKFSPTEITAPTMPLDCANASNVQAVNRSATKGVTLLLPEPEWTYPRLSCPGSTFQKALLISPHRFGETKGNSAPLIIREPFIACGPNECKHFALTHYAAQPGGYYNGTRGDRNKLRHLISVKLGKIPTVENSIFHMAAWSGSACHDGKEWTYIGVDGPDNNALLKVKYGEAYTDTYHSYANKILRTQESACNCIGGNCYLMITDGSASGVSECRFLKIREGRIIKEIFPTGRVKHTEECTCGFASNKTIECACRDNSYTAKRPFVKLNVETDTAEIRLMCTDTYLDTPRPDDGSITGPCESNGDKGSGGIKGGFVHQRMESKIGRWYSRTMSKTERMGMGLYVKYDGDPWADSDALAFSGVMVSMKEPGWYSFGFEIKDKKCDVPCIGIEMVHDGGKETWHSAATAIYCLMGSGQLLWDTVTGVDMAL

SEQ ID NO: 28822 - protein, 466 aa, Artificial Sequence; identical to SEQ ID NO: 28821
  derived and/or modified protein sequence (wt) from neuraminidase__InfluenzaB__AEA51379

SEQ ID NO: 28823 - protein, 466 aa, Artificial Sequence
  derived and/or modified protein sequence (wt) from neuraminidase__InfluenzaB__AEA51381
MLPSTIQTLTLFLTSGGVLLSLYVSASLSYLLYSDILLKFSPTEITAPTMPLDCANASNVQAVNRSATKGVTLLLPEPEWTYPRLSCPGSTFQKALLISPHRFGETKGNSAPLIIREPFIACGPNECKHFALTHYAAQPGGYYNGTRGDRNKLRHLISVKLGKIPTVENSIFHMAAWSGSACHDGKEWTYIGVDGPDNNALLKVKYGEAYTDTYHSYANKILRTQESACNCIGGNCYLMITDGSASGVSECRFLKIREGRIIKEIFPTGRVKHTEECTCGFASNKTIECACRDNSYTAKRPFVKLNVETDTAEIRLMCTDTYLDTPRPNDGSITGPCESDGDKGSGGIKGGFVHQRMKSKIGRWYSRTMSKTERMGMGLYVKYDGDPWADSDALAFSGVMVSVKEPGWYSFGFEIKDKKCDVPCIGIEMVHDGGKETWHSAATAIYCLMGSGQLLWDTVTGVDMAL

SEQ ID NO: 28824 - protein, 466 aa, Artificial Sequence; identical to SEQ ID NO: 28821
  derived and/or modified protein sequence (wt) from neuraminidase__InfluenzaB__AEA51383

SEQ ID NO: 28825 - protein, 466 aa, Artificial Sequence
  derived and/or modified protein sequence (wt) from neuraminidase__InfluenzaB__AEG20998
MLPSTIQTLTLFLTSGGVLLSLYVSASLSYLLYSDILLKFSRTEITAPILRLACANASNVQAVNRSATKGVTLLLPEPEWTYPRLSCPGSTFQKALLISPHRFGETKGNSAPLIIREPFIACGPKECKHFALTHYAAQPGGYYNGTREDRNKLRHLISVKLGKIPTVENSIFHMAAWSGSACHDGREWTYIGVDGPDSNALLKIKYGGAFTDTYHSYAKNILSPQESACNCIGGDCYLMITDGPASGISECRFLKIREGRIIKEIFPTGRVKHTEECTCGFASNKTIECACRDNSYTAKRPFVKLNVETDTAEIRLMCTETYLDTPRPNDGSITGPCESNGDKGSGGIKGGFVHQRMASKIGRWYSRTMSKTKRMGMGLYVKYDGDPWTDSEALALSGVMVSMEEPGWYSFGFEIKDKKCDVPCIGIEMVHDGGKTTWHSAATAIYCLMGSGQLLWDTVTGVNMTL

SEQ ID NO: 28826 - protein, 466 aa, Artificial Sequence
  derived and/or modified protein sequence (wt) from neuraminidase__InfluenzaB__AEG20999
MLPSTIQTLTLFLTSGGVLLSLSVSASLSYLLYSDILLKFSRTEITAPIMPLDCANASNVQAVNRSATKGVTLLLPEPEWTYPRLSCPGSTFQKALLISPHRFGETKGNSAPLIIREPFIACGPKECKHFALTHYAAQPGGYYNGTREDRNKLRHLISVKLGKIPTVENSIFHMAAWSGSACHDGREWTYIGVDGPDSNALLKIKYGGAFTDTYHSYAKNILSPQESACNCIGGDCYLMITDGPASGISECRFLKIREGRIIKEIFPTGRVKHTEECTCGFASNKTIECACRDNSYTAKRPFVKLNVETDTAEIRLMCTETYLDTPRPNDGSITGPCESNGDKGSGGIKGGFVHQRMASKIGRWYSRTMSKTKRMGMGLYVKYDGDPWTDSEALALSGVMVSMEEPGWYSFGFEIKDKKCDVPCIGIEMVHDGGKTTWHSAATAIYCLMGSGQLLWDTVTGVNMTL

SEQ ID NO: 28827 - protein, 466 aa, Artificial Sequence
  derived and/or modified protein sequence (wt) from neuraminidase__InfluenzaB__AEG21000
MLPSTIQTLTLFLTSGGVLLSLYVSASLSYLLYSDILLKFSRTEITAAILILDCANASNVQAVNRSATKGVTLLLPEPEWTYPRLSCPGSTFQKALLISPHRFGETKGNSAPLIIREPFIACGPKECKHFALTHYAAQPGGYYNGTREDRNKLRHLISVKLGKIPTVENSIFHMAAWSGSACHDGREWTYIGVDGPDSNALLKIKYGGAFTDTYHSYAKNILSPQESACNCIGGDCYLMITDGPASGISECRFLKIREGRIIKEIFPTGRVKHTEECTCGFASNKTIECACRDNSYTAKRPFVKLNVETDTAEIRLMCTETYLDTPRPNDGSITGPCESNGDKGSGGIKGGFVHQRMASKIGRWYSRTMSKTKRMGMGLYVKYDGDPWTDSEALALSGVMVSMEEPGWYSFGFEIKDKKCDVPCIGIEMVHDGGKTTWHSAATAIYCLMGSGQLLWDTVTGVNMTL

SEQ ID NO: 28828 - protein, 466 aa, Artificial Sequence
  derived and/or modified protein sequence (wt) from neuraminidase__InfluenzaB__AEG21002
MLPSTIQTLTLFLTSGGVLLSLYVSASLSYLLYSDILLKFSRTEITAPIMPLDCANASNVQAVNRSATKGVTLLLPEPEWTYPRLSCPGSTFQKALLISPHRFGETKGNSAPLIIREPFIACGPKECKHFALTHYAAQPGGYYNGTREDRNKLRHLISVKLGKIPTVENSIFHMAAWSGSACHDGREWTYIGVDGPDSNALLKIKYGEAYTDTYHSYAKNILRTQESACNCIGGDCYLMITDGPASGISECRFLKIREGRIIKEIFPTGRVRHTEECTCGFASNKTIECACRDNSYTAKRPFVKLNVETDTAEIRLMCTETYLDTPRPNDGSITGPCESNGDKGSGGIKGGFVHQRMASKIGRWYSRTMSKTKRMGMGLYVKYDGDPWTDSEALALSGVMVSMEEPGWYSFGFEIKDKKCDVPCIGIEMVHDGGKTTWHSAATAIYCLMGSGQLLWDTVTGVNMTL

SEQ ID NO: 28829 - protein, 466 aa, Artificial Sequence
  derived and/or modified protein sequence (wt) from neuraminidase__InfluenzaB__AEG21003
MLPSTIQTLTLFLTSGGVLLSLYVSASLSYLLYSDILLKFSRTEITAPIMPLDCANASNVQAVNRSATKGVTLLLPEPEWTYPRLSCPGSTFQKALLISPHRFGETKGNSAPLIIREPFIACGPKECKHFALTHYAAQPGGYYNGTREDRNKLRHLISVKLGKIPTVENSIFHMAAWSGSACHDGREWTYIGVDGPDSNALLKIKYGEAYTDTYHSYAKNILRTQESACNCIGGDCYLMITDGPASGISECRFLKIREGRIIKEIFPTGRVKHTEECTCGFASNKTIECACRDNSYTAKRPFVKLNVETDTAEIRLMCTETYLDTPRPNDGSITGPCESDGDKGSGGIKGGFVHQRMASKIGRWYSRTMSKTKRMGMGLYVKYDGDPWTDSEALALSGVMVSMEEPGWYSFGFEIKDKKCDVPCIGIEMVHDGGKTTWHSAATAIYCLMGSGQLLWDTVTGVNMTL

SEQ ID NO: 28830 - protein, 466 aa, Artificial Sequence
  derived and/or modified protein sequence (wt) from neuraminidase__InfluenzaB__AEG21004
MLPSTIQTLTLFLTSGGVLLSLYVSASLSYLLYSDILLKFSPTEITAPTMPLDCANASNVQAVNRSATKGVTLLLPEPEWTYPRLSCPGSTFQKALLISPHRFGETKGNSAPLIIREPFIACGPNECKHFALTHYAAQPGGYYNGTRGDRNKLRHLISVKLGKIPTVENSIFHMAAWSGSACHDGKEWTYIGVDGPDNNALLKVKYGEAYTDTYHSYANKILRTQESACNCIGGNCYLMITDGSASGVSECRFLKIREGRIIKEIFPTGRVKHTEECTCGFASNKTIECACRDNSYTAKRPFVKLNVETDTAEIRLMCTDTYLDTPRPDDGSITGPCESNGDKGGGGIKGGFVHQRMESKIGRWYSRTMSKTERMGMGLYVKYDGDPWADSDALAFSGVMVSMKEPGWYSFGFEIKDKKCDVPCIGIEMVHDGGKETWHSAATAIYCLMGSGQLLWDTVTGVDMAL

SEQ ID NO: 28831 - protein, 466 aa, Artificial Sequence
  derived and/or modified protein sequence (wt) from neuraminidase__InfluenzaB__AEG21005
MLPSTIQTLTLFLTSGGVLLSLYVSASLSYLLYSDILLKFSPTEITAPTMPLDCANASNVQAVNRSATKGVTLLLPEPEWTYPRLSCPGSTFQKALLISPHRFGETKGNSAPLIIREPFIACGPNECKHFALTHYAAQPGGYYNGTRGDRNKLRHLISVKLGKIPTVENSIFHMAAWSGSACHDGKEWTYIGVDGPDNNALLKVKYGEAYTDTYHSYANKILRTQESACNCIGGNCYLMITDGSASGVSECRFLKIREGRIIKEIFPTGRVKHTEECTCGFASNKTIECACRDNSYTAKRPFVKLNVETDTAEIRLMCTDTYLDTPRPDDGSITGPCESNGDKGGGGIKGGFVHQRMESKIGRWYSRTMSKTERMGMGLYVKYDGDPWADSDALAFSGVMVSMKEPGWYSFGFEIKDKKCDVPCIGIEMVHDGGKETWHSAATAIYCLMGSGQLLWDTVTGVNMTL

SEQ ID NO: 28832 - protein, 466 aa, Artificial Sequence; identical to SEQ ID NO: 28817
  derived and/or modified protein sequence (wt) from neuraminidase__InfluenzaB__AEG21006

SEQ ID NO: 28833 - protein, 466 aa, Artificial Sequence; identical to SEQ ID NO: 28821
  derived and/or modified protein sequence (wt) from neuraminidase__InfluenzaB__AEG21007

SEQ ID NO: 28834 - protein, 466 aa, Artificial Sequence
  derived and/or modified protein sequence (wt) from neuraminidase__InfluenzaB__AEG21008
MLPSTIQTLTLFLTSGGVLLSLYVSASLSYLLYSDILLKFSPTEITAPTMPLDCANASNVQAVNRSATKGVTLLLPEPEWTYPRLSCPGSTFQKALLISPHRFGETKGNSAPLIIREPFIACGPNECKHFALTHYAAQPGGYYNGTRGDRNKLRHLISVKLGKIPTVENSIFHMAAWSGSACHDGKEWTYIGVDGPDNNALLKVKYGEAYTDTYHSYANKILRTQESACNCIGGNCYLMITDGSASGVSECRFLKIREGRIIKEIFPTGRVKHTEECTCGFASNKTIECACRDNSYTAKRPFVKLNVETDTAEIRLMCTDTYLDTPRPDDGSITGPCESNGDKGSGGIKGGFVHQRMASKIGRWYSRTMSKTKRMGMGLYVKYDGDPWADSDALAFSGVMVSMKEPGWYSFGFEIKDKKCDVPCIGIEMVHDGGKETWHSAATAIYCLMGSGQLLWDTVTGVDMAL

SEQ ID NO: 28835 - protein, 466 aa, Artificial Sequence; identical to SEQ ID NO: 28821
  derived and/or modified protein sequence (wt) from neuraminidase__InfluenzaB__AEG21009

SEQ ID NO: 28836 - protein, 466 aa, Artificial Sequence; identical to SEQ ID NO: 28821
  derived and/or modified protein sequence (wt) from neuraminidase__InfluenzaB__AEG21010

SEQ ID NO: 28837 - protein, 466 aa, Artificial Sequence; identical to SEQ ID NO: 28821
  derived and/or modified protein sequence (wt) from neuraminidase__InfluenzaB__AEG21011

SEQ ID NO: 28838 - protein, 466 aa, Artificial Sequence; identical to SEQ ID NO: 28821
  derived and/or modified protein sequence (wt) from neuraminidase__InfluenzaB__AEG21012

SEQ ID NO: 28839 - protein, 466 aa, Artificial Sequence
  derived and/or modified protein sequence (wt) from neuraminidase__InfluenzaB__AEG21013
MLPSTIQTLTLFLTSGGVLLSLYVSASLSYLLYSDILLKFSPTEITAPTMPLDCANASNVQAVNRSATKGVTLLLPEPEWTYPRLSCPGSTFQKALLISPHRFGETKGNSAPLIIREPFIACGPNECKHFALTHYAAQPGGYYNGTRGDRNKLRHLISVKLGKIPTVENSIFHMAAWSGSACHDGKEWTYIGVDGPDNNALLKVKYGEAYTDTYHSYANKILRTQESACNCIGGNCYLMITDGSASGVSECRFLKIREGRIIKEIFPTGRVKHTEECTCGFASNKTIECACRDNSYTAKRPFVKLNVETDTAEIRLMCTDTYLDTPRPNDGSITGPCESDGDKGSGGIKGGFVHQRMKSKIGRWYSRTMSKTERMGMGLYVKYDGDPWADSDALAFSGVMVSMKEPGWYSFGFEIKDKKCDVPCIGIEMVHDGGKETWHSAATAIYCLMGSGQLLWDTVTGVDMAL

SEQ ID NO: 28840 - protein, 466 aa, Artificial Sequence
  derived and/or modified protein sequence (wt) from neuraminidase__InfluenzaB__AEN68957
MLPSTIQTLTLFLTSGGVLLSLYVSASLSYLLYSDILLKFSRTEIPAPIMPLDCANASNVQAVNRSATKGVTLLLPEPEWTYPRLSCPGSTFQKALLISPHRFGETKGNSAPLIIREPFIACGPKECKHFALTHYAAQPGGYYNGTREDRNKMRHLISVKLGKIPTVENSIFHMAAWSGSACHDGREWTYIGVDGPDSNALLKIKYGEAYTDTYHSYAKNILRTQESACNCIGGDCYLMITDGPASGISECRFLKIREGRIIKEIFPTGRVKYTEECTCGFASNKTIGCACRDNSYTAKRPFVKLNVETDTAEIRLMCTETYLDTPRPNDGSITGPCESNGDKGSGGIKGGFVHQRMASKIGRWYSRTMSKTKRMGMGLYVKYDGDPWTDSEALALSGVMVSMEEPGWYSFGFEIKDKKCDVPCIGIEMVHDGGKTTWHSAATAIYCLMGSGQLMWDTVTGVNMTL

SEQ ID NO: 28841 - protein, 466 aa, Artificial Sequence
  derived and/or modified protein sequence (wt) from neuraminidase__InfluenzaB__AEO80071
MLPSTIQTLTLFLTSGGVLLSLYVSASLSYLLYSDILLKFSPTEITAPTMPLDCANASNVHAVNRSATKGVTLLLPEPEWTYPRLSCPGSTFQKALLISPHRFGETKGNSAPLIIREPFIACGPNECKHFALTHYAAQPGGYYNGTRGDRNKLRHLISVKLGKIPTVENSIFHMAAWSGSACHDGKEWTYIGVDGPDNNALLKIKYGEAYTDTYHSYANNILRTQESACNCIGGNCYLMITDGSASGVSECRFLKIREGRIIKEIFPTGRVKHTEECTCGFASNKTIECACRDNSYTAKRPFVKLNVETDTAEIRLMCTDTYLDTPRPDDGSITGPCESNGDKGSGGIKGGFVHQRMASKIGRWYSRTMSKTERMGMGLYVKYDGDPWADSDALAFSGVMVSMKEPGWYSFGFEIKDKKCDVPCIGIEMVHDGGKETWHSAATAIYCLMGSGQLLWDTVTGVDMAL

SEQ ID NO: 28842 - protein, 466 aa, Artificial Sequence
  derived and/or modified protein sequence (wt) from neuraminidase__InfluenzaB__AEO80082
MLPSTIQTLTLFLTSGGVLLSLYVSASLSYLLYSDILLKFSQTGITAPIMPLDCANASNVQAVNRSATKGVTLLLPEPEWTYPRLSCPGSTFQKALLISPHRFGETKGNSAPLIIREPFIACGPTECKYFALTHYAAQPGGYYNGTREDRNKLRHLISVKLGKIPTVENSIFHMAAWSGSACHDGKEWTYIGVDGPDSNALLKIKYGEAYTDTYHSYAKNILRTQESACNCIGGDCYLMITDGPASGISECRFLKIREGRIIKEIFPTGRVKHTEECTCGFASNKTIECACRDNSYTAKRPFVKLNVETDTAEIRLMCTETYLDTPRPNDGSITGPCESDGDKGSGGIKGGFVHQRMASKIGRWYSRTMSKTKRMGMGLYVKYDGDPWTDSEALALSGVMVSMEEPGWYSFGFEIKDKKCDVPCIGIEMVHDGGKTTWHSAATAIYCLMGSGQLLWDTVTGVDMAL

SEQ ID NO: 28843 - protein, 466 aa, Artificial Sequence; identical to SEQ ID NO: 28682
  derived and/or modified protein sequence (wt) from neuraminidase__InfluenzaB__AEO80090

SEQ ID NO: 28844 - protein, 466 aa, Artificial Sequence; identical to SEQ ID NO: 28627
  derived and/or modified protein sequence (wt) from neuraminidase__InfluenzaB__AEO80101

SEQ ID NO: 28845 - protein, 466 aa, Artificial Sequence; identical to SEQ ID NO: 28723
  derived and/or modified protein sequence (wt) from neuraminidase__InfluenzaB__AEO80149

SEQ ID NO: 28846 - protein, 466 aa, Artificial Sequence; identical to SEQ ID NO: 28635
  derived and/or modified protein sequence (wt) from neuraminidase__InfluenzaB__AEO80158

SEQ ID NO: 28847 - protein, 466 aa, Artificial Sequence; identical to SEQ ID NO: 28635
  derived and/or modified protein sequence (wt) from neuraminidase__InfluenzaB__AEO80167

SEQ ID NO: 28848 - protein, 466 aa, Artificial Sequence; identical to SEQ ID NO: 28723
  derived and/or modified protein sequence (wt) from neuraminidase__InfluenzaB__AEO80176

SEQ ID NO: 28849 - protein, 466 aa, Artificial Sequence
  derived and/or modified protein sequence (wt) from neuraminidase__InfluenzaB__AEO80187
MLPSTIQTLTLFLTSGGVLLSLYVSASLSYLLYSDILLKFSPTEITAPTMPLGCANASNVQAVNRSATKGVTLLLPEPEWTYPRLSCPGSTFQKALLISPHRFGETKGNSAPLIIREPFIACGPNECKHFALTHYAAQPGGYYNGTRGDRNKLRHLISVKLGKIPTVENSIFHMAAWSGSACHDGKEWTYIGVDGPDNNALLKIKYGEAYTDTYHSYANKILRTQESACNCIGGNCYLMITDGSASGVSECRFLKIREGRIIKEIFPTGRVKHTEECTCGFASNKTIECACRDNSYTAKRPFVKLNVETDTAEIRLMCTDTYLDTPRPDDGSITGPCESNGDRGSGGIKGGFVHQRMASKIGRWYSRTMSKTERMGMGLYVKYDGDPWADSDALAFSGVMVSMKEPGWYSFGFEIKDKKCDVPCIGIEMVHDGGKETWHSAATAIYCLMGSGQLLWDTVTGVDMAL

SEQ ID NO: 28850 - protein, 466 aa, Artificial Sequence
  derived and/or modified protein sequence (wt) from neuraminidase__InfluenzaB__AEO80198
MLPSTIQTLTLFLTSGGVLLSLYVSASLSYLLYSDILLKFSPTEITAPTMPLDCANASNVQAVNRSATKGVTLLLPEPEWTYPRLSCPGSTFQKALLISPHRFGETKGNSAPLIIREPFIACGPNECKHFALTHYAAQPGGYYNGTRGDRNKLRHLISVKLGKIPTVENSIFHMAAWSGSACHDGKEWTYIGVDGPDNNALLKIKYGEAYTDTYHSYANKILRTQESACNCIGGNCYLMITDGSASGVSECRFLKIREGRIIKEIFPTGRVKHTEECTCGFASNKTIECACRDNSYTAKRPFVKLNVETDTAEIRLMCTDTYLDTPRPDDGSITGPCESNGDRGSGGIKGGFVHQRMASKIGRWYSRTMSKTERMGMGLYVKYDGDPWADSDALAFRGVMVSMKEPGWYSFGFEIKDKKCDVPCIGIEMVHDGGKETWHSAATAIYCLMGSGQLLWDTVTGVDMAL

SEQ ID NO: 28851 - protein, 466 aa, Artificial Sequence; identical to SEQ ID NO: 28791
  derived and/or modified protein sequence (wt) from neuraminidase__InfluenzaB__AEO80209

SEQ ID NO: 28852 - protein, 466 aa, Artificial Sequence
  derived and/or modified protein sequence (wt) from neuraminidase__InfluenzaB__AEO80220
MLPSTIQTLTLFLTSGGVLLSLYVSASLSYLLYSDILLKFSPTEITAPTMPLDCANASNVQAVNRSATKGLTLLLPEPEWTYPRLSCPGSTFQKALLISPHRFGETKGNSAPLIIREPFIACGPNECKHFALTHYAAQPGGYYNGTRGDRNKLRHLISVKLGKIPTVETSIFHMAAWSGSACHDGKEWTYIGVDGPDNNALLKIKYGEAYTDTYHSYANKILRTQESACNCIGGNCYLMITDGSASGVSECRFLKIREGRIIKEIFPTGRVKHTEECTCGFASNKTIECACRDNSYTAKRPFVKLNVETDTAEIRLMCTDTYLDTPRPDDGSITGPCESNGDRGSGGIKGGFVHQRMASKIGRWYSRTMSKTERMGMGLYVKYDGDPWADSDALAFSGVMVSMKEPGWYSFGFEIKDKKCDVPCIGIEMVHDGGKETWHSAATAIYCLMGSGQLLWDTVTGVDMAL

SEQ ID NO: 28853 - protein, 466 aa, Artificial Sequence; identical to SEQ ID NO: 28788
  derived and/or modified protein sequence (wt) from neuraminidase__InfluenzaB__AEO80231

SEQ ID NO: 28854 - protein, 466 aa, Artificial Sequence; identical to SEQ ID NO: 28791
  derived and/or modified protein sequence (wt) from neuraminidase__InfluenzaB__AEO80242

SEQ ID NO: 28855 - protein, 466 aa, Artificial Sequence; identical to SEQ ID NO: 28635
  derived and/or modified protein sequence (wt) from neuraminidase__InfluenzaB__AEP20182

SEQ ID NO: 28856 - protein, 466 aa, Artificial Sequence
  derived and/or modified protein sequence (wt) from neuraminidase__InfluenzaB__AEP20193
MLPSTIQTLTLFLTSGGVLLSLYVSASLSYLLYSDILLKFSPTEITAPTMPLDCANASNVHAVNRSATKGVTLLLPEPEWTYPRLSCPGSTFQKALLISPHRFGETKGNSAPLIIREPFIACGPNECKHFALTHYAAQPGGYYNGTRGDRNKLRHLISVKLGKIPTVENSIFHMAAWSGSACHDGKEWTYIGVDGPDNNALLKIKYGEAYTDTYHSYANNILRTQESACNCIGGNCYLMITDGSASGVSECRFLKIREGRIIKEIFPTGRVKHTEECTCGFASNKTIECACRDNSYTAKRPFVKLNVETDTAEIRLMCTDTYLDTPRPDDGSITGPCESNGDKGSGGIKGGFVHQRMASKIGRWYSRTMSKTERMGMGLYVKYDGDPWADSDALAFSGVMVSVKEPGWYSFGFEIKDKKCDVPCIGIEMVHDGGKETWHSAATAIYCLMGSGQLLWDTVTGVDMAL

SEQ ID NO: 28857 - protein, 466 aa, Artificial Sequence
  derived and/or modified protein sequence (wt) from neuraminidase__InfluenzaB__AEP20204
MLPSTIQTLTLFLTSGGVLLSLYVSASLSYLLYSDILLKFSPTEITAPTMPLDCANASNVQAVNRSATKGVTLLLPEPEWTYPRLSCPGSTFQKALLISPHRFGETKGNSAPLIIREPFIACGPNECKHFALTHYAAQPGGYYNGTRGDRNKLRHLISVKLGKIPTVENSIFHMAAWSGSACHDGKEWTYIGVDGPDNNALLKIKYGEAYTDTYHSYANKILRTQESACNCIGGNCYLMITDGSASGVSECRFLKIREGRIIKEIFPTGRVKHTEECTCGFASNKTIECACRDNSYTAKRPFVKLNVETDTAEIRLMCTDTYLDTPRPDDGSITGPCESNGDKGSGGIKGGFVHQRMASKIGRWYSRTMSKTERMGMGLYVKYDGDPWADSDALAFSGVMVSIKEPGWYSFGFEIKDKKCDVPCIGIEMVHDGGKETWHSAATAIYCLMGSGQLLWDTVTGVDMAL

SEQ ID NO: 28858 - protein, 466 aa, Artificial Sequence; identical to SEQ ID NO: 28687
  derived and/or modified protein sequence (wt) from neuraminidase__InfluenzaB__AEP20215

SEQ ID NO: 28859 - protein, 466 aa, Artificial Sequence
  derived and/or modified protein sequence (wt) from neuraminidase__InfluenzaB__AEP20237
MLPSTIQTLTLFLTSGGVLLSLYVSASLSYLLYSDILLKFSPTEITAPTMPLDCANASNVQAVNRSATKGVTLLLPEPEWTYPRLSCPGSTFQKALLISPHRFGETKGNSAPLIIREPFIACGPKECKHFALTHYAAQPGGYYNGTRGDRNKLRHLISVKLGKIPTVENSIFHMAAWSGSACHDGKEWTYIGVDGPDSNALLKIKYGEAYTDTYHSYANNILRTQESACNCIGGNCYLMITDGSASGISECRFLKIREGRIIKEIFPTGRVKHTEECTCGFASNKTIECACRDNSYTAKRPFVKLNVETDAAEIRLMCTETYLDTPRPDDGSITGPCESNGDKGSGGIKGGFVHQRMASKIGRWYSRTMSKTKRMGMGLYVKYDGDPWTDSDALALSGVMVSMEEPGWYSFGFEIKDKKCDVPCIGIEMVHDGGKETWHSAATAIYCLMGSGQLLWDTVTGVDMAL

SEQ ID NO: 28860 - protein, 466 aa, Artificial Sequence; identical to SEQ ID NO: 28687
  derived and/or modified protein sequence (wt) from neuraminidase__InfluenzaB__AEP20248

SEQ ID NO: 28861 - protein, 466 aa, Artificial Sequence
  derived and/or modified protein sequence (wt) from neuraminidase__InfluenzaB__AEP20259
MLPSTIQTLTLFLTSGGVLLSLYVSASLSYLLYSDILLKFSPTEITAPTMPLDCANASNVQAVNRSATKGVTLLLPEPEWTYPRLSCPGSTFQKALLISPHRFGETKGNSAPLIIREPFIACGPNECKHFALTHYAAQPGGYYNGTRGDRNKLRHLISVKLGKIPTVENSIFHMAAWSGSACHDGKEWTYIGVDGPDNNALLKIKYGEAYTDTYHSYANNILRTQESACNCIGGNCYLMITDGSASGVSECRFLKIREGRIIKEIFPTGRVKHTEECTCGFASNKIIECACRDNSYTAKRPFVKLNVETDTAEIRLMCTETYLDTPRPDDGSITGPCESNGDKGSGGIKGGFVHQRMASKIGRWYSRTMSKTERMGMGLYVKYDGDPWADSDALALSGVMVSMEEPGWYSFGFEIKDKKCDVPCIGIEMVHDGGKETWHSAATAIYCLMGSGQLLWDTVTGVDMAL

SEQ ID NO: 28862 - protein, 466 aa, Artificial Sequence
  derived and/or modified protein sequence (wt) from neuraminidase__InfluenzaB__AEP20281
MLPSTIQTLTLFLTSGGVLLSLYVSASLSYLLYSDILLKFSPTEITAPTMPLDCANASNVQAVNRSTTKGVTLLLPEPEWTYPRLSCPGSTFQKALLISPHRFGETKGNSAPLIIREPFIACGPNECKHFALTHYAAQPGGYYNGTRGDRNKLRHLISVKLGKIPTVENSIFHMAAWSGSACHDGKEWTYIGVDGPDNNALLKIKYGEAYTDTYHSYANNILRTQESACNCIGGNCYLMITDGSASGVSECRFLKIREGRIIKEIFPTGRVKHTEECTCGFASNKTIECACRDNSYTAKRPFVKLNVETDTAEIRLMCTETYLDTPRPDDGSITGPCESNGDKGSGGIKGGFVHQRMASKIGRWYSRTMSKTERMGMGLYVKYDGDPWADSDALALSGVMVSMEEPGWYSFGFEIKDKKCDVPCIGIEMVHDGGKETWHSAATAIYCLMGSGQLLWDTVTGVDMAL

SEQ ID NO: 28863 - protein, 466 aa, Artificial Sequence; identical to SEQ ID NO: 28635
  derived and/or modified protein sequence (wt) from neuraminidase__InfluenzaB__AEP20292

SEQ ID NO: 28864 - protein, 466 aa, Artificial Sequence; identical to SEQ ID NO: 28627
  derived and/or modified protein sequence (wt) from neuraminidase__InfluenzaB__AEP20303

SEQ ID NO: 28865 - protein, 466 aa, Artificial Sequence
  derived and/or modified protein sequence (wt) from neuraminidase__InfluenzaB__AEP20314
MLPSTIQTLTLFLTSGGVLLSLYVSASLSYLLYSDILLKFSQTGITAPIMPLDCANASNVQAVNRSATKGVTLLLPEPEWTYPRLSCPGSTFQKALLISPHRFGETKGNSAPLIIREPFIACGPKECKHFALTHYAAQPGGYYNGTREDRNKLRHLISVKLGKIPTVENSIFHMAAWSGSACHDGREWTYIGVDGPDSNALLKIKYGEAYTDTYHSYAKNILRTQESACNCIGGDCYLMITDGPASGISECRFLKIREGRIIKEIFPTGRVKHTEECTCGFASNKTIECACRDNSYTAKRPFVKLNVETDTAEIRLMCTETYLDTPRPNDGSITGPCESNGDKGSGGIKGGFVHQRMASKIGRWYSRTMSKTKRMGMGLYVKYDGDPWTDSEALALSGVMISMEEPGWYSFGFEIKDKKCDVPCIGIEMVHDGGKTTWHSAATAIYCLMGSGQLLWDTVTGVDMAL

SEQ ID NO: 28866 - protein, 466 aa, Artificial Sequence
  derived and/or modified protein sequence (wt) from neuraminidase__InfluenzaB__AEP20336
MLPSTIQTLTLFLTSGGVLLSLYVSASLSYLLYSDILLKFSPTEITAPTMPLDCANASNVQAVNRSATKGVTLLLPEPEWTYPRLSCPGSTFQKALLISPHRFGETKGNSAPLIIREPFIACGPNECKHFALTHYAAQPGGYYNGTRGDRNKLRHLISVKLGKIPTVENSIFHMAAWSGSACHDGKEWTYIGVDGPDNNALLKIKYGEAYTDTYHSYANNILRTQESACNCIGGNCYLMITDGSASGVSECRFLKIREGRIIKEIFPTGRVKHTEECTCGFASNKTIECACRDNSYTAKRPFVKLNVETDTAEIRLMCTETYLDTPRPDDGSITGPCESNGDKGSGGIKGGFVHQRMASKIGRWYSRTMSKTERMGMGLYVKYDGDPWADSDALTLSGVMVSMEEPGWYSFGFEIKDKKCDVPCIGIEMVHDGGKETWHSAATSIYCLMGSGQLLWDTVTGVDMAL

SEQ ID NO: 28867 - protein, 466 aa, Artificial Sequence
  derived and/or modified protein sequence (wt) from neuraminidase__InfluenzaB__AEP20347
MLPSTIQTLTLFLTSGGVLLSLYVSASLSYLLYSDILLKFSQTEITAPIMPLDCANASNVQAVNRSATKGVTLLLPEPEWTYPRLSCPGSTFQKALLISPHRFGETKGNSAPLIIREPFIACGPTECKHFALTHYAAQPGGYYNGTREDRNKLRHLISVKLGKIPTVENSIFHMAAWSGSACHDGKEWTYIGVDGPDSNALLKIKYGEAYTDTYHSYAKNILRTQESACNCIGGDCYLMITDGPASGISECRFLKIREGRIIKEIFPTGRVKHTEECTCGFASNKTIECACRDNSYTAKRPFVKLNVETDTAEIRLMCTETYLDTPRPNDGSITGPCESDGDKGSGGIKGGFVHQRMASKIGRWYSRTMSKTKRMGMGLYVKYDGDPWTDSEALALSGVMVPMEEPGWYSFGFEIKDKKCDVPCIGIEMVHDGGKTTWHSAATAIYCLMGSGQLLWDTVTGVDMAL

SEQ ID NO: 28868 - protein, 466 aa, Artificial Sequence; identical to SEQ ID NO: 28867
  derived and/or modified protein sequence (wt) from neuraminidase__InfluenzaB__AEP20358

SEQ ID NO: 28869 - protein, 466 aa, Artificial Sequence; identical to SEQ ID NO: 28867
  derived and/or modified protein sequence (wt) from neuraminidase__InfluenzaB__AEP20369

SEQ ID NO: 28870 - protein, 466 aa, Artificial Sequence; identical to SEQ ID NO: 28867
  derived and/or modified protein sequence (wt) from neuraminidase__InfluenzaB__AEP20380

SEQ ID NO: 28871 - protein, 466 aa, Artificial Sequence
  derived and/or modified protein sequence (wt) from neuraminidase__InfluenzaB__AEP20391
MLPSTIQTLTLFLTSGGVLLSLYVSASLSYLLYSDILLKFSPTEITAPTMPLDCANASNVQAVNRSATKGVTLLLPEPEWTYPRLSCPGSTFQKALLISPHRFGETKGNSAPLIIREPFIACGPNECKHFALTHYAAQPGGYYNGTRGDRNRLRHLISVKLGKIPTVENSIFHMAAWSGSACHDGKEWTYIGVDGPDNNALLKIKYGEAYTDTYHSYANNILRTQESACNCIGGNCYLMITDGSASGVSECRFLKIREGRIIKEIFPTGRVKHTEECTCGFASNKTIECACRDNSYTAKRPFVKLNVETDTAEIRLMCTDTYLDTPRPDDGSITGPCESNGDKGSGGIKGGFVHQRMASKVGRWYSRTMSKTERMGMGLYVKYDGDPWADSDALAFSGVMVSMKEPGWYSFGFEIKDKKCDVPCIGIEMVHDGGKETWHSAATAIYCLMGSGQLLWDTVTGVDMAL

SEQ ID NO: 28872 - protein, 466 aa, Artificial Sequence
  derived and/or modified protein sequence (wt) from neuraminidase__InfluenzaB__AEP20413
MLPSTIQTLTLFLTSGGVLLSLYVSALLSYLLYSDILLKFSPTEIIAPTMSLDCANASNVQAVNRSATKGVTFLLPEPEWTYPRLSCPGSTFQKALLISPHRFGETKGNSAPLIIREPFIACGPNECKHFALTHYAAQPGGYYNGTRGDRNKLRHLISVKLGKIPTVENSIFHMAAWSGSACHDGKEWTYIGVDGPDNDALLKVKYGEAYTDTYHSYANKILRTQESACNCIGGNCYLMITDGSASGVSECRFLKIREGRIIKEIFPTGRVKHTEECTCGFASNKTIECACRDNSYTAKRPFVKLNVETDTAEIRLMCTDTYLDTPRPDDGSITGPCESNGDKGSGGIKGGFVHQRMESKIGRWYSRTMSKTERMGMGLYVKYNGDPWADSDALAFSGVMVSMKEPGWYSFGFEIKDKKCDVPCIGIEMVHDGGKETWHSAATAIYCLMGSGQLLWDTVTGVDMAL

SEQ ID NO: 28873 - protein, 466 aa, Artificial Sequence; identical to SEQ ID NO: 28872
  derived and/or modified protein sequence (wt) from neuraminidase__InfluenzaB__AEP20435

SEQ ID NO: 28874 - protein, 466 aa, Artificial Sequence; identical to SEQ ID NO: 28867
  derived and/or modified protein sequence (wt) from neuraminidase__InfluenzaB__AEQ39031

SEQ ID NO: 28875 - protein, 466 aa, Artificial Sequence
  derived and/or modified protein sequence (wt) from neuraminidase__InfluenzaB__AEQ39275
MLPSTIQTLTLFLTSGGVLLSLYVSASLSYLLYSDILLKFSPKEITAPTMPLDCANASNVQAVNHSATKGVTLLLPEPEWTYPRLSCPGSTFQKALLISPHRFGETKGNSAPLIIREPFIACGPNECKHFALTHYAAQPGGYYNGTRGDRNKLRHLISVKLGKIPTVENSIFHMAAWSGSACHDGKEWTYIGVDGPDNNALLKVKYGEAYTDTYHSYANKILRTQESACNCIGGNCYLMITDGSASGVSECRFLKIREGRIIKEIFPTGRVKHTEECTCGFASNKTIECACRDNSYTAKRPFVKLNVETDTAEIRLMCTDTYLDTPRPDDGSITGPCESNGDKGSGGIKGGFVHQRMESKIGRWYSRTMSKTERMGMGLYVKYDGDPWADSDALAFSGVMVSMKEPGWYSFGFEIKDKKCDVPCIGIEMVHDGGKETWHSAATAIYCLMGSGQLLWDTVTGVDMAL

SEQ ID NO: 28876 - protein, 466 aa, Artificial Sequence; identical to SEQ ID NO: 28875
  derived and/or modified protein sequence (wt) from neuraminidase__InfluenzaB__AEQ39286

SEQ ID NO: 28877 - protein, 466 aa, Artificial Sequence; identical to SEQ ID NO: 28875
  derived and/or modified protein sequence (wt) from neuraminidase__InfluenzaB__AEQ39297

SEQ ID NO: 28878 - protein, 466 aa, Artificial Sequence; identical to SEQ ID NO: 28875
  derived and/or modified protein sequence (wt) from neuraminidase__InfluenzaB__AEQ39308

SEQ ID NO: 28879 - protein, 466 aa, Artificial Sequence; identical to SEQ ID NO: 28875
  derived and/or modified protein sequence (wt) from neuraminidase__InfluenzaB__AEQ39319

SEQ ID NO: 28880 - protein, 466 aa, Artificial Sequence
  derived and/or modified protein sequence (wt) from neuraminidase__InfluenzaB__AEQ39330
MLPSTIQTLTLFLTSGGVLLSLYVSASLSYLLYSDILLKFSPKEITAPTMPLDCANASNVQAVNHSATKGVTLLLPEPEWTYPRLSCPGSTFQKALLISPHRFGETKGNSAPLIIREPFIACGPNECKHFALTHYAAQPGGYYNGTRGDRNKLRHLISVKLGKIPTVENSIFHMAAWSGSACHDGKEWTYIGVDGPDNNALLKVKYGEAYTDTYHSYANKILRTQESACNCIGGNCYLMITDGSASGVSECRFLKIREGRIIKEIFPTGRVKHTEECTCGFASNKTIECACRDNSYTAKRPFVKLNVETDTAEIRLMCTDTYLDTPRPDDGSITGPCESNGDKGSGGIKGGFVHQRMESKIGRWYSRTMSKTERMGMGLYVKYDGDPWADSDALAFSGVMVSMKEPGWYSFGFEIKDKKCDVPCIGIEMVHDGGKETWHSAATAIYCLMGSGQLLWDTVTGVDIAL

SEQ ID NO: 28881 - protein, 466 aa, Artificial Sequence; identical to SEQ ID NO: 28875
  derived and/or modified protein sequence (wt) from neuraminidase__InfluenzaB__AEQ39341

SEQ ID NO: 28882 - protein, 466 aa, Artificial Sequence; identical to SEQ ID NO: 28875
  derived and/or modified protein sequence (wt) from neuraminidase__InfluenzaB__AEQ39352

SEQ ID NO: 28883 - protein, 466 aa, Artificial Sequence; identical to SEQ ID NO: 28875
  derived and/or modified protein sequence (wt) from neuraminidase__InfluenzaB__AEQ39363

SEQ ID NO: 28884 - protein, 466 aa, Artificial Sequence; identical to SEQ ID NO: 28841
  derived and/or modified protein sequence (wt) from neuraminidase__InfluenzaB__AEQ39374

SEQ ID NO: 28885 - protein, 466 aa, Artificial Sequence
  derived and/or modified protein sequence (wt) from neuraminidase__InfluenzaB__AEQ39385
MLPSTIQTLTLFLTSGGVLLSLYVSASLSYLLYSDILLKFSPTEITAPTMPLDCANASNVQAVNRSATKGVTLLLPEPEWTYPRLSCPGSTFQKALLISPHRFGETKGNSAPLIIREPFIACGPKECKHFALTHYAAQPGGYYNGTRGDRNKLRHLISVKLGKIPTVENSIFHMAAWSGSACHDGKEWTYIGVDGPDSNALLKIKYGEAYTDTYHSYANNILRTQESACNCIGGNCYLMITDGSASGISECRFLKIREGRIIKEIFPTGRVKHTEECTCGFASNKTIECACRDNSYTAKRPFVKLNVETDTAEIRLMCTETYLDTPRPDDGSITGPCESNGDKGSGGIKGGFVHQRMTSKIGRWYSRTMSKTKRMGMGLYVKYDGDPWTDSDALALSGVMVSMEEPGWYSFGFEIKDKKCDVPCIGIEMVHDGGKETWHSAATAIYCLMGSGQLLWDTVTGVDMAL

SEQ ID NO: 28886 - protein, 466 aa, Artificial Sequence
  derived and/or modified protein sequence (wt) from neuraminidase__InfluenzaB__AEQ39444
MLPSTIQTLTLFLTSGGVLLSLYVSASLSYLLYSDILLKFSQTEIIAPIMPLDCANASNVQAVNRSATKGVTLLLPEPEWTYPRLSCPGSTFQKALLISPHRFGETKGNSAPLIIREPFIACGPTECKHFALTHYAAQPGGYYNGTREDRNKLRHLISVKLGKIPTVENSIFHMAAWSGSACHDGKEWTYIGVDGPDSNALLKIKYGEAYTDTYHSYAKNILRTQESACNCIGGDCYLMITDGPASGISECRFLKIREGRIIKEIFPTGRVKHTEECTCGFASNKTIECACRDNSYTAKRPFVKLNVETDTAEIRLMCTETYLDTPRPNDGSITGPCESDGDKGSGGIKGGFVHQRMASKIGRWYSRTMSKTKRMGMGLYVKYDGDPWTDSEALALSGVMVSMEEPGWYSFGFEIKDKKCDVPCIGIEMVHDGGKTTWHSAATAIYCLMGSGQLLWDTVTGVDMAL

SEQ ID NO: 28887 - protein, 466 aa, Artificial Sequence; identical to SEQ ID NO: 28788
  derived and/or modified protein sequence (wt) from neuraminidase__InfluenzaB__AEQ39455

SEQ ID NO: 28888 - protein, 466 aa, Artificial Sequence
  derived and/or modified protein sequence (wt) from neuraminidase__InfluenzaB__AEQ39466
MLPSTIQTLTLFLTSGGVLLSLYVSASLSYLLYSDILLKFSPTEITAPTMPLDCANASNVQAVNRSATKGVTLLLPEPEWTYPRLSCPGSTFQKALLISPHRFGETKGNSAPLIIREPFIACGPNECKHFALTHYAAQPGGYYNGTRGDRNKLRHLISVKLGKIPTVENSIFHMAAWSGSACHDGKEWTYIGVDGPDNNALLKIKYGEAYTDTYHSYANNILRTQESACNCIGGNCYLMITDGSASGVSECRFLKIREGRIIKEIFPTGRVKHTEECTCGFASNKTIECACRDNSYTAKRPFVKLNVETDTAEIRLMCTDTYLDTPRPDDGSITGPCESNGDKGSGGIKGGFVHQRMASKVGRWYSRTMSKTERMGMGLYVKYDGDPWADSDALAFSGVMVSMKEPGWYSFGFEIKDKKCDVPCIGIEMVHDGGKETWHSAATAIYCLMGSGQLLWDTVTGVDMAL

SEQ ID NO: 28889 - protein, 466 aa, Artificial Sequence; identical to SEQ ID NO: 28875
  derived and/or modified protein sequence (wt) from neuraminidase__InfluenzaB__AEQ39477

SEQ ID NO: 28890 - protein, 466 aa, Artificial Sequence
  derived and/or modified protein sequence (wt) from neuraminidase__InfluenzaB__AEQ39488
MLPSTIQTLTLFLTSGGVLLSLYVSASLSYLLYSDILLKFSPTEITAPTMPLDCANASNVQAVNRSATKGVTLLLPEPEWTYPRLSCPGSTFQKALLISPHRFGETKGNSAPLIIREPFIACGPNECKHFALTHYAAQPGGYYNGTRGDRNKLRHLISVKLGKIPTVENSIFHMAAWSGSACHDGKEWTYIGVDGPDNNALLKVKYGEAYTDTYHSYANKILRTQESACNCIGGNCYLMITDGSASGVSECRFLKIREGRIIKEIFPTGRVKHTEECTCGFASNKTIECACRDNSYTAKRPFVKLNVETDTAEIRLMCTDTYLDTPRPNDGSITGPCESNGDKGSGGIKGGFVHQRMESRIGRWYSRTMSKTERMGMGLYVKYDGDPWTDSDALAFSGVMVSMKEPGWYSFGFEIKDKKCDVPCIGIEMVHDGGKETWHSAATAIYCLMGSGQLLWDTVTGVDMAL

SEQ ID NO: 28891 - protein, 466 aa, Artificial Sequence; identical to SEQ ID NO: 28841
  derived and/or modified protein sequence (wt) from neuraminidase__InfluenzaB__AEQ39499

SEQ ID NO: 28892 - protein, 466 aa, Artificial Sequence; identical to SEQ ID NO: 28687
  derived and/or modified protein sequence (wt) from neuraminidase__InfluenzaB__AEQ39510

SEQ ID NO: 28893 - protein, 466 aa, Artificial Sequence
  derived and/or modified protein sequence (wt) from neuraminidase__InfluenzaB__AEQ49685
MLPSTIQTLTLFLTSGGVLLSLYVSASLSYLLYSDILLKFSPTEITAPTMPLDCANASNVQAVNRSATKGVTLLLPEPEWTYPRLSCPGSTFQKALLISPHRFGETKGNSAPLIIREPFIACGPNECKHFALTHYAAQPGGYYNGTRGDRNKLRHLISVKLGKIPTVENSIFHMAAWSGSACHDGKEWTYIGVDGPDNNALLKVKYGEAYTDTYHSYANKILRTQESACNCIGGNCYLMITDGSASGVSECRFLKIREGRIIKEIFPTGRVKHTEECTCGFASNKTIECACRDNSYTAKRPFVKLNVETDTAEIRLMCTDTYLDTPRPNDGSITGPCESDGDKGSGGIKGGFVHQRMESKIGRWYSRTMSKTERMGMGLYVKYDGDPWADSDALAFSGVMVSMKEPGWYSFGFEIKDKKCDVPCIGIEMVHDGGKETWHSAATAIYCLMGSGQLLWDTVTGVDMDL

SEQ ID NO: 28894 - protein, 466 aa, Artificial Sequence
  derived and/or modified protein sequence (wt) from neuraminidase__InfluenzaB__AEQ49686
MLPSTIQTLTLFLTSGGVLLSLYVSASLSYLLYSDILLKFSPTEITAPTMPLDCANASNVQAVNRSATKGVTLLLPEPEWTYPRLSCPGSTFQKALLISPHRFGETKGNSAPLIIREPFIACGPNECKHFALTHYAAQPGGYYNGTRGDRNKLRHLISVKLGKIPTVENSIFHMAAWSGSACHDGKEWTYIGVDGPDNDALLKVKYGEAYTDTYHSYANKILRTQESACNCIGGNCYLMITDGSASGVSECRFLKIREGRIIKEIFPTGRVKHTEECTCGFASNKTIECACRDNSYTAKRPFVKLNVETDTAEIRLMCTDTYLDTPRPDDGSITGPCESNGDKGSGGIKGGFVHQRMESKIGRWYSRTMSKTERMGMGLYVKYDGDPWADSDALAFSGVMVSMKEPGWYSFGFEIKDKKCDVPCIGIEMVHDGGKETWHSAATAIYCLMGSGQLLWDTVTGVDMAL

SEQ ID NO: 28895 - protein, 466 aa, Artificial Sequence
  derived and/or modified protein sequence (wt) from neuraminidase__InfluenzaB__AEQ49687
MLPSTIQTLTLFLTSGGVLLSLYVSALLSYLLYSDILLKFSPTEITAPTMSLDCANASNVQAVNRSATKGVTFLLPEPEWTYPRLSCPGSTFQKALLISPHRFGETKGNSAPLIIREPFIACGPNECKHFALTHYAAQPGGYYNGTRGDRNKLRHLISVKLGKIPTVENSIFHMAAWSGSACHDGKEWTYIGVDGPDNDALLKVKYGEAYTDTYHSYANKILRTQESACNCIGGNCYLMITDGSASGVSECRFLKIREGRIIKEIFPTGRVKHTEECTCGFASNKTIECACRDNSYTAKRPFVKLNVETDTAEIRLMCTDTYLDTPRPDDGSITGPCESNGDKGSGGIKGGFVHQRMESKIGRWYSRTMSKTERMGMGLYVKYDGDPWADSDALAFSGVMVSMKEPGWYSFGFEIKDKKCDVPCIGIEMVHDGGKETWHSAATAIYCLMGSGQLLWDTVTGVDMAL

SEQ ID NO: 28896 - protein, 466 aa, Artificial Sequence
  derived and/or modified protein sequence (wt) from neuraminidase__InfluenzaB__AEQ49688
MLPSTIQTLTLFLTSGGVLLSLYVSASLSYLLYSDILLKFSRTEITAPIMPLGCANASNVQAVNRSATKGVTLLLPEPEWTYPRLSCPGSTFQKALLISPHRFGETKGNSAPLIIREPFIACGPKECKHFALTHYAAQPGGYYNGTREDRNKLRHLISVKLGKIPTVENSIFHMAAWSGSACHDGREWTYIGVDGPDSNALLKIKYGEAYTDTYHSYAKNILRTQESACNCIGGDCYLMITDGPASGISECRFLKIREGRIIKEIFPTGRVKHTEECTCGFASNKTIECACRDNSYTAKRPFVKLNVETDTAEIRLMCTETYLDTPRPNDGSITGPCESNGDKGSGGIKGGFVHQRMASKIGRWYSRTMSKTKRMGMGLYVKYDGDPWTDSEALALSGVMVSMEEPGWYSFGFEIKDKKCDVPCIGIEMVHDGGKTTWHSAATAIYCLMGSGQLLWDTVTGVNMTL

SEQ ID NO: 28897 - protein, 466 aa, Artificial Sequence
  derived and/or modified protein sequence (wt) from neuraminidase__InfluenzaB__AEQ49691
MLPSTIQTLTLFLTSGGVLLSLYVSALLSYLLYSDILLKFSPTEITAPTMSLDCANASNVQAVNRSATKGVTFLLPEPEWTYPRLSCPGSTFQKALLISPHRFGETKGNSAPLIIREPFIACGPNECKHFALTHYAAQPGGYYNGTRGDRNKLRHLISVKLGKIPTVENSIFHMAAWSGSACHDGKEWTYIGVDGPDNDALLKVKYGEAYTDTYHSYANKILRTQESACNCIGGNCYLMITDGSASGVSECRFLKIREGRIIKEIFPTGRVKHTEECTCGFASNKTIECACRDNSYTAKRPFVKLNVETDTAEIRLMCTDTYLDTPRPDDGSITGPCESNGDRGSGGIKGGFVHQRMESKIGRWYSRTMSKTERMGMGLYVKYDGDPWADSDALAFSGVMVSMKEPGWYSFGFEIKDKKCDVPCIGIEMVHDGGKETWHSAATAIYCLMGSGQLLWDTVTGVDMAL

SEQ ID NO: 28898 - protein, 466 aa, Artificial Sequence
  derived and/or modified protein sequence (wt) from neuraminidase__InfluenzaB__AEQ49692
MLPSTIQTLTLFLTSGGVLLSLYVSASLSYLLYSDILLKFSPTETTAPTMSLDCANASNVQAVNRSATKGVTFLLPEPEWTYPRLSCPGSTFQKALLISPHRFGETKGNSAPLIIREPFIACGPNECKHFALTHYAAQPGGYYNGTRGDRNKLRHLISVKLGKIPTVENSIFHMAAWSGSACHDGKEWTYIGVDGPDNDALLKVKYGEAYTDTYHSYANKILRTQESACNCIGGNCYLMITDGSASGVSECRFLKIREGRIIKEIFPTGRVKHTEECTCGFASNKTIECACRDNSYTAKRPFVKLNVETDTAEIRLMCTDTYLDTPRPDDGSITGPCESNGDKGSGGIKGGFVHQRMESKIGRWYSRTMSKTERMGMGLYVKYDGDPWADSDALAFSGVMVSMKEPGWYSFGFEIKDKKCDVPCIGIEMVHDGGKETWHSAATAIYCLMGSGQLLWDTVTGVDMAL

SEQ ID NO: 28899 - protein, 466 aa, Artificial Sequence
  derived and/or modified protein sequence (wt) from neuraminidase__InfluenzaB__AEQ49693
MLPSTIQTLTLFLTSGGVLLSLYVSASLSYLLYSDILLKFSPTEITAPTMPLDCANASNVQAVNRSATKGVTLLLPEPEWTYPRLSCPGSTFQKALLISPHRFGETKGNSAPLIIREPFIACGPNECKHFALTHYAAQPGGYYNGTRGDRNKLRHLISVKLGKIPTVENSIFHMAAWSGSACHDGKEWTYIGVDGPDNNALLKVKYGEAYTDTYHSYANKILRTQESACNCIGGNCYLMITDGSASGVSECRFLKIREGRIIKEIFPTGRVKHTEECTCGFASNRTIECACRDNSYTAKRPFVKLNVETDTAEIRLMCTDTYLDTPRPNDGSITGPCESDGDKGSGGIKGGFVHQRMESKIGRWYSRTMSKTERMGMGLYVKYDGDPWADSDALAFSGVMVSMKEPGWYSFGFEIKDKKCDVPCIGIEMVHDGGKETWHSAATAIYCLMGSGQLLWDTVTGVDMAL

SEQ ID NO: 28900 - protein, 466 aa, Artificial Sequence
  derived and/or modified protein sequence (wt) from neuraminidase__InfluenzaB__AEQ49695
MLPSTIQTLTLFLTSGGVLLSLYVSASLSYLLYSDILLKFSPTEITAPTMPLDCANASNVQAVNRSATKGVTLLLPEPEWTYPRLSCPGSTFQKALLISPHRFGETKGNSAPLIIREPFIACGPNECKHFALTHYAAQPGGYYNGTRGDRNKLRHLISVKLGKIPTVENSIFHMAAWSGSACHDGKEWTYIGVDGPDNNALLKVKYGEAYTDTYHSYANKILRTQESACNCIGGNCYLMITDGSASGVSECRFLKIREGRIIKEIFPTGRVKHTEECTCGFASNKTIECACRDNSYTAKRPFVKLNVETDTAEIRLMCTDTYLDTPRPNDGSITGPCESDGDKGSGGIKGGFVHQRMESKIGRWYSRTMSKTERMGMGLYVKYDGDPWADSDALAFSGVMVSMKEPGWYSFGFEIKDKKCDVPCIGIEMVHDGGKETWHSAATAIYCLMGSGQLLWDTVTGVDMAL

SEQ ID NO: 28901 - protein, 466 aa, Artificial Sequence
  derived and/or modified protein sequence (wt) from neuraminidase__InfluenzaB__AEQ49697
MLPSTIQTLTLFLTSGGVLLSLYVSASLSYLLYSDILLKFSPTEITAPTMSLDCANASNVQAVNRSATKGVTFLLPEPEWTYPRLSCPGSTFQKALLISPHRFGETKGNSAPLIIREPFIACGPNECKHFALTHYAAQPGGYYNGTRGDRNKLRHLISVKLGKIPTVENSIFHMAAWSGSACHDGKEWTYIGVDGPDNDALLKVKYGEAYTDTYHSYANKILRTQESACNCIGGNCYLMITDGSASGVSECRFLKIREGRIIKEIFPTGRVKHTEECTCGFASNKTIECACRDNSYTAKRPFVKLNVETDTAEIRLMCTDTYLDTPRPDDGSITGPCESNGDKGSGGIKGGFVHQRMESKIGRWYSRTMSKTERMGMGLYVKYDGDPWADSDALAFSGVMVSMKEPGWYSFGFEIKDKKCDVPCIGIEMVHDGGKETWHSAATAIYCLMGSGQLLWDTVTGVDMAL

SEQ ID NO: 28902 - protein, 466 aa, Artificial Sequence; identical to SEQ ID NO: 28901
  derived and/or modified protein sequence (wt) from neuraminidase__InfluenzaB__AEQ49698

SEQ ID NO: 28903 - protein, 466 aa, Artificial Sequence; identical to SEQ ID NO: 28901
  derived and/or modified protein sequence (wt) from neuraminidase__InfluenzaB__AEQ49699

SEQ ID NO: 28904 - protein, 466 aa, Artificial Sequence; identical to SEQ ID NO: 28901
  derived and/or modified protein sequence (wt) from neuraminidase__InfluenzaB__AEQ49700

SEQ ID NO: 28905 - protein, 466 aa, Artificial Sequence; identical to SEQ ID NO: 28898
  derived and/or modified protein sequence (wt) from neuraminidase__InfluenzaB__AEQ49701

SEQ ID NO: 28906 - protein, 466 aa, Artificial Sequence; identical to SEQ ID NO: 28901
  derived and/or modified protein sequence (wt) from neuraminidase__InfluenzaB__AEQ49702

SEQ ID NO: 28907 - protein, 466 aa, Artificial Sequence; identical to SEQ ID NO: 28898
  derived and/or modified protein sequence (wt) from neuraminidase__InfluenzaB__AEQ49703

SEQ ID NO: 28908 - protein, 466 aa, Artificial Sequence; identical to SEQ ID NO: 28901
  derived and/or modified protein sequence (wt) from neuraminidase__InfluenzaB__AEQ49705

SEQ ID NO: 28909 - protein, 466 aa, Artificial Sequence
  derived and/or modified protein sequence (wt) from neuraminidase__InfluenzaB__AEQ49706
MLPSTIQMLTLFLTLGGVLLSLYVSASLSYLLYLDILLKFPPTEITAPTMPLDCANASNVQAVNRSATKGVTFLLPEPEWTYPRLSCPGSTFQKALLISPHRFGETKGNSAPLIIREPFIACGPKECKHFALTHYAAQPGGYYNGTRGDRNKLRHLISVKLGKIPTVENSIFHMAAWSGSACHDGKEWTYIGVDGPDNNALLKIKYGEAFTDTYHSYANNILRTQESACNCIGGNCYLMITDGSASGVSECRFLKIREGRIIKEIFPTGRVKHTEECTCGFASNKTIECACRDNSYTAKRPFVKLNVETDTAEIRLMCTDTYLDTPRPDDGSITGPCESNGDKGSGGIKGGFVHQRMASKIGRWYSRTMSKTERMGMGLYVKYDGDPWADSDALAFSGVMVSMKEPGWYSFGFEIKDKKCDVPCIGIEMVHDGGKETWHSAATAIYCLMGSGQLLWDTVTGVNMAL

SEQ ID NO: 28910 - protein, 466 aa, Artificial Sequence; identical to SEQ ID NO: 28901
  derived and/or modified protein sequence (wt) from neuraminidase__InfluenzaB__AEQ49707

SEQ ID NO: 28911 - protein, 466 aa, Artificial Sequence; identical to SEQ ID NO: 28901
  derived and/or modified protein sequence (wt) from neuraminidase__InfluenzaB__AEQ49708

SEQ ID NO: 28912 - protein, 466 aa, Artificial Sequence
  derived and/or modified protein sequence (wt) from neuraminidase__InfluenzaB__AEQ49709
MLPSTIQTLTLFLTSGGVLLSLYVSALLSYLLYSDILLKFSPTEITAPTMSLDCANASNVQAVNRSATKGVTFLLPEPEWTYPRLSCPGSTFQKALLISPHRFGETKGNSAPLIIREPFIACGPNECKHFALTHYAAQPGGYYNGTRGDRNKLRHLISVKLGKIPTVENSIFHMAAWSGSACHDGKEWTYIGVDGPDNDALLKVKYGEAYTDTYHSYANKILRTQESACNCIGGNCYLMITDGSASGVSECRFLKIREGRIIKEIFPTGRVKHTEECTCGFASNKTIECACRDNSYTAKRPFVKLNVETDTAEIRLMCTDTYLDTPRPDDGSITGPCESNGDKGSGGIKGGFVHQRMESKIGRWYSRTMSKTERMGMGLYVKYDGDPWADSDALAFSGVMVSMKEPGWYSFGFEIKDKKCDVPCIGIEMVHDGGKETWHSAATAIYCLMGSGHLLWDTVTGVDMAL

SEQ ID NO: 28913 - protein, 466 aa, Artificial Sequence; identical to SEQ ID NO: 28875
  derived and/or modified protein sequence (wt) from neuraminidase__InfluenzaB__AEQ49710

SEQ ID NO: 28914 - protein, 466 aa, Artificial Sequence; identical to SEQ ID NO: 28872
  derived and/or modified protein sequence (wt) from neuraminidase__InfluenzaB__AER27042

SEQ ID NO: 28915 - protein, 466 aa, Artificial Sequence; identical to SEQ ID NO: 28900
  derived and/or modified protein sequence (wt) from neuraminidase__InfluenzaB__AER27053

SEQ ID NO: 28916 - protein, 466 aa, Artificial Sequence; identical to SEQ ID NO: 28872
  derived and/or modified protein sequence (wt) from neuraminidase__InfluenzaB__AER27064

SEQ ID NO: 28917 - protein, 466 aa, Artificial Sequence; identical to SEQ ID NO: 28875
  derived and/or modified protein sequence (wt) from neuraminidase__InfluenzaB__AET43128

SEQ ID NO: 28918 - protein, 466 aa, Artificial Sequence; identical to SEQ ID NO: 28875
  derived and/or modified protein sequence (wt) from neuraminidase__InfluenzaB__AET43139

SEQ ID NO: 28919 - protein, 466 aa, Artificial Sequence
  derived and/or modified protein sequence (wt) from neuraminidase__InfluenzaB__AET43150
MLPSTIQTLTLFLTSGGVLLSLYVSASLSYLLYSDILLKFSPKEITAPTMPLDCANASNVQAVNHSATKGVTLLLPEPEWTYPRLSCPGSTFQKALLISPHRFGETKGNSAPLIIREPFIACGPNECKHFALTHYAAQPGGYYNGTRGDRNKLRHLISVKLGKIPTVENSIFHMAAWSGSACHDGKEWTYIGVDGPDNNALLKVKYGEAYTDTYHSYANKILRTQESACNCIGGNCYLMITDGSASGVSECRFLKIREGRIIKEIFPTGRVKHTEECTCGFASNKTIECACRDNSYTAKRPFVKLNVETDTAEIRLMCTDTYLDTPRPDDGSITGPCESNGDKGSGGIKGGFVHQRMESKIGRWYSRTMSKTERMGMGLYVKYDGDPWADSDALTFSGVMVSMKEPGWYSFGFEIKDKKCDVPCIGIEMVHDGGKETWHSAATAIYCLMGSGQLLWDTVTGVDMAL

SEQ ID NO: 28920 - protein, 466 aa, Artificial Sequence; identical to SEQ ID NO: 28875
  derived and/or modified protein sequence (wt) from neuraminidase__InfluenzaB__AET43161

SEQ ID NO: 28921 - protein, 466 aa, Artificial Sequence; identical to SEQ ID NO: 28875
  derived and/or modified protein sequence (wt) from neuraminidase__InfluenzaB__AET43172

SEQ ID NO: 28922 - protein, 466 aa, Artificial Sequence; identical to SEQ ID NO: 28875
  derived and/or modified protein sequence (wt) from neuraminidase__InfluenzaB__AET43183

SEQ ID NO: 28923 - protein, 466 aa, Artificial Sequence; identical to SEQ ID NO: 28875
  derived and/or modified protein sequence (wt) from neuraminidase__InfluenzaB__AET43194

SEQ ID NO: 28924 - protein, 466 aa, Artificial Sequence; identical to SEQ ID NO: 28875
  derived and/or modified protein sequence (wt) from neuraminidase__InfluenzaB__AET43216

SEQ ID NO: 28925 - protein, 466 aa, Artificial Sequence; identical to SEQ ID NO: 28875
  derived and/or modified protein sequence (wt) from neuraminidase__InfluenzaB__AET43227

SEQ ID NO: 28926 - protein, 466 aa, Artificial Sequence
  derived and/or modified protein sequence (wt) from neuraminidase__InfluenzaB__AET50947
MLPSTIQTLTLFLTSGGVLLSLYVSASLSYLLYSDILLKFSPKEITAPTMPLDCANASNVQAVNHSATKGVTLLLPEPEWTYPRLSCPGSTFQKALLISPHRFGETKGNSAPLIIREPFIACGPNECKHFALTHYAAQPGGYYNGTRGDRNKLRHLISVKLGKIPTVENSIFHMAAWSGSACHDGKEWTYIGVDGPDNNALLKVKYGEAYTDTYHSYANKILRTQESACNCIGGNCYLMITDGSASGVSECRFLKIREGRIIKEIFPTGRVKHTEECTCGFASNKTIECACRDNSYTAKRPFVKLNVETDTAEIRLMCTDTYLDTPRPDDGSITGPCESNGDKGSGGIKGGFVHQRMESKIGRWYSRTMSKTERMGMGLYVKYDGDPWADSDALAFSGVMISMKEPGWYSFGFEIKDKKCDVPCIGIEMVHDGGKETWHSAATAIYCLMGSGQLLWDTVTGVDMAL

SEQ ID NO: 28927 - protein, 466 aa, Artificial Sequence
  derived and/or modified protein sequence (wt) from neuraminidase__InfluenzaB__AET50958
MLPSTIQTLTLFLTSGGVLLSLYVSASLSYLLYSDILLKFSPKEITAPTMPLDCANASNVQAVNHSATKGVTLLLPELEWTYPRLSCPGSTFQKALLISPHRFGETKGNSAPLIIREPFIACGPNECKHFALTHYAAQPGGYYNGTRGDRNKLRHLISVKLGKIPTVENSIFHMAAWSGSACHDGKEWTYIGVDGPDNNALLKVKYGEAYTDTYHSYANKILRTQESACNCIGGNCYLMITDGSASGVSECRFLKIREGRIIKEIFPTGRVKHTEECTCGFASNKTIECACRDNSYTAKRPFVKLNVETDTAEIRLMCTDTYLDTPRPDDGSITGPCESNGDKGSGGIKGGFVHQRMESKIGRWYSRTMSKTERMGMGLYVKYDGDPWADSDALAFSGVMVSMKEPGWYSFGFEIKDKKCDVPCIGIEMVHDGGKETWHSAATAIYCLMGSGQLLWDTVTGVDMAL

SEQ ID NO: 28928 - protein, 466 aa, Artificial Sequence; identical to SEQ ID NO: 28875
  derived and/or modified protein sequence (wt) from neuraminidase__InfluenzaB__AET50969

SEQ ID NO: 28929 - protein, 466 aa, Artificial Sequence; identical to SEQ ID NO: 28875
  derived and/or modified protein sequence (wt) from neuraminidase__InfluenzaB__AET50980

SEQ ID NO: 28930 - protein, 466 aa, Artificial Sequence; identical to SEQ ID NO: 28875
  derived and/or modified protein sequence (wt) from neuraminidase__InfluenzaB__AET74259

SEQ ID NO: 28931 - protein, 466 aa, Artificial Sequence; identical to SEQ ID NO: 28875
  derived and/or modified protein sequence (wt) from neuraminidase__InfluenzaB__AET74270

SEQ ID NO: 28932 - protein, 466 aa, Artificial Sequence; identical to SEQ ID NO: 28926
  derived and/or modified protein sequence (wt) from neuraminidase__InfluenzaB__AET74281

SEQ ID NO: 28933 - protein, 466 aa, Artificial Sequence; identical to SEQ ID NO: 28875
  derived and/or modified protein sequence (wt) from neuraminidase__InfluenzaB__AET74292

SEQ ID NO: 28934 - protein, 466 aa, Artificial Sequence; identical to SEQ ID NO: 28875
  derived and/or modified protein sequence (wt) from neuraminidase__InfluenzaB__AET74303

SEQ ID NO: 28935 - protein, 466 aa, Artificial Sequence; identical to SEQ ID NO: 28875
  derived and/or modified protein sequence (wt) from neuraminidase__InfluenzaB__AET74314

SEQ ID NO: 28936 - protein, 466 aa, Artificial Sequence; identical to SEQ ID NO: 28875
  derived and/or modified protein sequence (wt) from neuraminidase__InfluenzaB__AET74333

SEQ ID NO: 28937 - protein, 466 aa, Artificial Sequence
  derived and/or modified protein sequence (wt) from neuraminidase__InfluenzaB__AET74344
MLPSTIQTLTLFLTSGGVLLSLYVSASLSYLLYSDILLKFSPKEITAPTMPLDCANASNVQAVNHSATKGVTLLLPEPEWTYPRLSCPGSTFQKALLISPHRFGETKGNSAPLIIREPFIACGPNECKHFALTHYAAQPGGYYNGTRGDRNKLRHLISVKLGKIPTVENSIFHMAAWSGSACHDGKEWTYIGVDGPDNNALLKVKYGEAYTDTYHSYANKILRTQESACNCIGGNCYLMITDGSASGVSECRFLKIREGRIIKEIFPTGRVKHTEECTCGFASNKTIECACRDNSYTAKRPFVKLNVEADTAEIRLMCTDTYLDTPRPDDGSITGPCESNGDKGSGGIKGGFVHQRMESKIGRWYSRTMSKTERMGMGLYVKYDGDPWADSDALAFSGVMVSMKEPGWYSFGFEIKDKKCDVPCIGIEMVHDGGKETWHSAATAIYCLMGSGQLLWDTVTGVDMAL

SEQ ID NO: 28938 - protein, 466 aa, Artificial Sequence; identical to SEQ ID NO: 28875
  derived and/or modified protein sequence (wt) from neuraminidase__InfluenzaB__AET74355

SEQ ID NO: 28939 - protein, 467 aa, Artificial Sequence
  derived and/or modified protein sequence (wt) from neuraminidase__InfluenzaB__AEY75594
MLPSTIQMLTLFLTSGGVLLSLYVSASLSYLLYSDILLKFSPTEITAPTMPLDCANASNVHAVNRSATKGVTFLLLPEPEWTYPRLSCPGSTFQKALLISPHRFGETKGNSAPLIIREPFIACGPNECKHFALTHYAAQPGGYYNGTRGDRNKLRHLISVKLGKIPTVENSIFHMAAWSGSACHDGKEWTYIGVDGPDNNALLKIKYGEAYTDTYHSYANNILRTQESACNCIGGNCYLMITDGSASGVSECRFLKIREGRIIKEIFPTGRVKHTEECTCGFASNKTIECACRDNSYTAKRPFVKLNVETDTAEIRLMCTDTYLDTPRPDDGSITGPCESNGDKGSGGTKGGFVHQRMASKIGRWYSRTMSKTERKGMGLYVKYDGDPWTDSDALAFRGVMVSMKEPGWYSFGFEIKDKKCDVPCIGIEMVHDGGKETWHSAATAIYCLMGSGQLLWDTVTGVDMAL

SEQ ID NO: 28940 - protein, 466 aa, Artificial Sequence
  derived and/or modified protein sequence (wt) from neuraminidase__InfluenzaB__AFA45223
MLPSTIQTLTLFLTSGGVLLSLYVSALLSYLLYSDILPKFSPTEITAPTMSLDCANASNVQAVNRSATKGVTFLLSEPEWTYPRLSCPGSTFQKALLISPHRFGETKGNSAPLIIREPFIACGPNECKHFALTHYAAQPGGYYNGTRGDRNKLRHLISVKLGKIPTVENSIFHMAAWSGSACHDGKEWTYIGVDGPDNDALLKVKYGEAYTDTYHSYANKILRTQESACNCIGGNCYLMITDGSASGVSECRFLKIREGRIIKEIFPTGRVKHTEECTCGFASNKTIECACRDNSYTAKRPFVKLNVETDTAEIRLMCTDTYLDTPRPDDGSITGPCESNGDKGSGGIKGGFVHQRMESKIGRWYSRTMSKTERMGMGLYVKYDGDPWADSDALAFSGVMVSMKEPGWYSFGFEIKDKKCDVPCIGIEMVHDGGKETWHSAATAIYCLMGSGQLLWDTVTGVDMAL

SEQ ID NO: 28941 - protein, 466 aa, Artificial Sequence
  derived and/or modified protein sequence (wt) from neuraminidase__InfluenzaB__AFA45226
MLPSTIQTLTLFLTSGGVLLSLYVSASLSYLLYSDILLKFSPTETTAPTMSLDCANASNVQAVNRSATKGVTFLLPEPEWTYPRLSCPGSTFQKALLISPHRFGETKGNSAPLIIREPFIACGPNECKHFALTHYAAQPGGYYNGTRGDRNKLRHLISVKLGKVPTVENSIFHMAAWSGSACHDGKEWTYIGVDGPDNDALLKVKYGEAYTDTYHSYANKILRTQESACNCIGGNCYLMITDGSASGVSECRFLKIREGRIIKEIFPTGRVKHTEECTCGFASNKTIECACRDNSYTAKRPFVKLNVETDTAEIRLMCTDTYLDTPRPDDGSITGPCESNGDKGSGGIKGGFVHQRMESKIGRWYSRTMSKTERMGMGLYVKYDGDPWADSDALAFSGVMVSMKEPGWYSFGFEIKDKKCDVPCIGIEMVHDGGKGTWHSAATAIYCLMGSGQLLWDTVTGVDMAL

SEQ ID NO: 28942 - protein, 466 aa, Artificial Sequence
  derived and/or modified protein sequence (wt) from neuraminidase__InfluenzaB__AFA45229
MLPSTIQTLTLFLTSGGVLLSLYVSALLSYLLYSDILLKFSPTEITAPTMPLDCANASNVQAVNRSATKGVTFLLPEPEWTYPRLSCPGSTFQKALLISPHRFGETKGNSAPLIIREPFIACGPNECKHFALTHYAAQPGGYYNGTRGDRNKLRHLISVKLGKIPTVENSIFHMAAWSGSACHDGKEWTYIGVDGPDNDALLKVKYGEAYTDTYHSYANKILRTQESACNCIGGNCYLMITDGSASGVSECRFLKIREGRIIKEIFPTGRVKHTEECTCGFASNKTIECACRDNSYTAKRPFVKLNVETDTAEIRLMCTDTYLDTPRPDDGSITGPCESNGDKGSGGIKGGFVHQRMESKIGRWYSRTMSKTERMGMGLYVKYDGDPWADSDALAFSGVMVSMKEPGWYSFGFEIKDKKCDVPCIGIEMVHDGGKETWHSAATAIYCLMGSGQLLWDTVTGVDMAL

SEQ ID NO: 28943 - protein, 466 aa, Artificial Sequence; identical to SEQ ID NO: 28895
  derived and/or modified protein sequence (wt) from neuraminidase__InfluenzaB__AFA45235

SEQ ID NO: 28944 - protein, 466 aa, Artificial Sequence
  derived and/or modified protein sequence (wt) from neuraminidase__InfluenzaB__AFA45238
MLPSTIQTLTLFLTSGGVLLSLYVSASLSYLLYSDILLKFSPTKTTAPTMSLDCANASNVQAVNRSATKGVTFLLPEPEWTYPRLSCPGSTFQKALLISPHRFGETKGNSAPLIIREPFIACGPNECKHFALTHYAAQPGGYYNGTRGDRNKLRHLISVKLGKIPTVENSIFHMAAWSGSACHDGKEWTYIGVDGPDNDALLKVKYGEAYTDTYHSYANKILRTQESACNCIGGNCYLMITDGSASGVSECRFLKIREGRIIKEIFPTGRVKHTEECTCGFASNKTIECACRDNSYTAKRPFVKLNVETDTAEIRLMCTDTYLDTPRPDDGSITGPCESNGDKGSGGIKGGFVHQRMESKIGRWYSRTMSKTERMGMGLYVKYDGDPWADSDALAFSGVMVSMKEPGWYSFGFEIKDKKCDVPCIGIEMVHDGGKETWHSAATAIYCLMGSGQLLWDTVTGVDMAL

SEQ ID NO: 28945 - protein, 466 aa, Artificial Sequence
  derived and/or modified protein sequence (wt) from neuraminidase__InfluenzaB__AFA45241
MLPSTIQTLTLFLTSGGVLLSLYVSASLSYLLYSDILLKFSPTEITAPTMPLDCANASNVQAVNRSATKGVIFLLPEPEWTYPRLSCPGSTFQKALLISPHRFGETKGNSAPLIIREPFIACGPNECKHFALTHYAAQPGGYYNGTRGDRNKLRHLISVKLGKIPTVENSIFHMAAWSGSACHDGKEWTYIGVDGPDNNALLKVKYGEAYTDTYHSYANKILRTQESACNCIGGNCYLMITDGSASGVSECRFLKIREGRIIKEIFPTGRVKHTEECTCGFASNKTIECACRDNSYTAKRPFVKLNVETDTAEIRLMCTDTYLDTPRPDDGSITGPCESNGDKGSGGIKGGFVHQRMESKIGRWYSRTMSKTERMGMGLYVKYDGDPWADSDALTFSGVMVSMKEPGWYSFGFEIKDKKCDVPCIGIEMVHDGGKETWHSAATAIYCLMGSGQLLWDTVTGVDMAL

SEQ ID NO: 28946 - protein, 466 aa, Artificial Sequence
  derived and/or modified protein sequence (wt) from neuraminidase__InfluenzaB__AFA45244
MLPSTIQTLTLFLTSGGVLLSLYVSASLSYLLYSDILLKFSPTETTAPTMSLDCANASNVQAVNRSATKGVTFLLPEPEWTYPRLSCPGSTFQKALLISPHRFGETKGNSAPLIIREPFIACGPNECKHFALTHYAAQPGGYYNGTRGDRNKLRHLISVKLGKIPTVENSIFHMAAWSGSACHDGKEWTYIGVDGPDNDALLKVKYGEAYTDTYHSYANKILRTQESACNCIGGNCYLMITDGSASGVSECRFLKIREGRIIKEIFPTGRVKHTEECTCGFASNKTIECACRDNSYTAKRPFVKLNVETDTAEIRLMCTDTYLDTPRPDDGSITGPCESNGDKGSGGIKGGFVHQRMESKIGRWYSRTMSKTERMGMGLYVKYDGDPWADSDALAFSGVMVSMKEPGWYSFGFEIKDKKCDVPCIGIEMVHDGGKKTWHSAATAIYCLMGSGQLLWDTVTGVDMAL

SEQ ID NO: 28947 - protein, 466 aa, Artificial Sequence
  derived and/or modified protein sequence (wt) from neuraminidase__InfluenzaB__AFA45247
MLPSTIQTLTLFLTSGGVLLSLYVSASLSYLLYSDILLKFSTTEITAPTMPLDCANASNVQAVNRSATKGVTLLLPEPEWTYPRLSCPGSTFQKALLISPHRFGETKGNSAPLIIREPFIACGPNECKHFALTHYAAQPGGYYNGTRGDRNKLRHLISVKLGKIPTVENSIFHMAAWSGSACHDGKEWTYIGVDGPDNNALLKVKYGEAYTDTYHSYANKILRTQESACNCIGGNCYLMVTDGSASGVSECRFLKIREGRIIKEIFPTGRVKHTEECTCGFASNKTIECACRDNSYTAKRPFVKLNVETDTAEIRLMCTDTYLDTPRPDDGSITGPCESNGDKGSGGIKGGFVHQRMESKIGRWYSRTMSKTERMGMGLYVKYDGDPWADSDALVFSGVMVSMKEPGWYSFGFEIKDKKCDVPCIGIEMVHDGGKETWHSAATAIYCLMGSGQLLWDTVTGVDMAL

SEQ ID NO: 28948 - protein, 466 aa, Artificial Sequence; identical to SEQ ID NO: 28898
  derived and/or modified protein sequence (wt) from neuraminidase__InfluenzaB__AFA45250

SEQ ID NO: 28949 - protein, 466 aa, Artificial Sequence
  derived and/or modified protein sequence (wt) from neuraminidase__InfluenzaB__AFA45253
MLPSTIQTLTLFLTSGGVLLSLYVSALLSYLLYSDILLKFSPTEITAPTMSLDCANASNVQAVNRSATKGVTFLLPEPEWTYPRLSCPGSTFQKALLISPHRFGETKGNSAPLIIREPFIACGPNECKHFALTHYAAQPGGYYNGTRGDRNKLRHLISVKLGKIPTVENSIFHMAAWSGSACHDGKEWTYIGVDGPDNDALLKVKYGEAYTDTYHSYANKILRTQESACNCIGGNCYLMITDGSASGVSECRFLKIREGRIIKEIFPTGRVKHTEECTCGFASNKTIECVCRDNSYTAKRPFVKLNVETDTAEIRLMCTDTYLDTPRPDDGSITGPCESNGDKGSGGIKGGFVHQRMESKIGRWYSRTMSKTERMGMGLYVKYDGDPWADSDALAFSGVMVSMKEPGWYSFGFEIKDKKCDVPCIGIEMVHDGGKETWHSAATAIYCLMGSGQLLWDTVTGVDMAL

SEQ ID NO: 28950 - protein, 466 aa, Artificial Sequence
  derived and/or modified protein sequence (wt) from neuraminidase__InfluenzaB__AFB77645
MLPSTIQTLTLFLTSGGVLLSLYVSASLSYLLYSDILLKFSPTEITAPAMPLDCANASNVQAVNRSATKGVTLLLPEPEWTYPRLSCPGSTFQKALLISPHRFGETKGNSAPLIIREPFIACGPNECKHFALTHYAAQPGGYYNGTRGDRNKLRHLISVKLGKIPTVENSIFHMAAWSGSACHDGKEWTYIGVDGPDNNALLKVKYGEAYTDTYHSYANKILRTQESACNCIGGNCYLMITDGSASGVSECRFLKIREGRIIKEIFPTGRVKHTEECTCGFASNKTIECACRDNSYTAKRPFVKLNVETDTAEIRLMCTDTYLDTPRPNDGSITGPCESDGDKGSGGIKGGFVHQRMESKIGRWYSRTMSKTERMGMGLYVKYDGDPWADSDALVFSGVMVSMKEPGWYSFGFEIKDKKCDVPCIGIEMVHDGGKETWHSAATAIYCLMGSGQLLWDTVTGVDMAL

SEQ ID NO: 28951 - protein, 466 aa, Artificial Sequence
  derived and/or modified protein sequence (wt) from neuraminidase__InfluenzaB__AFB77647
MLPSTIQTLTLFLTSGGVLLSLYVSASLSYLLYSDILLKFSPTEITAPAIPLDCANASNVQAVNRSATKGVTLLLPEPEWTYPRLSCPGSTFQKALLISPHRFGETKGNSAPLIIREPFIACGPNECKHFALTHYAAQPGGYYNGTRGDRNKLRHLISVKLGKIPTVENSIFHMAAWSGSACHDGKEWTYIGVDGPDNNALLKVKYGEAYTDTYHSYANKILRTQESACNCIGGNCYLMITDGSASGVSECRFLKIREGRIIKEIFPTGRVKHTEECTCGFASNKTIECACRDNSYTAKRPFVKLNVETDTAEIRLMCTDTYLDTPRPNDGSITGPCESDGDKGSGGIKGGFVHQRMESKIGRWYSRTMSKTERMGMGLYVKYDGDPWADSDALAFSGVMVSMKEPGWYSFGFEIKDKKCDVPCIGIEMVHDGGKETWHSAATAIYCLMGSGQLLWDTVTGVDMAL

SEQ ID NO: 28952 - protein, 466 aa, Artificial Sequence
  derived and/or modified protein sequence (wt) from neuraminidase__InfluenzaB__AFB77649
MLPSTIQTLTLFLTSGGVLLSLYVSASLSYLLYSDILLKFSPTEITAPAMPLDCANASNVQAVNRSATKGVTLLLPEPEWTYPRLSCPGSTFQKALLISPHRFGETKGNSAPLIIREPFIACGPNECKHFALTHYAAQPGGYYNGTRGDRNKLRHLISVKLGKIPTVENSIFHMAAWSGSACHDGKEWTYIGVDGPDNNALLKVKYGEAYTDTYHSYANKILRTQESACNCIGGNCYLMITDGSASGVSECRFLKIREGRIIKEIFPTGRIKHTEECTCGFASNKTIECACRDNSYTAKRPFVKLNVETDTAEIRLMCTDTYLDTPRPNDGSITGPCESDGDKGSGGIKGGFVHQRMESKIGRWYSRTMSKTERMGMGLYVKYDGDPWADSDALAFSGVMVSMKEPGWYSFGFEIKDKKCDVPCIGIEMVHDGGKETWHSAATAIYCLMGSGQLLWDTVTGVDMAL

SEQ ID NO: 28953 - protein, 466 aa, Artificial Sequence
  derived and/or modified protein sequence (wt) from neuraminidase__InfluenzaB__AFB77651
MLPSTIQTLTLFLTSGGVLLSLYVSASLSYLLYSDILLKFSPTEITAPAMPLDCANASNVQAVNRSATKGVTLLLPEPEWTYPRLSCPGSTFQKALLISPHRFGETKGNSAPLIIREPFIACGPNECKHFALTHYAAQPGGYYNGTRGDRNKLRHLTSVKLGKIPTVENSIFHMAAWSGSACHDGKEWTYIGVDGPDNNALLKVKYGEAYTDTYHSYANKILRTQESACNCIGGNCYLMITDGSASGVSECRFLKIREGRIIKEIFPTGRVKHTEECTCGFASNKTIECACRDNSYTAKRPFVKLNVETDTAEIRLMCTDTYLDTPRPNDGSITGPCESDGDKGSGGIKGGFVHQRMESKIGRWYSRTMSKTERMGMGLYVKYDGDPWADSDALAFSGVMVSMKEPGWYSFGFEIKDKKCDVPCIGIEMVHDGGKETWHSAATAIYCLMGSGQLLWDTVTGVDMAL

SEQ ID NO: 28954 - protein, 466 aa, Artificial Sequence
  derived and/or modified protein sequence (wt) from neuraminidase__InfluenzaB__AFE00364
MLPSTIQMLTLFLTSGGVLLSLYVSASLSYLLYSDILLKFSPTEITAPTMPLDCANASNVHAVNRSATKGVTFLLPEPEWTYPRLSCPGSTFQKALLISPHRFGETKGNSAPLIIREPFIACGPNECKHFALTHYAAQPGGYYNGTRGDRNRLRHLISVKLGKIPTVENSIFHMAAWSGSACHDGKEWTYIGVDGPDNNALLKIKYGEAYTDTYHSYANNILRTQESACNCIGGNCYLMITDGSASGVSECRFLKIREGRIIKEIFPTGRVKHTEECTCGFASNKTIECACRDNSYTAKRPFVKLNVETDTAEIRLMCTDTYLDTPRPDDGSITGPCESNGDKGSGGIKGGFVHQRMASKIGRWYSRTMSKTERKGMGLYVKYDGDPWTDSDALAFRGVMVSMKEPGWYSFGFEIKDKKCDVPCIGIEMVHDGGKETWHSAATAIYCLMGSGQLLWDTVTGVDMAL

SEQ ID NO: 28955 - protein, 466 aa, Artificial Sequence
  derived and/or modified protein sequence (wt) from neuraminidase__InfluenzaB__AFF18536
MLPSTIQMLTLFLTSGGVLLSLYVSASLSYLLYSDILLKFSPTEITAPTMPLDCANASNVHAVNRSATKGVTFLLPEPEWTYPRLSCPGSTFQKALLISPHRFGETKGNSAPLIIREPFIACGPNECRHFALTHYAAQPGGYYNGTRGDRNKLRHLISVKLGKIPTVENSIFHMAAWSGSACHDGKEWTYIGVDGPDNNALLKIKYGEAYTDTYHSYANNILRTQESACNCIRGNCYLMITDGSASGVSECRFLKIREGRIIKEIFPTGRVKHTEECTCGFASNKTIECACRDNSYTAKRPFVKLNVETDTAEIRLMCTDTYLDTPRPDDGSITGPCESNGDKGSGGIKGGFVHQRMASKIGRWYSRTMSKTERKGMGLYVKYDGDPWTDSDALAFRGVMVSMKEPGWYSFGFEIKDKKCDVPCIGIEMVHDGGKETWHSAATAIYCLMGSGQLLWDTVTGVDMAL

SEQ ID NO: 28956 - protein, 466 aa, Artificial Sequence
  derived and/or modified protein sequence (wt) from neuraminidase__InfluenzaB__AFF18545
MLPSTIQMLTLFLTSGGVLLSLYVSASLSYLLYSDILLKFSPTEITAPTMPLDCANASNVHAVNRSATKGVTFLLPEPEWTYPRLSCPGSTFQKALLISPHRFGETKGNSAPLIIREPFIACGPNECKHFALTHYAAQPGGYYNGTRGDRNKLRHLISVKLGKIPTVENSIFHMAAWSGSACHDGKEWTYIGVDGPDNNALLKIKYGEAYTDTYHSYANNILRTQESACNCIGGNCYLMITDGSASGVSECRFLKIREGRIIKEIFPTGRVKHTEECTCGFASNKTIECACRDNSYTAKRPFVKLNVETDTAEIRLMCTDTYLDTPRPDDGSITGPCESNGDKGSGGIKGGFVHQRMASKIGRWYSRTMSKTERKGMGLYVKYDGDPWTDSDALAFRGVMVSMKEPGWYSFGFEIKDKKCDVPCIGIEMVHDGGKETWHSAATAIYCLMGSGQLLWDTVTGVDMAL

SEQ ID NO: 28957 - protein, 466 aa, Artificial Sequence; identical to SEQ ID NO: 28817
  derived and/or modified protein sequence (wt) from neuraminidase__InfluenzaB__AFH34933

SEQ ID NO: 28958 - protein, 466 aa, Artificial Sequence; identical to SEQ ID NO: 28817
  derived and/or modified protein sequence (wt) from neuraminidase__InfluenzaB__AFH34939

SEQ ID NO: 28959 - protein, 466 aa, Artificial Sequence; identical to SEQ ID NO: 28755
  derived and/or modified protein sequence (wt) from neuraminidase__InfluenzaB__AFH57869

SEQ ID NO: 28960 - protein, 466 aa, Artificial Sequence
  derived and/or modified protein sequence (wt) from neuraminidase__InfluenzaB__AFH57891
MLPSTIQTLTLFLTSGGVLLSLYVSASLSYLLYSDILLKFSQTEITAPIMPLDYANASNVQAVNHSAAKGVTLLLPEPEWTYPRLSCPGSTFQKALLISPHRFGETKGNSAPLIIREPFIACGPTECKHFALTHYAAQPGGYYNGTREDRNKLRHLISVKLGKIPTVENSIFHMAAWSGSACHDGKEWTYIGVDGPDSNALLKIKYGEAYTDTYHSYAKNILRTQESACNCIGGDCYLMITDGPASGISECRFLKIREGRIIKEIFPTGRVKHTEECTCGFASNKTIECACRDNSYTAKRPFVKLNVETDTAEIRLMCTETYLDTPRPNDGSITGPCESDGDKGSGGIKGGFVHQRMASKIGRWYSRTMSKTKRMGMGLYVKYDGDPWTDSEALALSGVMVSMEEPGWYSFGFEIKDKKCDVPCIGIEMVHDGGKTTWHSAATAIYCLMGSGQLLWDTVTGVDMAL

SEQ ID NO: 28961 - protein, 466 aa, Artificial Sequence
  derived and/or modified protein sequence (wt) from neuraminidase__InfluenzaB__AFH57913
MLPSTIQTLTLFLTSGGVLLSLYVSASLSYLLYSDILLKFSPTEITAPTMPLDCANASNVQAVNRSATKGVTLLLPEPEWTYPRLSCPGSTFQKALLISPHRFGETKGNSAPLIIREPFIACGPNECKHFALTHYAAQPGGYYNGTRGDRNKLRHLISVKLGKIPTVENSIFHMAAWSGSACHDGKEWTYIGVDGPDNNALLKVKYGEAYTDTYHSYANKILRTQESACNCIGGNCYLMITDGSASGVSECRFLKIREGRIIKEIFPTGRVKHTEECTCGFASNKTIECACRDNSYTAKRPFVKLNVETDTAEIRLMCTDTYLDTPRPNDGSITGPCESNGDKGSGGIKGGFVHQRMESKIGRWYSRTMSKTERMGMGLYVKYDGDPWADSDALAFSGVMVSMKEPGWYSFGFEIKDKKCDVPCIGIEMVHDGGKETWHSAATAIYCLMGSGQLLWDTVTGVDMAL

SEQ ID NO: 28962 - protein, 466 aa, Artificial Sequence; identical to SEQ ID NO: 28817
  derived and/or modified protein sequence (wt) from neuraminidase__InfluenzaB__AFH57935

SEQ ID NO: 28963 - protein, 466 aa, Artificial Sequence; identical to SEQ ID NO: 28817
  derived and/or modified protein sequence (wt) from neuraminidase__InfluenzaB__AFH57946

SEQ ID NO: 28964 - protein, 466 aa, Artificial Sequence; identical to SEQ ID NO: 28817
  derived and/or modified protein sequence (wt) from neuraminidase__InfluenzaB__AFH57957

SEQ ID NO: 28965 - protein, 466 aa, Artificial Sequence; identical to SEQ ID NO: 28895
  derived and/or modified protein sequence (wt) from neuraminidase__InfluenzaB__AFH57968

SEQ ID NO: 28966 - protein, 466 aa, Artificial Sequence
  derived and/or modified protein sequence (wt) from neuraminidase__InfluenzaB__AFH57979
MLPSTIQTLTLFLTSGGVLLSLYVSALLSYLLYSDILLKFSPTEITAPTMSLDCANASNVQAVNRSATKGVIFLLPEPEWTYPRLSCPGSTFQKALLISPHRFGETKGNSAPLIIREPFIACGPNECKHFALTHYAAQPGGYYNGTRGDRNKLRHLISVKLGKIPTVENSIFHMAAWSGSACHDGKEWTYIGVDGPDNDALLKVKYGEAYTDTYHSYANKILRTQESACNCIGGNCYLMITDGSASGVSECRFLKIREGRIIKEIFPTGRVKHTEECTCGFASNKTIECACRDNSYTAKRPFVKLNVETDTAEIRLMCTDTYLDTPRPDDGSITGPCESNGDKGSGGIKGGFVHQRMESKIGRWYSRTMSKTERMGMGLYVKYDGDPWADSDALAFSGVMVSMKEPGWYSFGFEIKDKKCDVPCIGIEMVHDGGKETWHSAATAIYCLMGSGQLLWDTVTGVDMAL

SEQ ID NO: 28967 - protein, 466 aa, Artificial Sequence; identical to SEQ ID NO: 28584
  derived and/or modified protein sequence (wt) from neuraminidase__InfluenzaB__AFH58253

SEQ ID NO: 28968 - protein, 466 aa, Artificial Sequence; identical to SEQ ID NO: 28647
  derived and/or modified protein sequence (wt) from neuraminidase__InfluenzaB__AFH58264

SEQ ID NO: 28969 - protein, 466 aa, Artificial Sequence; identical to SEQ ID NO: 28788
  derived and/or modified protein sequence (wt) from neuraminidase__InfluenzaB__AFH58275

SEQ ID NO: 28970 - protein, 466 aa, Artificial Sequence; identical to SEQ ID NO: 28788
  derived and/or modified protein sequence (wt) from neuraminidase__InfluenzaB__AFH58286

SEQ ID NO: 28971 - protein, 466 aa, Artificial Sequence; identical to SEQ ID NO: 28961
  derived and/or modified protein sequence (wt) from neuraminidase__InfluenzaB__AFH58297

SEQ ID NO: 28972 - protein, 466 aa, Artificial Sequence
  derived and/or modified protein sequence (wt) from neuraminidase__InfluenzaB__AFH58308
MLPSTIQTLTLFLTSGGVLLSLYVSASLSYLLYSDILLKFSRTETTAPIMPLDCANASNVQAVNRSATKGVTLLLPEPEWTYPRLSCPGSTFQKALLISPHRFGETKGNSAPLIIREPFIACGPKECKHFALTHYAAQPGGYYNGTREDRNKLRHLISVKLGKIPTVENSIFHMAAWSGSACHDGREWTYIGVDGPDSNALLKIKYGEAYTDTYHSYAKNILRTQESACNCIGGDCYLMITDGPASGISECRFLKIREGRIIKEIFPTGRVKHTEECTCGFASNKTIECACRDNSYTAKRPFVKLNVETDTAEIRLMCTETYLDTPRPNDGSITGPCESNGDKGSGGIKGGFVHQRMASKIGRWYSRTMSKTKRMGMGLYVKYDGDPWTDSEALALSGVMVSMEEPGWYSFGFEIKDKKCDVPCIGIEMVHDGGKTTWHSAATAIYCLMGSGQLLWDTVTGVDMAL

SEQ ID NO: 28973 - protein, 466 aa, Artificial Sequence; identical to SEQ ID NO: 28972
  derived and/or modified protein sequence (wt) from neuraminidase__InfluenzaB__AFH58319

SEQ ID NO: 28974 - protein, 466 aa, Artificial Sequence
  derived and/or modified protein sequence (wt) from neuraminidase__InfluenzaB__AFH58341
MLPSTIQTLTLFLTSGGVLLSLYVSASLSYLLYSDILLKFSRTEITAPIMPLDCANASNVQAVNRSATKGVTLLLPEPEWTYPRLSCPGSTFQKALLISPHRFGETKGNSAPLIIREPFIACGPKECKHFALTHYAAQPGGYYNGTREDRNKLRHLISVRLGKIPTVENSIFHMAAWSGSACHDGREWTYIGVDGPDSNALLKIKYGEAYTDTYHSYAKNILRTQESACNCIGGDCYLMITDGPASGISECRFLKIREGRIIKEIFPTGRVKHTEECTCGFASNKTIECACRDNSYTAKRPFVKLNVETDTAEIRLMCTETYLDTPRPNDGSITGPCESNGDKGSGGIKGGFVHQRMASKIGRWYSRTMSKTKRMGMGLYVKYDGDPWTDSEALALSGVMVSMEEPGWYSFGFEIKDKKCDVPCIGIEMVHDGGKTTWHSAATAIYCLMGSGQLLWDTVTGVNMTL

SEQ ID NO: 28975 - protein, 466 aa, Artificial Sequence
  derived and/or modified protein sequence (wt) from neuraminidase__InfluenzaB__AFH58363
MLPSTIQTLTLFLTSGGVLLSLYVSASLSYLLYSDILLKFPSTEITAPTMPLDCANASNVQAVNRSATKGVTFLLPEPEWTYPRLSCPGSTFQKALLISPHRFGETKGNSAPLIIREPFIACGPKECKHFALTHYAAQPGGYYNGTRGDRNKLRHLISVKLGKIPTVENSIFHMAAWSGSACHDGKEWTYIGVDGPDNNALLKIKYGEAYTDTYHSYANNILRTQESACNCIGGNCYLMITDGSASGVSECRFLKIREGRIIKEIFPTGRIKHTEECTCGFASNKTIECACRDNSYTAKRPFVKLNVETDTAEIRLMCTETYLDTPRPDDGSITGPCESNGGKGSGGIKGGFVHQRMASKIGRWYSRTMSKTERKGMGLYVKYDGDPWADSDALAFSGVMVSMEEPGWYSFGFEIKDKKCDVPCIGIEMVHDGGKETWHSAATAIYCLMGSGQLLWDTVTGVNMAL

SEQ ID NO: 28976 - protein, 466 aa, Artificial Sequence; identical to SEQ ID NO: 28975
  derived and/or modified protein sequence (wt) from neuraminidase__InfluenzaB__AFH58374

SEQ ID NO: 28977 - protein, 466 aa, Artificial Sequence; identical to SEQ ID NO: 28961
  derived and/or modified protein sequence (wt) from neuraminidase__InfluenzaB__AFH58385

SEQ ID NO: 28978 - protein, 466 aa, Artificial Sequence; identical to SEQ ID NO: 28961
  derived and/or modified protein sequence (wt) from neuraminidase__InfluenzaB__AFH58396

SEQ ID NO: 28979 - protein, 466 aa, Artificial Sequence; identical to SEQ ID NO: 28961
  derived and/or modified protein sequence (wt) from neuraminidase__InfluenzaB__AFH58407

SEQ ID NO: 28980 - protein, 466 aa, Artificial Sequence; identical to SEQ ID NO: 28961
  derived and/or modified protein sequence (wt) from neuraminidase__InfluenzaB__AFH58418

SEQ ID NO: 28981 - protein, 466 aa, Artificial Sequence
  derived and/or modified protein sequence (wt) from neuraminidase__InfluenzaB__AFH58429
MLPSTIQTLTLFLTSGGVLLSLYVSASLSYLLYSDILLKFSPTEITAPTMPLDCANASNVQAVNRSATKGVTLLLPEPEWTYPRLSCPGSTFQKALLISPHRFGETKGNSAPLIIREPFIACGPNECKHFALTHYAAQPGGYYNGTRGDRNKLRHLISVKLGKIPTVENSIFHMAAWSGSACHDGKEWTYIGVDGPDNNALLKVKYGEAYTDTYHSYANKILRTQESACNCIGGNCYLMITDGSASGVSECRFLKIREGRIIKEIFPTGRVKHTEECTCGFASNETIECACRDNSYTAKRPFVKLNVETDTAEIRLMCTDTYLDTPRPNDGSITGPCESNGDKGSGGIKGGFVHQRMESKIGRWYSRTMSKTERMGMGLYVKYDGDPWADSDALAFSGVMVSMKEPGWYSFGFEIKDKKCDVPCIGIEMVHDGGKETWHSAATAIYCLMGSGQLLWDTVTGVDMAL

SEQ ID NO: 28982 - protein, 466 aa, Artificial Sequence
  derived and/or modified protein sequence (wt) from neuraminidase__InfluenzaB__AFH58440
MLPSTIQTLTLFLTSGGVLLSLYVSASLSYLLYSDILLKFSPTEITAPTMPLDCANASNVQAVNRSATKGVTLLLPEPEWTYPRLSCPGSTFQKALLISPHRFGETKGNSAPLIIREPFIACGPNECKHFALTHYAAQPGGYYNGTRGDRNKLRHLISVKLGKIPTVENSIFHMAAWSGSACHDGKEWTYIGVDGPDNNALLKVKYGEAYTDTYHSYANKILRTQESACNCIGGNCYLMITDGSASGVSECRFLKIQEGRIIKEIFPTGRVKHTEECTCGFASNKTIECACRDNSYTAKRPFVKLNVETDTAEIRLMCTDTYLDTPRPNDGSITGPCESNGDKGSGGIKGGFVHQRMESKIGRWYSRTMSKTERMGMGLYVKYDGDPWADSDALAFSGVMVSMKEPGWYSFGFEIKDKKCDVPCIGIEMVHDGGKETWHSAATAIYCLMGSGQLLWDTVTGVDMAL

SEQ ID NO: 28983 - protein, 466 aa, Artificial Sequence
  derived and/or modified protein sequence (wt) from neuraminidase__InfluenzaB__AFH58462
MLPSTIQTLTLFLTSGGVLLSLYVSASLSYLLYSDILLKFSPTEITAPTMPLDCANASNVQAVNRSATKGVTFLLPEPEWTYPRLSCPGSTFQKALLISPHRFGETKGNSAPLIIREPFIACGPNECKHFALTHYAAQPGGYYNGTRGDRNKLRHLISVKLGKIPTVENSIFHMAAWSGSACHDGKEWTYIGVDGPDNNALLKVKYGEAYTDTYHSYANKILRTQESACNCIGGNCYLMITDGSASGVSECRFLKIREGRIIKEIFPTGRVKHTEECTCGFASNKTIECACRDNSYTAKRPFVKLNVETDTAEIRLMCTDTYLDTPRPDDGSITGPCESNGDEGSGGIKGGFVHQRMESKIGRWYSRTMSKTERMGMGLYVKYDGDPWADSDALAFSGVMVSMKEPGWYSFGFEIKDKKCDVPCIGIEMVHDGGKETWHSAATAIYCLMGSGQLLWDTVTGVDMTL

SEQ ID NO: 28984 - protein, 466 aa, Artificial Sequence; identical to SEQ ID NO: 28983
  derived and/or modified protein sequence (wt) from neuraminidase__InfluenzaB__AFH58473

SEQ ID NO: 28985 - protein, 466 aa, Artificial Sequence; identical to SEQ ID NO: 28817
  derived and/or modified protein sequence (wt) from neuraminidase__InfluenzaB__AFH58484

SEQ ID NO: 28986 - protein, 466 aa, Artificial Sequence; identical to SEQ ID NO: 28817
  derived and/or modified protein sequence (wt) from neuraminidase__InfluenzaB__AFH58495

SEQ ID NO: 28987 - protein, 466 aa, Artificial Sequence; identical to SEQ ID NO: 28817
  derived and/or modified protein sequence (wt) from neuraminidase__InfluenzaB__AFH58506

SEQ ID NO: 28988 - protein, 466 aa, Artificial Sequence
  derived and/or modified protein sequence (wt) from neuraminidase__InfluenzaB__AFH58517
MLPSTIQTLTLFLTSGGVLLSLYVSALLSYLLYSDILLKFSPTEITAPTMSLDCANASNVQAVNRSATKGVTFLLPEPEWTYPRLSCPGSTFQKALLISPHRFGETKGNSAPLIIREPFIACGPNECKHFALTHYAAQPGGYYNGTRGDRNKLRHLISVKLGKIPTVENSIFHMAAWSGSACHDGKEWTYIGVDGPDNDALLKVKYGEAYTDTYHSYANKILRTQESACNCIGGNCYLMITDGSASGVSECRFLKIREGRIIKEIFPTGRVKHTEECTCGFASNKTIECACRDNSYTAKRPFVKLNVETDTAEIRLMCTDTYLDTPRPDDGSITGPCESNGDKGSGGIKGGFVHQRMESKIGRWYSRTMSKTERMGMGLYVKYDGDPWADSDALAFSGVMVSMKEPGWYSFGFEIKDKKCDVPCIGIEMVHDGGKETWHSAATAIYCLMGSGRLLWDTVTGVDMAL

SEQ ID NO: 28989 - protein, 466 aa, Artificial Sequence; identical to SEQ ID NO: 28895
  derived and/or modified protein sequence (wt) from neuraminidase__InfluenzaB__AFH58528

SEQ ID NO: 28990 - protein, 466 aa, Artificial Sequence
  derived and/or modified protein sequence (wt) from neuraminidase__InfluenzaB__AFH58539
MLPSTVQTLTLLLTSGGVLLSLYVSASLSYLLYSDVLLKFSSTKTTAPTMSLECTNASNAQTVNHSATKEMTFPPPEPEWTYPRLSCQGSTFQKALLISPHRFGEIKGNSAPLIIREPFVACGPKECRHFALTHYAAQPGGYYNGTRKDRNKLRHLVSVKLGKIPTVENSIFHMAAWSGSACHDGREWTYIGVDGPDNDALVKIKYGEAYTDTYHSYAHNILRTQESACNCIGGDCYLMITDGSASGISKCRFLKIREGRIIKEILPTGRVEHTEECTCGFASNKTIECACRDNSYTAKRPFVKLNVETDTAEIRLMCTKTYLDTPRPDDGSIAGPCESNGDKWLGGIKGGFVHQRMASKIGRWYSRTMSKTNRMGMELYVKYDGDPWTDSDALTLSGVMVSIEEPGWYSFGFEIKDKKCDVPCIGIEMVHDGGKDTWHSAATAIYCLMGSGQLLWDTATGVDMAL

SEQ ID NO: 28991 - protein, 466 aa, Artificial Sequence
  derived and/or modified protein sequence (wt) from neuraminidase__InfluenzaB__AFH58550
MLPSTIQTLTLFLTSGGVLLSLYVSASLSYLLYSDILLKFSPTEITAPTMPLDCANASNVQAVNRSATKEMTLLLPEPEWTYPRLSCPGSTFQKALLISPHRFGETRGNSAPLTIREPFIACGPKECKHFALTHYAAQPGGYYNGTREDRNKLRHLISVKLGKIPTVENSIFHMAAWSGSACHDGREWTYIGVDGPDSNALIKIKYGEAYTDTYHSYANNILRTQESACNCIGGDCYLMITDGSASGISKCRFLKIREGRIIKEIFPTGRVEHTEECTCGFASNKTIECACRDNSYTAKRPFVKLNVETDTAEIRLMCTETYLDTPRPDDGSITGPCESNGDKGRGGIKGGFVHQRMASKIGRWYSRTMSKTERMGMELYVKYDGDPWTDSEALAPSGVMVSMEEPGWYSFGFEIKDKKCDVPCIGIEMVHDGGKKTWHSAATAIYCLMGSGQLLWDTVTGVDMAL

SEQ ID NO: 28992 - protein, 466 aa, Artificial Sequence; identical to SEQ ID NO: 28991
  derived and/or modified protein sequence (wt) from neuraminidase__InfluenzaB__AFH58561

SEQ ID NO: 28993 - protein, 466 aa, Artificial Sequence
  derived and/or modified protein sequence (wt) from neuraminidase__InfluenzaB__AFJ69969
MLPSTIQTLTLFLTSGGVLLSLYVSASLSYLLYSDILLKFSPTEITAPTMPLDCANASNVQAVNRSATKGVTLLLPEPEWTYPRLSCPGSTFQKALLISPHRFGETKGNSAPLIIREPFIACGPNECKHFALTHYAAQPGGYYNGTRGDRNKLRHLISVKLGKIPTVENSIFHMAAWSGSACHDGKEWTYIGVDGPDNNALLKVKYGEAYTDTYHSYANKILRTQESACNCIGGNCYLMITDGSASGVSECRFLKIREGRIIKEIFPTGRVKHTEECTCGFASNKTIECACRDNSYTAKRPFVKLNVETDTAEIRLMCTDTYLDTPRPNDGSITGPCESNGDKGSGGIKGGFVHQRMESKIGRWYSRTMSKTERMGMGLYVKYDGDPWTDSDALAFSGVMVSMKEPGWYSFGFEIKDKKCDVPCIGIEMVHDGGKETWHSAATAIYCLMGSGQLLWDTVTGVDMAL

SEQ ID NO: 28994 - protein, 466 aa, Artificial Sequence; identical to SEQ ID NO: 28956
  derived and/or modified protein sequence (wt) from neuraminidase__InfluenzaB__AFJ69971

SEQ ID NO: 28995 - protein, 466 aa, Artificial Sequence
  derived and/or modified protein sequence (wt) from neuraminidase__InfluenzaB__AFJ69973
MLPSTIQMLTLFLTSGGVLLSLYVSASLSYLLYSDILLKFSPTEITAPTMPLDCANASNVHAVNRSATKGVTFLLPEPEWTYPRLSCPGSTFQKALLISPHRFGETKGNSAPLIIREPFIACGPNECKHFALTHYAAQPGGYYNGTRGDRNKLRHLISVKLGKIPTVENSIFHMAAWSGSACHDGKEWTYIGVDGPDNNALLKIKYGEAYTDTYHSYANNILRTQESACNCIGGNCYLMITDGSASGVSACRFLKIREGRIIKEIFPTGRVKHTEECTCGFASNKTIECACRDNSYTAKRPFVKLNVETDTAEIRLMCTDTYLDTPRPDDGSITGPCESNGDKGSGGIKGGFVHQRMASKIGRWYSRTMSKTERKGMGLYVKYDGDPWTDSDALAFRGVMVSMKEPGWYSFGFEIKDKKCDVPCIGIEMVHDGGKETWHSAATAIYCLMGSGQLLWDTVTGVDMAL

SEQ ID NO: 28996 - protein, 466 aa, Artificial Sequence; identical to SEQ ID NO: 28817
  derived and/or modified protein sequence (wt) from neuraminidase__InfluenzaB__AFJ69975

SEQ ID NO: 28997 - protein, 466 aa, Artificial Sequence
  derived and/or modified protein sequence (wt) from neuraminidase__InfluenzaB__AFJ69979
MLPSTIQTLTLFLTSGGVLLSLYVSASLSYLLYSDILLKFSPTEITAPTMPLDCANTSNVQAVNHSATKGVTLLLPEPEWTYPRLSCPGSTFQKALLISPHRFGETKGNSAPLIIREPFIACGPNECKHFALTHYAAQPGGYYNGTRGDRNKLRHLISVKLGKIPTVENSIFHMAAWSGSACHDGKEWTYIGVDGPDNNALLKVKYGEAYTDTYHSYANKILRTQESACNCIGGNCYLMITDGSASGVSECRFLKIREGRIIKEIFPTGRVKHTEECTCGFASNKTIECACRDNSYTAKRPFVKLNVETDTAEIRLMCTDTYLDTPRPDDGSITGPCESNGDKGSGGIKGGFVHQRMESKIGRWYSRTMSKTERMGMGLYVKYDGDPWADSDALAFSGVMVSMKEPGWYSFGFEIKDKKCDVPCIGIEMVHDGGKETWHSAATAIYCLMGSGQLLWDTVTGVDMAL

SEQ ID NO: 28998 - protein, 466 aa, Artificial Sequence; identical to SEQ ID NO: 28956
  derived and/or modified protein sequence (wt) from neuraminidase__InfluenzaB__AFJ69981

SEQ ID NO: 28999 - protein, 466 aa, Artificial Sequence
  derived and/or modified protein sequence (wt) from neuraminidase__InfluenzaB__AFJ69983
MLPSTIQMLTLFLTSGGVLLSLYVSASLSYLLYSDILLKFSPTEITAPTMPLDCANASNVHAVNRSATKGVTFLLPEPEWTYPRLSCPGSTFQKALLISPHRFGETKGNSAPLIIREPFIACGPNECKHFALTHYAAQPGGYYNGTRGDRNKLRHLISVKLGKIPTVENSIFHMAAWSGSACHDGKEWTYIGVDGPDNNALLKIKYGEAYTDTYHSYANNILRTQESACNCIGGNCYLMITDGSASGVSECRFLKIREGRIIKEILPTGRVKHTEECTCGFASNKTIECACRDNSYTAKRPFVKLNVETDTAEIRLMCTDTYLDTPRPDDGSITGPCESNGGKGSGGIKGGFVHQRMASKIGRWYSRTMSKTERKGMGLYVKYDGDPWTDSDALAFRGVMVSMKEPGWYSFGFEIKDKKCDVPCIGIEMVHDGGKETWHSAATAIYCLMGSGQLLWDTVTGVDMAL

SEQ ID NO: 29000 - protein, 466 aa, Artificial Sequence
  derived and/or modified protein sequence (wt) from neuraminidase__InfluenzaB__AFJ69987
MLPSTIQTLTLFLTSGGVLLSLYVSASLSYLLYSDILLKFSPTEITAPTMPLDCANASNVQAVNRSATKGVTLLLPEPEWTYPRLSCPGSTFQKALLISPHRFGETKGNSAPLIIREPFIACGPNECKHFALTHYAAQPGGYYNGTRGDRNKLRHLISVKLGKIPTVENSIFHMAAWSGSACHDGKEWTYIGVDGPDNNALLKVKYGEAYTDTYHSYANKILRTQESACNCIGGNCYLMITDGSASGVSECRFLKIREGRIIKEIFPTGRVKHTEECTCGFASNKTIECACRDNRYTAKRPFVKLNVETDTAEIRLMCTDTYLDTPRPNDGSITGPCESDGDKGSGGTKGGFVHQRMKSKIGRWYSRTMSKTERMGMGLYVKYDGDPWADSDALTFSGVMVSMKEPGWYSFGFEIKDKKCDVPCIGIEMVHDGGKETWHSAATAIYCLMGSGQLLWDTVTGVDMAL

SEQ ID NO: 29001 - protein, 466 aa, Artificial Sequence
  derived and/or modified protein sequence (wt) from neuraminidase__InfluenzaB__AFJ76228
MLPSTIQTLTLFLTSGGVLLSLYVSASLSYLLYSGILLKFSPTEITAPTMPLNCANASNVQAVNRSATKGVTLLLPEPEWTYPRLSCPGSTFQKALLISPHRFGETKGNSAPLIIREPFIACGPKECKHFALTHYAAQPGGYYNGTREDRNKLRHLISVKLGKIPTVENSIFHMAAWSGSACHDGREWTYIGVDGPDSNALLKIKYGEAYTDTYHSYANNILRTQESACNCIGGDCYLMITDGSASGISECRFLKIREGRIIKEIFPTGRVEHTEECTCGFASNKTIECACRDNSYTAKRPFVKLNVETDTAEIRLMCTETYLDTPRPDDGSITGPCESNGDKGSGGIKGGFVHQRMASKIGRWYSRTMSKTKRMGMGLYVKYDGDPWIDSDALTLSGVMVSMEEPGWYSFGFEIKDKKCDVPCIGIEMVHDGGKKTWHSAATAIYCLMGSGQLLWDTVTGVDMAL

SEQ ID NO: 29002 - protein, 466 aa, Artificial Sequence; identical to SEQ ID NO: 28668
  derived and/or modified protein sequence (wt) from neuraminidase__InfluenzaB__AFJ76261

SEQ ID NO: 29003 - protein, 466 aa, Artificial Sequence
  derived and/or modified protein sequence (wt) from neuraminidase__InfluenzaB__AFJ76283
MLPSTIQTLTLFLTSGGVLLSLYVSASLSYLLYSDILLKFPPTEITAPTMPLDCANASNVQAVNRSATKGVTLLLPEPEWTYPRLSCPGSTFQKALLISPHRFGETKGNSAPLIIREPFIACGPKECKHFALTHYAAQPGGYYNGTRGDRNKLRHLISVKLGKIPTVENSIFHMAAWSGSACHDGKEWTYIGVDGPDNNALLKIKYGEAYTDTYHSYANNILRTQESACNCIGGNCYLMITDGSASGVSECRFLKIREGRIIKEIFPTGRIKHTEECTCGFASNKTIECACRDNSYTAKRPFVKLNVETDTAEIRLMCTETYLDTPRPDDGSITGPCESNGDKGSGGIKGGFVHQRMASKIGRWYSRTMSKTERMGMGLYVKYDGDPWADSDALTFSGVMVSMEEPGWYSFGFEIKDKKCDVPCIGIEMVHDGGKETWHSAATAIYCLMGSGQLLWDTVTGVNMAL

SEQ ID NO: 29004 - protein, 466 aa, Artificial Sequence
  derived and/or modified protein sequence (wt) from neuraminidase__InfluenzaB__AFJ76305
MLPSTIQTLTLFLTSGGVLLSLYVSASLSYLLYSDILLKFPSTEITAPTMPLDCANASNVQAVNRSATKGVTLLLPEPEWTYPRLSCPGSTFQRALLISPHRFGETKGNSAPLIIREPFIACGPKECKHFALTHYAAQPGGYYNGTRGDRNKLRHLISVKLGKIPTVENSIFHMAAWSGSACHDGKEWTYIGVDGPDNNALLKIKYGEAYTDTYHSYANNILRTQESACNCIGGNCYLMITDGSASGVSECRFLKIREGRIIKEIFPTGRIKHTEECTCGFASNKTIECACRDNSYTAKRPFVKLNVETDTAEIRLMCTETYLDTPRPDDGSITGPCESNGDKGSGGIKGGFVHQRMASKIGRWYSRTMSKTERMGMGLYVKYDGDPWADSDALTFSGVMVSMEEPGWYSFGFEIKDKKCDVPCIGIEMVHDGGKETWHSAATAIYCLMGSGQLLWDTVTGVDMAL

SEQ ID NO: 29005 - protein, 466 aa, Artificial Sequence
  derived and/or modified protein sequence (wt) from neuraminidase__InfluenzaB__AFJ76316
MLPSTIQTLTLFLTSGGVLLSLYVSASLSYLLYSDILLKFPSTEITAPTMPLDCANASNVQAVNRSATKGVTLLLPEPEWTYPRLSCPGSTFQKALLISPHRFGETKGNSAPLIIREPFIACGPKECKHFALTHYAAQPGGYYNGTRGDRNKLRHLISVKLGKIPTVENSIFHMAAWSGSACHDGKEWTYIGVDGPDNNALLKIKYGEAYTDTYHSYANNILRTQESACNCIGGNCYLMITDGSASGVSECRFLKIREGRIIKEIFPTGRIKHTEECTCGFASNKTIECACRDNSYTAKRPFVKLNVETDTAEIRLMCTETYLDTPRPDDGSITGPCESNGDKGSGGIKGGFVHQRMASKIGRWYSRTMSKTERMGMGLYVKYDGDPWADSDALTFSGVMVSMEEPGWYSFGFEIKDKKCDVPCIGIEMVHDGGKETWHSAATAIYCLMGSGQLLWDTVTGVNMAL

SEQ ID NO: 29006 - protein, 466 aa, Artificial Sequence; identical to SEQ ID NO: 28668
  derived and/or modified protein sequence (wt) from neuraminidase__InfluenzaB__AFJ76338

SEQ ID NO: 29007 - protein, 466 aa, Artificial Sequence
  derived and/or modified protein sequence (wt) from neuraminidase__InfluenzaB__AFJ77331
MLPSTIQTLTLFLTSGGVLLSLYVSASLSYLLYSDILLKFSQTEITAPIMPLDCANASNVQAVNHSAAKGVTLLLPEPEWTYPRLSCPGSTFQKALLISPHRFGETKGNSAPLIIREPFIACGPTECKHFALTHYAAQPGGYYNGTREDRNKLRHLISVKLGKIPTVENSIFHMAAWSGSACHDGKEWTYIGVDGPDSNALLKIKYGEAYTDTYHSYAKNILRTQESAYNCIGGDCYLMITDGPASGISECRFLKIREGRIIKEIFPTGRVKHTEECTCGFASNKTIECACRDNSYTAKRPFVKLNVETDTAEIRLMCTETYLDTPRPNDGSITGPCESDGDKGSGGIKGGFVHQRMASKIGRWYSRTMSKTKRMGMGLYVKYDGDPWTDSEALALSGVMVSMEEPGWYSFGFEIKDKKCDVPCIGIEMVHDGGKTTWHSAATAIYCLMGSGQLLWDTVTGVDMAL

SEQ ID NO: 29008 - protein, 466 aa, Artificial Sequence; identical to SEQ ID NO: 28743
  derived and/or modified protein sequence (wt) from neuraminidase__InfluenzaB__AFJ77351

SEQ ID NO: 29009 - protein, 466 aa, Artificial Sequence; identical to SEQ ID NO: 28635
  derived and/or modified protein sequence (wt) from neuraminidase__InfluenzaB__AFJ77362

SEQ ID NO: 29010 - protein, 466 aa, Artificial Sequence; identical to SEQ ID NO: 28788
  derived and/or modified protein sequence (wt) from neuraminidase__InfluenzaB__AFJ77384

SEQ ID NO: 29011 - protein, 466 aa, Artificial Sequence; identical to SEQ ID NO: 28710
  derived and/or modified protein sequence (wt) from neuraminidase__InfluenzaB__AFJ80132

SEQ ID NO: 29012 - protein, 466 aa, Artificial Sequence
  derived and/or modified protein sequence (wt) from neuraminidase__InfluenzaB__AFJ80143
MLPSTIQTLTLFLTSGGVLLSLYVSASLSYLLYSDILLKFSPTEITAPTMPLDCANASNVQAVNRSATKGVTLLLPEPEWTYPRLSCPGSTFQKALLISPHRFGETKGNSAPLIIREPFIACGPKECKHFALTHYAAQPGGYYNGTREDRNKLRHLISVKLGKIPTVENSIFHMAAWSGSACHDGREWTYIGVDGPDSNALLKIKYGEAYTDTYHSYANNILRTQESACNCIGGNCYLMITDGSASGISECRFLKIREGRIIKEIFPTGRVEHTEECTCGFASNKTIECACRDNSYTAKRPFVKLNVETDTAEIRLMCTETYLDTPRPDDGSITGPCESNGDKGSGGIKGGFVHQRMASKIGRWYSRTMSKTKRMGMGLYVKYDGDPWTDSDALALSGVMVSMEEPGWYSFGFEIKDKKCDVPCIGIEMVHDGGKKTWHSAATAIYCLMGSGQLLWDTVTGVDMAL

SEQ ID NO: 29013 - protein, 466 aa, Artificial Sequence
  derived and/or modified protein sequence (wt) from neuraminidase__InfluenzaB__AFJ80154
MLPSTIQTLTLFLTSGGVLLSLYVSASLSYLLYSDILLKFSPTEITAPTMPLDCANASNVQAVNRSATKGVTLLLPEPEWTYPRLSCPGSTFQKAILISPHRFGETKGNSAPLIIREPFIACGPKECKHFALTHYAAQPGGYYNGTREDRNKLRHLISVKLGKIPTVENSIFHMAAWSGSACHDGREWTYIGVDGPDSNALLKIKYGEAYTDTYHSYANNILRTQESACNCIGGNCYLMITDGSASGISECRFLKIREGRIIKEIFPTGRVEHTEECTCGFASNKTIECACRDNSYTAKRPFVKLNVETDTAEIRLMCTETYLDTPRPDDGSITGPCESNGDKGSGGIKGGFVHQRMASKIGRWYSRTMSKTKRMGMGLYVKYDGDPWTDSDALALSGVMVSMEEPGWYSFGFEIKDKKCDVPCIGIEMVHDGGKKTWHSAATAIYCLMGSGQLLWDTVTGVDMAL

SEQ ID NO: 29014 - protein, 466 aa, Artificial Sequence
  derived and/or modified protein sequence (wt) from neuraminidase__InfluenzaB__AFJ80165
MLPSTIQTLTLFLTSGGVLLSLYVSASLSYLLYSDILLKFSPTEITAPTIPLDCANASNVQAVNRSATKGVTLLLPEPEWTYPRLSCPGSTFQKALLISPHRFGEIKGNSAPLIIREPFIACGPKECKHFALTHYAAQPGGYYNGTREDRNKLRHLISVKLGKIPTVENSIFHMAAWSGSACHDGKEWTYIGVDGPDSNALLKIKYGEAYTDTYHSYANNILRTQESACNCIGGNCYLMITDGSASGISECRFLKIREGRIIKEIFPTGRVEHTEECTCGFASNKTIECACRDNSYTAKRPFVKLNVETDTAEIRLMCTETYLDTPRPDDGSITGPCESNGDKGSGGIKGGFVHQRMASKIGRWYSRTMSKTKRMGMGLYVKYDGDPWTDSDALALSGVMVSMEEPGWYSFGFEIKDKKCDIPCIGIEMVHDGGKETWHSAATAIYCLMGSGQLLWDTVTGVDMAL

SEQ ID NO: 29015 - protein, 466 aa, Artificial Sequence
  derived and/or modified protein sequence (wt) from neuraminidase__InfluenzaB__AFJ80176
MLPSTIQTLTLFLTSGGVLLSLYVSASLSYLLYSDILLKFSPTEITVPTMPLDCANASNVQAVNRSATKGVTLLLPEPEWTYPRLSCPGSTFQKALLISPHRFGETKGNSAPLIIREPFIACGPKECKHFALTHYAAQPGGYYNGTREDRNKLRHLISVKLGKIPTVENSIFHMAAWSGSACHDGREWTYIGVDGPDSNALLKIKYGEAYTDTYHSYANNILRTQESACNCIGGNCYLMITDGSASGISECRFLKIREGRIIKEIFPTGRVEHTEECTCGFASNKTIECACRDNSYTAKRPFVKLNVETDTAEIRLMCTETYLDTPRPDDGSITGPCESNGDKGSGGIKGGFVHQRMASKIGRWYSRTMSKTKRMGMGLYVKYDGDPWTDSDALALSGVMVSMEEPGWYSFGFEIKDKKCDVPCIGIEMVHDGGKKTWHSAATAIYCLMGSGQLLWDTVTGVDMAL

SEQ ID NO: 29016 - protein, 466 aa, Artificial Sequence
  derived and/or modified protein sequence (wt) from neuraminidase__InfluenzaB__AFJ80187
MLPSTIQTLTLFLTSGGVLLSLYVSASLSYLLYSGILLKFSPTEITAPTMPLNCANASNFQAVNRSATKGVTLLLPEPEWTYPRLSCPGSTFQKALLISPHRFGETKGNSAPLIIREPFIACGPKECKHFALTHYAAQPGGYYNGTREDRNKLRHLISVKLGKIPTVENSIFHMAAWSGSACHDGREWTYIGVDGPDSNALLKIKYGEAYTDTYHSYANNILRTQESACNCIGGDCYLMITDGSASGISECRFLKIREGRIIKEIFPTGRVEHTEECTCGFASNKTIECACRDNSYTAKRPFVKLNVETDTAEIRLMCTETYLDTPRPDDGSITGPCESNGDKGSGGIKGGFVHQRMASKIGRWYSRTMSKTKRMGMGLYVKYDGDPWIDSDALTLSGVMVSMEEPGWYSFGFEIKDKKCDVPCIGIEMVHDGGKKTWHSAATAIYCLMGSGQLLWDTVTGVDMAL

SEQ ID NO: 29017 - protein, 466 aa, Artificial Sequence; identical to SEQ ID NO: 29012
  derived and/or modified protein sequence (wt) from neuraminidase__InfluenzaB__AFJ80198

SEQ ID NO: 29018 - protein, 466 aa, Artificial Sequence; identical to SEQ ID NO: 28640
  derived and/or modified protein sequence (wt) from neuraminidase__InfluenzaB__AFJ80220

SEQ ID NO: 29019 - protein, 466 aa, Artificial Sequence
  derived and/or modified protein sequence (wt) from neuraminidase__InfluenzaB__AFJ80231
MLPSTIQTLTLFLTSGGVLLSLYVSASLSYLLYSGILLKFSLTEITAPTMPLNCANASNVQAVNRSATKGVTLFLPEPEWTYPRLSCPGSTFQKALLISPHRFGETKGNSAPLIIREPFIACGPKECKHFALTHYAAQPGGYYNGTREDRNKLRHLISVELGKIPTVENSIFHMAAWSGSACHDGKEWTYIGVDGPDSNALLKIKYGEAYTDTYHSYANNILRTQESACNCIGGDCYLMITDGSASGISECRFLKIREGRIIKEIFPTGRVEHTEECTCGFASNKTIECACRDNSYTAKRPFVKLNVETDTAEIRLMCTETYLDTPRPDDGSITGPCESNGDKGSGGIKGGFVHQRMASKIGRWYSRTMSKTKRMGMGLYVKYDGDPWIDSDALTLSGVMVSMEEPGWYSFGFEIKDKKCDVPCIGIEMVHDGGKKTWHSAATAIYCLMGSGQLLWDTVTGVDMAL

SEQ ID NO: 29020 - protein, 466 aa, Artificial Sequence
  derived and/or modified protein sequence (wt) from neuraminidase__InfluenzaB__AFJ80242
MLPSTIQTLTLFLTSGGVLLSLYVSALLSYLLYSDILLKFSPTKVIAPTMSLDCANASNVQAVNHSATEEMTFLLPEPEWTYPRLSCQGSTFQKALLISPHRFGEAKGNSAPLIIREPFIACGPKECKHFALTHYAAQPGGYYNGTREDRNKLRHLISVNLGKIPTVENSIFHMAAWSGSACHDGREWTYIGVDGPDSNALIKIKYGEAYTDTYHSYANNILRTQESACNCIGGDCYLMITDGSASGISRCRFLKIREGRIIKEIFPTGRVEHTEECTCGFASNKTIECACRDNSYTAKRPFVKLNVETDTAEIRLMCTETYLDTPRPDDGSITGPCESNGDKGNGGIKGGFVHQRMASRIGRWYSRTMSKTKRMGMELYVKYDGDPWTDSDALAPSGVMVSMEEPGWYSFGFEIKDKKCDVPCIGIEMVHDGGKTTWHSAATAIYCLMGSGQLLWDTVTGVDMAL

SEQ ID NO: 29021 - protein, 466 aa, Artificial Sequence
  derived and/or modified protein sequence (wt) from neuraminidase__InfluenzaB__AFJ80660
MLPSTIQTLTLFLTSGGVLLSLYVSASLSYLLYSDILLKFSPTEITAPTMPLDCANASNVQAVNRSATKGVTLLLPEPEWTYPRLSCPGSTFQKALLISPHRFGETKGNSAPLIIREPFIACGPKECKHFALTHYAAQPGGYYNGTREDRNKLRHLISVKLGKIPTVENSIFHMAAWSGSACHDGREWTYIGVDGPDSNALLKIKYGEAYTDTYHSYANNILRTQESACNCIGGDCYLMITDGSASGISECRFLKIREGRIIKEIFPTGRVEHTEECTCGFASNKTIECACRDNSYTAKRPFVKLNVETDTAEIRLMCTETYLDTPRPDDGSITGPCESNGDKGSGGIKGGFVHQRMTSKIGRWYSRTMSKTKRMGMGLYVKYDGDPWTDSDALALSGVMVSMEEPGWYSFGFEIKDKKCDVPCIGIEMVHDGGKKTWHSAATAIYCLMGSGQLLWDTVTGVDMAL

SEQ ID NO: 29022 - protein, 466 aa, Artificial Sequence; identical to SEQ ID NO: 29019
  derived and/or modified protein sequence (wt) from neuraminidase__InfluenzaB__AFJ80671

SEQ ID NO: 29023 - protein, 466 aa, Artificial Sequence; identical to SEQ ID NO: 29019
  derived and/or modified protein sequence (wt) from neuraminidase__InfluenzaB__AFJ80682

SEQ ID NO: 29024 - protein, 466 aa, Artificial Sequence
  derived and/or modified protein sequence (wt) from neuraminidase__InfluenzaB__AFJ80693
MLPSTIQTLTLFLTSGGVLLSLYVSASLSYLLYSGILLKFSPTEITAPTMPLNCANASNVQAVNRSATKGVTLLLPEPEWTYPRLSCPGSTFQKALLISPHRFGETKGNSAPLIIREPFIACGPKECKHFALTHYAAQPGGYYNGTREDRNKLRHLISVKLGKIPTVENSIFHMAAWSGSACHDGREWTYIGVDGPDSNALLKIKYGEAYTDTYHSYANNILRTQESACNCIGGDCYLMITDGSASGISECRFLKIREGRIIKEIFPTGRVEHTEECTCGFASNKTIECACRDNSYTAKRPFVKLNVETDTAEIRLMCTETYLDTPRPDDGSITGPCESHGDKGSGGIKGGFVHQRMASKIGRWYSRTMSKTKRMGMGLYVKYDGDPWIDSGALTLSGVMVSMEEPGWYSFGFEIKDKKCDVPCIGIEMVHDGGKKTWHSAATAIYCLMGSGQLLWDTVTGVDMAL

SEQ ID NO: 29025 - protein, 466 aa, Artificial Sequence
  derived and/or modified protein sequence (wt) from neuraminidase__InfluenzaB__AFJ80726
MLPSTIQTLTLFLTSGGVLLSLYVSASLSYLLYSDILLKFSQTEITAPTMPLDCANASNVQAVNRSATKGVTLLLPEPEWTYPRLSCPGSTFQKALLISPHRFGETKGNSAPLIIREPFIACGPKECKHFALTHYAAQPGGYYNGTREDRNKLRHLISVKLGKIPTVENSIFHMAAWSGSACHDGREWTYIGVDGPDSNALLKIKYGEAYTDTYHSYAKNILRTQESACNCIGGDCYLMITDGSASGISECRFLKIREGRIIKEIFPTGRVKHTEECTCGFASNKTIECACRDNSYTAKRPFVKLNVETDTAEIRLMCTETYLDTPRPNDGSITGPCESNGDRGGGGIKGGFVHQRMASKIGRWYSRTMSKTKRMGMGLYVKYDGDPWTDSEALALSGVMVPMEEPGWYSFGFEIKDKKCDVPCIGIEMVHDGGKTTWHSAATAIYCLMGSGQLLWDTVTGVDMAL

SEQ ID NO: 29026 - protein, 466 aa, Artificial Sequence
  derived and/or modified protein sequence (wt) from neuraminidase__InfluenzaB__AFJ80737
MLPSTIQTLTLFLTSGGVLLSLYVSASLSYLLYSDILLKFSQTEITAPIMPLDCANASNVQAVNRSATKGVTLLLPEPEWTYPRLSCPGSTFQKALLISPHRFGETKGNSAPLIIREPFIACGPKECKHFALTHYAAQPGGYYNGTREDRNKLRHLISVKLGKIPTVENSIFHMAAWSGSACHDGREWTYIGVDGPDSNALLKIKYGEAYTDTYHSYAKNILRTQESACNCIRGDCYLMITDGPASGISECRFLKIREGRIIKEIFPTGRVKHTEECTCGFASNKTIECACRDNSYTAKRPFVKLNVETDTAEIRLMCTETYLDTPRPNDGSITGPCESNGDKGSGGIKGGFVHQRMASKIGRWYSRTMSKTKRMGMGLYVKYDGDPWTDSEALALSGVMVSMEEPGWYSFGFEIKDKKCDVPCIGIEMVHDGGKTTWHSAATAIYCLMGSGQLLWDTVTGVDMAL

SEQ ID NO: 29027 - protein, 466 aa, Artificial Sequence; identical to SEQ ID NO: 28668
  derived and/or modified protein sequence (wt) from neuraminidase__InfluenzaB__AFJ80759

SEQ ID NO: 29028 - protein, 466 aa, Artificial Sequence
  derived and/or modified protein sequence (wt) from neuraminidase__InfluenzaB__AFJ80770
MLPSTIQTLTLFLTSGGVLLSLYVSASLSYLLYSDILLKFSQTEITAPTMPLDCANASNVQAVNRSATKGVTLLLPEPEWTYPRLSCPGSTFQKALLISPHRFGETKGNSAPLIIREPFIACGPNECKHFALTHYAAQPGGYYNGTREDRNKLRHLISVKLGKIPTVENSIFHMAAWSGSACHDGREWTYIGVDGPDSNALLKIKYGEAYTDTYHSYAKNILRTQESACNCIGGDCYLMITDGPASGISECRFLKIREGRIIKEIFPTGRVKHTEECTCGFASNKTIECACRDNSYTAKRPFVKLDVETDTAEIRLMCTETYLDTPRPNDGSITGPCESNGDKGSGGIKGGFVHQRMASKIGRWYSRTLSKTKRMGMGLYVKYDGDPWTDSEALALSGVMVSMEEPGWYSFGFEIKDKKCDVPCIGIEMVHDGGKTTWHSAATAIYCLMGSGQLLWDTVTGVDMAL

SEQ ID NO: 29029 - protein, 466 aa, Artificial Sequence; identical to SEQ ID NO: 28668
  derived and/or modified protein sequence (wt) from neuraminidase__InfluenzaB__AFJ80785

SEQ ID NO: 29030 - protein, 466 aa, Artificial Sequence; identical to SEQ ID NO: 28668
  derived and/or modified protein sequence (wt) from neuraminidase__InfluenzaB__AFJ80796

SEQ ID NO: 29031 - protein, 466 aa, Artificial Sequence
  derived and/or modified protein sequence (wt) from neuraminidase__InfluenzaB__AFJ80807
MLPSTIQTLTLFLTSGGVLLSLYVSVSLSYLLYSDILLKFPSTEITAPTMPLDCANASNVQAVNRSATKGVTLLLPEPEWTYPRLSCPGSTFQKALLISPHRFGETKGNSAPLIIREPFIACGPKECKHFALTHYAAQPGGYYNGTRGDRNKLRHLISVKLGKIPTVENSIFHMAAWSGSACHDGKEWTYIGVDGPDNNALLKIKYGEAYTDTYHSYANNILRTQESACNCIGGNCYLMITDGSASGVSECRFLKIREGRIIKEIFPTGRIKHTEECTCGFASNKTIECACRDNSYTAKRPFVKLNVETDTAEIRLMCTETYLDTPRPDDGSITGPCESNGDKGSGGIKGGFVHQRMASKIGRWYSRTMSKTKRMGMGLYVKYDGDPWADSDALAFSGVMVSMEEPGWYSFGFEIKDKKCDVPCIGIEMVHDGGKETWHSAATAIYCLMGSGQLLWDTVTGVNMAL

SEQ ID NO: 29032 - protein, 466 aa, Artificial Sequence; identical to SEQ ID NO: 28668
  derived and/or modified protein sequence (wt) from neuraminidase__InfluenzaB__AFJ80818

SEQ ID NO: 29033 - protein, 466 aa, Artificial Sequence; identical to SEQ ID NO: 28668
  derived and/or modified protein sequence (wt) from neuraminidase__InfluenzaB__AFJ80829

SEQ ID NO: 29034 - protein, 466 aa, Artificial Sequence; identical to SEQ ID NO: 29005
  derived and/or modified protein sequence (wt) from neuraminidase__InfluenzaB__AFJ80840

SEQ ID NO: 29035 - protein, 466 aa, Artificial Sequence; identical to SEQ ID NO: 29005
  derived and/or modified protein sequence (wt) from neuraminidase__InfluenzaB__AFJ80851

SEQ ID NO: 29036 - protein, 466 aa, Artificial Sequence
  derived and/or modified protein sequence (wt) from neuraminidase__InfluenzaB__AFJ80862
MLPSTIQTLTLFLTSGGVLLSLYVSASLSYLLYSDILLKFPSTEITAPTMPLDCANASNVQAMNRSATKGVTLLLPETEWTYPRLSCPGSTFQKALLISPHRFGETKGNSAPLIIREPFIACGPKECKHFALTHYAAQPGGYYNGTRGDRNKLRHLISVKLGKIPTVENSIFHMAAWSGSACHDGKEWTYIGVDGPDNNALLKIKYGEAYTDTYHSYANNILRTQESACNCIGGNCYLMITDGSASGVSECRFLKIREGRIIKEIFPTGRIKHTEECTCGFASNKTIECACRDNSYTAKRPFVKLNVETDTAEIRLMCTETYLDTPRPDDGSITGPCESNGDKGSGGIKGGFVHQRMASKIGRWYSRTMSKTERMGMGLYVKYDGDPWADSDALTFSGVMVSMEEPGWYSFGFEIKDKKCDVPCIGIEMVHDGGKETWHSAATAIYCLMGSGQLLWDTVTGVNMAL

SEQ ID NO: 29037 - protein, 466 aa, Artificial Sequence
  derived and/or modified protein sequence (wt) from neuraminidase__InfluenzaB__AFJ80873
MLPSTIQTLTLFLTSGGVLLSLYVSASLSHLLYSGILLKFPSTEITAPTMPLDCANASNVQAVNRSATKGVTLLPPEPEWTYPRLSCPGSTFQKALLISPHRFGETKGNSAPLIIREPFIACGPKECKHFALTHYAAQPGGYYNGTRGDRNKLRHLISVKLGKIPTVENSIFHMAAWSGSACHDGKEWTYIGVDGPDNNALLKIKYGEAYTDTYHSYANNILRTQESACNCIGGNCYLMITDGSASGVSECRFLKIREGRIIKEIFPTGRIKHTEECTCGFASNKTIECACRDNSYTAKRPFVKLNVETDTAEIRLMCTETYLDTPRPDDGSITGPCESNGDKGSGGIKGGFVHQRMASKIGRWYSRTMSKTERMGMGLYVKYDGDPWADSDALTFSGVMVSMEEPGWYSFGFEIKDKKCDVPCIGIEMVHDGGKETWHSAATAIYCLMGSGQLLWDTVTGVNMAL

SEQ ID NO: 29038 - protein, 466 aa, Artificial Sequence
  derived and/or modified protein sequence (wt) from neuraminidase__InfluenzaB__AFJ80884
MLPSTIQTLTLFLTSGGVLLSLYVSASLSYLLYSDILLKFPSTEITAPTMPLDCANASNVQAVNRSATKGVTLLLPEPEWTYPRLSCPGSTFQKALLISPHRFGETKGNSAPLIIREPFIACGPKECKHFALTHYAAQPGGYYNGTRGDRNKLRHLISVKLGKIPTVENSIFHMAAWSGSACHDGKEWTYIGVDGPDNNALLKIKYGEAYTDTYHSYANNILRTQESACNCIGGNCYLMITDGSASGVSKCRFLKIREGRIIKEIFPTGRIKHTEECTCGFASNKTIECACRDNSYTAKRPFVKLNVETDTAEIRLMCTETYLDTPRPDDGSITGPCESNGDKGSGGIKGGFVHQRMASKIGRWYSRTMSKTERMGMGLYVKYDGDPWADSDALTFSGVMVSMEEPGWYSFGFEIKDKKCDVPCIGIEMVHDGGKETWHSAATAIYCLMGSGQLLWDTVTGVNMAL

SEQ ID NO: 29039 - protein, 466 aa, Artificial Sequence; identical to SEQ ID NO: 29004
  derived and/or modified protein sequence (wt) from neuraminidase__InfluenzaB__AFJ80895

SEQ ID NO: 29040 - protein, 466 aa, Artificial Sequence
  derived and/or modified protein sequence (wt) from neuraminidase__InfluenzaB__AFJ80917
MLPSTIQTLTLFLTSGGVLLSLYVSASLSYLLYSDILLKFPSTEITAPTMPLDCANASNVQAVNRSATKGVTLLLPEPEWTYPRLSCPGSTFQKALLISPHRFGETKGNSAPLIIREPFIACGPKECKHFALTHYAAQPGGYYNGTRGDRNKLRHLISVKLGKIPTVENSIFHMAAWSGSACHDGKEWTYIGVDGPDNNALLKIKYGEAYTDTYHSYANNILRTQESACNCIGGNCYLMITDGSASGVSECRFLKIREGRIIKEIFPTGRIKHTEECTCGFASNKTIECTCRDNSYTAKRPFVKLNVETDTAEIRLMCTETYLDTPRPDDGSITGPCESNGDKGSGGIKGGFVHQRMASKIGRWYSRTMSKTERMGMGLYVKYDGDPWADSDALTFSGVMVSMEEPGWYSFGFEIKDKKCDVPCIGIEMVHDGGKETWHSAATAIYCLMGSGQLLWDTVTGVNMAL

SEQ ID NO: 29041 - protein, 466 aa, Artificial Sequence
  derived and/or modified protein sequence (wt) from neuraminidase__InfluenzaB__AFJ80928
MLPSTIQTLTLFLTSGGVLLSLYVSASLSYLLYSDILLKFPSTEITAPTMPLDCANASNVQAVNRSATKGVTLLLPEPEWTYPRLSCPGSTFQKALLISPHRFGETKGNSAPLIIREPFIACEPKECKHFALTHYAAQPGGYYNGTRGDRNKLRHLISVKLGKIPTVENSIFHMAAWSGSACHDGKEWTYIGVDGPDNNALLKIKYGEAYTDTYHSYANNILRTQESACNCIGGNCYLMITDGSASGVSECRFLKIREGRIIKEIFPTGRIKHTEECTCGFASNKTIECACRDNSYTAKRPFVKLNVETDTAEIRLMCTETYLDTPRPDDGSITGPCESNGDKGSGGIKGGFVHQRMASKIGRWYSRTMSKTERMGMGLYVKYDGDPWADSDALTFSGVMVSMEEPGWYSFGFEIKDKKCDVPCIGIEMVHDGGKETWHSAATAIYCLMGSGQLLWDTVTGVNMAL

SEQ ID NO: 29042 - protein, 466 aa, Artificial Sequence
  derived and/or modified protein sequence (wt) from neuraminidase__InfluenzaB__AFJ80939
MLPSTIQTLTLFLTSGGVLLSLYVSASLSYLLYSDILLKFPPTEVTAPTMPLDCANASNVQAVNRSATKGVTLLLPEPEWTYPRLSCPGSTFQKALLISPHRFGETKGNSAPLIIREPFIACGPKECKHFALTHYAAQPGGYYNGTRGDRNKLRHLISVKLGKIPTVENSIFHMAAWSGSACHDGKEWTYIGVDGPDNNALLKIKYGEAYTDTYHSYANNILRTQESACNCIGGNCYLMITDGSASGVSECRFLKIREGRIIKEIFPTGRIKHTEECTCGFASNKTIECACRDNSYTAKRPFVKLNVETDTAEIRLMCTETYLDTPRPDDGSITGPCESNGDKGSGGIKGGFVHQRMASKIGRWYSRTMSKTERMGMGLYVKYDGDPWADSDALTFSGVMVSMEEPGWYSFGFEIKDKKCDVPCIGIEMVHDGGKETWHSAATAIYCLMGSGQLLWDTVTGVNMAL

SEQ ID NO: 29043 - protein, 466 aa, Artificial Sequence
  derived and/or modified protein sequence (wt) from neuraminidase__InfluenzaB__AFJ80950
MLPSTIQTLTLFLTSGGVLLSLYVSASLSYLLYSDILLKFSQTEITAPIMPLDCANASNVQAVNRSAAKGVTLLLPEPEWTYPRLSCPGSTFQKALLISPHRFGETKGNSAPLIIREPFIACGPTECKHFALTHYAAQPGGYYNGTREDRNKLRHLISVKLGKIPTVENSIFHMAAWSGSACHDGKEWTYIGVDGPDSNALLKIKYGEAYTDTYHSYAKNILRTQESACNCIGGDCYLMITDGPASGISECRFLKIREGRIIKEIFPTGRVKHTEECTCGFASNKTIECACRDNSYTAKRPFVKLNVETDTAEIRLMCTETYLDTPRPNDGSITGPCESDGDKGNGGIKGGFVHQRMASKIGRWYSRTMSKTKRMGMGLYVKYDGDPWTDSEALALSGVMVSMEEPGWYSFGFEIKDKKCDVPCIGIEMVHDGGKTTWHSAATAIYCLMGSGQLLWDTVTGVDMAL

SEQ ID NO: 29044 - protein, 466 aa, Artificial Sequence; identical to SEQ ID NO: 29005
  derived and/or modified protein sequence (wt) from neuraminidase__InfluenzaB__AFJ80961

SEQ ID NO: 29045 - protein, 466 aa, Artificial Sequence; identical to SEQ ID NO: 28788
  derived and/or modified protein sequence (wt) from neuraminidase__InfluenzaB__AFJ80972

SEQ ID NO: 29046 - protein, 466 aa, Artificial Sequence; identical to SEQ ID NO: 28788
  derived and/or modified protein sequence (wt) from neuraminidase__InfluenzaB__AFJ80983

SEQ ID NO: 29047 - protein, 466 aa, Artificial Sequence; identical to SEQ ID NO: 28743
  derived and/or modified protein sequence (wt) from neuraminidase__InfluenzaB__AFJ80994

SEQ ID NO: 29048 - protein, 466 aa, Artificial Sequence; identical to SEQ ID NO: 28788
  derived and/or modified protein sequence (wt) from neuraminidase__InfluenzaB__AFJ81005

SEQ ID NO: 29049 - protein, 466 aa, Artificial Sequence; identical to SEQ ID NO: 28788
  derived and/or modified protein sequence (wt) from neuraminidase__InfluenzaB__AFJ84364

SEQ ID NO: 29050 - protein, 466 aa, Artificial Sequence
  derived and/or modified protein sequence (wt) from neuraminidase__InfluenzaB__AFJ90399
MLPSTIQTLTLFLTSGGVLLSLYVSASLSYLLYSDILLKFPSTEITAPPMPLDCANASNVQAVNRSATKGVTLLLPEPEWTYPRLSCPGSTFQRALLISPHRFGETKGNSAPLIIREPFIACGPRECKHFALTHYAAQPGGYYNGTRGDRNKLRHLISVKLGKIPTVENSIFHMAAWSGSACHDGKEWTYIGVDGPDNNALLKIKYGEAYTDTYHSYANNILRTQESACNCIGGNCYLMITDGSASGVSECRFLKIREGRIIKEIFPTGRIKHTEECTCGFASNKTIECACRDNSYTAKRPFVKLNVETDTAEIRLMCTETYLDTPRPDDGSITGPCESNGDKGSGGIKGGFVHQRMTSKIGRWYSRTMSKTERMGMGLYVKYDGDPWADSDALTFSGVMVSMEEPGWYSFGFEIKDKKCDVPCIGIEMVHDGGKETWHSAATAIYCLMGSGQLLWDTVTGVNMAL

SEQ ID NO: 29051 - protein, 466 aa, Artificial Sequence
  derived and/or modified protein sequence (wt) from neuraminidase__InfluenzaB__AFJ90410
MLPSTIQTLTLFLTSGGVLLSLYVSASLSYLLYSDILLKFSQTEITAPIMPLDCANASNVQAVNRSAAKGVTLLLPKPEWTYPRLSCPGSTFQKALLISPHRFGETKGNSAPLIIREPFIACGPTECKHFALTHYAAQPGGYYNGTREDRNNLRHLISVKLGKIPTVENSIFHMAAWSGSACHDGKEWTYIGVDGPDSNALLKIKYGEAYTDTYHSYAKNILRTQESACNCIGGDCYLMITDGPASGISECRFLKIREGRIIKEIFPTGRVKHTEECTCGFASNKTIECACRDNSYTAKRPFVKLNVETDTAEIRLMCTETYLDTPRPNDGSITGPCESDGDKGSGGIKGGFVHQRMASKIGRWYSRTMSKTKRMGMGLYVKYDGDPWTDSEALALSGVMVSMEEPGWYSFGFEIKDKKCDVPCIGIEMVHDGGKTTWHSAATAIYCLMGSGQLLWDTVTGVDMAL

SEQ ID NO: 29052 - protein, 466 aa, Artificial Sequence
  derived and/or modified protein sequence (wt) from neuraminidase__InfluenzaB__AFJ90432
MLPSTIQTLTLFLTSGGVLLSLYVSTSLSYLLYSDILLKFSQTEITAPIMPLDCANASNVQAVNRSAAKGVTLLLPEPEWTYPRLSCPGSTFQKALLISPHRFGETKGNSAPLIIREPFIACGPTECKHFALTHYAAQPGGYYNGTREDRNKLRHLISVKLGKIPTVENSIFHMAAWSGSACHDGKEWTYIGVDGPDSNALLKIKYGEAYTDTYHSYAKNILRTQESACNCIGGDCYLMITDGPASGISECRFLKIREGRIIKEIFPTGRVKHTEECTCGFASNKTIECACRDNSYTAKRPFVKLNVETDTAEIRLMCTETYLDTPRPNDGSITGPCESDGDKGSGGIKGGFVHQRMASKIGRWYSRTMSKTKRMGMGLYVKYDGDPWTDSEALALSGVMVSMEEPGWYSFGFEIKDKKCDVPCIGIEMVHDGGKTTWHSAATAIYCLMGSGQLLWDTVTGVDMAL

SEQ ID NO: 29053 - protein, 466 aa, Artificial Sequence; identical to SEQ ID NO: 28972
  derived and/or modified protein sequence (wt) from neuraminidase__InfluenzaB__AFJ90443

SEQ ID NO: 29054 - protein, 466 aa, Artificial Sequence
  derived and/or modified protein sequence (wt) from neuraminidase__InfluenzaB__AFJ90454
MLPSTIQTLTLFLTSGGVLLSLYVSASLSYLLYSDILLKFSQTEITAPIVPLDCANASNVQAVNRSAAKGVTLLLPEPEWTYPRLSCPGSTFQKALLISPHRFGETKGNSAPLIIREPFIACGPTECKHFALTHYAAQPGEYYNGTREDRNKLRHLISVKLGKIPTVENSIFHMAAWSGSACHDGKEWTYIGVDGPDSNALLKIKYGEAYTDTYHSYAKNILRTQESACNCIGGDCYLMITDGPASGISECRFLKIREGRIIKEIFPTGRVKHTEECTCGFASNKTIECACRDNSYTAKRPFVKLNVETDTAEIRLMCTETYLDTPRPNDGSITGPCESDGDKGSGGIKGGFVHQRMASKIGRWYSRTMSKTKRMGMGLYVKYDGDPWTDSEALALSGVMVSMEEPGWYSFGFEIKDKKCDVPCIGIEMVHDGGKTTWHSAATAIYCLMGSGQLLWDTVTGVDMAL

SEQ ID NO: 29055 - protein, 466 aa, Artificial Sequence
  derived and/or modified protein sequence (wt) from neuraminidase__InfluenzaB__AFJ91042
MLPSTIQTLTLFLTSGGVLLSLYVSASLSYLLYSDILLKFSQTEITAPIMPLDCANASNVQAVNRSAAKGVTLLIPEPEWTYPRLSCPGSTFQKALLISPHRFGETKGNSAPLIIREPFIACGPTECKHFALTHYAAQPGGYYNGTREDRNKLRHLISVKLGKIPTVENSIFHMAAWSGSACHDGKEWTYIGVDGPDSNALLKIKYGEAYTDTYHSYAKNILRTQESACNCIGGDCYLMITDGPASGISECRFLKIREGRIIKEIFPTGRVKHTEECTCGFASNKTIECACRDNSYTAKRPFVKLNVETDTAEIRLMCTETYLDTPRPNDGSIAGPCESDGDKGSGGIKGGFVHQRMTSKIGRWYSRTMSKTKRMGMGLYVKYDGDPWTDSEALALSGVMVSMEEPGWYSFGFEIKDKKCDVPCIGIEMVHDGGKTTWHSAATAIYCLMGSGQLLWDTVTGVDMAL

SEQ ID NO: 29056 - protein, 466 aa, Artificial Sequence
  derived and/or modified protein sequence (wt) from neuraminidase__InfluenzaB__AFJ91053
MLPSTIQTLTLFLTSGGVLLSLYVSASLSYLLYSDILLKFSQTEITAPIMPLDCANASNVQAVNRSAAKEVTLLLPEPEWTYPRLSCPGSTFQKALLISPHRFGETKGNSAPLIIREPFIACGPTECKHFALTHYAAQPGGYYNGTREDRNKLRHLISVKLGKIPTVENSIFHMAAWSGSACHDGKEWTYIGVDGPDSNALLKIKYGEAYTDTYHSYAKNILRTQESACNCIGGDCYLMITDGPASGISECRFLKIREGRIIKEIFPTGRVKHTEECTCGFASNKTIECACRDNSYTAKRPFVKLNVETDTAEIRLMCTETYLDTPRPNDGSITGPCESDGDKGSGGIKGGFVHQRMASKIGRWYSRTMSKTKRMGMGLYVKYDGDPWTDSEALALSGVMVSMEEPGWYSFGFEIKDKKCDVPCIGIEMVHDGGKTTWHSAATAIYCLMGSGQLLWDTVTGVDMAL

SEQ ID NO: 29057 - protein, 466 aa, Artificial Sequence
  derived and/or modified protein sequence (wt) from neuraminidase__InfluenzaB__AFJ91075
MLPSTIQTLTLFLTSGGVLLSLYVSASLSYLLYSDILLKFSQTEITAPIMPLDCANASNVQAVNRSAAKGVTLLLPEPEWTYPRLSCPGSTFQKALLISPHRFGETKGNSAPLIIREPFIACGPTECKHFALTHYAAQPGGYYNGTREDRNKLRHLISVKLGKIPTVENSIFHMAAWSGSACHDGKEWTYIGVDGPDSNTLLKIKYGEAYTDTYHSYAKNILRTQESACNCIGGDCYLMITDGPASGISECRFLKIREGRIIKEIFPTGRVKHTEECTCGFASNKTIECACRDNSYTAKRPFVKLNVETDTAEIRLMCTETYLDTPRPNDGSITGPCESDGDKGSGGIKGGFVHQRMASKIGRWYSRTMSKTKRMGMGLYVKYDGDPWTDSEALALSGVMVSMEEPGWYSFGFEIKDKKCDVPCIGIEMVHDGGKTTWHSAATAIYCLMGSGQLLWDTVTGVDMAL

SEQ ID NO: 29058 - protein, 466 aa, Artificial Sequence; identical to SEQ ID NO: 28817
  derived and/or modified protein sequence (wt) from neuraminidase__InfluenzaB__AFJ91086

SEQ ID NO: 29059 - protein, 466 aa, Artificial Sequence; identical to SEQ ID NO: 28817
  derived and/or modified protein sequence (wt) from neuraminidase__InfluenzaB__AFJ91097

SEQ ID NO: 29060 - protein, 466 aa, Artificial Sequence; identical to SEQ ID NO: 28817
  derived and/or modified protein sequence (wt) from neuraminidase__InfluenzaB__AFJ91108

SEQ ID NO: 29061 - protein, 466 aa, Artificial Sequence; identical to SEQ ID NO: 28817
  derived and/or modified protein sequence (wt) from neuraminidase__InfluenzaB__AFJ91119

SEQ ID NO: 29062 - protein, 466 aa, Artificial Sequence; identical to SEQ ID NO: 28668
  derived and/or modified protein sequence (wt) from neuraminidase__InfluenzaB__AFJ91707

SEQ ID NO: 29063 - protein, 466 aa, Artificial Sequence
  derived and/or modified protein sequence (wt) from neuraminidase__InfluenzaB__AFK09801
MLPSTIQTLTLFLTSGGVLLSLYVSASLSYLLYSDILLKFSQTEITAPTMPLDCANASNVQAVNRSATKGVTLLLPEPEWTYPRLSCPGSTFQKALLISPHRFGETKGNSAPLIIREPFIACGPKECKHFALTHYAAQPGGYYNGTREDRNKLRHLISVKLGKIPTVENSIFHMAAWSGSACHDGREWTYIGVDGPDSNALLKIKYGEAYTDTYHSYAKNILRTQESACNCIGGDCYLMITDGSASGISECRFLKIREGRIIKEIFPTGRVKHTEECTCGFASNKTIECACRDNSYTAKRPFVKLNVETDTAEIRLMCTETYLDTPRPNDGSITGPCESNGDRGSGGIKGGFVHQRMASKIGRWYSRTMSKTKRMGMGLYVKYDGDPWTDSEALALSGVMVPMEEPGWYSFGFEIKDKKCDVPCIGIEMVHDGGKTTWHSAATAIYCLMGSGQLLWDTVTGVDMAL

SEQ ID NO: 29064 - protein, 466 aa, Artificial Sequence; identical to SEQ ID NO: 28792
  derived and/or modified protein sequence (wt) from neuraminidase__InfluenzaB__AFN54669

SEQ ID NO: 29065 - protein, 466 aa, Artificial Sequence; identical to SEQ ID NO: 28792
  derived and/or modified protein sequence (wt) from neuraminidase__InfluenzaB__AFN54680

SEQ ID NO: 29066 - protein, 466 aa, Artificial Sequence; identical to SEQ ID NO: 28817
  derived and/or modified protein sequence (wt) from neuraminidase__InfluenzaB__AFN54691

SEQ ID NO: 29067 - protein, 466 aa, Artificial Sequence; identical to SEQ ID NO: 28817
  derived and/or modified protein sequence (wt) from neuraminidase__InfluenzaB__AFN54702

SEQ ID NO: 29068 - protein, 466 aa, Artificial Sequence; identical to SEQ ID NO: 28817
  derived and/or modified protein sequence (wt) from neuraminidase__InfluenzaB__AFN54713

SEQ ID NO: 29069 - protein, 466 aa, Artificial Sequence; identical to SEQ ID NO: 28817
  derived and/or modified protein sequence (wt) from neuraminidase__InfluenzaB__AFN54724

SEQ ID NO: 29070 - protein, 466 aa, Artificial Sequence; identical to SEQ ID NO: 28817
  derived and/or modified protein sequence (wt) from neuraminidase__InfluenzaB__AFN54735

SEQ ID NO: 29071 - protein, 466 aa, Artificial Sequence; identical to SEQ ID NO: 28817
  derived and/or modified protein sequence (wt) from neuraminidase__InfluenzaB__AFN54746

SEQ ID NO: 29072 - protein, 466 aa, Artificial Sequence; identical to SEQ ID NO: 28817
  derived and/or modified protein sequence (wt) from neuraminidase__InfluenzaB__AFN54757

SEQ ID NO: 29073 - protein, 466 aa, Artificial Sequence; identical to SEQ ID NO: 28817
  derived and/or modified protein sequence (wt) from neuraminidase__InfluenzaB__AFN54768

SEQ ID NO: 29074 - protein, 466 aa, Artificial Sequence; identical to SEQ ID NO: 28817
  derived and/or modified protein sequence (wt) from neuraminidase__InfluenzaB__AFN54779

SEQ ID NO: 29075 - protein, 466 aa, Artificial Sequence; identical to SEQ ID NO: 28817
  derived and/or modified protein sequence (wt) from neuraminidase__InfluenzaB__AFN54790

SEQ ID NO: 29076 - protein, 466 aa, Artificial Sequence; identical to SEQ ID NO: 28817
  derived and/or modified protein sequence (wt) from neuraminidase__InfluenzaB__AFN54801

SEQ ID NO: 29077 - protein, 466 aa, Artificial Sequence; identical to SEQ ID NO: 28817
  derived and/or modified protein sequence (wt) from neuraminidase__InfluenzaB__AFN54812

SEQ ID NO: 29078 - protein, 466 aa, Artificial Sequence
  derived and/or modified protein sequence (wt) from neuraminidase__InfluenzaB__AFN54834
MLPSTIQTLTLFLTSGGVLLSLYVSASLSYLLYSDILLKFSRTEITAPIMPLDCANASNVQAVNRSATKGVTLLLPEPEWTYPRLSCPGSTFQKALLISPHRFGETKGNSAPLIIREPFIACGPKECKHFALTHYAAQPGGYYNGTREDRNKLRHLISVKLGKIPTVENSIFHMAAWSGSACHDGREWIYIGVDGPDSNALLKIKYGEAYTDTYHSYAKNILRTQESACNCIGGDCYLMITDGPASGISECRFLKIREGRIIKEIFPTGRVKHTEECTCGFASNKTIECACRDNSYTAKRPFVKLNVETDTAEIRLMCTETYLDTPRPNDGSITGPCESNGDKGSGGIKGGFVHQRMASKIGRWYSRTMSKTKRMGMGLYVKYDGDPWTDSEALALSGVMVSMEEPGWYSFGFEIKDKKCDVPCIGIEMVHDGGKTTWHSAATAIYCLMGSGQLLWDTVTGVNMTL

SEQ ID NO: 29079 - protein, 466 aa, Artificial Sequence; identical to SEQ ID NO: 28817
  derived and/or modified protein sequence (wt) from neuraminidase__InfluenzaB__AFN54845

SEQ ID NO: 29080 - protein, 466 aa, Artificial Sequence
  derived and/or modified protein sequence (wt) from neuraminidase__InfluenzaB__AFN54856
MLPSTIQTLTLFLTSGGVLLSLYVSASLSYLLYSDILLKFSRTEITAPIMPLDCANASNVQAVNRSATKGVTLLLPEPEWTYPRLSCPGSTFQKALLISPHRFGETKGNSAPLIIREPFIACGPKECKHFALTHYAAQPGGYYNGTREDRNKLRHLISVKLGKIPTVENSIFHMAAWSGSACHDGREWTYIGVDGPDSNALLKIKYGEAYTDTYHSYAKNILRTQESACNCIGGDCYLMITDGPASGVSECRFLKIREGRIIKEIFPTGRVKHTEECTCGFASNKTIECACRDNSYTAKRPFVKLNVETDTAEIRLMCTETYLDTPRPNDGSITGPCESNGDKGSGGIKGGFVHQRMASKIGRWYSRTMSKTKRMGMGLYVKYDGDPWTDSEALALSGVMVSMEEPGWYSFGFEIKDKKCDVPCIGIEMVHDGGKTTWHSAATAIYCLMGSGQLLWDTATGVNMTL

SEQ ID NO: 29081 - protein, 466 aa, Artificial Sequence; identical to SEQ ID NO: 28817
  derived and/or modified protein sequence (wt) from neuraminidase__InfluenzaB__AFN54867

SEQ ID NO: 29082 - protein, 466 aa, Artificial Sequence
  derived and/or modified protein sequence (wt) from neuraminidase__InfluenzaB__AFU34598
MLPSTIQTLTLFLTSGGVLLSLYVSASLSYLLYSDILLKFSPTEITAPTMSLDCANASNVQAVNRSATKGVTFLLPEPEWTYPRLSCPGSTFQKALLISPHRFGETKGNSAPLIIREPFIACGPNECKHFALTHYAAQPGGYYNGTRGDRNKLRHLISVKLGKIPTVENSIFHMAAWSGSACHDGKEWTYIGVDGPDNNALLKVKYGEAYTDTYHSYANKILRTRESACNCIGGNCYLMITDGSASGVSECRFLKIRVGRIIKEIFPTGRVKHTEECTCGFASNKTIECACRDNSYTAKRPFVKLNVETDTAEIRLMCTDTYLDTPRPDDGSITGPCESNGDKGSGGIKGGFVHQRMESKIGRWYSRTMSKTERMGMGLYVKYDGDPWADSDALAFSGVMVSMKEPGWYSFGFEIKDKKCDVPCIGIEMVHDGGKETWHSAATAIYCLMGSGQLLWDTVTGVDVAL

SEQ ID NO: 29083 - protein, 466 aa, Artificial Sequence
  derived and/or modified protein sequence (wt) from neuraminidase__InfluenzaB__AFU34609
MLPSTIQTLTLFLTSGGVLLSLYVSALLSYLLYSDILLKFSPTEITAPTMSLDCANASNVQAVNRSATRGVTFLLPEPEWAYPRLSCPGSTFQKALLISPHRFGETKGNSAPLIIREPFIACGPNECKHFALTHYAAQPGGYYNGTRGDRNKLRHLISVKLGKIPTVENSIFHMAAWSGSACHDGKEWTYIGVDGPDNDALLKVKYGEAYTDTYHSYANKILRTQESACNCIGGNCYLMITDGSASGVSECRFLKIREGRIIKEIFPTGRVKHTEECTCGFASNKTIECACRDNSYTAKRPFVKLNVETDTAEIRLMCTDTYLDTPRPDDGSITGPCESNGDKGSGGIKGGFVHQRMESKIGRWYSRTMSKTERMGMGLYVKYDGDPWADSDALAFSGVMVSMKEPGWYSFGFEIKDKKCDVPCIGIEMVHDGGKETWHSAATAIYCLMGSGQLLWDTVTGVDMAL

SEQ ID NO: 29084 - protein, 466 aa, Artificial Sequence
  derived and/or modified protein sequence (wt) from neuraminidase__InfluenzaB__AFU34620
MLPSTIQTLTLFLTSGGVLLSLYVSALLSYLLYSDILLKFSPTEITAPTMSLDCANASNVQAVNRSATRGVTFLLPEPEWTYPRLSCPGSTFQKALLISPHRFGETKGNSAPLIIREPFIACGPNECKHFALTHYAAQPGGYYNGTRGDRNKLRHLISVKLGKIPTVENSIFHMAAWSGSACHDGKEWTYIGVDGPDNDALLKVKYGEAYTDTYHSYANKILRTQESACNCIGGNCYLMITDGSASGVSECRFLKIREGRIIKEIFPTGRVKHTEECTCGFASNKTIECACRDNSYTAKRPFVKLNVETDTAEIRLMCTDTYLDTPRPDDGSITGPCESNGDKGSGGIKGGFVHQRMESKIGRWYSRTMSKTERMGMGLYVKYDGDPWADSDALAFSGVMVSMKEPGWYSFGFEIKDKKCDVPCIGIEMVHDGGKETWHSAATAIYCLMGSGQLLWDTVTGVDMAL

SEQ ID NO: 29085 - protein, 466 aa, Artificial Sequence
  derived and/or modified protein sequence (wt) from neuraminidase__InfluenzaB__AFU34631
MLPSTIQTLTLFLTSGGVLLSLYVSALLSYLLYSDILLKFSPTEITAPTMSLDCANASNVQAVNRSATRGVTFLLPEPEWTYPRLSCPGSTFQKALLISPHRFGETKGNSAPLIIREPFIACGPNECKHFALTHYAAQPGGYYNGTRGDRNKLRHLISVKLGKIPTVENSIFHMAAWSGSACHDGKEWTYIGVDGPDNDALLKVKYGEAYTDTYHSYANKILRTQESACNCIRGNCYLMITDGSASGVSECRFLKIREGRIIKEIFPTGRVKHTEECTCGFASNKTIECACRDNSYTAKRPFVKLNVETDTAEIRLMCTDTYLDTPRPDDGSITGPCESNGDKGSGGIKGGFVHQRMESKIGRWYSRTMSKTERMGMGLYVKYDGDPWADSDALAFSGVMVSMKEPGWYSFGFEIKDKKCDVPCIGIEMVHDGGKETWHSAATAIYCLMGSGQLLWDTVTGVDMAL

SEQ ID NO: 29086 - protein, 466 aa, Artificial Sequence
  derived and/or modified protein sequence (wt) from neuraminidase__InfluenzaB__AFU34642
MLPSTIQTLTLFLTSGGVLLSLYVSASLSYLLYSDILLKFSPTEITAPTMSLDCANASNVQAVNRSATKGMTFLLPEPEWTYPRLSCPGSTFQKALLISPHRFGETKGNSAPLIIREPFIACGPNGCKHFALTHYAAQPGGYYNGTRGDRNKLRHLISVKLGKIPTVENSIFHMAAWSGSACHDGKEWTYIGVDGPDNNALLKVKYGEAYTDTYHSYANKILRTQESACNCIGGNCYLMITDGSASGVSECRFLKIREGRIIKEIFPTGRVKHTEECTCGFASNKTIECACRDNSYTAKRPFVKLNVETDTAEIRLMCTDTYLDTPRPDDGSITGPCESYGDKGSGGIKGGFVHQRMESKIGRWYSRTMSKTERMGMGLYVKYDGDPWADSDALAFSGVMVSMKEPGWYSFGFEIKDKKCDVPCIGIEMVHDGGKETWHSAATAIYCLMGSGQLLWDTVTGVDMAL

SEQ ID NO: 29087 - protein, 466 aa, Artificial Sequence
  derived and/or modified protein sequence (wt) from neuraminidase__InfluenzaB__AGB97261
MLPSTIQTLTLFLTSGGVLLSLYVSASLSYLLYSDMLLKFSRTEITAPIMPLDCANASNVQAVNRSATKGVTLLLPEPEWTYPRLSCPGSTFQKALLISPHRFGETKGNSAPLIIREPFIACGPKECKHFALTHYAAQPGGYYNGTREDRNKLRHLISVKLGKIPTVENSIFHMAAWSGSACHDGREWTYIGVDGPDSNALLKIKYGEAYTDTYHSYAKNILRTQESACNCIGGDCYLMITDGPASGISECRFLKIREGRIIKEIFPTGRVKHTEECTCGFASNKTIECACRDNSYTAKRPFVKLNVETDTAEIRLMCTETYLDTPRPNDGSITGPCESNGDKGSGGIKGGFVHQRMASKIGRWYSRTMSKTKRMGMGLYVKYDGDPWTDSEALALSGVMVSMEEPGWYSFGFEIKDKKCDVPCIGIEMVHDGGKTTWHSAATAIYCLMGSGQLLWDTVTGVNMTL

SEQ ID NO: 29088 - protein, 466 aa, Artificial Sequence
  derived and/or modified protein sequence (wt) from neuraminidase__InfluenzaB__AGB97267
MLPSTIQTLTLFLTSGGVLLSLYVSASLSYLLYSDILLKFSQTEITAPIMPLDCTNASNVQAVNRSAAKGVTLLLPEPEWTYPRLSCPGSTFQKALLISPHRFGEIKGNSAPLIIREPFIACGPTECKHFALTHYAAQPGGYYNGTREDRNKLRHLISVKLGKIPTVENSIFHMAAWSGSACHDGKEWTYIGIDGPDSNALLKIKYGEAYTDTYHSYAKNILRTQESACNCIGGDCYLMITDGPASGVSECRFLKIREGRIIKEIFPTGRVKHTEECTCGFASNKTIECACRDNRYTAKRPFVKLNVETDTAEIRLMCTETYLDTPRPNDGSITGPCESDGDKGSGGIKGGFVHQRMASKIGRWYSRTMSKTKRMGMGLYVKYDGDPWTDSEALALSGVMVSMEEPGWYSFGFEIKDKKCDVPCIGIEMVHDGGKTTWHSAATAIYCLMGSGQLLWDTVTGVDMAL

SEQ ID NO: 29089 - protein, 466 aa, Artificial Sequence; identical to SEQ ID NO: 28817
  derived and/or modified protein sequence (wt) from neuraminidase__InfluenzaB__AGR54784

SEQ ID NO: 29090 - protein, 466 aa, Artificial Sequence; identical to SEQ ID NO: 28682
  derived and/or modified protein sequence (wt) from neuraminidase__InfluenzaB__AGX15491

SEQ ID NO: 29091 - protein, 466 aa, Artificial Sequence
  derived and/or modified protein sequence (wt) from neuraminidase__InfluenzaB__AGX15533
MLPSTIQTLTLFLTSGGVLLSLYVSASLSYLLYSDILLKFSPTEITAPTMPLDCANASNVQAVNRSATKGVTLLLPEPEWTYPRLSCPGSTFQKALLISPHRFGETKGNSAPLIIREPFIACGPNECKHFALTHYAAQPGGYYNGKRGDRNKLRHLISVKLGKIPTVENSIFHMAAWSGSACHDGKEWTYIGVDGPDNNALLKIKYGEAYTDTYHSYANNILRTQESACNCIGGNCYLMITDGSASGVSECRFLKIREGRIIKEIFPTGRVKHTEECTCGFASNKTIECACRDNSYTAKRPFVKLNVETDTAEIRLMCTDTYLDTPRPDDGSITGPCESNGDKGSGGIKGGFVHQRMASKVGRWYSRTMSKTERMGMGLYVKYDGDPWADSDALAFSGVMVSMKEPGWYSFGFEIKDKKCDVPCIGIEMVHDGGKETWHSAATAIYCLMGSGQLLWDTVTGVDMAL

SEQ ID NO: 29092 - protein, 466 aa, Artificial Sequence; identical to SEQ ID NO: 28635
  derived and/or modified protein sequence (wt) from neuraminidase__InfluenzaB__AGX15545

SEQ ID NO: 29093 - protein, 466 aa, Artificial Sequence; identical to SEQ ID NO: 28635
  derived and/or modified protein sequence (wt) from neuraminidase__InfluenzaB__AGX15556

SEQ ID NO: 29094 - protein, 466 aa, Artificial Sequence
  derived and/or modified protein sequence (wt) from neuraminidase__InfluenzaB__AGX15567
MLPSTIQTLTLFLTSGGVLLSLYVSASLSYLLYSDILLKFPSTEITAPTMPLDCANASNVQAVNRSATKGVTLLLPEPEWTYPRLSCPGSTFQKALLISPHRFGETKGNSAPLIIREPFIACGPKECKHFALTHYAAQPGGYYNGTRGDRNKLRHLISVKLGKIPTVENSIFHMAAWSGSACHDGKEWTYIGVDGPDNNALLKIKYGEAYTDTYHSYANNILRTQESACNCIGGNCYLMITDGSASGVSECRFLKIREGRIIKEIFPTGRIKHTEECTCGFASNKTIECACRDNSYTAKRPFVKLNVETDTAEIRLMCTETYLDTPRPDDGSITGPCESNGDKGSGGIKGGFVHQRMASKIGRWYSRTMSKTERMGMGLYVKYDGDPWADSDALAFSGVMVSMEEPGWYSFGFEIKDKKCDVPCIGIEMVHDGGKETWHSAATAIYCLMGSGQLLWDTVTGVNMAL

SEQ ID NO: 29095 - protein, 466 aa, Artificial Sequence; identical to SEQ ID NO: 28635
  derived and/or modified protein sequence (wt) from neuraminidase__InfluenzaB__AGX15578

SEQ ID NO: 29096 - protein, 466 aa, Artificial Sequence; identical to SEQ ID NO: 28635
  derived and/or modified protein sequence (wt) from neuraminidase__InfluenzaB__AGX15589

SEQ ID NO: 29097 - protein, 466 aa, Artificial Sequence; identical to SEQ ID NO: 28841
  derived and/or modified protein sequence (wt) from neuraminidase__InfluenzaB__AGX15600

SEQ ID NO: 29098 - protein, 466 aa, Artificial Sequence; identical to SEQ ID NO: 28841
  derived and/or modified protein sequence (wt) from neuraminidase__InfluenzaB__AGX15611

SEQ ID NO: 29099 - protein, 466 aa, Artificial Sequence; identical to SEQ ID NO: 28961
  derived and/or modified protein sequence (wt) from neuraminidase__InfluenzaB__AGX15644

SEQ ID NO: 29100 - protein, 466 aa, Artificial Sequence; identical to SEQ ID NO: 28961
  derived and/or modified protein sequence (wt) from neuraminidase__InfluenzaB__AGX15655

SEQ ID NO: 29101 - protein, 466 aa, Artificial Sequence; identical to SEQ ID NO: 28961
  derived and/or modified protein sequence (wt) from neuraminidase__InfluenzaB__AGX15666

SEQ ID NO: 29102 - protein, 466 aa, Artificial Sequence; identical to SEQ ID NO: 28961
  derived and/or modified protein sequence (wt) from neuraminidase__InfluenzaB__AGX15679

SEQ ID NO: 29103 - protein, 466 aa, Artificial Sequence
  derived and/or modified protein sequence (wt) from neuraminidase__InfluenzaB__AGX15690
MLPSTIQTLTLFLTSGGVLLSLYVSASLSYLLYSDILLKFSPTEITAPTMPLDCANASNVQAVNRSATKGVTLLLPEPEWTYPRLSCPGSTFQKALLISPHRFGETKGNSAPLIIREPFIACGPNECKHFALTHYAAQPGGYYNGTRGDRNKLRHLISVKLGKIPTVENSIFHMAAWSGSACHDGKEWTYIGVDGPDNNALLKVKYGEAYTDTYHSYANKILRTQESACNCIGGNCYLMITDGSASGVSECRFLKIREGRIIKEIFPTGRVKHTEECTCGFASNKTIECACRDNSYTAKRPFVKLNVETDTAEIRLMCTDTYLDTPRPNDGSITGPCESNGDKGSGGIKGGFVHQRMKSKIGRWYSRTMSKTERMGMGLYVKYDGDPWADSDALAFSGVMVSMKEPGWYSFGFEIKDKKCDVPCIGIEMVHDGGKETWHSAATAIYCLMGSGQLLWDTVTGVDMAL

SEQ ID NO: 29104 - protein, 466 aa, Artificial Sequence; identical to SEQ ID NO: 28961
  derived and/or modified protein sequence (wt) from neuraminidase__InfluenzaB__AGX15701

SEQ ID NO: 29105 - protein, 466 aa, Artificial Sequence
  derived and/or modified protein sequence (wt) from neuraminidase__InfluenzaB__AGX15712
MLPSTIQTLTLFLTSGGVLLSLYVSASLSYLLYSDILLKFSPTEITAPTMPLDCANASNVQAVNRSATKGVTLLLPEPEWTYPRLSCPGSTFQKALLISPHRFGEPKGNSAPLIIREPFIACGPNECKHFALTHYAAQPGGYYNGTRGDRNKLRHLISVKLGKIPTVENSIFHMAAWSGSACHDGKEWTYIGVDGPDNNALLKVKYGEAYTDTYHSYANKILRTQESACNCIGGNCYLMITDGSASGVSECRFLKIREGRIIKEIFPTGRVKHTEECTCGFASNKTIECACRDNSYTAKRPFVKLNVETDTAEIRLMCTDTYLDTPRPNDGSITGPCESDGDKGSGGIKGGFVHQRMESKIGRWYSRTMSKTERMGMGLYVKYDGDPWADSDALAFSGVMVSMKEPGWYSFGFEIKDKKCDVPCIGIEMVHDGGKETWHSAATAIYCLMGSGQLLWDTVTGVNMAL

SEQ ID NO: 29106 - protein, 466 aa, Artificial Sequence; identical to SEQ ID NO: 28961
  derived and/or modified protein sequence (wt) from neuraminidase__InfluenzaB__AGX15723

SEQ ID NO: 29107 - protein, 466 aa, Artificial Sequence; identical to SEQ ID NO: 28961
  derived and/or modified protein sequence (wt) from neuraminidase__InfluenzaB__AGX15745

SEQ ID NO: 29108 - protein, 466 aa, Artificial Sequence; identical to SEQ ID NO: 28961
  derived and/or modified protein sequence (wt) from neuraminidase__InfluenzaB__AGX15757

SEQ ID NO: 29109 - protein, 466 aa, Artificial Sequence
  derived and/or modified protein sequence (wt) from neuraminidase__InfluenzaB__AGX15768
MLPSTIQTLTLFLTSGGVLLSLYVSASLSYLLYSDILLKFSPTEITAPTMPLDCANASNVQAVNRSATKGVTLLLPEPEWTYPRLSCPGSTFQKALLISPHRFGETKGNSAPLIIREPFIACGPNECKHFALTHYAAQPGGYYNGTRGDRNKLRHLISVKLGKIPTVENSIFHMAAWSGSACHDGKEWTYIGVDGPDNNALLKVKYGEAYTDTYHSYANKILRTQESACNCIGGNCYLMITDGSASGVSECRFLKIREGRIIKEIFPTGRVKHTEECTCGFASNKTIECACRDNSYTAKRPFVKLNVETDTAEIRLMCTDTYLDTPRPNDGSITGPCESNGDKGSGGIKGGFVHQRMESKIGRWYSRTMSKTERMGMGLYVKYDGDPWADSDALAFSGVMISMKEPGWYSFGFEIKDKKCDVPCIGIEMVHDGGKETWHSAATAIYCLMGSGQLLWDTVTGVDMAL

SEQ ID NO: 29110 - protein, 466 aa, Artificial Sequence
  derived and/or modified protein sequence (wt) from neuraminidase__InfluenzaB__AGX15801
MLPSTIQTLTLFLTSGGVLLSLYVSASLSYLLYSDILLKFSPTEITAPTMSLDCVNASNVQAVNRSATKGVTLLLPEPEWTYPRLSCPGSTFQKALLISPHRFGETKGNSAPLIIREPFIACGPNECKHFALTHYAAQPGGYYNGTRGDRNKLRHLISVKLGKIPTVENSIFHMAAWSGSACHDGKEWTYIGVDGPDNNALLKVKYGEAYTDTYHSYANKILRTQESACNCIGGNCYLMITDGSASGVSECRFLKIREGRIIKEIFPTGRVKHTEECTCGFASNKTIECACRDNSYTAKRPFVKLNVETDTAEIRLMCTDTYLDTPRPNDGSITGPCESNGDKGSGGIKGGFVHQRMESKIGRWYSRTMSKTERMGMGLYVKYDGDPWADSDALAFSGVMVSMKEPGWYSFGFEIKDKKCDVPCIGIEMVHDGGKETWHSAATAIYCLMGSGQLLWDTVTGVDMAL

SEQ ID NO: 29111 - protein, 466 aa, Artificial Sequence; identical to SEQ ID NO: 28961
  derived and/or modified protein sequence (wt) from neuraminidase__InfluenzaB__AGX15812

SEQ ID NO: 29112 - protein, 466 aa, Artificial Sequence; identical to SEQ ID NO: 28961
  derived and/or modified protein sequence (wt) from neuraminidase__InfluenzaB__AGX15823

SEQ ID NO: 29113 - protein, 466 aa, Artificial Sequence; identical to SEQ ID NO: 28895
  derived and/or modified protein sequence (wt) from neuraminidase__InfluenzaB__AGX15845

SEQ ID NO: 29114 - protein, 466 aa, Artificial Sequence; identical to SEQ ID NO: 28872
  derived and/or modified protein sequence (wt) from neuraminidase__InfluenzaB__AGX15856

SEQ ID NO: 29115 - protein, 466 aa, Artificial Sequence; identical to SEQ ID NO: 28895
  derived and/or modified protein sequence (wt) from neuraminidase__InfluenzaB__AGX15867

SEQ ID NO: 29116 - protein, 466 aa, Artificial Sequence; identical to SEQ ID NO: 28895
  derived and/or modified protein sequence (wt) from neuraminidase__InfluenzaB__AGX15889

SEQ ID NO: 29117 - protein, 466 aa, Artificial Sequence
  derived and/or modified protein sequence (wt) from neuraminidase__InfluenzaB__AGX15900
MLPSTIQTLTLFLTSGGVLLSLYVSALLSYLLYSDILLKFSPTEITAPTMSLDCANTSNVQAVNRSATKGVTFLLPEPEWTYPRLSCPGSTFQKALLISPHRFGETKGNSAPLIIREPFIACGPNECKHFALTHYAAQPGGYYNGTRGDRNKLRHLISVKLGKIPTVENSIFHMAAWSGSACHDGKEWTYIGVDGPDNDALLKVKYGEAYTDTYHSYANKILRTQESACNCIGGNCYLMITDGSASGVSECRFLKIREGRIIKEIFPTGRVKHTEECTCGFASNKTIECACRDNSYTAKRPFVKLNVETDTAEIRLMCTDTYLDTPRPDDGSITGPCESNGDKGSGGIKGGFVHQRMESKIGRWYSRTMSKTERRGMGLYVKYDGDPWADSDALAFSGVMVSMKEPGWYSFGFEIKDKKCDVPCIGIEMVHDGGKETWHSAATAIYCLMGSGQLLWDTVTGVDMAL

SEQ ID NO: 29118 - protein, 466 aa, Artificial Sequence; identical to SEQ ID NO: 28895
  derived and/or modified protein sequence (wt) from neuraminidase__InfluenzaB__AGX15911

SEQ ID NO: 29119 - protein, 466 aa, Artificial Sequence
  derived and/or modified protein sequence (wt) from neuraminidase__InfluenzaB__AGX15933
MLPSTIQTLTLFLTSGGVLLSLYVSASLSYLLYSDILLKFSPTEITAPAMPLDCANASNVQAVNRSATKGVTLLLPEPEWTYPRLSCPGSTFQKALLISPHRFGETKGNSAPLIIREPFIACGPNECKHFALTHYAAQPGGYYNGTRGDRNKLRHLISVKLGKIPTVENSIFHMAAWSGSACHDGKEWTYIGVDGPDNNALLKVKYGEAYTDTYHSYANKILRTQESACNCIGGNCYLMITDGSASGVSECRFLKIREGRIIKEIFPTGRVKHTEECTCGFASNKTIECACRDNSYTAKRPFVKLNVETDTAEIRLMCTDTYLDTPRPNDGSITGPCESDGDKGSGGIKGGFVHQRMESKIGRWYSRTMSKTERMGMGLYVKYDGDPWADSDALAFSGVMVSMKEPGWYSFGFEIKDKKCDVPCIGIEMVHDGGKETWHSAATAIYCLMGSGQLLWDTVTGVDMAL

SEQ ID NO: 29120 - protein, 466 aa, Artificial Sequence; identical to SEQ ID NO: 28895
  derived and/or modified protein sequence (wt) from neuraminidase__InfluenzaB__AGX15944

SEQ ID NO: 29121 - protein, 466 aa, Artificial Sequence; identical to SEQ ID NO: 28956
  derived and/or modified protein sequence (wt) from neuraminidase__InfluenzaB__AGX15966

SEQ ID NO: 29122 - protein, 466 aa, Artificial Sequence
  derived and/or modified protein sequence (wt) from neuraminidase__InfluenzaB__AGX15988
MLPSTIQTLTLFLTSGGVLLSLYVSASLSYLLYSDILLKFSPTEITAPTMPLDCANASNVQAVNRSATKGVTLLLPEPEWTYPRLSCPGSTFQKALLISPHRFGETKGNSAPLIIREPFIACGPNECKHFALTHYAAQPGGYYNGTRGDRNKLRHLISVKLGKIPTVENSIFHMAAWSGSACHDGKEWTYIGVDGPDNNALLKVKYGEAYTDTYHSYANKILRTQESACNCIGGNCYLMITDGSASGVSECRFLKIREGRIIKEIFPTGRVKHTEECTCGFASNKTIECACRDNSYTAKRPFVKLNVETDTAEVRLMCTDTYLDTPRPNDGSITGPCESDGDKGSGGIKGGFVHQRMESKIGRWYSRTMSKTERMGMGLYVKYDGDPWADSDALTFSGVMVSMKEPGWYSFGFEIKDKKCDVPCIGIEMVHDGGKETWHSAATAIYCLMGSGQLLWDTVTGVDMAL

SEQ ID NO: 29123 - protein, 466 aa, Artificial Sequence; identical to SEQ ID NO: 28956
  derived and/or modified protein sequence (wt) from neuraminidase__InfluenzaB__AGX15999

SEQ ID NO: 29124 - protein, 466 aa, Artificial Sequence; identical to SEQ ID NO: 28956
  derived and/or modified protein sequence (wt) from neuraminidase__InfluenzaB__AGX16010

SEQ ID NO: 29125 - protein, 466 aa, Artificial Sequence; identical to SEQ ID NO: 28956
  derived and/or modified protein sequence (wt) from neuraminidase__InfluenzaB__AGX16021

SEQ ID NO: 29126 - protein, 466 aa, Artificial Sequence
  derived and/or modified protein sequence (wt) from neuraminidase__InfluenzaB__AGX16032
MLPSTIQTLTLFLTSGGVLLSLYVSASLSYLLYSDILLKFSQTEITAPIMPLDCANASNVQAVNRSATKGVTLLLPEPEWTYPRLSCPGSTFQKALLISPHRFGETKGNSAPLIIREPFIACGPKECKHFALTHYAAQPGGYYNGTREDRNKLRHLISVKLGKIPTVENSIFHMAAWSGSACHDGKEWTYIGVDGPDSNALLKIKYGEAYTDTYHSYAKNILRTQESACNCIGGDCYLMITDGPASGISECRFLKIREGRIIKEIFPTGRVKHTEECTCGFASNKTIECACRDNSYTAKRPFVKLNVETDTAEIRLMCTETYLDTPRPNDGSITGPCESDGDKGSGGIKGGFVHQRMASKIGRWYSRTMSKTKRMGMGLYVKYDGDPWTDSEALALSGVMVSMEEPGWYSFGFEIKDKKCDVPCIGIEMVHDGGKTTWHSAATAIYCLMGSGQLLWDTVTGVDMAL

SEQ ID NO: 29127 - protein, 466 aa, Artificial Sequence; identical to SEQ ID NO: 28743
  derived and/or modified protein sequence (wt) from neuraminidase__InfluenzaB__AGX16043

SEQ ID NO: 29128 - protein, 466 aa, Artificial Sequence; identical to SEQ ID NO: 28745
  derived and/or modified protein sequence (wt) from neuraminidase__InfluenzaB__AGX16054

SEQ ID NO: 29129 - protein, 466 aa, Artificial Sequence
  derived and/or modified protein sequence (wt) from neuraminidase__InfluenzaB__AGX16087
MLPSTIQTLTLFLTSGGVLLSLYVSASLSYLLYSDILLKFSQTEITAPIMPLDCANASNVQAVNRSATKGVTLLLPEPEWTYPRLSCPGSTFQKALLISPHRFGETKGNSAPLIIREPFIACGPKECKHFALTHYAAQPGGYYNGTREDRNKLRHLISVKLGKIPTVENSIFHMAAWSGSACHDGREWTYIGVDGPDSNALLKIKYGEAYTDTYHSYAKNILRTQESACNCIGGDCYLMITDGPASGISECRFLKIREGRIIKEIFPTGRVKHTEECTCGFASNKTIECACRDNNYTAKRPFVKLNVETDTAEIRLMCTETYLDTPRPNDGSITGPCESNGDKGSGGIKGGFVHQRMASKIGRWYSRTMSKTKRMGMGLYVKYDGDPWTDSEALALSGVMVSMEEPGWYSFGFEIKDKKCDVPCIGIEMVHDGGKTTWHSAATAIYCLMGSGQLLWDTVTGVDMAL

SEQ ID NO: 29130 - protein, 466 aa, Artificial Sequence
  derived and/or modified protein sequence (wt) from neuraminidase__InfluenzaB__AGX16109
MLPSTIQTLTLFLTSGGVLLSLYVSASLSYLLYSDILLKFSQTEITAPTMPLDCANASNVQAVNRSATKGVTLLLPEPEWTYPRLSCPGSTFQKALLISPHRFGETKGNSAPLIIREPFIACGPKECKHFALTHYAAQPGGYYNGTREDRNKLRHLISVKLGKIPTVENSIFHMAAWSGSACHDGREWTYVGVDGPDSNALLKIKYGEAYTDTYHSYAKNILRTQESACNCIGGDCYLMITDGPASGISECRFLKIREGRIIKEIFPTGRVKHTEECTCGFASNKTIECACRDNSYTAKRPFVKLDVETDTAEIRLMCTETYLDTPRPNDGSITGPCEANGDKGSGGIKGGFVHQRMASKIGRWYSRTMSKTKRMGMGLYVKYDGDPWTDSEALALSGVMVSMEEPGWYSFGFEIKDKKCDVPCIGIEMVHDGGKTTWHSAATAIYCLMGSGQLLWDTVTGVDMAL

SEQ ID NO: 29131 - protein, 466 aa, Artificial Sequence
  derived and/or modified protein sequence (wt) from neuraminidase__InfluenzaB__AGX16120
MLPSTIQTLTLFLTSGGVLLSLYVSASLSYLLYSDILLKFSTTEITAPTMPLDCANASNVQAVNRSATKGVTFLLPEPEWTYPRLSCPGSTFQKALLISPHRFGETKGNSAPLIIREPFIACGPKECKHFALTHYAAQPGGYYNGTREDRNKLRHLISVKLGKIPTVENSIFHMAAWSGSACHDGKEWTYIGVDGPDSNALLKIKYGEAYTDTYHSYANNILRTQESACNCIGGNCYLMITDGSASGISECRFLKIREGRIIKEIFPTGRVKHTEECTCGFASNKTIECACRDNSYTAKRPFVKLNVETDTAEIRLMCTETYLDTPRPDDGSITGPCESNGNKGSGGIKGGFVHQRMASKIGRWYSRTMSKTKRMGMGLYVKYDGDPWTDSDALALSGVMVSMEEPGWYSFGFEIKDKKCDVPCIGIEMVHDGGKETWHSAATAIYCLMGSGQLLWDTVTGVDMAL

SEQ ID NO: 29132 - protein, 466 aa, Artificial Sequence; identical to SEQ ID NO: 29131
  derived and/or modified protein sequence (wt) from neuraminidase__InfluenzaB__AGX16131

SEQ ID NO: 29133 - protein, 466 aa, Artificial Sequence; identical to SEQ ID NO: 29131
  derived and/or modified protein sequence (wt) from neuraminidase__InfluenzaB__AGX16142

SEQ ID NO: 29134 - protein, 466 aa, Artificial Sequence
  derived and/or modified protein sequence (wt) from neuraminidase__InfluenzaB__AGX16153
MLPSTIQTLTLFLTSGGVLLSLYVSASLSYLLYSDILLKFSQTEITAPIMPLDCANASNVQAVNRSATRGVTLLLPEPEWTYPRLSCPGSTFQKALLISPHRFGETKGNSAPLIIREPFIACGPKECKHFALTHYAAQPGGYYNGTREDRNKLRHLISVKLGKIPTVENSIFHMTAWSGSACHDGREWTYIGVDGPDSNALLKIKYGEAYTDTYHSYAKNILRTQESACNCIGGDCYLMITDGPASGISECRFLKIREGRIIKEIFPTGRVKHTEECTCGFASNKTIECACRDNSYTAKRPFVKLNVETDTAEIRLMCTETYLDTPRPNDGSITGPCESNGDKGSGGIKGGFVHQRMASKIGRWYSRTMSKTKRMGMGLYVKYDGDPWTDSEALALSGVMVSMEEPGWYSFGFEIKDKKCDVPCIGIEMVHDGGKTTWHSAATAIYCLMGSGQLLWDTVTGVDMAL

SEQ ID NO: 29135 - protein, 466 aa, Artificial Sequence; identical to SEQ ID NO: 29129
  derived and/or modified protein sequence (wt) from neuraminidase__InfluenzaB__AGX16164

SEQ ID NO: 29136 - protein, 466 aa, Artificial Sequence; identical to SEQ ID NO: 28788
  derived and/or modified protein sequence (wt) from neuraminidase__InfluenzaB__AGX16197

SEQ ID NO: 29137 - protein, 466 aa, Artificial Sequence; identical to SEQ ID NO: 28788
  derived and/or modified protein sequence (wt) from neuraminidase__InfluenzaB__AGX16208

SEQ ID NO: 29138 - protein, 466 aa, Artificial Sequence; identical to SEQ ID NO: 28788
  derived and/or modified protein sequence (wt) from neuraminidase__InfluenzaB__AGX16219

SEQ ID NO: 29139 - protein, 466 aa, Artificial Sequence; identical to SEQ ID NO: 28627
  derived and/or modified protein sequence (wt) from neuraminidase__InfluenzaB__AGX16230

SEQ ID NO: 29140 - protein, 466 aa, Artificial Sequence
  derived and/or modified protein sequence (wt) from neuraminidase__InfluenzaB__AGX16241
MLPSTIQTLTLFLTSGGVLLSLYVSASLSYLLYSDILLKFSQTEITAPIMPLDCANASNVQAVNHSATKGVTLLLPEPEWTYPRLSCPGSTFQKALLISPHRFGETKGNSAPLIIREPFIACGPKECKHFALTHYAAQPGGYYNGTREDRNKLRHLISVKLGKIPTVENSIFHMAAWSGSACHDGREWTYIGVDGPDSNALLKIKYGEAYTDTYHSYAKNILRTQESACNCIGGDCYLMITDGPASGISECRFLKIREGRIIKEIFPTGRVKHTEECTCGFASNKTIECACRDNSYTAKRPFVKLNVETDTAEIRLMCTETYLDTPRPNDGSIIGPCESNGDKGSGGIKGGFVHQRMASKIGRWYSRTMSKTKRMGMGLYVKYDGDPWTDSEALTLSGVMVSMEEPGWYSFGFEIKDKKCDVPCIGIEMVHDGGKTTWHSAATAIYCLMGSGQLLWDTVTGVDMAL

SEQ ID NO: 29141 - protein, 466 aa, Artificial Sequence
  derived and/or modified protein sequence (wt) from neuraminidase__InfluenzaB__AGX16252
MLPSTIQTLTLFLTSGGVLLSLYVSASLSYLLYSDILLKFSQTEITAPIMPLDCANASNVQAVNRSAAKGVTLLLPEPEWAYPRLSCPGSTFQKALLISPHRFGETKGNSAPLIIREPFIACGPTECKHFALTHYAAQPGGYYNGTREDRNKLRHLISVKLGKIPTVENSIFHMAAWSGSACHDGKEWTYIGVDGPDSNALLKIKYGEAYTDTYHSYAKNILRTQESACNCIGGDCYLMITDGPASGISECRFLKIREGRIIKEIFPTGRVKHTEECTCGFASNKTIECACRDNRYTAKRPFVKLNVETDTAEIRLMCTETYLDTPRPNDGSITGPCESDGDKGSGGIKGGFVHQRMASKIGRWYSRTMSKTKRMGMGLYVKYDGDPWTDSEALALSGVMVSMEEPGWYSFGFEIKDKKCDVPCIGIEMVHDGGKTTWHSAATAIYCLMGSGQLLWDTVTGVDMAL

SEQ ID NO: 29142 - protein, 466 aa, Artificial Sequence; identical to SEQ ID NO: 28788
  derived and/or modified protein sequence (wt) from neuraminidase__InfluenzaB__AGX16274

SEQ ID NO: 29143 - protein, 466 aa, Artificial Sequence
  derived and/or modified protein sequence (wt) from neuraminidase__InfluenzaB__AGX16285
MLPSTIQTLTLFLTSGGVLLSLYVSASLSYLLYSDILLKFSQTEITAPIMPLDCANASNVQAVNRSAAKGVTLLLPEPEWTYPRLSCPGSTFQKALLISPHRFGETKGNSAPLIIREPFIACGPTECKHFALTHYAAQPGGYYNGTREDRNKLRHLISVKLGKIPTVENSIFHMAAWSGSACHDGKEWTYIGVDGPDSNALLKIKYGEAYTDTYHSYAKNILRTQESACNCIGGDCYLMITDGPASGISECRFLKIREGRIIKEIFPTGRVKHTEECTCGFASNKTIECACRDNSYTAKRPFVKLNVETDTAEIRLMCTETYLDTPRPNDGSTTGPCESDGDKGSGGIKGGFVHQRMASKIGRWYSRTMSKTKRMGMGLYVKYDGDPWTDSEALALSGVMVSMEEPGWYSFGFEIKDKKCDVPCIGIEMVHDGGKTTWHSAATAIYCLMGSGQLLWDTVTGVDMAL

SEQ ID NO: 29144 - protein, 466 aa, Artificial Sequence; identical to SEQ ID NO: 28788
  derived and/or modified protein sequence (wt) from neuraminidase__InfluenzaB__AGX16296

SEQ ID NO: 29145 - protein, 466 aa, Artificial Sequence; identical to SEQ ID NO: 28635
  derived and/or modified protein sequence (wt) from neuraminidase__InfluenzaB__AGX16307

SEQ ID NO: 29146 - protein, 466 aa, Artificial Sequence; identical to SEQ ID NO: 28788
  derived and/or modified protein sequence (wt) from neuraminidase__InfluenzaB__AGX16329

SEQ ID NO: 29147 - protein, 466 aa, Artificial Sequence
  derived and/or modified protein sequence (wt) from neuraminidase__InfluenzaB__AGX16362
MLPSTIQTLTLFLTSGGVLLSLYVSASLSYLLYSDILLKFSQTEITAPIMPLDCANASNVQAVNRSAAKGVTLLLPEPEWTYPRLSCPGSTFQKALLISPHRFGETKGNSAPLIIREPFIACGPTECKHFALTHYAAQPGGYYNGTREDRNKLRHLISVKLGKIPTVENSIFHMAAWSGSACHDGKEWTYIGVDGPDSNALLKIKYGEAYTDTYHSYAKNILRTQESACNCIGGDCYLMITDGPASGVSECRFLKIREGRIIKEIFPTGRVKHTEECTCGFASNKTIECACRDNSYTAKRPFVKLNVETDTAEIRLMCTETYLDTPRPNDGSITGPCESDGDKGSGGIKGGFVHQRMASKIGRWYSRTMSKTKRMGMGLYVKYDGDPWTDSEALALSGVMVSMEEPGWYSFGFEIKDKKCDVPCIGIEMVHDGGKTTWHSAATAIYCLMGSGQLLWDTVTGVDMAL

SEQ ID NO: 29148 - protein, 466 aa, Artificial Sequence; identical to SEQ ID NO: 28960
  derived and/or modified protein sequence (wt) from neuraminidase__InfluenzaB__AGX16373

SEQ ID NO: 29149 - protein, 466 aa, Artificial Sequence
  derived and/or modified protein sequence (wt) from neuraminidase__InfluenzaB__AGX16384
MLPSTIQTLTLFLTSGGVLLSLYVSASLSYLLYSDILLKFSQTEITAPIMPLDCANASNVQAVNRSAAKGVTLLLPEPEWTYPRLSCPGSTFQKALLISPHRFGETKGNSAPLIIREPFIACGPTECKHFALTHYAAQPGGYYNGTREDRNKLKHLISVKLGKIPTVENSIFHMAAWSGSACHDGKEWTYIGVDGPDSNALLKIKYGEAYTDTYHSYAKNILRTQESACNCIGGDCYLMITDGPASGISECRFLKIREGRIIKEIFPTGRVKHTEECTCGFASNKTIECACRDNSYTAKRPFVKLNVETDTAEIRLMCTETYLDTPRPNDGSITGPCESDGDKGSGGIKGGFVHQRMASKIGRWYSRTMSKTKRMGMGLYVKYDGDPWTDSEALALSGVMVSMEEPGWYSFGFEIKDKKCDVPCIGIEMVHDGGKTTWHSAATAIYCLMGSGQLLWDTVTGVDMAL

SEQ ID NO: 29150 - protein, 466 aa, Artificial Sequence; identical to SEQ ID NO: 28817
  derived and/or modified protein sequence (wt) from neuraminidase__InfluenzaB__AGX16406

SEQ ID NO: 29151 - protein, 466 aa, Artificial Sequence; identical to SEQ ID NO: 28817
  derived and/or modified protein sequence (wt) from neuraminidase__InfluenzaB__AGX16427

SEQ ID NO: 29152 - protein, 466 aa, Artificial Sequence; identical to SEQ ID NO: 28817
  derived and/or modified protein sequence (wt) from neuraminidase__InfluenzaB__AGX16438

SEQ ID NO: 29153 - protein, 466 aa, Artificial Sequence; identical to SEQ ID NO: 28817
  derived and/or modified protein sequence (wt) from neuraminidase__InfluenzaB__AGX16449

SEQ ID NO: 29154 - protein, 466 aa, Artificial Sequence; identical to SEQ ID NO: 28817
  derived and/or modified protein sequence (wt) from neuraminidase__InfluenzaB__AGX16460

SEQ ID NO: 29155 - protein, 466 aa, Artificial Sequence
  derived and/or modified protein sequence (wt) from neuraminidase__InfluenzaB__AGX16471
MLPSTIQTLTLFLTSGGVLLSLYVSASLSYLLYSDILLKFSQTEITAPIMPLDCANASNVQAVNRSAAKGVTLLLPEPEWTYPRLSCPGSTFQKALLISPHRFGETKGNSAPLIIREPFIACGPTECKHFALTHYAAQPGGYYNGTREDRNKLRHLISVKLGKIPTVENSIFHMAAWSGSACHDGKEWTYIGVDGPDSNALLKIKYGEAYTDTYHSYAKNILRTQESACNCIGGDCYLMITDGPASGISECRFLKIREGRIIKEIFPTGRVKHTEECTCGFASNKTIECACRDNSYTAKRPFVKLNVETDTAEIRLMCTKTYLDTPRPNDGSITGPCESDGDKGSGGIKGGFVHQRMASKIGRWYSRTMSKTRRMGMGLYVKYDGDPWTDSEALALSGVMVSMEEPGWYSFGFEIKDKKCDVPCIGIEMVHDGGKTTWHSAATAIYCLMGSGQLLWDTVTGVDMAL

SEQ ID NO: 29156 - protein, 466 aa, Artificial Sequence; identical to SEQ ID NO: 28817
  derived and/or modified protein sequence (wt) from neuraminidase__InfluenzaB__AGX16482

SEQ ID NO: 29157 - protein, 466 aa, Artificial Sequence
  derived and/or modified protein sequence (wt) from neuraminidase__InfluenzaB__AGX16493
MLPSTIQTLTLFLTSGGVLLSLYVSASLSYLLYSDILLKFSQTEITAPIMPLDCANASNVQAVNRSAAKGVTLLLPEPEWTYPRLSCPGSTFQKALLISPHRFGETKGNSAPLIIREPFIACGPTECKHFALTHYAAQPGGYYNGTREDRNKLRHLISVKLGKIPTVENSIFHMAAWSGSACHDGKEWTYIGVDGPDSNALLKIKYGEAYTDTYHSYAKNILRTQESACNCIGGDCYLMITDGPASGISECRFLKIREGRIIKEIFPTGRVKHTEECTCGFASNKTIECACRDNSYTAKRPFVKLNVETDTAEIRLMCTETYLDTPRPNDGSITGPCESDGDKGSGGIKGGFVHQRMASKIGRWYSRTMSKTKRMGMGLYVKYDGDPWTDSEALALSGVVVSMEEPGWYSFGFEIKDKKCDVPCIGIEMVHDGGKTTWHSAATAIYCLMGSGQLLWDTVTGVDMAL

SEQ ID NO: 29158 - protein, 466 aa, Artificial Sequence; identical to SEQ ID NO: 28616
  derived and/or modified protein sequence (wt) from neuraminidase__InfluenzaB__AGX16504

SEQ ID NO: 29159 - protein, 466 aa, Artificial Sequence; identical to SEQ ID NO: 28616
  derived and/or modified protein sequence (wt) from neuraminidase__InfluenzaB__AGX16515

SEQ ID NO: 29160 - protein, 466 aa, Artificial Sequence
  derived and/or modified protein sequence (wt) from neuraminidase__InfluenzaB__AGX16548
MLPSTIQTLTLFLTSGGVLLSLYVSASLSYLLYSDILLKFSPTEITAPTMPLDCANASNVQAVNRSATKGVTLLLPEPEWTYPRLSCPGSTFQKALLISPHRFGETKGNSAPLIIREPFIACGPKECKHFALTHYAAQPGGYYNGTRGDRNKLRHLISVKLGKIPTVENSIFHMAAWSGSACHDGKEWTYIGVDGPDNNALLKIKYGEAYTDTYHSYANNILRTQESACNCIGGNCYLMITDGSASGISECRFLKIREGRIIKEIFPTGRVKHTEECTCGFASNKTIECACRDNSYTAKRPFVKLNVETDTAEIRLMCTETYLDTPRPDDGSITGPCESNGDNGSGGIKGGFVHQRMASKIGRWYSRTMSKTKRMGMGLYVKYDGDPWADSDALALSGVMVSMEEPGWYSFGFEIKDKKCDVPCIGIEMVHDGGKETWHSAATAIYCLMGSGQLLWDTVTGVDMAL

SEQ ID NO: 29161 - protein, 466 aa, Artificial Sequence
  derived and/or modified protein sequence (wt) from neuraminidase__InfluenzaB__AGX16559
MLPSTIQTLTLFLTSGGVLLSLYVSASLSYLLYSDILLKFSPTEIIAPTMPLDCANASNVQAVNRSATKGVTLLLPEPEWTYPRLSCPGSTFQKALLISPHRFGETKGNSAPLIIREPFIACGPKECKHFALTHYAAQPGGYYNGTRGDRNKLRHLISVKLGKIPTVENSIFHMAAWSGSACHDGKEWTYIGVDGPDNNALLKIKYGEAYTDTYHSYANNILRTQESACNCIGGNCYLMITDGSASGISECRFLKIREGRIIKEIFPTGRVKHTEECTCGFASNKTIECACRDNSYTAKRPFVKLNVETDTAEIRLMCTETYLDTPRPDDGSITGPCESNGDKGSGGIKGGFVHQRMASKIGRWYSRTMSKTKRMGMGLYVKYDGDPWADSDALALSGVMVSMEEPGWYSFGFEIRDKKCDVPCIGIEMVHDGGKETWHSAATAIYCLMGSGQLLWDTVTGVDMAL

SEQ ID NO: 29162 - protein, 466 aa, Artificial Sequence
  derived and/or modified protein sequence (wt) from neuraminidase__InfluenzaB__AGX16581
MLPSTIQTLTLFLTSGGVLLSLYVSASLSYLLYSDILLKFSPTEIIAPTMPLDCANASNVQAVNRSATKGVTLLLPEPEWTYPRLSCPGSTFQKALLISPHRFGETKGNSAPLIIREPFIACGPKECKHFALTHYAAQPGGYYNGTRGDRNKLRHLISVKLGKIPTVENSIFHMAAWSGSACHDGKEWTYIGVDGPDNNALLKIKYGEAYTDTYHSYANNILRTQESACNCIGGNCYLMITDGSASGISECRFLKIREGRIIKEIFPTGRVKHTEECTCGFASNKTIECACRDNSYTAKRPFVKLNVETDTAEIRLMCTETYLDTPRPDDGSITGPCESNGDKGSGGIKGGFVHQRMASKIGRWYSRTMSKTKRMGMGLYVKYDGDPWADSDALALSGVMVSMEEPGWYSFGFEIKDKKCDVPCIGIEMVHDGGKETWHSAATAIYCLMGSGQLLWDTVTGVDMAL

SEQ ID NO: 29163 - protein, 466 aa, Artificial Sequence; identical to SEQ ID NO: 29162
  derived and/or modified protein sequence (wt) from neuraminidase__InfluenzaB__AGX16592

SEQ ID NO: 29164 - protein, 466 aa, Artificial Sequence; identical to SEQ ID NO: 28616
  derived and/or modified protein sequence (wt) from neuraminidase__InfluenzaB__AGX16603

SEQ ID NO: 29165 - protein, 466 aa, Artificial Sequence; identical to SEQ ID NO: 28682
  derived and/or modified protein sequence (wt) from neuraminidase__InfluenzaB__AGX16614

SEQ ID NO: 29166 - protein, 466 aa, Artificial Sequence; identical to SEQ ID NO: 29160
  derived and/or modified protein sequence (wt) from neuraminidase__InfluenzaB__AGX16625

SEQ ID NO: 29167 - protein, 466 aa, Artificial Sequence
  derived and/or modified protein sequence (wt) from neuraminidase__InfluenzaB__AGX16636
MLPSTIQTLTLFLTSGGVLLSLYVSASLSYLLYSDILLKFSPTEIIAPTMPLDCANASNVQAVNRSATKGVTLLLPEPEWTYPRLSCPGSTFQKALLISPHRFGETKGNSAPLIIREPFIACGPKECKHFALTHYAAQPGGYYNGTRGDRNKLRHLISVKLGKIPTVENSIFHMAAWSGSACHDGKEWTYIGVDGPDNNALLKIKYGEAYTDTYHSYANNILRTQESACNCIGGNCYLMITDGSASGISECRFLKIREGRIIKEIFPTGRVKHTEECTCGFASNKTIECACRDNSYTAKRPFVKLNVETDTAEIRLMCTETYLDTPRPDDGSITGPCESNGDKGSGGIKGGFVHQRMASKIGRWYSRTMSKTKRMGMGLYVKYDGDPWADSDALALSGVMVSMEEPGWYSFGFEIKDKKCDVPCIGIEMVHDGGKETWHSAATAIYCLMGSGQLLWNTVTGVDMAL

SEQ ID NO: 29168 - protein, 466 aa, Artificial Sequence; identical to SEQ ID NO: 28614
  derived and/or modified protein sequence (wt) from neuraminidase__InfluenzaB__AGX16647

SEQ ID NO: 29169 - protein, 466 aa, Artificial Sequence; identical to SEQ ID NO: 29162
  derived and/or modified protein sequence (wt) from neuraminidase__InfluenzaB__AGX16658

SEQ ID NO: 29170 - protein, 466 aa, Artificial Sequence; identical to SEQ ID NO: 28616
  derived and/or modified protein sequence (wt) from neuraminidase__InfluenzaB__AGX16669

SEQ ID NO: 29171 - protein, 466 aa, Artificial Sequence; identical to SEQ ID NO: 28682
  derived and/or modified protein sequence (wt) from neuraminidase__InfluenzaB__AGX16680

SEQ ID NO: 29172 - protein, 466 aa, Artificial Sequence; identical to SEQ ID NO: 28616
  derived and/or modified protein sequence (wt) from neuraminidase__InfluenzaB__AGX16691

SEQ ID NO: 29173 - protein, 466 aa, Artificial Sequence
  derived and/or modified protein sequence (wt) from neuraminidase__InfluenzaB__AGX16702
MLPSTIQTLTLFLTSGGVLLSLYVSASLSYLLYSDILLKFSPTEITAPTMPLDCANASNVQAVNRSATKGVTLLLPEPEWTYPRLSCPGSTFQKALLISPHRFGETKGNSAPLIIREPFIACGPKECKHFALTHYAAQPGGYYNGKRGDRNKLRHLISVKLGKIPTVENSIFHMAAWSGSACHDGKEWTYIGVDGPDNNALLKIKYGEAYTDTYHSYANNILRTQESACNCIGGNCYLMITDGSASGISECRFLKIREGRIIKEIFPTGRVKHTEECTCGFASNKTIECACRDNSYTAKRPFVKLNVETDTAEIRLMCTETYLDTPRPDDGSITGPCESNGDKGSGGIKGGFVHQRMASKIGRWYSRTMSKTKRMGMGLYVKYDGDPWADSDALALSGVMVSMEEPGWYSFGFEIKDKKCDVPCIGIEMVHDGGKETWHSAATAIYCLMGSGQLLWDTVTGVDMAL

SEQ ID NO: 29174 - protein, 466 aa, Artificial Sequence
  derived and/or modified protein sequence (wt) from neuraminidase__InfluenzaB__AGX16713
MLPSTIQTLTLFLTSGGVLLSLYVSASLSYLLYSDILLKFSPTEITAPTMPLDCANASNVQAVNRSATKGVTLLLPEPEWTYPRLSCPGSIFQKALLISPHRFGETKGNSAPLIIREPFIACGPKECKHFALTHYAAQPGGYYNGTRGDRNKLRHLISVKLGKIPTVENSIFHMAAWSGSACHDGKEWTYIGVDGPDNNALLKIKYGEAYTDTYHSYANNILRTQESACNCIGGNCYLMITDGSASGISECRFLKIREGRIIKEIFPTGRVKHTEECTCGFASNKTIECACRDNSYTAKRPFVKLNVETDTAEIRLMCTETYLDTPRPDDGSITGPCESNGDKGSGGIKGGFVHQRMASKIGRWYSRTMSKTKRMGMGLYVKYDGDPWADSDALALSGVMVSMEEPGWYSFGFEIRDKKCDVPCIGIEMVHDGGKETWHSAATAIYCLMGSGQLLWDTVTGVDMAL

SEQ ID NO: 29175 - protein, 466 aa, Artificial Sequence; identical to SEQ ID NO: 28616
  derived and/or modified protein sequence (wt) from neuraminidase__InfluenzaB__AGX16724

SEQ ID NO: 29176 - protein, 466 aa, Artificial Sequence; identical to SEQ ID NO: 29162
  derived and/or modified protein sequence (wt) from neuraminidase__InfluenzaB__AGX16735

SEQ ID NO: 29177 - protein, 466 aa, Artificial Sequence; identical to SEQ ID NO: 29162
  derived and/or modified protein sequence (wt) from neuraminidase__InfluenzaB__AGX16746

SEQ ID NO: 29178 - protein, 466 aa, Artificial Sequence; identical to SEQ ID NO: 28616
  derived and/or modified protein sequence (wt) from neuraminidase__InfluenzaB__AGX16757

SEQ ID NO: 29179 - protein, 466 aa, Artificial Sequence
  derived and/or modified protein sequence (wt) from neuraminidase__InfluenzaB__AGX16768
MLPSTIQTLTLFLTSGGVLLSLYVSASLSYLLYSDILLKFSPTEIIAPTMPLDCANASNVQAVNRSATKGVTLLLPEPEWTYPRLSCPGSTFQKALLISPHRFGETKGNSAPLIIREPFIACGPKECKHFALTHYAAQPGGYYNGTRGDRNKLRHLISVKLGKIPTVENSIFHMAAWSGSACHDGKEWTYIGVDGPDNNALLKIKYGEAYTDTYHSYANNILRTQESACNCIGGNCYLMITDGSASGISECRFLKIREGRIIKEIFPTGRVKHTEECTCGFASNKTIECACRDNSYTAKRPFVKLNVETDTAEIRLMCTETYLDTPRPDDGSITGPCKSNGDKGSGGIKGGFVHQRMASKIGRWYSRTMSKTKRMGMGLYVKYDGDPWADSDALALSGVMVSMEEPGWYSFGFEIKDKKCDVPCIGIEMVHDGGKETWHSAATAIYCLMGSGQLLWDTVTGVDMAL

SEQ ID NO: 29180 - protein, 466 aa, Artificial Sequence; identical to SEQ ID NO: 28682
  derived and/or modified protein sequence (wt) from neuraminidase__InfluenzaB__AGX16779

SEQ ID NO: 29181 - protein, 466 aa, Artificial Sequence
  derived and/or modified protein sequence (wt) from neuraminidase__InfluenzaB__AGX16790
MLPSTIQTLTLFLTSGGVLLSLYVSASLSYLLYSDILLKFSPTEITAPTMPLDCANASNVQAVNRSATKGVTLLLPEPEWTYPRLSCPGSTFQKALLISPHRFGETKGNSAPLIIREPFIACGPKECKHFALTHYAAQPGGYYNGTRGGRNKLRHLISVKLGKIPTVENSIFHMAAWSGSACHDGKEWTYIGVDGPDNNALLKIKYGEAYTDTYHSYANNILRTQESACNCIGGNCYLMITDGSASGISECRFLKIREGRIIKEIFPTGRVKHTEECTCGFASNKTIECACRDNSYTAKRPFVKLNVETDTAEIRLMCTETYLDTPRPDDGSITGPCESNGDKGSGGIKGGFVHQRMASKIGRWYSRTMSKTKRMGMGLYVKYDGDPWADSDALALSGVMVSMEEPGWYSFGFEIRDKKCDVPCIGIEMVHDGGKETWHSAATAIYCLMGSGQLLWDTVTGVDMAL

SEQ ID NO: 29182 - protein, 466 aa, Artificial Sequence
  derived and/or modified protein sequence (wt) from neuraminidase__InfluenzaB__AGX16801
MLPSTIQTLTLFLTSGGVLLSLYVSASLSYLLYSDILLKFSPTEIIAPTMPLDCANASNVQAVNRSATKGVTLLLPEPEWTYPRLSCPGSTFQKALLISPHRFGETKGNSAPLIIREPFIACGPKECKHFALTHYAAQPGGYYNGTRGDRNKLRHLISVKLGKIPTVENSIFHMAAWSGSACHDGKEWTYIGVDGPDNNALLKIKYGEAYTDTYHSYANNILRTQESACNCIGGNCYLMITDGSASGISECRFLKIREGRIIKEIFPTGRVKHTEECTCGFASNKTIECACRDNSYTAKRPFVKLNVETDTAEIRLMCTETYLDTPRPNDGSITGPCESNGDKGSGGIKGGFVHQRMASKIGRWYSRTMSKTKRMGMGLYVKYDGDPWADSDALALSGVMVSMEEPGWYSFGFEIKDKKCDVPCIGIEMVHDGGKETWHSAATAIYCLMGSGQLLWDTVTGVDMAL

SEQ ID NO: 29183 - protein, 466 aa, Artificial Sequence; identical to SEQ ID NO: 28616
  derived and/or modified protein sequence (wt) from neuraminidase__InfluenzaB__AGX16812

SEQ ID NO: 29184 - protein, 466 aa, Artificial Sequence
  derived and/or modified protein sequence (wt) from neuraminidase__InfluenzaB__AGX16823
MLPSTIQTLTLFLTSGGVLLSLYVSASLSYLLYSDILLKFSPTEITAPTMPLDCANASNVQAVNRSATKGVTLLLPEPEWTYPRLSCPGSTFQKALLISPHRFGETKGNSAPLIIREPFIACGPKECKHFALTHYAAQPGGYYNGTRGDRNKLRHLISVKLGKIPTVENSIFHMAAWSGSACHDGKEWTYIGVDGPDNNALLKIKYGEAYTDTYHSYANNILRTQESACNCIGGNCYLMITDGSASGISECRFLKIREGRIIKEIFPTGRVKHTEECTCGFASNKTIECACRDNSYTAKRPFVKLNVETDTAEIRLMCTETYLDTPRPADGSITGPCESNGDKGSGGIKGGFVHQRMASKIGRWYSRTMSKTKRMGMGLYVKYDGDPWADSDALALSGVMVSMEEPGWYSFGFEIKDKKCDVPCIGIEMVHDGGKETWHSAATAIYCLMGSGQLLWDTVTGVDMAL

SEQ ID NO: 29185 - protein, 466 aa, Artificial Sequence; identical to SEQ ID NO: 28616
  derived and/or modified protein sequence (wt) from neuraminidase__InfluenzaB__AGX16834

SEQ ID NO: 29186 - protein, 466 aa, Artificial Sequence
  derived and/or modified protein sequence (wt) from neuraminidase__InfluenzaB__AGX16845
MLPSTIQTLTLFLTSGGVLLSLYVSASLSYLLYSDILLKFSPTEITTPTMPLDCANASNVQAVNRSATKGVTLLLPEPEWTYPRLSCPGSTFQKALLVSPHRFGETKGNSAPLIIREPFIACGPKECKHFALTHYAAQPGGYYNGTRGDRNKLRHLISVKLGKIPTVENSIFHMAAWSGSACHDGKEWTYIGVDGPDNNALLKIKYGEAYTDTYHSYANNILRTQESACNCIGGNCYLMITDGSASGISECRFLKIREGRIIKEIFPTGRVKHTEECTCGFASNKTIECACRDNSYTAKRPFVKLNVETDTAEIRLMCTETYLDTPRPDDGSITGPCESNGDKGSGGIKGGFVHQRMASKIGRWYSRTMSKTKRMGMGLYVKYDGDPWADSDALALSGVMVSMEEPGWYSFGFEIKDKKCDVPCIGIEMVHDGGKETWHSAATAIYCLMGSGQLLWDTVTGVDMAL

SEQ ID NO: 29187 - protein, 466 aa, Artificial Sequence
  derived and/or modified protein sequence (wt) from neuraminidase__InfluenzaB__AGX16856
MLPSTIQTLTLFLTSGGVLLSLYVSASLSYLLYSDILLKFSPTEITAPTVPLDCANASNVQAVNRSATKGVTLLLPEPEWTYPRLSCPGSTFQKALLISPHRFGETKGNSAPLIIREPFIACGPKECKHFALTHYAAQPGGYYSGTRGDRNKLRHLISVKLGKIPTVENSIFHMAAWSGSACHDGKEWTYIGVDGPDNNALLKIKYGEAYTDTYHSYANNILRTQESACNCIGGNCYLMITDGSASGISECRFLKIREGRIIKEIFPTGRVKHTEECTCGFASNKTIECACRDNSYTAKRPFVKLNVETDTAEIRLMCTETYLDTPRPDDGSITGPCESNGDKGSGGIKGGFVHQRMASKIGRWYSRTMSKNKRMGMGLYVKYDGDPWADSDALALSGVMVSMEEPGWYSFGFEIKDKKCDVPCIGIEMVHDGGKETWHSAATAIYCLMGSGQLLWDTVTGVDMAL

SEQ ID NO: 29188 - protein, 466 aa, Artificial Sequence; identical to SEQ ID NO: 28616
  derived and/or modified protein sequence (wt) from neuraminidase__InfluenzaB__AGX16867

SEQ ID NO: 29189 - protein, 466 aa, Artificial Sequence
  derived and/or modified protein sequence (wt) from neuraminidase__InfluenzaB__AGX16878
MLPSTIQTLTLFLTSGGVLLSLYVSASLSYLLYSDILLKFSPTELTAPTMPLDCANASNVQAVNRSATKGVTLLLPEPEWTYPRLSCPGSTFQKALLISPHRFGETKGNSAPLIIREPFIACGPKECKHFALTHYAAQPGGYYNGKRGDRNKLRHLISVKLGKIPTVENSIFHMAAWSGSACHDGKEWTYIGVDGPDNNALLKIKYGEAYTDTYHSYANNILRTQESACNCIGGNCYLMITDGSASGISECRFLKIREGRIIKEIFPTGRVKHTEECTCGFASNKTIECACRDNSYTAKRPFVKLNVETDTAEIRLMCTETYLDTPRPDDGSITGPCESNGDNGSGGIKGGFVHQRMASKIGRWYSRTMSKTKRMGMGLYVKYDGDPWADSDALALSGVMVSMEEPGWYSFGFEIKDKKCDVPCIGIEMVHDGGKETWHSAATAIYCLMGSGQLLWDTVTGVDMAL

SEQ ID NO: 29190 - protein, 466 aa, Artificial Sequence; identical to SEQ ID NO: 29162
  derived and/or modified protein sequence (wt) from neuraminidase__InfluenzaB__AGX16889

SEQ ID NO: 29191 - protein, 466 aa, Artificial Sequence
  derived and/or modified protein sequence (wt) from neuraminidase__InfluenzaB__AGX16900
MLPSTIQTLTLFLTTGGVLLSLYVSASLSYLLYSDILLKFSPTEIIAPTMPLDCANASNVQAVNRSATKGVTLLLPEPEWTYPRLSCPGSTFQKALLISPHRFGETKGNSAPLIIREPFIACGPKECKHFALTHYAAQPGGYYNGTRGDRNKLRHLISVKLGKIPTVENSIFHMAAWSGSACHDGKEWTYIGVDGPDNNALLKIKYGEAYTDTYHSYANNILRTQESACNCIGGNCYLMITDGSASGISECRFLKIREGRIIKEIFPTGRVKHTEECTCGFASNKTIECACRDNSYTAKRPFVKLNVETDTAEIRLMCTETYLDTPRPDDGSITGPCESNGDKGSGGIKGGFVHQRMASKIGRWYSRTMSKTKRMGMGLYVKYDGDPWADSDALALSGVMVSMEEPGWYSFGFEIKDKKCDVPCIGIEMVHDGGKETWHSAATAIYCLMGSGQLLWDTVTGVDMAL

SEQ ID NO: 29192 - protein, 466 aa, Artificial Sequence
  derived and/or modified protein sequence (wt) from neuraminidase__InfluenzaB__AGX16911
MLPSTIQTLTLFLTSGGVLLSLYVSALLSYLLYSDILLKFSPTEITAPTMPLDCANASNVQAVNRSATKGVTLLLPEPEWTYPRLSCPGSTFQKALLISPHRFGETKGNSAPLIIREPFIACGPKECKHFALTHYAAQPGGYYNGTRGDRNKLRHLISVKLGKIPTVENSIFHMAAWSGSACHDGKEWTYIGVDGPDNNALLKIKYGEAYTDTYHSYANNILRTQESACNCIGGNCYLMITDGSASGISECRFLKIREGRIIKEIFPTGRVKHTEECTCGFASNKTIECACRDNSYTAKRPFVKLNVETDTAEIRLMCTETYLDTPRPDDGSITGPCESNGDKGSGGIKGGFVHQRMASKIGRWYSRTMSKTKRMGMGLYVKYDGDPWADSDALALSGVMVSMEEPGWYSFGFEIKDKKCDVPCIGIEMVHDGGKETWHSAATAIYCLMGSGQLLWDTVTGVDMAL

SEQ ID NO: 29193 - protein, 466 aa, Artificial Sequence
  derived and/or modified protein sequence (wt) from neuraminidase__InfluenzaB__AGX16922
MLPSTIQTLTLFLTSGGVLLSLYVSASLSYLLYSDILLKFSPTEITAPTMPLDCANASNVQAVNRSATKGVTFLLPEPEWTYPRLSCPGSTFQKALLISPHRFGETKGNSAPLIIREPFIACGPKECKHFALTHYAAQPGGYYNGTRGDRNKLRHLISVKLGKIPTVENSIFHMAAWSGSACHDGKEWTYIGVDGPDNNALLKIKYGEAYTDTYHSYANNILRTQESACNCIGGNCYLMITDGSASGISECRFLKIREGRIIKEIFPTGRVKHTEECTCGFASNKTIECACRDNSYTAKRPFVKLNVETDTAEIRLMCTETYLDTPRPDDGSITGPCESNGDKGSGGIKGGFVHQRMASKIGRWYSRTMSKTKRMGMGLYVKYDGDPWADSDALALSGVMVSMEEPGWYSFGFEIKDKKCDVPCIGIEMVHDGGKETWHSAATAIYCLMGSGQLLWDTVTGVDMAL

SEQ ID NO: 29194 - protein, 466 aa, Artificial Sequence
  derived and/or modified protein sequence (wt) from neuraminidase__InfluenzaB__AGX16933
MLPSTIQTLTLFLTSGGVLLSLYVSASLSYLLYSDILLKFSPTEINAPTMPLDCANASNVQAVNRSATKGVTLLLPEPEWTYPRLSCPGSTFQKALLISPHRFGETKGNSAPLIIREPFIACGPKECKHFALTHYAAQPGGYYNGTRGDRNKLRHLISVKLGKIPTVENSIFHMAAWSGSACHDGKEWTYIGVDGPDNNALLKIKYGEAYTDTYHSYANNILRTQESACNCIGGNCYLMITDGSASGISECRFLKIREGRIIKEIFPTGRVKHTEECTCGFASNKTIECACRDNSYTAKRPFVKLNVETDTAEIRLMCTETYLDTPRPDDGSITGPCESNGDKGSGGIKGGFVHQRMASKIGRWYSRTMSKTKRMGMGLYVKYDGDPWADSDALALSGVMVSMEEPGWYSFGFEIKDKKCDVPCIGIEMVHDGGKETWHSAATAIYCLMGSGQLLLDTVTGVDMAL

SEQ ID NO: 29195 - protein, 466 aa, Artificial Sequence
  derived and/or modified protein sequence (wt) from neuraminidase__InfluenzaB__AGX16944
MLPSTIQTLTLFLTSGGVLLSLYVSASLSYLLYSDILLKFSPTEITAPTMPLDCANASNVQAVNRSATKGVTLLLPEPEWTYPRLSCPGSTFQKALLISPHRFGETKGNSAPLIIREPFIACGPKECKHFALTHYAAQPGGYYSGTRGDRNKLRHLISVKLGKIPTVENSIFHMAAWSGSACHDGKEWTYIGVDGPDNNALLKIKYGEAYTDTYHSYANNILRTQESACNCIGGNCYLMITDGSASGISECRFLKIREGRIIKEIFPTGRVKHTEECTCGFASNKTIECACRDNSYTAKRPFVKLNVETDTAEIRLMCTETYLDTPRPDDGSITGPCESNGDKGSGGIKGGFVHQRMASKIGRWYSRTMSKNKRMGMGLYVKYDGDPWADSDALALSGVMVSMEEPGWYSFGFEIKDKKCDVPCIGIEMVHDGGKETWHSAATAIYCLMGSGQLLWDTVTGVDMAL

SEQ ID NO: 29196 - protein, 466 aa, Artificial Sequence; identical to SEQ ID NO: 28616
  derived and/or modified protein sequence (wt) from neuraminidase__InfluenzaB__AGX16955

SEQ ID NO: 29197 - protein, 466 aa, Artificial Sequence; identical to SEQ ID NO: 28614
  derived and/or modified protein sequence (wt) from neuraminidase__InfluenzaB__AGX16966

SEQ ID NO: 29198 - protein, 466 aa, Artificial Sequence; identical to SEQ ID NO: 28616
  derived and/or modified protein sequence (wt) from neuraminidase__InfluenzaB__AGX16977

SEQ ID NO: 29199 - protein, 466 aa, Artificial Sequence; identical to SEQ ID NO: 28616
  derived and/or modified protein sequence (wt) from neuraminidase__InfluenzaB__AGX16988

SEQ ID NO: 29200 - protein, 466 aa, Artificial Sequence; identical to SEQ ID NO: 29160
  derived and/or modified protein sequence (wt) from neuraminidase__InfluenzaB__AGX16999

SEQ ID NO: 29201 - protein, 466 aa, Artificial Sequence; identical to SEQ ID NO: 28616
  derived and/or modified protein sequence (wt) from neuraminidase__InfluenzaB__AGX17010

SEQ ID NO: 29202 - protein, 466 aa, Artificial Sequence; identical to SEQ ID NO: 29162
  derived and/or modified protein sequence (wt) from neuraminidase__InfluenzaB__AGX17021

SEQ ID NO: 29203 - protein, 466 aa, Artificial Sequence
  derived and/or modified protein sequence (wt) from neuraminidase__InfluenzaB__AGX17032
MLPSTIQTLTLFLTSGGVLLSLYVSASLSYLLYSDILLKFSPTEITAPTMPLDCANASDVQAVNRSATKGVTLLLPEPEWTYPRLSCPGSTFQKALLISPHRFGETKGNSAPLIIREPFIACGPKECKHFALTHYAAQPGGYYNRTRGDRNKLRHLISVKLGKIPTVENSIFHMAAWSGSACHDGKEWTYIGVDGPDNNALLKIKYGEAYTDTYHSYANNILRTQESACNCIGGNCYLMITDGSASGISECRFLKIREGRIIKEIFPTGRVKHTEECTCGFASNKTIECACRDNSYTAKRPFVKLNVETDTAEIRLMCTETYLDTPRPDDGSITGPCESNGDKGSGGIKGGFVHQRMASKIGRWYSRTMSKTKRMGMGLYVKYDGDPWADSDALALSGVMVSMEEPGWYSFGFEIKDKKCDVPCIGIEMVHDGGKETWHSAATAIYCLMGSGQLLWDTVTGVDMAL

SEQ ID NO: 29204 - protein, 466 aa, Artificial Sequence; identical to SEQ ID NO: 28614
  derived and/or modified protein sequence (wt) from neuraminidase__InfluenzaB__AGX17043

SEQ ID NO: 29205 - protein, 466 aa, Artificial Sequence
  derived and/or modified protein sequence (wt) from neuraminidase__InfluenzaB__AGX17054
MLPSTIQTLTLFLTSGGVLLSLYVSASLSYLLYSDILLKFSPTEITAPTMPLDCANASNVQAVNRSATKGVTLLLPEPEWTYPRLSCPGSTFQKALLISPHRFGETKGNSAPLIIREPFIACGPKECKHFALTHYAAQPGGYYNGTRGDRNKLRHLISVKLGKIPTVENSIFHMAAWSGSACHDGKEWTYIGVDGPDNNALLKIKYGEAYTDTYHSYANNILRTQESACNCIGGNCYLMITDGSASGISECRFLKIREGRIIKEIFPTGRVKHTEECTCGFASNKTIECACRDNSYTAKRPFVKLNVETDTAEIRLMCTETYLDTPRPDDGSITGPCESNGDNGNGGIKGGFVHQRMASKIGRWYSRTMSKTKRMGMGLYVKYDGDPWADSDALALSGVMVSMEEPGWYSFGFEIKDKKCDVPCIGIEMVHDGGKETWHSAATAIYCLMGSGQLLWDTVTGVDMAL

SEQ ID NO: 29206 - protein, 466 aa, Artificial Sequence
  derived and/or modified protein sequence (wt) from neuraminidase__InfluenzaB__AGX17065
MLPSTIQTLTLFLTSGGVLLSLYVSALLSYLLYSDILLKFSPTKIIAPTTSLDSANASNFQAVNHSATKEMTFLLPEPEWTYPRLSCQGSTFQKALLISPHRFGEAKGNSAPLIIREPFIACGPKECKHFALTHYAAQPGGYYNGTREDRNKLRHLISVNLGKIPTVENSIFHMAAWSGSACHDGREWTYIGVDGPDSNALIKIKYGEAYTDTYHSYANNILRTQESACNCIGGDCYLMITDGSASGISKCRFLKIREGRIIKEIFPTGRVEHTEECTCGFASNKTIECACRDNSYTAKRPFVKLNVETDTAEIRLMCTETYLDTPRPDDGSITGPCESNGDKGSGGIKGGFVHQRMASKIGRWYSRTISKTKRMGMELYVKYDGDPWTDSDALAPSGVMVSIEEPGWYSFGFEIKDKKCDVPCIGIEMVHDGGKTTWHSAATAIYCLMGSGQLLWDTVTGVDMAL

SEQ ID NO: 29207 - protein, 466 aa, Artificial Sequence
  derived and/or modified protein sequence (wt) from neuraminidase__InfluenzaB__AGX17076
MLPSTIQTLTLFLTSGGVLLSLYVSASLSYLLYSDILLKFSPTEITAPTMPLDCANASNVQAVNRSATKGVTLLLPEPEWTYPRLSCPGSTFQKALLISPHRFGETKGNSAPLIIREPFIACGPKECKHFALTHYAAQPGGYYNGTRGDRNKLRHLISVKLGKIPTVENSIFHMAAWSGSACHDGKEWTYIGVDGPDNNALLKIKYGEAYTDTYHSYANNILRTQESACNCIGGNCYLMITDGSASGISECRFLKIREGRIIKEIFPTGRVKHTEECTCGFASNKTIECACRDNSYTAKRPFVKLNVETDTAEIRLMCTETYLDTPRPDDGSITGPCESNGDKGSGGIKGGFVHQRMASKIGRWYSRTMSKTKRMGMGLYVKYDGDPWADSDALALSGVMVSMEEPGWYSFGFEIRDKKCDVPCIGIEIVHDGGKETWHSAATAIYCLMGSGQLLWDTVTGVDMAL

SEQ ID NO: 29208 - protein, 466 aa, Artificial Sequence; identical to SEQ ID NO: 29162
  derived and/or modified protein sequence (wt) from neuraminidase__InfluenzaB__AGX17087

SEQ ID NO: 29209 - protein, 466 aa, Artificial Sequence; identical to SEQ ID NO: 29162
  derived and/or modified protein sequence (wt) from neuraminidase__InfluenzaB__AGX17098

SEQ ID NO: 29210 - protein, 466 aa, Artificial Sequence; identical to SEQ ID NO: 29162
  derived and/or modified protein sequence (wt) from neuraminidase__InfluenzaB__AGX17109

SEQ ID NO: 29211 - protein, 466 aa, Artificial Sequence; identical to SEQ ID NO: 29162
  derived and/or modified protein sequence (wt) from neuraminidase__InfluenzaB__AGX17120

SEQ ID NO: 29212 - protein, 466 aa, Artificial Sequence; identical to SEQ ID NO: 28614
  derived and/or modified protein sequence (wt) from neuraminidase__InfluenzaB__AGX17131

SEQ ID NO: 29213 - protein, 466 aa, Artificial Sequence; identical to SEQ ID NO: 28616
  derived and/or modified protein sequence (wt) from neuraminidase__InfluenzaB__AGX17142

SEQ ID NO: 29214 - protein, 466 aa, Artificial Sequence
  derived and/or modified protein sequence (wt) from neuraminidase__InfluenzaB__AGX17153
MLPSTIQTLTLFLTSGGVLLSLYVSASLSYLLYSDILLKFSPTEITAPTMPLDCANASNVQAVNRSATKGVTLLLPEPEWTYPRLSCPGSTFQKALLISPHRFGETKGNSAPLIIREPFIACGPKECKHFALTHYAAQPGGYYNGTRGDRNKLRHLISVKLGKIPTVENSIFHMAAWSGSACHDGKEWTYIGVDGPDNNALLKIKYGEAYTDTYHSYANNILRTQESACNCIGGNCYLMITDGSASGISECRFLKIREGRIIKEIFPTGRVKHTEECTCGFASNKTIECACRDNSYTAKRPFVKLNVETDTAEIRLMCTETYLDTPRPDDGSIIGPCESNGDKGSGGIKGGFVHQRMASKIGRWYSRTMSKTKRMGMGLYVKYDGDPWADSDALALSGVMVSMEEPGWYSFGFEIKDKKCDVPCIGIEMVHDGGKETWHSAATAIYCLMGSGQLLWDTVTGVDMAL

SEQ ID NO: 29215 - protein, 466 aa, Artificial Sequence; identical to SEQ ID NO: 29162
  derived and/or modified protein sequence (wt) from neuraminidase__InfluenzaB__AGX17164

SEQ ID NO: 29216 - protein, 467 aa, Artificial Sequence
  derived and/or modified protein sequence (wt) from neuraminidase__InfluenzaB__AGX17175
MLPSTIQTLTLFLTSGGVLLSLYVSASLSYLLYSDILLKFSPTEITAPTMPLDCANASNVQAVNRSATKGVTLLLLPEPEWTYPRLSCPGSTFQKALLISPHRFGETKGNSAPLIIREPFIACGPKECKHFALTHYAAQPGGYYNGTRGDRNKLRHLISVKLGKIPTVENSIFHMAAWSGSACHDGKEWTYIGVDGPDNNALLKIKYGEAYTDTYHSYANNILRTQESACNCIGGNCYLMITDGSASGISECRFLKIREGRIIKEIFPTGRVKHTEECTCGFASNKTIECACRDNSYTAKRPFVKLNVETDTAEIRLMCTETYLDTPRPDDGSITGPCESNGDKGSGGIKGGFVHQRMASKIGRWYSRTMSKTKRMGMGLYVKYDGDPWADSDALALSGVMVSMEEPGWYSFGFEIRDKKCDVPCIGIEMVHDGGKETWHSAATAIYCLMGSGQLLWDTVTGVDMAL

SEQ ID NO: 29217 - protein, 466 aa, Artificial Sequence
  derived and/or modified protein sequence (wt) from neuraminidase__InfluenzaB__AGX17186
MLPSTIQTLTLFLTSGGVLLSLYVSASLSYLLYSDILLKFSPTEITTPTMPLDCANASNVQAVNRSATKGVTLLLPEPEWTYPRLSCPGSTFQKALLISPHRFGETKGNSAPLIIREPFIACGPKECKHFALTHYAAQPGGYYNGTRGDRNKLRHLISVKLGKIPTVENSIFHMAAWSGSACHDGKEWTYIGVDGPDNNALLKIKYGEAYTDTYHSYANNILRTQESACNCIGGNCYLMITDGSASGISECRFLKIREGRIIKEIFPTGRVKYTEECTCGFASNKTIECACRDNSYTAKRPFVKLNVETDTAEIRLMCTETYLDTPRPDDGSITGPCESNGDKGSGGIKGGFVHQRMASKIGRWYSRTMSKTRRMGMGLYVKYDGDPWADSDALALSGVMVSMEEPGWYSFGFEIKDKKCDVPCIGIEMVHDGGKETWHSAATAIYCLMGSGQLLWDTVTGVDMAL

SEQ ID NO: 29218 - protein, 466 aa, Artificial Sequence; identical to SEQ ID NO: 29193
  derived and/or modified protein sequence (wt) from neuraminidase__InfluenzaB__AGX17197

SEQ ID NO: 29219 - protein, 466 aa, Artificial Sequence
  derived and/or modified protein sequence (wt) from neuraminidase__InfluenzaB__AGX17208
MLPSTIQTLTLFLTSGGVLLSLYVSASLSYLLYSDILLKFSPTEITTPTMPLDCANASNVQAVNRSATKGVTLLLPEPEWTYPRLSCPGSTFQKALLISPHRFGETKGNSAPLIIREPFIACGPKECKHFALTHYAAQPGGYYNGTRGDRNKLRHLISVKLGKIPTVENSIFHMAAWSGSACHDGKEWTYIGVDGPDNNALLKIKYGEAYTDTYHSYANNILRTQESACNCIGGNCYLMITDGSASGISECRFLKIREGRIIKEIFPTGRVKHTEECTCGFASNKTIECACRDNSYTAKRPFVKLNVETDTAEIRLMCTETYLDTPRPDDGSITGPCESNGDKGSGGIKGGFVHQRMASKIGRWYSRTMSKTRRMGMGLYVKYDGDPWADSDALALSGVMVSMEEPGWYSFGFEIKDKKCDVPCIGIEMVHDGGKETWHSAATAIYCLMGSGQLLWDTVTGVDMAL

SEQ ID NO: 29220 - protein, 466 aa, Artificial Sequence; identical to SEQ ID NO: 29162
  derived and/or modified protein sequence (wt) from neuraminidase__InfluenzaB__AGX17219

SEQ ID NO: 29221 - protein, 466 aa, Artificial Sequence; identical to SEQ ID NO: 28616
  derived and/or modified protein sequence (wt) from neuraminidase__InfluenzaB__AGX17230

SEQ ID NO: 29222 - protein, 466 aa, Artificial Sequence; identical to SEQ ID NO: 29162
  derived and/or modified protein sequence (wt) from neuraminidase__InfluenzaB__AGX17241

SEQ ID NO: 29223 - protein, 466 aa, Artificial Sequence
  derived and/or modified protein sequence (wt) from neuraminidase__InfluenzaB__AGX17252
MLPSTIQTLTLFLTSGGVLLSLYVSASLSYLLYSDILLKFSPTEITAPTMPLDCANASNVQAVNRSATKGVTLLLPELEWTYPRLSCPGSTFQKALLISPHRFGETKGNSAPLIIREPFIACGPKECKHFALTYYAAQPGGYYNGTRGDRNKLRHLISVKLGKIPTVENSIFHMAAWSGSACHDGKEWTYIGVDGPDNNALLKIKYGEAYTDTYHSYANNILRTQESACNCIGGNCYLMITDGSASGISECRFLKIREGRIIKEIFPTGRVKHTEECTCGFASNKTIECACRDNSYTAKRPFVKLNVETDTAEIRLMCTETYLDTPRPADGSITGPCESNGDKGSGGIKGGFVHQRMASKIGRWYSRTMSKTKRMGMGLYVKYDGDPWADSDALALSGVMVSMEEPGWYSFGFEIKDKKCDVPCIGIEMVHDGGKETWHSAATAIYCLMGSGQLLWDTVTGVDMAL

SEQ ID NO: 29224 - protein, 466 aa, Artificial Sequence
  derived and/or modified protein sequence (wt) from neuraminidase__InfluenzaB__AGX17263
MLPSTIQTLTLFLTSGGVLLSLYVSASLSYLLYSDILLKLSPTEITAPTMPLDCANASNVQAVNRSATKGVTLLLPEPEWTYPRLSCPGSTFQKALLISPHRFGETKGNSAPLIIREPFIACGPKECKHFALTHYAAQPGGYYNGTRGDRNKLRHLISVKLGKIPTVENSIFHMAAWSGSACHDGKEWTYIGVDGPDNNALLKIKYGEAYTDTYHSYANNILRTQESACNCIGGNCYLMITDGSASGISECRFLKIREGRIIKEIFPTGRVKHTEECTCGFASNKTIECACRDNSYTAKRPFVKLNVETDTAEIRLMCTETYLDTPRPDDGSITGPCESNGDKGSGGIKGGFVHQRMASKIGRWYSRTMSKTKRMGMGLYVKYDGDPWADSDALALSGVMVSMEEPGWYSFGFEIKDKKCDVPCIGIEMVHDGGKETWHSAATAIYCLMGSGQLLWDTVTGVDMAL

SEQ ID NO: 29225 - protein, 466 aa, Artificial Sequence
  derived and/or modified protein sequence (wt) from neuraminidase__InfluenzaB__AGX17274
MLPSTIQTLTLFLTSGGVLLSLYVSASLSYLLYSDILLKFSPTEINAPTMPLDCANASNVQAVNRSATKGVTLLLPEPEWTYPRLSCPGSTFQKALLISPHRFGETKGNSAPLIIREPFIACGPKECKHFALTHYAAQPGGYYNGTRGDRNKLRHLISVKLGKIPTVENSIFHMAAWSGSACHDGKEWTYIGVDGPDNNALLKIKYGEAYTDTYHSYANNILRTQESACNCIGGNCYLMITDGSASGISECRFLKIREGRIIKEIFPTGRVKHTEECTCGFASNKTIECACRDNSYTAKRPFVKLNVETDTAEIRLMCTETYLDTPRPDDGSITGPCESNGDKGSGGIKGGFVHQRMASKIGRWYSRTMSKTKRMGMGLYVKYDGDPWADSDALALSGVMVSMEEPGWYSFGFEIKDKKCDVPCIGIEMVHDGGKETWHSAATAIYCLMGSGQLLWDTVTGVDMAL

SEQ ID NO: 29226 - protein, 466 aa, Artificial Sequence
  derived and/or modified protein sequence (wt) from neuraminidase__InfluenzaB__AGX17285
MLPSTIQTLTLFLTSGGVLLSLYMSASLSYLLYSDILLKFSPTEITAPTMPLDCANASNVQAVNRSATKGVTLLLPEPEWTYPRLSCPGSTFQKALLISPHRFGETKGNSAPLIIREPFIACGPKECKHFALTHYAAQPGGYYNGTRGDRNKLRHLISVKLGKIPTVENSIFHMAAWSGSACHDGKEWTYIGVDGPDNNALLKIKYGEAYTDTYHSYANNILRTQESACNCIGGNCYLMITDGSASGISECRFLKIREGRIIKEIFPTGRVKHTEECTCGFASNKTIECACRDNSYTAKRPFVKLNVETDTAEIRLMCTETYLDTPRPDDGSITGPCESNGDKGSGGIKGGFVHQRMASKIGRWYSRTMSKTKRMGMGLYVKYDGDPWADSDALALSGVMVSMEEPGWYSFGFEIKDKKCDVPCIGIEMVHDGGKETWHSAATAIYCLMGSGQLLWDTVTGVDMAL

SEQ ID NO: 29227 - protein, 466 aa, Artificial Sequence
  derived and/or modified protein sequence (wt) from neuraminidase__InfluenzaB__AGX17296
MLPSTIQTLTLFLTSGGVLLSLYVSASLSYLLYSDILLKFSPTEITAPTMPLDCANASNVQAVNRSATKGVTLLLPEPEWTYPRLSCPGSTFQKALLISPHRFGEAKGNSAPLIIREPFIACGPKECKHFALTHYAAQPGGYYNGTRGDRNKLRHLISVKLGKIPTVENSIFHMAAWSGSACHDGKEWTYIGVDGPDNNALLKIKYGEAYTDTYHSYANNILRTQESACNCIGGNCYLMITDGSASGISECRFLKIREGRIIKEIFPTGRVKHTEECTCGFASNKTIECACRDNSYTAKRPFVKLNVETDTAEIRLMCTETYLDTPRPDDGSITGPCESNGDKGSGGIKGGFVHQRMASKIGRWYSRTMSKTKRMGMGLYVKYDGDPWADSDALALSGVMVSMEEPGWYSFGFEIKDKKCDVPCIGIEMVHDGGKETWHSAATAIYCLMGSGQLLWDTVTGVDMAL

SEQ ID NO: 29228 - protein, 466 aa, Artificial Sequence; identical to SEQ ID NO: 29160
  derived and/or modified protein sequence (wt) from neuraminidase__InfluenzaB__AGX17307

SEQ ID NO: 29229 - protein, 466 aa, Artificial Sequence; identical to SEQ ID NO: 28614
  derived and/or modified protein sequence (wt) from neuraminidase__InfluenzaB__AGX17318

SEQ ID NO: 29230 - protein, 466 aa, Artificial Sequence
  derived and/or modified protein sequence (wt) from neuraminidase__InfluenzaB__AGX17329
MLPSTIQTLTLFLTSGGVLLSLYVSASLSYLLYSDMLLKFSPTEITAPTMPLDCANASNVQAVNRSATKGVTLLLPEPEWTYPRLSCPGSTFQKALLISPHRFGETKGNSAPLIIREPFIACGPKECKHFALTHYAAQPGGYYSGTRGDRNKLRHLISVKLGKIPTVENSIFHMAAWSGSACHDGKEWTYIGVDGPDNNALLKIKYGEAYTDTYHSYANNILRTQESACNCIGGNCYLMITDGSASGISECRFLKIREGRIIKEIFPTGRVKHTEECTCGFASNKTIECACRDNSYTAKRPFVKLNVETDTAEIRLMCTETYLDTPRPDDGSITGPCESNGDKGSGGIKGGFVHQRMASKIGRWYSRTMSKNKRMGMGLYVKYDGDPWADSDALALSGVMVSMEEPGWYSFGFEIKDKKCDVPCIGIEMVHDGGKETWHSAATAIYCLMGSGQLLWDTVTGVDMAL

SEQ ID NO: 29231 - protein, 466 aa, Artificial Sequence; identical to SEQ ID NO: 29162
  derived and/or modified protein sequence (wt) from neuraminidase__InfluenzaB__AGX17340

SEQ ID NO: 29232 - protein, 466 aa, Artificial Sequence
  derived and/or modified protein sequence (wt) from neuraminidase__InfluenzaB__AGX17351
MLPSTIQTLTLFLTSGGVLLSLYVSASLSYLLYSDILLKFSPTEITAPTMPLDCANASNVQAVNRSATKGVTLLLPEPEWTYPRLSCPGSTFQKALLISPHRFGETKGNSAPLIIREPFIACGPKECKHFALTHYAAQPGGYYNGTRGDRNKLRHLISVKLGKIPTVENSIFHMAAWSGSACHDGKEWTYIGVDGPDNNALLKIKYGEAYTDTYHSYANNILRTQESACNCIGGNCYLMITDGSASGISECRFLKIREGRIIKEIFPTGRVKHTEECTCGFASNKTIECACRDNSYTAKRPFVKLNVETDTAEIRLMCTETYLDTPRPDDGSITGPCETNGDKGSGGIKGGFVHQRMASKIGRWYSRTMSKTKRMGMGLYVKYDGDPWADSDALALSGVMVSMEEPGWYSFGFEIKDKKCDVPCIGIEMVHDGGKETWHSAATAIYCLMGSGQLLWDTVTGVDMAL

SEQ ID NO: 29233 - protein, 466 aa, Artificial Sequence
  derived and/or modified protein sequence (wt) from neuraminidase__InfluenzaB__AGX17362
MLPSTIQTLTLFLTSGGVLLSLYVSASLSYLLYSDILLKFSPTEITAPTIPLDCANASNIQAVNRSATKGVTLLLPEPEWTYPRLSCPGSTFQKALLISPHRFGETKGNSAPLIIREPFIACGPKECKHFALTHYAAQPGGYYNGTRGDRNKLRHLISVKLGKIPTVENSIFHMAAWSGSACHDGKEWTYIGVDGPDNNALLKIKYGEAYTDTYHSYANNILRTQESACNCIGGNCYLMITDGSASGISECRFLKIREGRIIKEIFPTGRVKHTEECTCGFASNKTIECACRDNSYTAKRPFVKLNVETDTAEIRLMCTETYLDTPRPDDGSITGPCESNGDKGSGGIKGGFVHQRMASKIGRWYSRTMSKTKRMGMGLYVKYDGDPWADSDALALSGVMVSMEEPGWYSFGFEIKDKKCDVPCIGIEMVHDGGKETWHSAATAIYCLMGSGQLLWDTVTGVDMAL

SEQ ID NO: 29234 - protein, 466 aa, Artificial Sequence
  derived and/or modified protein sequence (wt) from neuraminidase__InfluenzaB__AGX17373
MLPSTIQTLTLFLTSGGVLLSLYVSASLSYLLYSDILLKFSPTEITAPTMPLDCANASNVQAVNRSATKGVTLLLPEPEWTYPRLSCPGSTFQKALLISPHRFGETKGNSAPLIIREPFIACGPKECKHFALTHYAAQPGGYYNGTRGDRNKLRHLISVKLGKIPTVENSIFHMAAWSGSACHDGKEWTYIGVDGPDNNALLKIKYGEAYTDTYHSYANNILRTQESACNCIGGNCYLMITDGSASGVSECRFLKIREGRIIKEIFPTGRVKHTEECTCGFANNKTIECACRDNSYTAKRPFVKLNVETDTAEIRLMCTETYLDTPRPDDGSITGPCESNGDKGSGGIKGGFVHQRMASKIGRWYSRTMSKTKRMGMGLYVKYDGDPWADSDALALSGVMVSMEEPGWYSFGFEIKDKKCDVPCIGIEMVHDGGKETWHSAATAIYCLMGSGQLLWDTVTGVNMAL

SEQ ID NO: 29235 - protein, 466 aa, Artificial Sequence; identical to SEQ ID NO: 28614
  derived and/or modified protein sequence (wt) from neuraminidase__InfluenzaB__AGX17384

SEQ ID NO: 29236 - protein, 466 aa, Artificial Sequence; identical to SEQ ID NO: 28682
  derived and/or modified protein sequence (wt) from neuraminidase__InfluenzaB__AGX17395

SEQ ID NO: 29237 - protein, 466 aa, Artificial Sequence
  derived and/or modified protein sequence (wt) from neuraminidase__InfluenzaB__AGX17404
MLPSTIQTLTLFLTSGGVLLSLYVSASLSYLLYSDILLKFSPTEITAPTMPLDCANASNVQAVNRSATKGVTLLLPEPEWTYPRLSCPGSTFQKALLISPHRFGETKGNSAPLIIREPFIACGPKECKHFALTHYAAQPGGYYNGTRGDRNKLRHLISVKLGKIPTVENSIFHMAAWSGSACHDGKEWTYIGVDGSDNNALLKIKYGEAYTDTYHSYANNILRTQESACNCIGGNCYLMITDGSASGISECRFLKIREGRIIKEIFPTGRVKHTEECTCGFASNKTIECACRDNSYTAKRPFVKLNVETDTAEIRLMCTETYLDTPRPDDGSITGPCESNGDKGSGGIKGGFVHQRMASKIGRWYSRTMSKTKRMGMGLYVKYDGDPWADSDALALSGIMVSMEEPGWYSFGFEIKDKKCDVPCIGIEMVHDGGKETWHSAATAIYCLMGSGQLLWDTVTGVDMAL

SEQ ID NO: 29238 - protein, 466 aa, Artificial Sequence
  derived and/or modified protein sequence (wt) from neuraminidase__InfluenzaB__AGX17415
MLPSTIQTLTLFLTSGGVLLSLYVSASLSYLLYSDILLKFSPTEITAPTMPLDCANASNVQAVNRSATKGVTLLLPEPDWTYPRLSCPGSTFQKALLISPHRFGETKGNSAPLIIREPFIACGPKECKHFALTHYAAQPGGYYNGTRGDRNKLRHLISVKLGKIPTVENSIFHMAAWSGSACHDGKEWTYIGVDGPDNNALLKIKYGEAYTDTYHSYANNILRTQESACNCIGGNCYLMITDGSASGISECRFLKIREGRIIKEIFPTGRVKHTEECTCGFASNKTIECACRDNSYTAKRPFVKLNVETDTAEIRLMCTETYLDTPRPDDGSITGPCESNGDKGSGGIKGGFVHQRMASKIGRWYSRTMSKTKRMGMGLYVKYDGDPWADSDALALSGVMVSMEEPGWYSFGFEIKDKKCDVPCIGIEMVHDGGKETWHSAATAIYCLMGSGQLLWDTVTGVDMAL

SEQ ID NO: 29239 - protein, 466 aa, Artificial Sequence
  derived and/or modified protein sequence (wt) from neuraminidase__InfluenzaB__AGX17426
MLPSTIQTLTLFLTSGGVLLSLYVSASLSYLLYSDILLKFSPTEITAPTMPLDCANASNVQAVNRSATKGVTFLLPEPEWTYPRLSCPGSTFQKALLISPHRFGETKGNSAPLIIREPFIACGPKECKHFALTHYAAQPGGYYNGTRGDRNKLRHLISVKLGKIPTVENSIFHMAAWSGSACHDGKEWTYIGVDGPDNNALLKIKYGEAYTDTYHSYANNILRTQESACNCIGGNCYLMITDGSASGISECRFLKIREGRIIKEIFPTGRVKHTEECTCGFASNKTIECACRDNSYTAKRPFVKLNVETDTAEIRLMCTETYLDTPRPDDGSITGPCESNGDKGSGGIKGGFVHQRMASKIGRWYSRTMSKTKRMGMGLYVKYDGDPWADSDALALSGVMVSMEEPGWYSFGFEIRDKKCDVPCIGIEMVHDGGKETWHSAATAIYCLMGSGQLLWDTVTGVDMAL

SEQ ID NO: 29240 - protein, 466 aa, Artificial Sequence
  derived and/or modified protein sequence (wt) from neuraminidase__InfluenzaB__AGX17437
MLPSTIQTLTLFLTSGGVLLSLYVSVSLSYLLYSDILLKFSPTEITAQTMPLDFANASNVQAVNRSATKGVTLLLPEPEWTYPRLSCPGSTFQKALLISPHRFGETKGNSAPLIIREPFIACGPKECKHFALTHYAAQPGGYYNGTRGDRNKLRHLISVKLGKIPTVENSIFHMAAWSGSACHDGKEWTYIGVDGPDNNALLKIKYGEAYTDTYHSYANNILRTQESACNCIGGNCYLMITDGSASGISECRFLKIREGRIIKEIFPTGRVKHTEECTCGFASNKTIECACRDNSYTAKRPFVKLNVETDTAEIRLMCTETYLDTPRPDDGSITGPCESNGDKGSGGIKGGFVHQRMASKIGRWYSRTMSKTKRMGMGLYVKYDGDPWADSDALALSGVMVSMEEPGWYSFGFEIRDKKCDVPCIGIEMVHDGGKETWHSAATAIYCLMGSGQLLWDTVTGVDMAL

SEQ ID NO: 29241 - protein, 466 aa, Artificial Sequence
  derived and/or modified protein sequence (wt) from neuraminidase__InfluenzaB__AGX17448
MLPSTIQTLTLFLTSGGVLLSLYVSASLSYLLYSDILLKFSPTEITAPTMPLDCANASNVQAVNRSATKGVTLLLPEPEWTYPRLSCPGSTFQKALLISPHRFGETKGNSAPLIIREPFIACGPKECKHFALTHYAAQPGGYYNGTRGDRNKLRHLISVKLGKIPTVENSIFHMAAWSGSACHDGKEWTYIGVDGPDNNALLKIKYGEAYTDTYHSYANNILRTQESACNCIGGNCYLMITDGSASGISECRFLKIREGRIIKEIFPTGRVKHTEECTCGFASNKTIECACRDNSYTAKRPFVKLNVETDTAEIRLMCTETYLDTPRPDDGSITGPCETNGDKGSGGIKGGFVHQRMASKIGRWYSRTMSKTKRMGMGLYVKYDGDPWADSDALVLSGVMVSMEEPGWYSFGFEIKDKKCDVPCIGIEMVHDGGKETWHSAATAIYCLMGSGQLLWDTVTGVDMAL

SEQ ID NO: 29242 - protein, 466 aa, Artificial Sequence
  derived and/or modified protein sequence (wt) from neuraminidase__InfluenzaB__AGX17459
MLPSTIQTLTLFLTSGGVLLSLYVSASLSYLLYSDILLKFSPTEITASTMPLDCANASNVQAVNRSATKGVTLLLPEPDWTYPRLSCPGSTFQKALLISPHRFGETKGNSAPLIIREPFIACGPKECKHFALTHYAAQPGGYYNGTRGDRNKLRHLISVKLGKIPTVENSIFHMAAWSGSACHDGKEWTYIGVDGPDNNALLKIKYGEAYTDTYHSYANNILRTQESACNCIGGNCYLMITDGSASGISECRFLKIREGRIIKEIFPTGRVKHTEECTCGFASNKTIECACRDNSYTAKRPFVKLNVETDTAEIRLMCTETYLDTPRPDDGSITGPCESNGDKGSGGIKGGFVHQRMASKIGRWYSRTMSKTKRMGMGLYVKYDGDPWADSDALALSGVMVSMEEPGWYSFGFEIKDKKCDVPCIGIEMVHDGGKETWHSAATAIYCLMGSGQLLWDTVTGVDMAL

SEQ ID NO: 29243 - protein, 466 aa, Artificial Sequence; identical to SEQ ID NO: 28614
  derived and/or modified protein sequence (wt) from neuraminidase__InfluenzaB__AGX17470

SEQ ID NO: 29244 - protein, 466 aa, Artificial Sequence
  derived and/or modified protein sequence (wt) from neuraminidase__InfluenzaB__AGX17481
MLPSTIQTLTLFLTSGGVLLSLYVSASLSYLLYSDILLKFSPTEITAPTMPLDCANASNVQAVNRSATKGVTLILPEPEWTYPRLSCPGSTFQKALLISPHRFGETKGNSAPLIIREPFIACGPKECKHFALTHYAAQPGGYYNGTRGDRNKLRHLISVKLGKIPTVENSIFHMAAWSGSACHDGKEWTYIGVDGPDNNALLKIKYGEAYTDTYHSYANNILRTQESACNCIGGNCYLMITDGSASGISECRFLKIREGRIIKEIFPTGRVKHTEECTCGFASNKTIECACRDNSYTAKRPFVKLNVETDTAEIRLMCTETYLDTPRPDDGSITGPCESNGDKGSGGIKGGFVHQRMASKIGRWYSRTMSKTKRMGMGLYVKYDGDPWADSDALALSGVMVSVEEPGWYSFGFEIKDKKCDVPCIGIEMVHDGGKETWHSAATAIYCLMGSGQLLWDTVTGVDMAL

SEQ ID NO: 29245 - protein, 466 aa, Artificial Sequence
  derived and/or modified protein sequence (wt) from neuraminidase__InfluenzaB__AGX17492
MLPSTIQTLTLFLTSGGVLLSLYVSASLSYLLYSDILLKFSPTEITAPTMPLDCANASNVQAVNRSATKGVTLLLPEPEWTYPRLSCPGSTFQKALLISPHRFGETKGNSAPLIIREPFIACGPKECKHFALTHYAAQPGGYYNGTRGDRNKLRHLISVKLGKIPTVENSIFHMAAWSGSACHDGKEWTYIGVDGPDNNALLKIKYGEAYTDTYHSYANNILRTQESACNCIGGNCYLMITDGSASGISECRFLKIREGRIIKEIFPTGRVKHTEECTCGFASNKTIECACRDNSYTAKRPFVKLNVETDTAEIRLMCTETYLDTPRPDDGSITGPCESNGDKGSGGIKGGFVHQRMASKIGRWYSRTMSKTKRMGMGLYVKYDGDPWADSDALALSGVMVSMEEPGWYSFGFEIKDKKCDVPCIGIEMVHDGGKETWHSAATAIYCLMGSGQLLWDTVTGVDIAL

SEQ ID NO: 29246 - protein, 466 aa, Artificial Sequence
  derived and/or modified protein sequence (wt) from neuraminidase__InfluenzaB__AGX17503
MLPSTIQTLTLFLTSGGVLLSLYVSASLSYLLYSDILLKFSPTEITAPTMPLDCANASNVQAVNRSATKGVTLLLPEPEWTYPRLSCPGLTFQKALLISPHRFGETKGNSAPLIIREPFIACGPKECKHFALTHYAAQPGGYYNGTRGDRNKLRHLISVKLGKIPTVENSIFHMAAWSGSACHDGKEWTYIGVDGPDNNALLKIKYGEAYTDTYHSYANNILRTQESACNCIGGNCYLMITDGSASGISECRFLKIREGRIIKEIFPTGRVKHTEECTCGFASNKTIECACRDNSYTAKRPFVKLNVETDTAEIRLMCTETYLDTPRPDDGSITGPCESNGDKGSGGIKGGFVHQRMASKIGRWYSRTMSKTKRMGMGLYVKYDGDPWADSDALALSGVMVSMEEPGWYSFGFEIKDKKCDVPCIGIEMVHDGGKETWHSAATAIYCLMGSGQLLWDTVTGVDMAL

SEQ ID NO: 29247 - protein, 466 aa, Artificial Sequence; identical to SEQ ID NO: 28614
  derived and/or modified protein sequence (wt) from neuraminidase__InfluenzaB__AGX17514

SEQ ID NO: 29248 - protein, 466 aa, Artificial Sequence
  derived and/or modified protein sequence (wt) from neuraminidase__InfluenzaB__AGX17525
MLPSTIQTLTLFLTSGGVLLSLYVSASLSYLLYSDILLKFSPTEITAPTMPLDCANASNVQAVNRSATKGVTLLLPEPEWTYPRLSCPGSTFQKALLISPHRFGETKGNSAPLIIREPFIACGPKECKHFALTHYAAQPGGYYNGKRGDRNKLRHLISVKLGKIPTVENSIFHMAAWSGSACHDGKEWTYIGVDGPDNNALLKIKYGEAYTDTYHSYANNILRTQESACNCIGGNCYLMITDGSASGISECRFLKIREGRIIKEIFPTGRVKHTEECTCGFASNKTIECACRDNSYTAKRPFVKLNVETDTAEIRLMCTETYLDTPRPDDGSITGPCESNGDKGSGGIKGGFVHQRMASKIGRWYSRTMSKTKRMGMGLYVKYDGDPWADSDALALSGVMVSMEEPGWYSFGFEIRDKKCDVPCIGIEMVHDGGKETWHSAATAIYCLMGSGQLLWDTVTGVDMAL

SEQ ID NO: 29249 - protein, 466 aa, Artificial Sequence; identical to SEQ ID NO: 29193
  derived and/or modified protein sequence (wt) from neuraminidase__InfluenzaB__AGX17536

SEQ ID NO: 29250 - protein, 466 aa, Artificial Sequence; identical to SEQ ID NO: 29224
  derived and/or modified protein sequence (wt) from neuraminidase__InfluenzaB__AGX17547

SEQ ID NO: 29251 - protein, 466 aa, Artificial Sequence
  derived and/or modified protein sequence (wt) from neuraminidase__InfluenzaB__AGX17558
MLPSTIQTLTLFLTSGGVLLSLYVSASLSYLLYSDVLLKFSPAEITAPTMPLDCANASNVQAVNRSATKGVTLLLPEPEWTYPRLSCPGSTFQKALLISPHRFGETKGNSAPLIIREPFIACGPKECKHFALTHYAAQPGGYYNGTRGDRNKLRHLISVKLGKIPTVENSIFHMAAWSGSACHDGKEWTYIGVDGPDNNALLKIKYGEAYTDTYHSYANNILRTQESACNCIGGNCYLMITDGSASGVSECRFLKIREGRIIKEIFPTGRVKHTEECTCGFASNKTIECACRDNSYTAKRPFVKLNVETDTAEIRLMCTETYLDTPRPDDGSITGPCESNGDKGSGGIKGGFVHQRMASKIGRWYSRTMSKTKRMGMGLYVKYDGDPWADSDALALSGVMVSMEEPGWYSFGFEIKDKKCDVPCIGIEMVHDGGKETWHSAATAIYCLMGSGQLLWDTVTGVDMAL

SEQ ID NO: 29252 - protein, 466 aa, Artificial Sequence; identical to SEQ ID NO: 28743
  derived and/or modified protein sequence (wt) from neuraminidase__InfluenzaB__AGX17569

SEQ ID NO: 29253 - protein, 466 aa, Artificial Sequence; identical to SEQ ID NO: 28670
  derived and/or modified protein sequence (wt) from neuraminidase__InfluenzaB__AGX17580

SEQ ID NO: 29254 - protein, 466 aa, Artificial Sequence
  derived and/or modified protein sequence (wt) from neuraminidase__InfluenzaB__AGX17591
MLPSTIQTLTLFLTSGGVLLSLYVSASLSYLLYSDILLKFPPTEITAPTMPLDCANASNVQAVNRSATKGVTLLLPEPEWTYPRLSCPGSTFQKALLISPHRFGETKGNSAPLIIREPFIACGPKECKHFALTHYAAQPGGYYNGTRGDRNKLRHLISVKLGKIPTVENSIFHMAAWSGSACHDGKEWTYIGVDGPDNNALLKIKYGEAYTDTYHSYANNILRTQESACNCIGGNCYLMITDGSASGVSECRFLKIREGRIIKEIFPTGRVKHTEECTCGFASNKTIECACRDNSYTAKRPFVKLNVETDTAEIRLMCTETYLDTPRPDDGSITGPCESNGDKGSGGIKGGFVHQRMASKIGRWYSRTMSKTKRMGMGLYVKYDGDPWADSDALAFSGVMVSMEEPGWYSFGFEIKDKKCDVPCIGIEMVHDGGKETWHSAATAIYCLMGSGQLLWDTVTGVNMAL

SEQ ID NO: 29255 - protein, 466 aa, Artificial Sequence; identical to SEQ ID NO: 28668
  derived and/or modified protein sequence (wt) from neuraminidase__InfluenzaB__AGX17602

SEQ ID NO: 29256 - protein, 466 aa, Artificial Sequence; identical to SEQ ID NO: 29254
  derived and/or modified protein sequence (wt) from neuraminidase__InfluenzaB__AGX17613

SEQ ID NO: 29257 - protein, 466 aa, Artificial Sequence; identical to SEQ ID NO: 28841
  derived and/or modified protein sequence (wt) from neuraminidase__InfluenzaB__AGX17624

SEQ ID NO: 29258 - protein, 466 aa, Artificial Sequence
  derived and/or modified protein sequence (wt) from neuraminidase__InfluenzaB__AGX17635
MLPSTIQTLTLFLTSGGVLLSLYVSASLSYLLYSDILLKFPPTEITAPTMPLDCANASNVQAVNRSATKGVTLLLPEPEWTYPRLSCPGSTFQKALLISPHRFGETKGNSAPLIIREPFIACGPKECKHFALTHYAAQPGGYYNGTRGDRNKLRHLISVKLGKIPTVENSIFHMAAWSGSACHDGKEWTYIGVDGPDNNALLKIKYGEAYTDTYHSYANNILRTQESACNCIGGNCYLMITDGSASGISECRFLKIREGRIIKEIFPTGRVKHTEECTCGFASNKTIECACRDNSYTAKRPFVKLNVETDTAEIRLMCTETYLDTPRPDDGSITGPCESNGDKGSGGIKGGFVHQRMASKIGRWYSRTMSKTKRMGMGLYVKYDGDPWADSDALAFSGVMVSMEEPGWYSFGFEIKDKKCDVPCIGIEMVHDGGKETWHSAATAIYCLMGSGQLLWDTVTGVNMAL

SEQ ID NO: 29259 - protein, 466 aa, Artificial Sequence; identical to SEQ ID NO: 28841
  derived and/or modified protein sequence (wt) from neuraminidase__InfluenzaB__AGX17657

SEQ ID NO: 29260 - protein, 466 aa, Artificial Sequence; identical to SEQ ID NO: 29254
  derived and/or modified protein sequence (wt) from neuraminidase__InfluenzaB__AGX17668

SEQ ID NO: 29261 - protein, 466 aa, Artificial Sequence
  derived and/or modified protein sequence (wt) from neuraminidase__InfluenzaB__AGX17679
MLPSTIQTLTLFLTSGGVLLSLYVSASLSYLLYSDILLKFSPTEITAPTMPLDCANASNVQAVNRSATKGVTLLLPEPEWTYPRLSCPGSTFQKALLISPHRFGETKGNSAPLIIREPFIACGPNECKHFALTHYAAQPGGYYNGTRGDRNKLRHLISVKLGKIPTVENSIFHMAAWSGSACHDGKEWTYIGVDGPDNNALLKIKYGEAYTDTYHSYANNILRTQESACNCIGGNCYLMITDGSASGVSECRFLKIREGRIIKEIFPTGRVKHTEECTCGFASNKTIECACRDNSYTAKRPFVKLNVEIDTAEIRLMCTDTYLDTPRPDDGSITGPCESNGDKGSGGIKGGFVHQRMASKIGRWYSRTMSKTERMGMGLYVKYDGDPWADSDALAFSGVMVSMKEPGWYSFGFEIKDKKCDVPCIGIEMVHDGGKETWHSAATAIYCLMGSGQLLWDTVTGVDMAL

SEQ ID NO: 29262 - protein, 466 aa, Artificial Sequence; identical to SEQ ID NO: 28841
  derived and/or modified protein sequence (wt) from neuraminidase__InfluenzaB__AGX17690

SEQ ID NO: 29263 - protein, 466 aa, Artificial Sequence
  derived and/or modified protein sequence (wt) from neuraminidase__InfluenzaB__AGX17701
MLPSTIQTLTLFLTSGGVLLSLYVSASLSYLLYSDILLKFPPTEITAPTMPLDCANASNVQAVNRSATKGVTLLLPEPEWTYPRLSCPGSTFQKALLISPHRFGETKGNSAPLIIREPFIACGPKECKHFALTHYAAQPGGYYNGKRGDRNKLRHLISVKLGKIPTVENSIFHMAAWSGSACHDGKEWTYIGVDGPDNNALLKIKYGEAYTDTYHSYANNILRTQESACNCIGGNCYLMITDGSASGVSECRFLKIREGRIIKEIFPTGRVKHTEECTCGFASNKTIECACRDNSYTAKRPFVKLNVETDTAEIRLMCTETYLDTPRPDDGSITGPCESNGDKGSGGIKGGFVHQRMASKIGRWYSRTMSKTKRMGMGLYVKYDGDPWADSDALAFSGVMVSMEEPGWYSFGFEIKDKKCDVPCIGIEMVHDGGKETWHSAATAIYCLMGSGQLLWDTVTGVNMAL

SEQ ID NO: 29264 - protein, 466 aa, Artificial Sequence; identical to SEQ ID NO: 28841
  derived and/or modified protein sequence (wt) from neuraminidase__InfluenzaB__AGX17723

SEQ ID NO: 29265 - protein, 466 aa, Artificial Sequence; identical to SEQ ID NO: 29261
  derived and/or modified protein sequence (wt) from neuraminidase__InfluenzaB__AGX17734

SEQ ID NO: 29266 - protein, 466 aa, Artificial Sequence
  derived and/or modified protein sequence (wt) from neuraminidase__InfluenzaB__AGX17745
MLPSTIQTLTLFLTSGGVLLSLYVSASLSYLLYSDILLKFPPTEITAPTMPLDCANASNVQAVNRSATKGVTLLLPEPEWTYPRLSCSGSTFQKALLISPHRFGEIKGNSAPLIIREPFIACGPKECKHFALTHYAAQPGGYYNGTRGDRNKLRHLISVKLGKIPTVENSIFHMAAWSGSACHDGKEWTYIGVDGPDNNALLKIKYGEAYTDTYHSYANNILRTQESACNCIGGNCYLMITDGSASGVSECRFLKIREGRIIKEIFPTGRVKHTEECTCGFASNKTIECACRDNSYTAKRPFVKLNVETDTAEIRLMCTETYLDTPRPDDGSITGPCESNGDKGSGGIKGGFVHQRMASKIGRWYSRTMSKTKRMGMGLYVKYDGDPWADSDALAFSGVMVSMEEPGWYSFGFEIKDKKCDVPCIGIEMVHDGGKETWHSAATAIYCLMGSGQLLWDTVTGVNMAL

SEQ ID NO: 29267 - protein, 466 aa, Artificial Sequence
  derived and/or modified protein sequence (wt) from neuraminidase__InfluenzaB__AGX17756
MLPSTIQTLTLFLTSGGVLLSLYVSASLSYLLYSDILLKFSPTEITAPTMPLDCANASNVHAVNRSATKGVTLLLPEPEWTYPRLSCPGSTFQKALLISPHRFGETKGNSAPLIIREPFIACGPNECKHFALTHYAARPGGYYNGTRGDRNKLRHLISVKLGKIPTVENSIFHMAAWSGSACHDGKEWTYIGVDGPDNNALLKIKYGEAYTDTYHSYANNILRTQESACNCIGGNCYLMITDGSASGVSECRFLKIREGRIIKEIFPTGRVKHTEECTCGFASNKTIECACRDNSYTAKRPFVKLNVETDTAEIRLMCTDTYLDTPRPDDGSITGPCESNGDKGSGGIKGGFVHQRMASKIGRWYSRTMSKTERMGMGLYVKYDGDPWADSDALAFSGVMVSMKEPGWYSFGFEIKDKKCDVPCIGIEMVHDGGKETWHSAATAIYCLMGSGQLLWDTVTGVDMAL

SEQ ID NO: 29268 - protein, 466 aa, Artificial Sequence; identical to SEQ ID NO: 28888
  derived and/or modified protein sequence (wt) from neuraminidase__InfluenzaB__AGX17767

SEQ ID NO: 29269 - protein, 466 aa, Artificial Sequence
  derived and/or modified protein sequence (wt) from neuraminidase__InfluenzaB__AGX17778
MLPSTIQTLTLFLTSGGVLLSLYVSASLSYLLYSDILLKFSPTEITAPTMPLDCANASNVHAVNRSATKGVTLLLPEPEWTYPRLSCPGSTFQKALLISPHRFGETKGNSAPLIIREPFIACGPNECKHFALTHYAAQPGGYYNGTRGDRNKLRHLISVKLGKIPTVENSIFHMAAWSGSACHDGKEWTYIGVDGPDNNALLKIKYGEAYTDTYHSYANNILRTQESACNCIGGNCYLMITDGSASGVSECRFLKIREGRIIKEIFPTGRVKHTEECTCGFASNKTIECACRDNSYTAKRPFVKLNVETDTAEIRLMCTDTYLDTPRPDDGSITGPCESNGDKGSGGIKGGFVHQRMASKIGRWYSRTMSKTERMGMGLYVKYDGDPWAESDALAFSGVMVSMKEPGWYSFGFEIKDKKCDVPCIGIEMVHDGGKETWHSAATAIYCLMGSGQLLWDTVTGVDMAL

SEQ ID NO: 29270 - protein, 466 aa, Artificial Sequence
  derived and/or modified protein sequence (wt) from neuraminidase__InfluenzaB__AGX17789
MLPSTIQTLTLFLTSGGVLLSLYVSASLSYLLYSDILLKFSPTEITAPTMPLDCANASNVQAVNRSATKGVTLLLPEPEWTYPRLSCPGSTFQKALLISPHRFGETKGNSAPLIIREPFIACGPNECKHFALTHYAAQPGGYYNGTRGDRNKLRHLISVKLGKIPTVENSIFHMAAWSGSACHDGKEWTYIGVDGPDNNALLKIKYGEAYTDTYHSYANNILRTQESACNCIGGNCYLMITDGSASGVSECRFLKIREGRIIKEIFPTGRVKHTEECTCGFASNKTIECACRDNSYTAKRPFVKLNVEIDTAEIRLMCTDTYLDTPRPDDGSITGPCESNGDKGSGGIKGGFVHQRMASKIGRWYSRTMSKTERMGMGLYVKYDGDPWADSDALVFSGVMVSMKEPGWYSFGFEIKDKKCDVPCIGIEMVHDGGKETWHSAATAIYCLMGSGQLLWDTVTGVDMAL

SEQ ID NO: 29271 - protein, 466 aa, Artificial Sequence; identical to SEQ ID NO: 28841
  derived and/or modified protein sequence (wt) from neuraminidase__InfluenzaB__AGX17800

SEQ ID NO: 29272 - protein, 466 aa, Artificial Sequence
  derived and/or modified protein sequence (wt) from neuraminidase__InfluenzaB__AGX17811
MLPSTIQTLTLFLTSGGVLLSLYVSASLSYLLYSDILLKFPPTEITAPTMPLDCANASNVQAVNRSATKGVTLLLPEPEWTYPRLSCPGSTFQKALLISPHRFGETKGNSAPLIIREPFIACGPKECKHFALTHYAAQPGGYYNGTRGDRNKLRHLISVKLGKIPTVENSIFHMAAWSGSACHDGKEWTYIGVDGPDNNALLKIKYGEAYTDTYHSYANNILRTQESACNCIGGNCYLMITDGSASGVSECRFLKIREGRIIKEIFPTGRVKHTEECTCGFASNKTIECACRDNSYTAKRPFVKLNVETDTAEIRLMCTETYLDTPRPDDGSITGPCESNGDKGSGGIKGGFVHQRMASKIGRWYSRTMSKTKRMGMGLYVKYDGDPWADSDALAFSGVMVSMEEPGWYSFGFEIKDKKCDVPCIGIEMVHDGGKETWHSAATAIYCLMGSGQLLWDTVTGVNMAQ

SEQ ID NO: 29273 - protein, 466 aa, Artificial Sequence; identical to SEQ ID NO: 29254
  derived and/or modified protein sequence (wt) from neuraminidase__InfluenzaB__AGX17822

SEQ ID NO: 29274 - protein, 466 aa, Artificial Sequence
  derived and/or modified protein sequence (wt) from neuraminidase__InfluenzaB__AGX17833
MLPSTIQTLTLFLTSGGVLLSLYVSASLSYLLYSDILLKFPPTEITAPTMPLDCANASNVQAVNRSATKGVTLLLPEPEWTYPRLSCPGSTFQKALLISPHRFGETKGNSAPLIIREPFIACGPKECKHFALTHYAAQPGGYYNGTRGDRNKLRHLISIKLGKIPTVENSIFHMAAWSGSACHDGKEWTYIGVDGPDNNALLKIKYGEAYTDTYHSYANNILRTQESACNCIGGNCYLMITDGSASGVSECRFLKIREGRIIKEIFPTGRVKHTEECTCGFASNKTIECACRDNSYTAKRPFVKLNVETDTAEIRLMCTETYLDTPRPDDGSITGPCESNGDKGSGGIKGGFVHQRMASKIGRWYSRTMSKTKRMGMGLYVKYDGDPWADSDALAFSGVMVSMEEPGWYSFGFEIKDKKCDVPCIGIEMVHDGGKETWHSAATAIYCLMGSGQLLWDTVTGVNMAL

SEQ ID NO: 29275 - protein, 466 aa, Artificial Sequence; identical to SEQ ID NO: 29261
  derived and/or modified protein sequence (wt) from neuraminidase__InfluenzaB__AGX17844

SEQ ID NO: 29276 - protein, 466 aa, Artificial Sequence; identical to SEQ ID NO: 29269
  derived and/or modified protein sequence (wt) from neuraminidase__InfluenzaB__AGX17855

SEQ ID NO: 29277 - protein, 466 aa, Artificial Sequence; identical to SEQ ID NO: 28888
  derived and/or modified protein sequence (wt) from neuraminidase__InfluenzaB__AGX17866

SEQ ID NO: 29278 - protein, 466 aa, Artificial Sequence; identical to SEQ ID NO: 29254
  derived and/or modified protein sequence (wt) from neuraminidase__InfluenzaB__AGX17877

SEQ ID NO: 29279 - protein, 466 aa, Artificial Sequence; identical to SEQ ID NO: 29261
  derived and/or modified protein sequence (wt) from neuraminidase__InfluenzaB__AGX17888

SEQ ID NO: 29280 - protein, 466 aa, Artificial Sequence; identical to SEQ ID NO: 29254
  derived and/or modified protein sequence (wt) from neuraminidase__InfluenzaB__AGX17899

SEQ ID NO: 29281 - protein, 466 aa, Artificial Sequence; identical to SEQ ID NO: 29261
  derived and/or modified protein sequence (wt) from neuraminidase__InfluenzaB__AGX17910

SEQ ID NO: 29282 - protein, 466 aa, Artificial Sequence; identical to SEQ ID NO: 29261
  derived and/or modified protein sequence (wt) from neuraminidase__InfluenzaB__AGX17921

SEQ ID NO: 29283 - protein, 466 aa, Artificial Sequence; identical to SEQ ID NO: 28888
  derived and/or modified protein sequence (wt) from neuraminidase__InfluenzaB__AGX17932

SEQ ID NO: 29284 - protein, 466 aa, Artificial Sequence
  derived and/or modified protein sequence (wt) from neuraminidase__InfluenzaB__AGX17943
MLPSTIQTLTLFLTSGGVLLSLYVSASLSYLLYSDILLKFPPTEITAPTMPLDCANASNVQAVNRSATKGVTLLLPEPEWTYPRLSCPGSTFQKALLISPHRFGETKGNSAPLIIREPFIACGPKECKHFALTHYAAQPGGYYNGTRGDRNKLRHLISVRLGKIPTVENSIFHMAAWSGSACHDGKEWTYIGVDGPDNNALLKIKYGEAYTDTYHSYANNILRTQESACNCIGGNCYLMITDGSASGVSECRFLKIREGRIIKEIFPTGRVKHTEECTCGFASNKTIECACRDNSYTAKRPFVKLNVETDTAEIRLMCTETYLDTPRPDDGSITGPCESNGDKGSGGIKGGFVHQRMASKIGRWYSRTMSKTKRMGMGLYVKYDGDPWADSDALAFSGVMVSMEEPGWYSFGFEIKDKKCDVPCIGIEMVHDGGKETWHSAATAIYCLMGSGQLLWDTVTGVNMAL

SEQ ID NO: 29285 - protein, 466 aa, Artificial Sequence; identical to SEQ ID NO: 29254
  derived and/or modified protein sequence (wt) from neuraminidase__InfluenzaB__AGX17954

SEQ ID NO: 29286 - protein, 466 aa, Artificial Sequence
  derived and/or modified protein sequence (wt) from neuraminidase__InfluenzaB__AGX17976
MLPSTIQTLTLFLTSGGVLLSLYVSASLSYLLYSDILLKFSPTEITAPTMPLDCANASNVHAVNRSATKGVTPLLPEPEWTYPRLSCPGSTFQKALLISPHRFGETKGNSAPLIIREPFIACGPNECKHFALTHYAAQPGGYYNGTRGDRNKLRHLISVKLGKIPTVENSIFHMAAWSGSACHDGKEWTYIGVDGPDNNALLKIKYGEAYTDTYHSYANNILRTQESACNCIGGNCYLMITDGSASGVSECRFLKIREGRIIKEIFPTGRVKHTEECTCGFASNKTIECACRDNSYTAKRPFVKLNVETDTAEIRLMCTDTYLDTPRPDDGSITGPCESNGDKGSGGIKGGFVHQRMASKIGRWYSRTMSKTERMGMGLYVKYDGDPWADSDALAFSGVMVSMKEPGWYSFGFEIKDKKCDVPCIGIEMVHDGGKETWHSAATAIYCLMGSGQLLWDTVTGVDMAL

SEQ ID NO: 29287 - protein, 466 aa, Artificial Sequence
  derived and/or modified protein sequence (wt) from neuraminidase__InfluenzaB__AGX17987
MLPSTIQTLTLFLTSGGVLLSLYVSVSLSYLLYSDILLKFPPTEITAPTMPLDCANASNVQAVNRSATKGVTLLLPEPEWTYPRLSCPGSTFQKALLISPHRFGETKGNSAPLIIREPFIACGPKECKHFALTHYAAQPGGYYNGTRGDRNKLRHLISVKLGKIPTVENSIFHMAAWSGSACHDGKEWTYIGVDGPDNNALLKIKYGEAYTDTYHSYANNILRTQESACNCIGGNCYLMITDGSASGVSECRFLKIREGRIIKEIFPTGRVKHTEECTCGFASNKTIECACRDNSYTAKRPFVKLNVETDTAEIRLMCTETYLDTPRPDDGSITGPCESNGDKGSGGIKGGFVHQRMASKIGRWYSRTMSKTKRMGMGLYVKYDGDPWADSDALAFSGVMVSMEEPGWYSFGFEIKDKKCDVPCIGIEMVHDGGKETWHSAATAIYCLMGSGQLLWDTVTGVNMAL

SEQ ID NO: 29288 - protein, 466 aa, Artificial Sequence; identical to SEQ ID NO: 29261
  derived and/or modified protein sequence (wt) from neuraminidase__InfluenzaB__AGX17998

SEQ ID NO: 29289 - protein, 466 aa, Artificial Sequence; identical to SEQ ID NO: 29254
  derived and/or modified protein sequence (wt) from neuraminidase__InfluenzaB__AGX18009

SEQ ID NO: 29290 - protein, 466 aa, Artificial Sequence; identical to SEQ ID NO: 29287
  derived and/or modified protein sequence (wt) from neuraminidase__InfluenzaB__AGX18020

SEQ ID NO: 29291 - protein, 466 aa, Artificial Sequence; identical to SEQ ID NO: 29254
  derived and/or modified protein sequence (wt) from neuraminidase__InfluenzaB__AGX18031

SEQ ID NO: 29292 - protein, 466 aa, Artificial Sequence
  derived and/or modified protein sequence (wt) from neuraminidase__InfluenzaB__AGX18042
MLPSTIQTLTLFLTSGGVLLSLYVSASLSYLLYSDILLKFSPTEITAPTMPLNCANASNVQAVNRSATKGVTLLLPEPEWTYPRLSCPGSTFQKALLISPHRFGETKGNSAPLIIREPFIACGPNECKHFALTHYAAQPGGYYNGTRGDRNKLRHLISVKLGKIPTVENSIFHMAAWSGSACHDGKEWTYIGVDGPDNNALLKIKYGEAYTDTYHSYANNILRTQESACNCIGGNCYLMITDGSASGVSECRFLKIREGRIIKEIFPTGRVKHTEECTCGFASNKTIECACRDNSYTAKRPFVKLNVEIDTAEIRLMCTDTYLDTPRPDDGSITGPCESNGDKGSGGIKGGFVHQRMASKIGRWYSRTMSKTERMGMGLYVKYDGDPWADSDALAFSGVMVSMKEPGWYSFGFEIKDKKCDVPCIGIEMVHDGGKETWHSAATAIYCLMGSGQLLWDTVTGVDMAL

SEQ ID NO: 29293 - protein, 466 aa, Artificial Sequence; identical to SEQ ID NO: 29261
  derived and/or modified protein sequence (wt) from neuraminidase__InfluenzaB__AGX18053

SEQ ID NO: 29294 - protein, 466 aa, Artificial Sequence; identical to SEQ ID NO: 29261
  derived and/or modified protein sequence (wt) from neuraminidase__InfluenzaB__AGX18064

SEQ ID NO: 29295 - protein, 466 aa, Artificial Sequence
  derived and/or modified protein sequence (wt) from neuraminidase__InfluenzaB__AGX18075
MLPSTIQTLTLFLTSGGVLLSLYVSASLSYLLYSDILLKFPPTEITAPTMPLDCANASNVQAVNRSATKGVTLLLPEPEWTYPRLSCPGSTFQKALLISPHRFGETKGNSAPLIIREPFIACGPKECKHFALTHYAAQPGGYYNGTRGDRNKLRHLISVKLGKIPTVENSIFHMAAWSGSSCHDGKEWTYIGVDGPDNNALLKIKYGEAYTDTYHSYANNILRTQESACNCIGGNCYLMITDGSASGVSECRFLKIREGRIIKEIFPTGRVKHTEECTCGFASNKTIECACRDNSYTAKRPFVKLNVETDTAEIRLMCTETYLDTPRPDDGSITGPCESNGDKGSGGIKGGFVHQRMASKIGRWYSRTMSKTKRMGMGLYVKYDGDPWADSDALAFSGVMVSMEEPGWYSFGFEIKDKKCDVPCIGIEMVHDGGKETWHSAATAIYCLMGSGQLLWDTVTGVNMAL

SEQ ID NO: 29296 - protein, 466 aa, Artificial Sequence; identical to SEQ ID NO: 28888
  derived and/or modified protein sequence (wt) from neuraminidase__InfluenzaB__AGX18086

SEQ ID NO: 29297 - protein, 466 aa, Artificial Sequence; identical to SEQ ID NO: 28888
  derived and/or modified protein sequence (wt) from neuraminidase__InfluenzaB__AGX18097

SEQ ID NO: 29298 - protein, 466 aa, Artificial Sequence; identical to SEQ ID NO: 28841
  derived and/or modified protein sequence (wt) from neuraminidase__InfluenzaB__AGX18108

SEQ ID NO: 29299 - protein, 466 aa, Artificial Sequence
  derived and/or modified protein sequence (wt) from neuraminidase__InfluenzaB__AGX18119
MLPSTIQTLTLFLTSGGVLLSLYVSASLSYLLYSDILLKFSPTEITAPTMPLDCANTSNVQAVNRSATKGVTLLLPEPEWTYPRLSCPGSTFQKALLISPHRFGETKGNSAPLIIREPFIACGPNECKHFALTHYAAQPGGYYNGTRGDRNKLRHLISVKLGKIPTVENSIFHMAAWSGSACHDGKEWTYIGVDGPDNNALLKIKYGEAYTDTYHSYANNILRTQESACNCIGGNCYLMITDGSASGVSECRFLKIREGRIIKEIFPTGRVKHTEECTCGFASNKTIECACRDNSYTAKRPFVKLNMETDTAEIKLMCTDTYLDTPRPDDGSITGPCESNGDKGSGGIKGGFVHQRMASKIGRWYSRTMSKTERMGMGLYVKYDGDPWADSDALAFSGVMVSMKEPGWYSFGFEIKDKKCDVPCIGIEMVHDGGKETWHSAATAIYCLMGSGQLLWDTVTGVDMAL

SEQ ID NO: 29300 - protein, 466 aa, Artificial Sequence
  derived and/or modified protein sequence (wt) from neuraminidase__InfluenzaB__AGX18130
MLPSTIQTLTLFLTSGGVLLSLYVSASLSYLLYSDILLKFSPTEITAPTMPLDCANASNVQAVNRSATKGVTLLLPEPEWTYPRLSCPGSTFQKALLISPHRFGETKGNSAPLIIREPFIACGPNECKHFALTHYAAQPGGYYNGTRGDRNKLRHLISVKLGKIPTVENSIFHMAAWSGSACHDGKEWTYIGVDGPDNNALLKIKYGEAYTDTYHSYANNILRTQESACNCIGGNCYLMITDGSASGVSECRFLKIREGRIIKEIFPTGRVKHTEECTCGFASNKTIECACRDNSYTAKRPFVKLNVEIDTAEIRLMCTDTYLDTPRPDDGSITGPCESNGDKGSGGIKGGFVHQRMASKIGRWYSRTMSRTERMGMGLYVKYDGDPWADSDALAFSGVMVSMKEPGWYSFGFEIKDKKCDVPCIGIEMVHDGGKETWHSAATAIYCLMGSGQLLWDTVTGVDMAL

SEQ ID NO: 29301 - protein, 466 aa, Artificial Sequence
  derived and/or modified protein sequence (wt) from neuraminidase__InfluenzaB__AGX18141
MLPSTIQTLTLFLTSGGVLLSLYVSASLSYLLYSDILLKFPSTEITAPTMPLDCANASNVQAVNRSATKGMTLLLPEPEWTYPRLSCPGSTFQKALLISPHRFGETKGNSAPLIIREPFIACGPKECKHFALTHYAAQPGGYYNGTRGDRNKLRHLISVKLGKIPTVENSIFHMAAWSGSACHDGKEWTYIGVDGPDNNALLKIKYGEAYTDTYHSYANNILRTQESACNCIGGNCYLMITDGSASGVSECRFLKIREGRIIKEIFPTGRIKHTEECTCGFASNKTIECACRDNSYTAKRPFVKLNVETDTAEIRLMCTETYLDTPRPDDGSITGPCESNGDKGSGGIKGGFVHQRMASKIGRWYSRTMSKTERMGMGLYVKYDGDPWAESDALAFSGVMVSMEEPGWYSFGFEIKDKKCDVPCIGIEMVHDGGKETWHSAATAIYCLMGSGQLLWDTVTGVNMAL

SEQ ID NO: 29302 - protein, 466 aa, Artificial Sequence; identical to SEQ ID NO: 28888
  derived and/or modified protein sequence (wt) from neuraminidase__InfluenzaB__AGX18152

SEQ ID NO: 29303 - protein, 466 aa, Artificial Sequence
  derived and/or modified protein sequence (wt) from neuraminidase__InfluenzaB__AGX18163
MLPSTIQTLTLFLTSGGVLLSLYVSASLSYLLYSDILLKFPSTEITAPTMPLDCANASNVQAVNRSATKGVTLLLPEPEWTYPRLSCPGSTFQKALLISPHRFGETKGNSAPLIIREPFIACGPKECKHFALTHYAAQPGGYYNGKRGDRNKLRHLISVKLGKIPTVENSIFHMAAWSGSACHDGKEWTYIGVDGPDNNALLKIKYGEAYTDTYHSYANNILRTQESACNCIGGNCYLMITDGSASGVSECRFLKIREGRIIKEIFPTGRIKHTEECTCGFASNKTIECACRDNSYTAKRPFVKLNVETDTAEIRLMCTETYLDTPRPDDGSITGPCESNGDKGSGGIKGGFVHQRMASKIGRWYSRTMSKTERMGMGLYVKYDGDPWADSDALAFSGVMVSMEEPGWYSFGFEIKDKKCDVPCIGIEMVHDGGKETWHSAATAIYCLMGSGQLLWDTVTGVNMAL

SEQ ID NO: 29304 - protein, 466 aa, Artificial Sequence; identical to SEQ ID NO: 29254
  derived and/or modified protein sequence (wt) from neuraminidase__InfluenzaB__AGX18174

SEQ ID NO: 29305 - protein, 466 aa, Artificial Sequence; identical to SEQ ID NO: 28888
  derived and/or modified protein sequence (wt) from neuraminidase__InfluenzaB__AGX18185

SEQ ID NO: 29306 - protein, 466 aa, Artificial Sequence; identical to SEQ ID NO: 28841
  derived and/or modified protein sequence (wt) from neuraminidase__InfluenzaB__AGX18196

SEQ ID NO: 29307 - protein, 466 aa, Artificial Sequence
  derived and/or modified protein sequence (wt) from neuraminidase__InfluenzaB__AGX18207
MLPSTIQTLTLFLTSGGVLLSLYVSASLSYLLYSDILLKFPPTEITAPTMPLDCANASNVQAVNRSATKGVTLLLPEPEWTYPRLSCPGSTFQKALLISPHRFGETKGNSAPLIIREPFIACGPKECKHFALTHYAAQPGGYYNGTRGDRNKLRHLISVKLGKIPTVETSIFHMAAWSGSACHDGKEWTYIGVDGPDNNALLKIKYGEAYTDTYHSYANNILRTQESACNCIGGNCYLMITDGSASGVSECRFLKIREGRIIKEIFPTGRVKHTEECTCGFASNKTIECACRDNSYTAKRPFVKLNVETDTAEIRLMCTETYLDTPRPDDGSITGPCESNGDKGSGGIKGGFVHQRMASKIGRWYSRTMSKTKRMGMGLYVKYDGDPWADSDALAFSGVMVSMEEPGWYSFGFEIKDKKCDVPCIGIEMVHDGGKETWHSAATAIYCLMGSGQLLWDTVTGVNMAL

SEQ ID NO: 29308 - protein, 466 aa, Artificial Sequence
  derived and/or modified protein sequence (wt) from neuraminidase__InfluenzaB__AGX18218
MLPSTIQTLTLFLTSGGVLLSLYVSASLSYLLYSDILLKLSPTEITAPTMPLDCANTSNVQAVNRSATKGVTLLLPEPEWTYPRLSCPGSTFQKALLISPHRFGETKGNSAPLIIREPFIACGPNECKHFALTHYAAQPGGYYNRTRGDRNKLRHLISVKLGKIPTVENSIFHMAAWSGSACHDGKEWTYIGVDGPDNNALLKIKYGEAYTDTYHSYANNILRTQESACNCIGGNCYLMITDGSASGVSECRFLKIREGRIIKEIFPTGRVKHTEECTCGFASNKTIECACRDNSYTAKRPFVKLNMETDTAEIRLMCTDTYLDTPRPDDGSITGPCESNGDKGSGGIKGGFVHQRMASKIGRWYSRTMSKTERMGMGLYVKYDGDPWADSDALAFSGVMVSMKEPGWYSFGFEIKDKKCDVPCIGIEMVHDGGKETWHSAATAIYCLMGSGQLLWDTVTGVDMAL

SEQ ID NO: 29309 - protein, 466 aa, Artificial Sequence; identical to SEQ ID NO: 29261
  derived and/or modified protein sequence (wt) from neuraminidase__InfluenzaB__AGX18229

SEQ ID NO: 29310 - protein, 466 aa, Artificial Sequence
  derived and/or modified protein sequence (wt) from neuraminidase__InfluenzaB__AGX18240
MLPSTIQTLTLFLTSGGVLLSLYVSASLSYLLYSDILLKFSPTEITAPTMPLDCANASNVQTVNRSATKGVTLLLPEPEWTYPRLSCPGSTFQKALLISPHRFGETKGNSAPLIIREPFIACGPNECKHFALTHYAAQPGGYYNGTRGDRNKLRHLISVKLGKIPTVENSIFHMAAWSGSACHDGKEWTYIGVDGPDNNALLKIKYGEAYTDTYHSYANNILRTQESACNCIGGNCYLMITDGSASGVSECRFLKIREGRIIKEIFPTGRVKHTEECTCGFASNKTIECACRDNSYTAKRPFVKLNVEIDTAEIRLMCTDTYLDTPRPDDGSITGPCESNGDKGSGGIKGGFVHQRMASKIGRWYSRTMSKTERMGMGLYVKYDGDPWADSDALAFSGVMVSMKEPGWYSFGFEIKDKKCDVPCIGIEMVHDGGKETWHSAATAIYCLMGSGQLLWDTVTGVDMAL

SEQ ID NO: 29311 - protein, 466 aa, Artificial Sequence; identical to SEQ ID NO: 29254
  derived and/or modified protein sequence (wt) from neuraminidase__InfluenzaB__AGX18251

SEQ ID NO: 29312 - protein, 466 aa, Artificial Sequence
  derived and/or modified protein sequence (wt) from neuraminidase__InfluenzaB__AGX18262
MLPSTIQTLTLFLTSGGVLLSLYVSASLSYLLYSNILLKFSPTEITAPTMPLDCANASNVQAVNRSATKGVTLLLPEPEWTYPRLSCPGSTFQKALLISPHRFGETKGNSAPLIIREPFIACGPNECKHFALTHYAAQPGGYYNGTRGDRNKLRHLISVKLGKIPTVENSIFHMAAWSGSACHDGKEWTYIGVDGPDNNALLKIKYGEAYTDTYHSYANNILRTQESACNCIGGNCYLMITDGSASGVSECRFLKIREGRIIKEIFPTGRVKHTEECTCGFASNKTIECACRDNSYTAKRPFVKLNVETDTAEIRLMCTDTYLDTPRPDDGSITGPCESNGDKGSGGIKGGFVHQRMASKVGRWYSRTMSKTERMGMGLYVKYDGDPWADSDALAFSGVMVSMKEPGWYSFGFEIKDKKCDVPCIGIEMVHDGGKETWHSAATAIYCLMGSGQLLWDTVTGVDMAL

SEQ ID NO: 29313 - protein, 466 aa, Artificial Sequence; identical to SEQ ID NO: 29261
  derived and/or modified protein sequence (wt) from neuraminidase__InfluenzaB__AGX18273

SEQ ID NO: 29314 - protein, 466 aa, Artificial Sequence; identical to SEQ ID NO: 29286
  derived and/or modified protein sequence (wt) from neuraminidase__InfluenzaB__AGX18284

SEQ ID NO: 29315 - protein, 466 aa, Artificial Sequence; identical to SEQ ID NO: 29261
  derived and/or modified protein sequence (wt) from neuraminidase__InfluenzaB__AGX18295

SEQ ID NO: 29316 - protein, 466 aa, Artificial Sequence; identical to SEQ ID NO: 28888
  derived and/or modified protein sequence (wt) from neuraminidase__InfluenzaB__AGX18306

SEQ ID NO: 29317 - protein, 466 aa, Artificial Sequence
  derived and/or modified protein sequence (wt) from neuraminidase__InfluenzaB__AGX18317
MLPSTIQTLTLFLTSGGVLLSLYVSASLSYLLYSDILLKFPSTEITAPTMPLDCANASNVQAVNRSATKGVTLLLPEPEWTYPRLSCPGSTFQKALLISPHRFGETKGNSAPLIIREPFIACGPKECKHFALTHYAAQPGGYYNETRGDRNKLRHLISVKLGKIPTVENSIFHMAAWSGSACHDGKEWTYIGVDGPDNNALLKIKYGEAYTDTYHSYANNILRTQESACNCIGGNCYLMITDGSASGVSECRFLKIREGRIIKEIFPTGRIKHTEECTCGFASNKTIECACRDNSYTAKRPFVKLNVETDTAEIRLMCTETYLDTPRPDDGSITGPCESNGDKGSGGIKGGFVHQRMASKIGRWYSRTMSKTKRMGMGLYVKYDGDPWADSDALAFSGVMVSMEEPGWYSFGFEIKDKKCDVPCIGIEMVHDGGKETWHSAATAIYCLMGSGQLLWDTVTGVNMAL

SEQ ID NO: 29318 - protein, 466 aa, Artificial Sequence; identical to SEQ ID NO: 29261
  derived and/or modified protein sequence (wt) from neuraminidase__InfluenzaB__AGX18328

SEQ ID NO: 29319 - protein, 466 aa, Artificial Sequence
  derived and/or modified protein sequence (wt) from neuraminidase__InfluenzaB__AGX18339
MLPSTIQTLTLFLTSGGVLLSLYVSASLSYLLYSDILLKFSPTEITAPTMPLDCANASNVQAVNRSATKGVTLLLPEPEWTYPRLSCPGSTFQKALLISPHRFGETKGNSAPLIIREPFIACGPNECKHFALTHYAAQPGGYYNGTRGDRNKLRHLISVKLGKIPTVENSIFHMAAWSGSACHDGKEWTYIGVDGPDNNALLKIKYGEAYTDTYHSYANNILRTQESACNCIGGNCYLMITDGSASGVSECRFLKIREGRIIKEIFPTGRVKHTEECTCGFASNKTIECACRDNSYTAKRPFVKLNVETDTAEIRLMCTDTYLDTPRPDDGSITGPCESNGDKGSGGIKGGFVHQRMASKVGRWYSRTMSKTERMGMGLYVKYDGDPWADSDALAFGGVMVSMKEPGWYSFGFEIKDKKCDVPCIGIEMVHDGGKETWHSAATAIYCLMGSGQLLWDTVTGVDMAL

SEQ ID NO: 29320 - protein, 466 aa, Artificial Sequence
  derived and/or modified protein sequence (wt) from neuraminidase__InfluenzaB__AGX18350
MLPSTIQTLTLFLTSGGVLLSLYVSASLSYLLYSDILLKFSPTEITAPTMPLDCANASNVQAMNRSATKGVTLLLPEPEWTYPRLSCPGSTFQKALLISPHRFGETKGNSAPLIIREPFIACGPNECKHFALTHYAAQPGGYYNGTRGDRNKLRHLISVKLGKIPTVENSIFHMAAWSGSACHDGKEWTYIGVDGPDNNALLKIKYGEAYTDTYHSYANNILRTQESACNCIGGNCYLMITDGSASGVSECRFLKIREGRIIKEIFPTGRVKHTEECTCGFASNKTIECACRDNSYTAKRPFVKLNVEIDTAEIRLMCTDTYLDTPRPDDGSITGPCESNGDKGSGGIKGGFVHQRMASKIGRWYSRTMSKTERMGMGLYVKYDGDPWADSDALAFSGVMVSMKEPGWYSFGFEIKDKKCDVPCIGIEMVHDGGKETWHSAATAIYCLMGSGQLLWDTVTGVDMAL

SEQ ID NO: 29321 - protein, 466 aa, Artificial Sequence; identical to SEQ ID NO: 29286
  derived and/or modified protein sequence (wt) from neuraminidase__InfluenzaB__AGX18361

SEQ ID NO: 29322 - protein, 466 aa, Artificial Sequence
  derived and/or modified protein sequence (wt) from neuraminidase__InfluenzaB__AGX18383
MLPSTIQTLTLFLTSGGVLLSLYVSASLSYLLYSDILLKFSPTEITAPTMPLDCANTSNVQAVNRSATKGVTLLLPEPEWTYPRLSCPGSTFQKALLISPHRFGETKGNSAPLIIREPFIACGPNECKHFALTHYAAQPGGYYNGTRGDRNKLRHLISVKLGKIPTVENSIFHMAAWSGSACHDGKEWTYIGVDGPDNNALLKIKYGEAYTDTYHSYANNILRTQESACNCIGGNCYLMITDGSASGVSECRFLKIREGRIIKEIFPTGRVKHTEECTCGFASNKTIECACRDNSYTAKRPFVKLNMETDTAEIRLMCTDTYLDTPRPDDGSITGPCESNGDKGSGGIKGGFVHQRMASKIGRWYSRTMSKTERMGMGLYVKYDGDPWADSDALVFSGVMVSMKEPGWYSFGFEIKDKKCDVPCIGIEMVHGGGKETWHSAATAIYCLMGSGQLLWDTVTGVDMAL

SEQ ID NO: 29323 - protein, 466 aa, Artificial Sequence; identical to SEQ ID NO: 28888
  derived and/or modified protein sequence (wt) from neuraminidase__InfluenzaB__AGX18394

SEQ ID NO: 29324 - protein, 466 aa, Artificial Sequence
  derived and/or modified protein sequence (wt) from neuraminidase__InfluenzaB__AGX18405
MLPSTIQTLTLFLTSGGVLLSLYVSASLSYLLYSDILLKFSPTEITAPTMPLDCANASNVHAVNRSATKGVTPLLPEPEWTYPRLSCPGSTFQKALLISPHRFGETKGNSAPLIIREPFIACGPNECKHFALTHYAAQPGGYYNGTRGDRNKLRHLISVKLGKIPTVENSIFHMAAWSGSACHDGKEWTYIGVDGPDNNALLKIKYGEAYTDTYHSYANNILRTQESACNCIGGNCYLMITDGSASGVSECRFLKIREGRIIKEIFPTGRVKHTEECTCGFASNKTIECVCRDNSYTAKRPFVKLNVETDTAEIRLMCTDTYLDTPRPDDGSITGPCESNGDKGSGGIKGGFVHQRMASKIGRWYSRTMSKTERMGMGLYVKYDGDPWADSDALAFSGVMVSMKEPGWYSFGFEIKDKKCDVPCIGIEMVHDGGKETWHSAATAIYCLMGSGQLLWDTVTGVDMAL

SEQ ID NO: 29325 - protein, 466 aa, Artificial Sequence
  derived and/or modified protein sequence (wt) from neuraminidase__InfluenzaB__AGX18416
MLPSTIQTLTLFLTSGGVLLSLYVSASLSYLLYSDILLKFSPTEITAPTMPLDCANASNVQAVNRSATKGVTLLLPEPEWTYPRLSCPGSTFQKALLISPHRFGETKGNSAPLIIREPFIACGPNECKHFALTHYAAQPGGYYNGTRGDRNKLRHLISVKLGKIPTVENSIFHMAAWSGSACHDGKEWTYIGVDGPDNNALLKIKYGEAYTDTYHSYANNILRTQESACNCIGGNCYLMITDGSASGVSECRFLKIREGRIIKEIFPTGRVKHTEECTCGFASNKTIECACRDNSYTAKRPFVKLNVEIDTAEIRLMCTDTYLDTPRPDDGSITGSCESNGDKGSGGIKGGFVHQRMASKIGRWYSRTMSKTERMGMGLYVKYDGDPWADSDALAFSGVMVSMKEPGWYSFGFEIKDKKCDVPCIGIEMVHDGGKETWHSAATAIYCLMGSGQLLWDTVTGVDMAL

SEQ ID NO: 29326 - protein, 466 aa, Artificial Sequence
  derived and/or modified protein sequence (wt) from neuraminidase__InfluenzaB__AGX18428
MLPSTIQTLTLFLTSGGVLLSLYVSASLSYLLYSDILLKFSTTEITAPTMPLDCANASNVQAVNRSATKGVTLLLPEPEWTYPRLSCPGSTFQKALLISPHRFGETKGNSAPLIIREPFIACGPKECKHFALTHYAAQPGGYYNGTREDRNKLRHLISVKLGKIPTVENSIFHMAAWSGSACHDGKEWTYIGVDGPDSNALLKIKYGEAYTDTYHSYANNILRTQESACNCIGGNCYLMITDGSASGISECRFLKIREGRIIKEIFPTGRVKHTEECTCGFASNKTIECACRDNSYTAKRPFVKLNVETDTAEIRLMCTETYLDTPRPDDGSITGPCESNGNKGSGGIKGGFVHQRMASKIGRWYSRTMSKTKRMGMGLYVKYDGDPWIDSDALALSGVMVSMEEPGWYSFGFEIKDKKCDVPCIGIEMVHDGGKETWHSAATAIYCLMGSGQLLWDTVTGVDMAL

SEQ ID NO: 29327 - protein, 466 aa, Artificial Sequence
  derived and/or modified protein sequence (wt) from neuraminidase__InfluenzaB__AGX18439
MLPSTIQTLTLFLTSGGVLLSLYVSASLSYLLYSDILLKFSPTEITAPTMPLDCANASNVQAVNRSATKGVTLLLPEPEWTYPRLSCPGSTFQKALLISPHRFGETKGNSAPLIIREPFIACGPNECKHFALTHYAAQPGGYYNGTRGDRNKLRHLISVKLGKIPTVENSIFHMAAWSGSACHDGKEWTYIGVDGPDNNALLKIKYGEAYTDTYHSYANNILRTQESACNCIGGNCYLMITDGSASGVSECRFLKIREGRIIKEIFPTGRVKHTEECTCGFASNKTIECACRDNSYTAKRPFVKLNVEIDTAEIRLMCTDTYLDTPRPDDGSITGPCESNGDKGSGGIKGGFVHQRMASKIGRWYSRTMSKTERMGMGLYVKYDGDPWADSDALAFSGLMVSMKEPGWYSFGFEIKDKKCDVPCIGIEMVHDGGKETWHSAATAIYCLMGSGQLLWDTVTGVDMAL

SEQ ID NO: 29328 - protein, 466 aa, Artificial Sequence
  derived and/or modified protein sequence (wt) from neuraminidase__InfluenzaB__AGX18450
MLPSTIQTLTLFLTSGGVLLSLYVSASLSYLLYSDILLKFSPTEITASTMPLDCANASNVQAVNRSATKGVTLLLPEPEWTYPRLSCPGSTFQKALLISPHRFGETKGNSAPLIIREPFIACGPNECKHFALTHYAAQPGGYYNGTRGDRNKLRHLISVKLGKIPTVENSIFHMAAWSGSACHDGKEWTYIGVDGPDNNALLKIKYGEAYTDTYHSYANNILRTQESACNCIGGNCYLMITDGSASGVSECRFLKIREGRIIKEIFPTGRVKHTEECTCGFASNKTIECACRDNSYTAKRPFVKLNVEIDTAEIRLMCTDTYLDTPRPDDGSITGPCESNGDKGSGGIKGGFVHQRMASKIGRWYSRTMSKTERMGMGLYVKYDGDPWADSDALAFSGVMVSMKEPGWYSFGFEIKDKKCDVPCIGIEMVHDGGKETWHSAATAIYCLMGSGQLLWDTVTGVDMAL

SEQ ID NO: 29329 - protein, 466 aa, Artificial Sequence; identical to SEQ ID NO: 28888
  derived and/or modified protein sequence (wt) from neuraminidase__InfluenzaB__AGX18461

SEQ ID NO: 29330 - protein, 466 aa, Artificial Sequence
  derived and/or modified protein sequence (wt) from neuraminidase__InfluenzaB__AGX18472
MLPSTIQTLTLFLTSGGVLLSLYVSASLSYLLYSDILLKFSPTEITAPTMPLDCANASNVHAVNHSATKGVTPLLPEPEWTYPRLSCPGSTFQKALLISPHRFGETKGNSAPLIIREPFIACGPNECKHFALTHYAAQPGGYYNGTRGDRNKLRHLISVKLGKIPTVENSIFHMAAWSGSACHDGKEWTYIGVDGPDNNALLKIKYGEAYTDTYHSYANNILRTQESACNCIGGNCYLMITDGSASGVSECRFLKIREGRIIKEIFPTGRVKHTEECTCGFASNKTIECACRDNSYTAKRPFVKLNVETDTAEIRLMCTDTYLDTPRPDDGSITGPCESNGDKGSGGIKGGFVHQRMASKIGRWYSRTMSKTERMGMGLYVKYDGDPWADSDALAFSGVMVSMKEPGWYSFGFEIKDKKCDVPCIGIEMVHDGGKETWHSAATAIYCLMGSGQLLWDTVTGVDMAL

SEQ ID NO: 29331 - protein, 466 aa, Artificial Sequence; identical to SEQ ID NO: 28888
  derived and/or modified protein sequence (wt) from neuraminidase__InfluenzaB__AGX18483

SEQ ID NO: 29332 - protein, 466 aa, Artificial Sequence; identical to SEQ ID NO: 28635
  derived and/or modified protein sequence (wt) from neuraminidase__InfluenzaB__AGX18494

SEQ ID NO: 29333 - protein, 466 aa, Artificial Sequence
  derived and/or modified protein sequence (wt) from neuraminidase__InfluenzaB__AGX18505
MLPSTIQTLTLFLTSGGVLLSLYVSASLSYLLYSDILLKFSPTEITAPTMPLDCANASNVQAVNRSATKGVTLLLPEPEWTYPRLSCPGSTFQKALLISPHRFGETKGNSAPLIIREPFIACGPNECKHFALTHYAAQPGGYYNGTRGDRNKLRHLISVKLGKIPTVENSIFHMAAWSGSACHDGKEWTYIGVDGPDNNALLKIKYGEAYTDTYHSYANKILRTQESACNCIGGNCYLMITDGSASGVSECRFLKIREGRIIKEIFPTGRVKHTEECTCGFASNKTIECACRDNSYTAKRPFVKLNVETDTAEIRLMCTDTYLDTPRPDDGSITGPCESNGDKGSGGIKGGFVHQRMASKIGRWYSRTISKTERMGMGLYVKYDGDPWADSDALAFSGVMVSMKEPGWYSFGFEIKDKKCDVPCIGIEMVHDGGKETWHSAATAIYCLMGSGQLLWDTVTGVDMAL

SEQ ID NO: 29334 - protein, 466 aa, Artificial Sequence
  derived and/or modified protein sequence (wt) from neuraminidase__InfluenzaB__AGX18516
MLPSTIQTLTLFLTSGGVLLSLYVSASLSYLLYSDILLKFSPTEITAPTMPLDCANASNVQAVNRSATKGVTLLLPEPEWTYPRLSCPGSTFQKALLISPHRFGETKGNSAPLIIREPFIACGPNECKHFALTHYAAQPGGYYNGTRGDRNKLRHLISVKLGKIPTVENSIFHMAAWSGSACHDGKEWTYIGVDGPDNNALLKIKYGEAYTDTYHSYANKILRTQESACNCIGGNCYLMITDGSASGVSECRFLKIREGRIIKEIFPTGRVKHTEECTCGFASNKTIECACRDNSYTAKRPFVKLNVETDTAEIRLMCTDTYLDTPRPDDGSITGPCESNGDKGSGGIKGGFVHQRMASKIGRWYSRTISKTERMGMGLYVKYDGDPWADSDALAFSGVMVSMKEPGWYSFGFEIKDKKCDVPCIGIEMVHGGGKETWHSAATAIYCLMGSGQLLWDTVTGVDMAL

SEQ ID NO: 29335 - protein, 466 aa, Artificial Sequence; identical to SEQ ID NO: 28635
  derived and/or modified protein sequence (wt) from neuraminidase__InfluenzaB__AGX18527

SEQ ID NO: 29336 - protein, 466 aa, Artificial Sequence; identical to SEQ ID NO: 28635
  derived and/or modified protein sequence (wt) from neuraminidase__InfluenzaB__AGX18538

SEQ ID NO: 29337 - protein, 466 aa, Artificial Sequence; identical to SEQ ID NO: 28635
  derived and/or modified protein sequence (wt) from neuraminidase__InfluenzaB__AGX18549

SEQ ID NO: 29338 - protein, 466 aa, Artificial Sequence; identical to SEQ ID NO: 28635
  derived and/or modified protein sequence (wt) from neuraminidase__InfluenzaB__AGX18560

SEQ ID NO: 29339 - protein, 466 aa, Artificial Sequence; identical to SEQ ID NO: 28635
  derived and/or modified protein sequence (wt) from neuraminidase__InfluenzaB__AGX18571

SEQ ID NO: 29340 - protein, 466 aa, Artificial Sequence
  derived and/or modified protein sequence (wt) from neuraminidase__InfluenzaB__AGX18582
MLPSTIQTLTLFLTSGGVLLSLYVLASLSYLLYSDILLKFSPTEITAPTMPLDCANASNVHAVNRSATKGVTLLLPEPEWAYPRLSCPGSTFQKALLISPHRFGETKGNSAPLIIREPFIACGPNECKHFALTHYAAQPGGYYNGTRGDRNKLRHLISVKLGKIPTVENSIFHMAAWSGSACHDGKEWTYIGVDGPDNNALLKIKYGEAYTDTYHSYANNILRTQESACNCIGGNCYLMITDGSASGVSECRFLKIREGRIIKEIFPTGRVKHTEECTCGFASNKTIECACRDNSYTAKRPFVKLNVETDTAEIRLMCTDTYLDTPRPDDGSITGPCESNGDKGSGGIKGGFVHQRMASKIGRWYSRTMSKTERMGMGLYVKYDGDPWADSDALAFSGVMVSMKEPGWYSFGFEIKDKKCDVPCIGIEMVHDGGKETWHSAATAIYCLMGSGQLLWDTVTGVDMAL

SEQ ID NO: 29341 - protein, 466 aa, Artificial Sequence; identical to SEQ ID NO: 28635
  derived and/or modified protein sequence (wt) from neuraminidase__InfluenzaB__AGX18593

SEQ ID NO: 29342 - protein, 466 aa, Artificial Sequence; identical to SEQ ID NO: 28635
  derived and/or modified protein sequence (wt) from neuraminidase__InfluenzaB__AGX18604

SEQ ID NO: 29343 - protein, 466 aa, Artificial Sequence
  derived and/or modified protein sequence (wt) from neuraminidase__InfluenzaB__AGX18615
MLPSTIQTLTLFLTSGGVLLSLYVSASLSYLLYSDILLKFSPTEITAPTMPLDCANASNVQAVNRSATKGVTLLLPEPEWTYPRLSCPGSTFQKALLISPHRFGETKGNSAPLIIREPFIACGPNECKHFALTHYAAQPGGYYNGTRGDRNKLRHLISVKLGKIPTVENSIFHMAAWSGSACHDGKEWTYIGVDGPDNNALLKIKYGEAYTDTYHSYANKILRTQESACNCIGGNCYLMITDGSASGVSECRFLKIREGRIIKEIFPTGRVKHTEECTCGFASNKTIECACRDNSYTAKRPFVKLNVETDTAEIRLMCTDTYLDTPRPDDGSITGPCESNGNKGSGGIKGGFVHQRMASKIGRWYSRTMSKTERMGMGLYVKYDGDPWADSDALAFSGVMVSMKEPGWYSFGFEIKDKKCDVPCIGIEMVHDGGKETWHSAATAIYCLMGSGQLLWDTVTGVDMAL

SEQ ID NO: 29344 - protein, 466 aa, Artificial Sequence
  derived and/or modified protein sequence (wt) from neuraminidase__InfluenzaB__AGX18626
MLPSTIQTLTLFLTSGGVLLSLYVSASLSYLLYSDILLKFSPTEITAPTMPLDCANASNVQAVNRSATKGVTLLLPEPEWTYPRLSCPGSTFQKALLISPHRFGETKGNSAPLILREPFIACGPNECKHFALTHYAAQPGGYYNGTRGDRNKLRHLISVKLGKIPTVENSIFHMAAWSGSACHDGKEWTYIGVDGPDNNALLKIKYGEAYTDTYHSYANKILRTQESACNCIGGNCYLMITDGSASGVSECRFLKIREGRIIKEIFPTGRVKHTEECTCGFASNKTIECACRDNSYTAKRPFVKLNVETDTAEIRLMCTDTYLDTPRPDDGSITGPCESNGDKGSGGIKGGFVHQRMASKIGRWYSRTMSKTERMGMGLYVKYDGDPWADSDALAFSGVMVSMKEPGWYSFGFEIKDKKCDVPCIGIEMVHDGGKETWHSAATAIYCLMGSGQLLWDTVTGVDMAL

SEQ ID NO: 29345 - protein, 466 aa, Artificial Sequence; identical to SEQ ID NO: 28635
  derived and/or modified protein sequence (wt) from neuraminidase__InfluenzaB__AGX18637

SEQ ID NO: 29346 - protein, 466 aa, Artificial Sequence; identical to SEQ ID NO: 28635
  derived and/or modified protein sequence (wt) from neuraminidase__InfluenzaB__AGX18648

SEQ ID NO: 29347 - protein, 466 aa, Artificial Sequence; identical to SEQ ID NO: 28635
  derived and/or modified protein sequence (wt) from neuraminidase__InfluenzaB__AGX18659

SEQ ID NO: 29348 - protein, 466 aa, Artificial Sequence; identical to SEQ ID NO: 28635
  derived and/or modified protein sequence (wt) from neuraminidase__InfluenzaB__AGX18670

SEQ ID NO: 29349 - protein, 466 aa, Artificial Sequence
  derived and/or modified protein sequence (wt) from neuraminidase__InfluenzaB__AGX18681
MLPSTIQTLTLFLTSGGVLLSLYVSASLSYLLYSDILLKFSPTEITAPTMPLDCANASNVQAVNRSATKGVTLLLPEPEWTYPRLSCPGSTFQKALLISPHRFGETKGNSAPLIVREPFIACGPNECKHFALTHYAAQPGGYYNGTRGDRNKLRHLISVKLGKIPTVENSIFHMAAWSGSACHDGKEWTYIGVDGPDNNALLKIKYGEAYTDTYHSYANKILRTQESACNCIGGNCYLMITDGSASGVSECRFLKIREGRIIKEIFPTGRVKHTEECTCGFASNKTIECACRDNSYTAKRPFVKLNVETDTAEIRLMCTDTYLDTPRPDDGSITGPCESNGDKGSGGIKGGFVHQRMASKIGRWYSRTMSKTERMGMGLYVKYDGDPWADSDALAFSGVMVSMKEPGWYSFGFEIKDKKCDVPCIGIEMVHDGGKETWHSAATAIYCLMGSGQLLWDTVTGVDMAL

SEQ ID NO: 29350 - protein, 466 aa, Artificial Sequence; identical to SEQ ID NO: 28635
  derived and/or modified protein sequence (wt) from neuraminidase__InfluenzaB__AGX18692

SEQ ID NO: 29351 - protein, 466 aa, Artificial Sequence
  derived and/or modified protein sequence (wt) from neuraminidase__InfluenzaB__AGX18703
MLPSTIQTLTLFLTSGGVLLSLYVSASLSYLLYSDILLKFPSTEITAPTMPLDCANASNVQAVNLSATKGVTLLLPEPEWTYPRLSCPGSTFQKALLISPHRFGETKGNSAPLIIREPFIACGPKECKHFALTHYAAQPGGYYNGTRGDRNKLRHLISVKLGKIPTVENSIFHMAAWSGSACHDGKEWTYIGVDGPDNNALLKIKYGEAYTDTYHSYANNILRTQESACNCIGGNCYLMITDGSASGVSECRFLKIREGRIIKEIFPTGRIKHTEECTCGFASNKTIECACRDNSYTAKRPFVKLNVETDTAEIRLMCTETYLDTPRPDDGSITGPCESNGDKGSGGIKGGFVHQRMASKIGRWYSRTMSKTERMGMGLYVKYDGDPWADSDALAFSGVMVSMEEPGWYSFGFEIKDKKCDVPCIGIEMVHDGGKETWHSAATAIYCLMGSGQLLWDTVTGVNMAL

SEQ ID NO: 29352 - protein, 466 aa, Artificial Sequence; identical to SEQ ID NO: 28635
  derived and/or modified protein sequence (wt) from neuraminidase__InfluenzaB__AGX18714

SEQ ID NO: 29353 - protein, 466 aa, Artificial Sequence; identical to SEQ ID NO: 28635
  derived and/or modified protein sequence (wt) from neuraminidase__InfluenzaB__AGX18725

SEQ ID NO: 29354 - protein, 466 aa, Artificial Sequence
  derived and/or modified protein sequence (wt) from neuraminidase__InfluenzaB__AGX18736
MLPSTIQTLTLFLTSGGVLLSLYVSASLSYLLYSDILLKFSPTEITAPTMPLDCANASNVQAVNRSATKGVTLLLPEPEWTYPRLSCPGSTFQKALLISPHRFGETKGNSAPLIIREPFIACGPNECKHFALTHYAAQPGGYYNGTGGDRNKLRHLISVKLGKIPTVENSIFHMAAWSGSACHDGKEWTYIGVDGPDNNALLKIKYGEAYTDTYHSYANKILRTQESACNCIGGNCYLMITDGSASGVSECRFLKIREGRIIKEIFPTGRVKHTEECTCGFASNKTIECACRDNSYTAKRPFVKLNVETDTAEIRLMCTDTYLDTPRPDDGSITGPCESNGDKGSGGIKGGFVHQRMASKIGRWYSRTMSKTERMGMGLYVKYDGDPWADSDALAFSGVMVSMKEPGWYSFGFEIKDKKCDVPCIGIEMVHDGGKETWHSAATAIYCLMGSGQLLWDTVTGVDMAL

SEQ ID NO: 29355 - protein, 466 aa, Artificial Sequence; identical to SEQ ID NO: 28635
  derived and/or modified protein sequence (wt) from neuraminidase__InfluenzaB__AGX18758

SEQ ID NO: 29356 - protein, 466 aa, Artificial Sequence; identical to SEQ ID NO: 28635
  derived and/or modified protein sequence (wt) from neuraminidase__InfluenzaB__AGX18769

SEQ ID NO: 29357 - protein, 466 aa, Artificial Sequence; identical to SEQ ID NO: 29094
  derived and/or modified protein sequence (wt) from neuraminidase__InfluenzaB__AGX18780

SEQ ID NO: 29358 - protein, 466 aa, Artificial Sequence; identical to SEQ ID NO: 28635
  derived and/or modified protein sequence (wt) from neuraminidase__InfluenzaB__AGX18791

SEQ ID NO: 29359 - protein, 466 aa, Artificial Sequence; identical to SEQ ID NO: 28635
  derived and/or modified protein sequence (wt) from neuraminidase__InfluenzaB__AGX18802

SEQ ID NO: 29360 - protein, 466 aa, Artificial Sequence
  derived and/or modified protein sequence (wt) from neuraminidase__InfluenzaB__AGX18813
MLPSTIQTLTLFLTSGGVLLSLYVSASLSYLLYSDILLKFPSTEITAPTMPLDCANASNVQAVNRSATKGVTLLLPEPEWTYPRLSCPGSTFQKALLISPHRFGETKGNSAPLIIREPFIACGPKECKHFALTHYAAQPGGYYNGTRGDRNKLRHLISVKLGKIPTVENSIFHMAAWSGSACHDGKEWTYIGVDGPDNNALLKIKYGEAYTDTYHSYANNILRTQESACNCIGGNCYLMITDGSASGVSECRFLKIREGRIIKEIFPTGRIKHTEECTCGFASNKTIECACRDNSYTAKRPFVKLNVETDTAEIRLMCTETYLDTPRPDDGSITGPCESNGDKGSGGIKGGFVHQRMASKIGRWYSRTMSKTERMGMGLYVKYDGDPWADSDALVFSGVMVSMEEPGWYSFGFEIKDKKCDVPCIGIEMVHDGGKETWHSAATAIYCLMGSGQLLWDTVTGVNMAL

SEQ ID NO: 29361 - protein, 466 aa, Artificial Sequence; identical to SEQ ID NO: 29094
  derived and/or modified protein sequence (wt) from neuraminidase__InfluenzaB__AGX18824

SEQ ID NO: 29362 - protein, 466 aa, Artificial Sequence
  derived and/or modified protein sequence (wt) from neuraminidase__InfluenzaB__AGX18846
MLPSTIQTLTLFLTSGGVLLSLYVSASLSYLLYSDILLKFSPTEITAPTMPLDCANASNVQAVNRSATKGVTLLLSEPEWTYPRLSCPGSTFQKALLISPHRFGETKGNSAPLIIREPFIACGPNECKHFALTHYAAQPGGYYNGTRGDRNKLRHLISVKLGKIPTVENSIFHMAAWSGSACHDGKEWTYIGVDGPDNNALLKIKYGEAYTDTYHSYANKILRTQESACNCIGGNCYLMITDGSASGVSECRFLKIREGRIIKEIFPTGRVKHTEECTCGFASNKTIECACRDNSYTAKRPFVKLNVETDTAEIRLMCTDTYLDTPRPDDGSITGPCESNGDKGSGGIKGGFVHQRMASKIGRWYSRTMSKTERMGMGLYVKYDGDPWADSDALAFSGVMVSMKEPGWYSFGFEIKDKKCDVPCIGIEMVHDGGKETWHSAATAIYCLMGSGQLLWDTVTGVDMAL

SEQ ID NO: 29363 - protein, 466 aa, Artificial Sequence; identical to SEQ ID NO: 28635
  derived and/or modified protein sequence (wt) from neuraminidase__InfluenzaB__AGX18857

SEQ ID NO: 29364 - protein, 466 aa, Artificial Sequence; identical to SEQ ID NO: 29362
  derived and/or modified protein sequence (wt) from neuraminidase__InfluenzaB__AGX18868

SEQ ID NO: 29365 - protein, 466 aa, Artificial Sequence; identical to SEQ ID NO: 29362
  derived and/or modified protein sequence (wt) from neuraminidase__InfluenzaB__AGX18879

SEQ ID NO: 29366 - protein, 466 aa, Artificial Sequence
  derived and/or modified protein sequence (wt) from neuraminidase__InfluenzaB__AGX18890
MLPSTIQTLTLFLTSGGVLLSLYVSASLSYLLYSDILLKFPSTEITAPTMPLDCANASNVQAVNRSATKGVTLLLPEPEWTYPRLSCPGSTFQKALLISPHRFGETKGNSAPLIIREPFIACGPKECKHFALTHYAAQPGGYYNGTRGDRNKLRHLISVKLGKIPTVENSIFHMAAWSGSACHDGKEWTYIGVDGPDNNALLKIKYGEAYTDTYHSYANNILRTQESACNCIGGNCYLMITDGSASGVSECRFLKIREGRIIKEIFPTGRIKHTEECTCGFASNKTIECACRDNSYTAKRPFVKLNVETDTAEIRLMCTETYLDTPRPDDGSITGPCESNGDKGSGGIKGGFVHQRMASKIGRWYSRTMSKTERMGMGLYVKYDGDPWADSDALAFSGVMVSMEEPGWYSFGFEIKDKKCDVPCIGIEMVHDGGKETWHSAATTIYCLMGSGQLLWDTVTGVNMAL

SEQ ID NO: 29367 - protein, 466 aa, Artificial Sequence; identical to SEQ ID NO: 28635
  derived and/or modified protein sequence (wt) from neuraminidase__InfluenzaB__AGX18912

SEQ ID NO: 29368 - protein, 466 aa, Artificial Sequence
  derived and/or modified protein sequence (wt) from neuraminidase__InfluenzaB__AGX18923
MLPSTIQTLTLFLTSGGVLLSLYVSASLSYLLYSDILLKFSPTEITAPTMPLDCANASNVQAVNRSATKGVTLLLPEPEWTYPRLSCPGSTFQKALLISPHRFGETKGNSAPLIIREPFIACGPNECKHFALTHYAAQPGGYYNRTRGDRNKLRHLISVKLGKIPTVENSIFHMAAWSGSACHDGKEWIYIGVDGPDNNALLKIKYGEAYTDTYHSYANKILRTQESACNCIGGNCYLMITDGSASGVSECRFLKIREGRIIKEIFPTGRVKHTEECTCGFASNKTIECACRDNSYTAKRPFVKLNVETDTAEIRLMCTDTYLDTPRPDDGSITGPCESNGDKGSGGIKGGFVHQRMASKIGRWYSRTMSKTERMGMGLYVKYDGDPWADSDALAFSGVMVSMKEPGWYSFGFEIKDKKCDVPCIGIEMVHDGGKETWHSAATAIYCLMGSGQLLWDTVTGVDMAL

SEQ ID NO: 29369 - protein, 466 aa, Artificial Sequence; identical to SEQ ID NO: 28635
  derived and/or modified protein sequence (wt) from neuraminidase__InfluenzaB__AGX18934

SEQ ID NO: 29370 - protein, 466 aa, Artificial Sequence
  derived and/or modified protein sequence (wt) from neuraminidase__InfluenzaB__AGX18956
MLPSTIQTLTLFLTSGGVLLSLYVSASLSYLLYSDILLKFSPTEITAPTMPLDCANASNVQAVNRSATKGVTLLLPEPEWTYPRLSCPGSTFQKALLISPHRFGETKGNSAPLIIREPFIACGPNECKHFALTHYAAQPGGYYNGTRGDRNKLRHLISVKLGKIPTVENSIFHVAAWSGSACHDGKEWTYIGVDGPDNNALLKIKYGEAYTDTYHSYANKILRTQESACNCIGGNCYLMITDGSASGVSECRFLKIREGRIIKEIFPTGRVKHTEECTCGFASNKTIECACRDNSYTAKRPFVKLNVETDTAEIRLMCTDTYLDTPRPDDGSITGPCESNGDKGSGGIKGGFVHQRMASKIGRWYSRTMSKTERMGMGLYVKYDGDPWADSDALAFSGVMVSMKEPGWYSFGFEIKDKKCDVPCIGIEMVHDGGKETWHSAATAIYCLMGSGQLLWDTVTGVDMAL

SEQ ID NO: 29371 - protein, 466 aa, Artificial Sequence
  derived and/or modified protein sequence (wt) from neuraminidase__InfluenzaB__AGX18967
MLPSTIQTLTLFLTSGGVLLSLYVSASLSYLLYSDILLKFSPTEITAPTMPLDCANASNVQAVNRSATKGVTPLLPEPEWTYPRLSCPGSTFQKALLISPHRFGETKGNSAPLIIREPFIACGPNECKHFALTHYAAQPGGYYNGTRGDRNKLRHLISVKLGKIPTVENSIFHMAAWSGSACHDGKEWTYIGVDGPDNNALLKIKYGEAYTDTYHSYANKILRTQESACNCIGGNCYLMITDGSASGVSECRFLKIREGRIIKEIFPTGRVKHTEECTCGFASNKTIECACRDNSYTAKRPFVKLNVETDTAEIRLMCTDTYLDTPRPDDGSITGPCESNGDKGSGGIKGGFVHQRMASKIGRWYSRTMSKTERMGMGLYVKYDGDPWADSDALAFSGVMVSMKEPGWYSFGFEIKDKKCDVPCIGIEMVHDGGKETWHSAATAIYCLMGSGQLLWDTVTGVDMAL

SEQ ID NO: 29372 - protein, 466 aa, Artificial Sequence; identical to SEQ ID NO: 29094
  derived and/or modified protein sequence (wt) from neuraminidase__InfluenzaB__AGX18978

SEQ ID NO: 29373 - protein, 466 aa, Artificial Sequence
  derived and/or modified protein sequence (wt) from neuraminidase__InfluenzaB__AGX18989
MLPSTIQTLTLFLTSGGVLLSLYVSASLSYLLYSDILLKFSPTEITAPTMPLDYANASNVQAVNRSATKGVTLLLPEPEWTYPRLSCPGSTFQKALLISPHRFGETKGNSAPLIIREPFIACGPNECKHFALTHYAAQPGGYYNGTRGDRNKLRHLISVKLGKIPTVENSIFHMAAWSGSACHDGKEWTYIGVDGPDNNALLKIKYGEAYTDTYHSYANKILRTQESACNCIGGNCYLMITDGSASGVSECRFLKIREGRITKEIFPTGRVKHTEECTCGFASNKTIECACRDNSYTAKRPFVKLNVETDTAEIRLMCTDTYLDTPRPDDGSITGPCESNGDKGSGGIKGGFVHQRMASKIGRWYSRTMSKTERMGMGLYVKYDGDPWADSDALAFSGVMVSMKEPGWYSFGFEIKDKKCDVPCIGIEMVHDGGKETWHSAATAIYCLMGSGQLLWDTVTGVDMAL

SEQ ID NO: 29374 - protein, 466 aa, Artificial Sequence
  derived and/or modified protein sequence (wt) from neuraminidase__InfluenzaB__AGX19000
MLPSTIQTLTLFLTSGGVLLSLYVSASLSYLLYSDILLKFSPTEITAPTMPLDCANASNVHAVNRSATKGVTLLLPEPEWTYPRLSCPGSTFQKALLISPHRFGETKGNSAPLIIREPFIACGPNECKHFALTYYAAQPGGYYNGTRGDRNKLRHLISVKLGKIPTVENSIFHMAAWSGSACHDGKEWTYIGVDGPDNNALLKIKYGEAYTDTYHSYANNILRTQESACNCIGGNCYLMITDGSASGVSECRFLKIREGRIIKEIFPTGRVKHTEECTCGFASNKTIECACRDNSYTAKRPFVKLNVETDTAEIRLMCTDTYLDTPRPDDGSITGPCESNGDKGSGGIKGGFVHQRMASKIGRWYSRTMSKTERMGMGLYVKYDGDPWADSDALAFSGVMVSMKEPGWYSFGFEIKDKKCDVPCIGIEMVHDGGKETWHSAATAIYCLMGSGQLLWDTVTGVDMAL

SEQ ID NO: 29375 - protein, 466 aa, Artificial Sequence; identical to SEQ ID NO: 28635
  derived and/or modified protein sequence (wt) from neuraminidase__InfluenzaB__AGX19011

SEQ ID NO: 29376 - protein, 466 aa, Artificial Sequence; identical to SEQ ID NO: 28635
  derived and/or modified protein sequence (wt) from neuraminidase__InfluenzaB__AGX19022

SEQ ID NO: 29377 - protein, 466 aa, Artificial Sequence
  derived and/or modified protein sequence (wt) from neuraminidase__InfluenzaB__AGX19033
MLPSTIQTLTLFLTSGGVLLSLYVSASLSYLLYSDILLKFPSTEITAPTMPLNCANASNVQAVNRSATKGVTLLLPEPEWTYPRLSCPGSTFQKALLISPHRFGETKGNSAPLIIREPFIACGPKECKHFALTHYAAQPGGYYNGTRGDRNKLRHLISVKLGKIPTVENSIFHMAAWSGSACHDGKEWTYIGVDGPDNNALLKIKYGEAYTDTYHSYANNILRTQESACNCIGGNCYLMITDGSASGVSECRFLKIREGRIIKEIFPTGRIKHTEECTCGFASNKTIECACRDNSYTAKRPFVKLNVETDTAEIRLMCTETYLDTPRPDDGSITGPCESNGDKGSEGIKGGFVHQRMASKIGRWYSRTMSKTERMGMGLYVKYDGDPWADSDALAFSGVMVSMEEPGWYSFGFEIKDKKCDVPCIGIEMVHDGGKETWHSAATAIYCLMGSGQLLWDTVTGVNMAL

SEQ ID NO: 29378 - protein, 466 aa, Artificial Sequence; identical to SEQ ID NO: 28635
  derived and/or modified protein sequence (wt) from neuraminidase__InfluenzaB__AGX19044

SEQ ID NO: 29379 - protein, 466 aa, Artificial Sequence; identical to SEQ ID NO: 28635
  derived and/or modified protein sequence (wt) from neuraminidase__InfluenzaB__AGX19055

SEQ ID NO: 29380 - protein, 466 aa, Artificial Sequence
  derived and/or modified protein sequence (wt) from neuraminidase__InfluenzaB__AGX19066
MLPSTIQTLTLFLTSGGVLLSLYVSASLSYLLYSDILLKFSPTEITAPTMPLDCANASNVQAVNRSATKGVTLLLPEPEWTYPRLSCPGSTFQKALLISPHRFGETKGNSAPLIIREPFIACGPNECKHFALTHYAAQPGGYYNGTRGDRNKLRHLISVKLGKIPTVENSIFHMAAWSGSACHDGKEWIYIGVDGPDNNALLKIKYGEAYTDTYHSYANKILRTQESACNCIGGNCYLMITDGSASGVSECRFLKIREGRIIKEIFPTGRVKHTEECTCGFASNKTIECACRDNSYTAKRPFVKLNVETDTAEIRLMCTDTYLDTPRPDDGSITGPCESNGDKGSGGIKGGFVHQRMASKIGRWYSRTMSKTERMGMGLYVKYDGDPWADSDALAFSGVMVSMKEPGWYSFGFEIKDKKCDVPCIGIEMVHDGGKETWHSAATAIYCLMGSGQLLWDTVTGVDMAL

SEQ ID NO: 29381 - protein, 466 aa, Artificial Sequence
  derived and/or modified protein sequence (wt) from neuraminidase__InfluenzaB__AGX19077
MLPSTIQTLTLFLTSGGVLLSLYVSASLSYLLYSDILLKFTPTEITAPTMPLDCANASNVQAVNRSATKGVTPLLPEPEWTYPRLSCPGSTFQKALLISPHRFGETKGNSAPLIIREPFIACGPNECKHFALTHYAAQPGGYYNGTRGDRNKLRHLISVKLGKIPTVENSIFHMAAWSGSACHDGKEWTYIGVDGPDNNALLKIKYGEAYTDTYHSYANKILRTQESACNCIGGNCYLMITDGSASGVSECRFLKIREGRIIKEIFPTGRVKHTEECTCGFASNKTIECACRDNSYTAKRPFVKLNVETDTAEIRLMCTDTYLDTPRPDDGSITGPCESNGDKGSGGIKGGFVHQRMASKIGRWYSRTMSKTERMGMGLYVKYDGDPWADSDALAFSGVMVSMKEPGWYSFGFEIKDKKCDVPCIGIEMVHDGGKETWHSAATAIYCLMGSGQLLWDTVTGVDMAL

SEQ ID NO: 29382 - protein, 466 aa, Artificial Sequence
  derived and/or modified protein sequence (wt) from neuraminidase__InfluenzaB__AGX19088
MLPSTIQTLTLFLTSGGVLLSLYVSASLSYLLYSDILLKFSPTEITAPTMPLDCANASNVQAVNRSATKGVTLLLPEPEWTYPRLSCPGSTFQKALLISPHRFGETKGNSAPLIIREPFIACGPNECKHFALTHYAAQPGGYYNGTRGDRNKLRHLISVKLGKIPTVENSIFHMAAWSGSACHDGKEWTYIGVDGPDNNALLKIKYGEAYTDTYHSYANKILRTQESACNCIGGNCYLMITDGSASGVSECRFLKIREGRIVKEIFPTGRVKHTEECTCGFASNKTIECACRDNSYTAKRPFVKLNVETDTAEIRLMCTDTYLDTPRPDDGSITGPCESNGDKGSGGIKGGFVHQRMASKIGRWYSRTMSKTERMGMGLYVKYDGDPWADSDALAFSGVMVSMKEPGWYSFGFEIKDKKCDVPCIGIEMVHDGGKETWHSAATAIYCLMGSGQLLWDTVTGVDMAL

SEQ ID NO: 29383 - protein, 466 aa, Artificial Sequence; identical to SEQ ID NO: 28635
  derived and/or modified protein sequence (wt) from neuraminidase__InfluenzaB__AGX19099

SEQ ID NO: 29384 - protein, 466 aa, Artificial Sequence
  derived and/or modified protein sequence (wt) from neuraminidase__InfluenzaB__AGX19110
MLPSTIQTLTLFLTSGGVLLSLYVSASLSYLLYSDILLKFPSTEITAPTMPLDCANASNVQAVNRSATKGVTLLLPEPEWTYPRLSCPGSTFQKALLISPHRFGETKGNSAPLIIREPFIACGPKECKHFALTHYAAQPGGYYNGTRGDRNKLRHLISVKLGKIPTVENSIFHMAAWSGSACHDGKEWTYIGVDGPDNNALLKIKYGEAYTDTYHSYANNILRTQESACNCIGGNCYLMITDGSASGVSECRFLKIREGRIIKEIFPTGRIKHTEECTCGFASNKTIECACRDNSYTAKRPFIKLNVETDTAEIRLMCTETYLDTPRPDDGSITGPCESNGDKGSGGIKGGFVHQRMASKIGRWYSRTMSKTERMGMGLYVKYDGDPWADSDALVFSGVMVSMEEPGWYSFGFEIKDKKCDVPCIGIEMVHDGGKETWHSAATAIYCLMGSGQLLWDTVTGVNMAL

SEQ ID NO: 29385 - protein, 466 aa, Artificial Sequence
  derived and/or modified protein sequence (wt) from neuraminidase__InfluenzaB__AGX19121
MLPSTTQTLTLFLTSGGVLLSLYVSASLSYLLYSDILLKFSPTEITAPTMPLDCANASNVQAVNRSATKGVTLLLPEPEWTYPRLSCPGSTFQKALLISPHRFGETKGNSAPLIIREPFIACGPNECKHFALTHYAAQPGGYYNGTRGDRNKLRHLISVKLGKIPTVENSIFHMAAWSGSACHDGKEWTYIGVDGPDNNALLKIKYGEAYTDTYHSYANKILRTQESACNCIGGNCYLMITDGSASGVSECRFLKIREGRIIKEIFPTGRVKHTEECTCGFASNKTIECACRDNSYTAKRPFVKLNVETDTAEIRLMCTDTYLDTPRPDDGSITGPCESNGDKGSGGIKGGFVHQRMASKIGRWYSRTMSKTERMGMGLYVKYDGDPWADSDALAFRGVMVSMKEPGWYSFGFEIKDKKCDVPCIGIEMVHDGGKETWHSAATAIYCLMGSGQLLWDTVTGVDMAL

SEQ ID NO: 29386 - protein, 466 aa, Artificial Sequence; identical to SEQ ID NO: 29269
  derived and/or modified protein sequence (wt) from neuraminidase__InfluenzaB__AGX19132

SEQ ID NO: 29387 - protein, 466 aa, Artificial Sequence; identical to SEQ ID NO: 29373
  derived and/or modified protein sequence (wt) from neuraminidase__InfluenzaB__AGX19143

SEQ ID NO: 29388 - protein, 466 aa, Artificial Sequence
  derived and/or modified protein sequence (wt) from neuraminidase__InfluenzaB__AGX19154
MLPSTIQTLTLFLTSGGVLLSLYVSASLSYLLYSNILLKFSPTEITAPTMPLDCANASNVHAVNRSATKGVTLLLPEPEWTYPRLSCPGSTFQKALLISPHRFGETKGNSAPLIIREPFIACGPNECKHFALTHYAAQPGGYYNGTRGDRNKLRHLISVKLGKIPTVENSIFHMAAWSGSACHDGKEWTYIGVDGPDNNALLKIKYGEAYTDTYHSYANNILRTQESACNCIGGNCYLMITDGSASGVSECRFLKIREGRIIKEIFPTGRVKHTEECTCGFASNKTIECACRDNSYTAKRPFVKLNVETDTAEIRLMCTDTYLDTPRPDDGSITGPCESNGDKGSGGIKGGFVHQRMASKIGRWYSRTMSKTERMGMGLYVKYDGDPWADSDALAFSGVMVSMKEPGWYSFGFEIKDKKCDVPCIGIEMVHDGGKETWHSAATAIYCLMGSGQLLWDTVTGVDMAL

SEQ ID NO: 29389 - protein, 466 aa, Artificial Sequence; identical to SEQ ID NO: 28635
  derived and/or modified protein sequence (wt) from neuraminidase__InfluenzaB__AGX19165

SEQ ID NO: 29390 - protein, 466 aa, Artificial Sequence
  derived and/or modified protein sequence (wt) from neuraminidase__InfluenzaB__AGX19176
MLPSTIQTLTLFLTSGGVLLSLYVSASLSYLLYSDILLKFSPTEITAPTMPLDCANASNVHAVNRSATKGVTLLLPEPEWTYPRLSCPGSTFQKALLISPHRFGETKGNSAPLIIREPFIACGPNECKHFALTHYAAQPGGYYNRTRGDRNKLRHLISVKLGKIPTVENSIFHMAAWSGSACHDGKEWTYIGVDGPDNNALLKIKYGEAYTDTYHSYANNILRTQESACNCIGGNCYLMITDGSASGVSECRFLKIREGRIIKEIFPTGRVKHTEECTCGFASNKTIECACRDNSYTAKRPFVKLNVETDTAEIRLMCTDTYLDTPRPDDGSITGPCESNGDKGSGGIKGGFVHQRMASKIGRWYSRTMSKTERMGMGLYVKYDGDPWADSDALAFSGVMVSMKEPGWYSFGFEIKDKKCDVPCIGIEMVHDGGKETWHSAATAIYCLMGSGQLLWDTVTGVDMAL

SEQ ID NO: 29391 - protein, 466 aa, Artificial Sequence
  derived and/or modified protein sequence (wt) from neuraminidase__InfluenzaB__AGX19187
MLPSTIQTLTLFLTSGGVLLSLYVSASLSYLLYSDILLKFSPTEITAPTMPLDCANASNVQAVNRSATKGVTLLLPEPEWTYPRLSCSGSTFQKALLISPHRFGETKGNSAPLIIREPFIACGPNECKHFALTHYAAQPGGYYNGTRGDRNKLRHLISVKLGKIPTVENSIFHMAAWSGSACHDGKEWTYIGVDGPDNNALLKIKYGEAYTDTYHSYANKILRTQESACNCIGGNCYLMITDGSASGVSECRFLKIREGRIIKEIFPTGRVKHTEECTCGFASNKTIECACRDNSYTAKRPFVKLNVETDTAEIRLMCTDTYLDTPRPDDGSITGPCESNGDKGSGGIKGGFVHQRMASKIGRWYSRTMSKTERMGMGLYVKYDGDPWADSDALAFSGVMVSMKEPGWYSFGFEIKDKKCDVPCIGIEMVHDGGKETWHSAATAIYCLMGSGQLLWDTVTGVDMAL

SEQ ID NO: 29392 - protein, 466 aa, Artificial Sequence
  derived and/or modified protein sequence (wt) from neuraminidase__InfluenzaB__AGX19198
MLPSTIQTLTLFLTSGGVLLSLYVSASLSYLLYSDILLKFSPTEITAPTMPLDYANASNVQAVNRSATKGVTLLLPEPEWTYPRLSCPGSTFQKALLISPHRFGETKGNSAPLIIREPFIACGPNECKHFALTHYAAQPGGYYNGTRGDRNKLRHLISVKLGKIPTVENSIFHMAAWSGSACHDGKEWTYIGVDGPDNNALLKIKYGEAYTDTYHSYANKILRTQESACNCIGGNCYLMITDGSASGVSECRFLKIREGRIIKEIFPTGRVKHTEECTCGFASNKTIECACRDNSYTAKRPFVKLNVETDTAEIRLMCTDTYLDTPRPDDGSITGPCESNGDKGSGGIKGGFVHQRMASKIGRWYSRTMSKTERMGMGLYVKYDGDPWADSDALAFSGVMVSMKEPGWYSFGFEIKDKKCDVPCIGIEMVHDGGKETWHSAATAIYCLMGSGQLLWDTVTGVDMAL

SEQ ID NO: 29393 - protein, 466 aa, Artificial Sequence; identical to SEQ ID NO: 29373
  derived and/or modified protein sequence (wt) from neuraminidase__InfluenzaB__AGX19209

SEQ ID NO: 29394 - protein, 466 aa, Artificial Sequence
  derived and/or modified protein sequence (wt) from neuraminidase__InfluenzaB__AGX19220
MLPSTIQTLTLFLTSGGVLLSLYVSASLSYLLYSDILLKFSPTEITAPTMSLDCANASNVQAVNRSATKGVTLLLPEPEWTYPRLSCPGSTFQKALLISPHRFGETKGNSAPLIIREPFIACGPNECKHFALTHYAAQPGGYYNGTRGDRNKLRHLISVKLGKIPTVENSIFHMAAWSGSACHDGKEWTYIGVDGPDNNALLKIKYGEAYTDTYHSYANKILRTQESACNCIGGNCYLMITDGSASGVSECRFLKIREGRIIKEIFPTGRVKHTEECTCGFASNKTIECACRDNSYTAKRPFVKLNVETDTAEIRLMCTDTYLDTPRPDDGSITGPCESNGDRGSGGIKGGFVHQRMASKIGRWYSRTMSKTERMGMGLYVKYDGDPWADSDALAFSGVMVSMKEPGWYSFGFEIKDKKCDVPCIGIEMVHDGGKETWHSAATAIYCLMGSGQLLWDTVTGVDMAL

SEQ ID NO: 29395 - protein, 466 aa, Artificial Sequence; identical to SEQ ID NO: 28841
  derived and/or modified protein sequence (wt) from neuraminidase__InfluenzaB__AGX19231

SEQ ID NO: 29396 - protein, 466 aa, Artificial Sequence
  derived and/or modified protein sequence (wt) from neuraminidase__InfluenzaB__AGX19253
MLPSTIQTLTLFLTSGGVLLSLYVSASLSYLLYSDILLKFSPTEITAPTMPLDCANASNVQAVNHSATKGVTLLLPEPEWTYPRLSCPGSTFQKALLISPHRFGETKGNSAPLIIREPFIACGPNECKHFALTHYAAQPGGYYNGTRGDRNKLRHLISVKLGKIPTVENSIFHMAAWSGSACHDGKEWTYIGVDGPDNNALLKIKYGEAYTDTYHSYANKILRTQESACNCIGGNCYLMITDGSASGVSECRFLKIREGRIIKEIFPTGRVKHTEECTCGFASNKTIECACRDNSYTAKRPFVKLNVETDTAEIRLMCTDTYLDTPRPDDGSITGPCESNGDKGSGGIKGGFVHQRMASKIGRWYSRTMSKTERMGMGLYVKYDGDPWADSDSLAFSGVMVSMKEPGWYSFGFEIKDKKCDVPCIGIEMVHDGGKETWHSAATAIYCLMGSGQLLWDTVTGVDMAL

SEQ ID NO: 29397 - protein, 466 aa, Artificial Sequence; identical to SEQ ID NO: 29371
  derived and/or modified protein sequence (wt) from neuraminidase__InfluenzaB__AGX19264

SEQ ID NO: 29398 - protein, 466 aa, Artificial Sequence; identical to SEQ ID NO: 28635
  derived and/or modified protein sequence (wt) from neuraminidase__InfluenzaB__AGX19275

SEQ ID NO: 29399 - protein, 466 aa, Artificial Sequence
  derived and/or modified protein sequence (wt) from neuraminidase__InfluenzaB__AGX19286
MIPSTIQTLTLFLTSGGVLLSLYVSASLSYLLYSDILLKFSPTEIIAPTMPLDCANASNVHAVNRSATKGVTLLLPEPEWTYPRLSCPGSTFQKALLISPHRFGETKGNSAPLIIREPFIACGPNECKHFALTHYAAQPGGYYNGTRGDRNKLRHLISVKLGKIPTVENSIFHMAAWSGSACHDGKEWTYIGVDGPDNNALLKIKYGEAYTDTYHSYANNILRTQESACNCIGGNCYLMITDGSASGVSECRFLKIREGRIIKEIFPTGRVKHTEECTCGFASNKTIECACRDNSYTAKRPFVKLNVETDTAEIRLMCTDTYLDTPRPDDGSITGPCESNGDKGSGGIKGGFVHQRMASKIGRWYSRTMSKTERMGMGLYVKYDGDPWADSDALAFSGVMVSMKEPGWYSFGFEIKDKKCDVPCIGIEMVHDGGKETWHSAATAIYCLMGSGQLLWDTVTGVDMAL

SEQ ID NO: 29400 - protein, 466 aa, Artificial Sequence
  derived and/or modified protein sequence (wt) from neuraminidase__InfluenzaB__AGX19297
MLPSTIQTLTLFLTSGGVLLSLYVSASLSYLLYSDILLKFSPTEIIAPTMPLDCANASNVHAVNRSATKGVTLLLPEPEWTYPRLSCPGSTFQKALLISPHRFGETKGNSAPLIIREPFIACGPNECKHFALTHYAAQPGGYYNGTRGDRNKLRHLISVKLGKIPTVENSIFHMAAWSGSACHDGKEWTYIGVDGPDNNALLKIKYGEAYTDTYHSYANNILRTQESACNCIGGNCYLMITDGSASGVSECRFLKIREGRIIKEIFPTGRVKHTEECTCGFASNKTIECACRDNSYTAKRPFVKLNVETDTAEIRLMCTDTYLDTPRPDDGSITGPCESNGDKGSGGIKGGFVHQRMASKIGRWYSRTMSKTERMGMGLYVKYDGDPWADSDALAFSGVMVSMKEPGWYSFGFEIKDKKCDVPCIGIEMVHDGGKETWHSAATAIYCLMGSGQLLWDTVTGVDMAL

SEQ ID NO: 29401 - protein, 466 aa, Artificial Sequence; identical to SEQ ID NO: 29400
  derived and/or modified protein sequence (wt) from neuraminidase__InfluenzaB__AGX19308

SEQ ID NO: 29402 - protein, 466 aa, Artificial Sequence; identical to SEQ ID NO: 29400
  derived and/or modified protein sequence (wt) from neuraminidase__InfluenzaB__AGX19319

SEQ ID NO: 29403 - protein, 466 aa, Artificial Sequence
  derived and/or modified protein sequence (wt) from neuraminidase__InfluenzaB__AGX19330
MLPSTIQTLTLFLTSGGVLLSLYVSASLSYLLYSDILLKFSPTEIIAPTMPLDCANASNVHAVNRSATKGVTLLLPEPEWTYPRLSCPGSTFQKALLISPHRFGETKGNSAPLIIREPFIACGPNECKHFALTHYAAQPGGYYNGTRGNRNKLRHLISVKLGKIPTVENSIFHMAAWSGSACHDGKEWTYIGVDGPDNNALLKIKYGEAYTDTYHSYANNILRTQESACNCIGGNCYLMITDGSASGVSECRFLKIREGRIIKEIFPTGRVKHTEECTCGFASNKTIECACRDNSYTAKRPFVKLNVETDTAEIRLMCTDTYLDTPRPDDGSITGPCESNGDKGSGGIKGGFVHQRMASKIGRWYSRTMSKTERMGMGLYVKYDGDPWADSDALAFSGVMVSMKEPGWYSFGFEIKDKKCDVPCIGIEMVHDGGKETWHSAATAIYCLMGSGQLLWDTVTGVDMAL

SEQ ID NO: 29404 - protein, 466 aa, Artificial Sequence; identical to SEQ ID NO: 29400
  derived and/or modified protein sequence (wt) from neuraminidase__InfluenzaB__AGX19341

SEQ ID NO: 29405 - protein, 466 aa, Artificial Sequence; identical to SEQ ID NO: 29400
  derived and/or modified protein sequence (wt) from neuraminidase__InfluenzaB__AGX19352

SEQ ID NO: 29406 - protein, 466 aa, Artificial Sequence
  derived and/or modified protein sequence (wt) from neuraminidase__InfluenzaB__AGX19363
MLPSTIQTLTLFLTSGGVLLSLYVSASLSYLLYSDILLKFSPTEIIAPTMPLDCANASNVHAVNRSATKGVTLLLPEPEWTYPRLSCPGSTFQKALLISPHRFGETKGNSAPLIIREPFIACGPNECKHFALTYYAAQPGGYYNGTRGDRNKLRHLISVKLGKIPTVENSIFHMAAWSGSACHDGKEWTYIGVDGPDNNALLKIKYGEAYTDTYHSYANNILRTQESACNCIGGNCYLMITDGSASGVSECRFLKIREGRIIKEIFPTGRVKHTEECTCGFASNKTIECACRDNSYTAKRPFVKLNVETDTAEIRLMCTDTYLDTPRPDDGSITGPCESNGDKGSGGIKGGFVHQRMASKIGRWYSRTMSKTERMGMGLYVKYDGDPWADSDALAFSGVMVSMKEPGWYSFGFEIKDKKCDVPCIGIEMVHDGGKETWHSAATAIYCLMGSGQLLWDTVTGVDMAL

SEQ ID NO: 29407 - protein, 466 aa, Artificial Sequence
  derived and/or modified protein sequence (wt) from neuraminidase__InfluenzaB__AGX19374
MLPSTIQTLTLFLTSGGVLLSLYVSASLSYLLYSDILLKFSQTEITAPIMPLDCANASNVQAVNRSAAKGVTLLLSEPEWTYPRLSCPGSTFQKALLISPHRFGETKGNSAPLIIREPFIACGPTECKHFALTHYAAQPGGYYNGTREDRNKLRHLISVKLGKIPTVENSIFHMAAWSGSACHDGKEWTYIGVDGPDSNALLKIKYGEAYTDTYHSYAKNILRTQESACNCIGGDCYLMITDGPASGVSECRFLKIREGRIIKEIFPTGRVKHTEECTCGFASNKTIECACRDNSYTAKRPFVKLNVETDTAEIRLMCTETYLDTPRPNDGSITGPCESDGDKGSGGIKGGFVHQRMASKIGRWYSRTMSKTKRMGMGLYVKYDGDPWTDSEALALSGVMVSMEEPGWYSFGFEIKDKKCDVPCIGIEMVHDGGKTTWHSAATAIYCLMGSGQLLWDTVTGVDMAL

SEQ ID NO: 29408 - protein, 466 aa, Artificial Sequence; identical to SEQ ID NO: 29400
  derived and/or modified protein sequence (wt) from neuraminidase__InfluenzaB__AGX19385

SEQ ID NO: 29409 - protein, 466 aa, Artificial Sequence
  derived and/or modified protein sequence (wt) from neuraminidase__InfluenzaB__AGX19396
MLPSTIQTLTLFLTSGGVLLSLYVSASLSYLLYSDILLKFSPTEIIAPTMPLDCANASNVHAVNRSATKGVTLLLPEPEWTYPRLSCPGSTFQKALLISPHRFGETKGNSAPLIIREPFIACGPNECKHFALTHYAAQPGGYYNGPRGDRNKLRHLISVKLGKIPTVENSIFHMAAWSGSACHDGKEWTYIGVDGPDNNALLKIKYGEAYTDTYHSYANNILRTQESACNCIGGNCYLMITDGSASGVSECRFLKIREGRIIKEIFPTGRVKHTEECTCGFASNKTIECACRDNSYTAKRPFVKLNVETDTAEIRLMCTDTYLDTPRPDDGSITGPCESNGDKGSGGIKGGFVHQRMASKIGRWYSRTMSKTERMGMGLYVKYDGDPWADSDALAFSGVMVSMKEPGWYSFGFEIKDKKCDVPCIGIEMVHDGGKETWHSAATAIYCLMGSGQLLWDTVTGVDMAL

SEQ ID NO: 29410 - protein, 466 aa, Artificial Sequence; identical to SEQ ID NO: 29400
  derived and/or modified protein sequence (wt) from neuraminidase__InfluenzaB__AGX19407

SEQ ID NO: 29411 - protein, 466 aa, Artificial Sequence; identical to SEQ ID NO: 28961
  derived and/or modified protein sequence (wt) from neuraminidase__InfluenzaB__AGX19418

SEQ ID NO: 29412 - protein, 466 aa, Artificial Sequence
  derived and/or modified protein sequence (wt) from neuraminidase__InfluenzaB__AGX19429
MLPSTIQTLTLFLTSGGVLLSLYVSASLSYLLYSDILLKFSQTEITAPIMPLDCANASNVQAVNRSAAKGVTLLLPEPEWTYPRLSCPGSTFQKALLISPHRFGETKGNSAPLIIREPFIACGPTECKHFALTHYAAQPGGYYNGTREDRNKLRHLISVKLGKIPTVENSIFHMAAWSGSACHDGKEWTYIGVDGPDSNALLKIKYGEAYTDTYHSYAKNILRTQESACNCIGGDCYLMITDGPASGISECRFLKIREGRIIKEIFPTGRVKHTEECTCGFASNKTIECACRDNSYTAKRPFVKLNVETDTAEIRLMCTETYLDTPRPNDGSITGPCESDGDKGSGGIKGGFVHQRMASKIGRWYSRTMSKTRRMGMGLYVKYDGDPWTDSEALALSGVMVSMEEPGWYSFGFEIKDKKCDVPCIGIEMVHDGGKTTWHSAATAIYCLMGSGQLLWDTVTGVDMAL

SEQ ID NO: 29413 - protein, 466 aa, Artificial Sequence
  derived and/or modified protein sequence (wt) from neuraminidase__InfluenzaB__AGX19451
MLPSTIQTLTLFLTSGGVLLSLYVSASLSYLLYSDILLKFSPTEITAPTMPLDCANASNVHAVNHSATKGVTLLLPEPEWTYPRLSCPGSTFQKALLISPHRFGETKGNSAPLIIREPFIACGPNECKHFALTHYAAQPGGYYNGTRGDRNKLRHLISVKLGKIPTVENSIFHMAAWSGSACHDGKEWTYIGVDGPDNNALLKIKYGEAYTDTYHSYANNILRTQESACNCIGGNCYLMVTDGSASGVSECRFLKIREGRIIKEIFPTGRVKHTEECTCGFASNKTIECACRDNSYTAKRPFVKLNVETDTAEIRLMCTDTYLDTPRPDDGSITGPCESNGDKGSGGIKGGFVHQRMASKIGRWYSRTMSKTERMGMGLYVKYDGDPWADSDALAFSGVMVSMKEPGWYSFGFEIKDKKCDVPCIGIEMVHDGGKETWHSAATAIYCLMGSGQLLWDTVTGVDMAL

SEQ ID NO: 29414 - protein, 466 aa, Artificial Sequence; identical to SEQ ID NO: 29412
  derived and/or modified protein sequence (wt) from neuraminidase__InfluenzaB__AGX19462

SEQ ID NO: 29415 - protein, 466 aa, Artificial Sequence; identical to SEQ ID NO: 29412
  derived and/or modified protein sequence (wt) from neuraminidase__InfluenzaB__AGX19473

SEQ ID NO: 29416 - protein, 466 aa, Artificial Sequence; identical to SEQ ID NO: 28961
  derived and/or modified protein sequence (wt) from neuraminidase__InfluenzaB__AGX19484

SEQ ID NO: 29417 - protein, 466 aa, Artificial Sequence; identical to SEQ ID NO: 29413
  derived and/or modified protein sequence (wt) from neuraminidase__InfluenzaB__AGX19495

SEQ ID NO: 29418 - protein, 466 aa, Artificial Sequence; identical to SEQ ID NO: 28961
  derived and/or modified protein sequence (wt) from neuraminidase__InfluenzaB__AGX19506

SEQ ID NO: 29419 - protein, 466 aa, Artificial Sequence; identical to SEQ ID NO: 28961
  derived and/or modified protein sequence (wt) from neuraminidase__InfluenzaB__AGX19517

SEQ ID NO: 29420 - protein, 466 aa, Artificial Sequence; identical to SEQ ID NO: 28961
  derived and/or modified protein sequence (wt) from neuraminidase__InfluenzaB__AGX19528

SEQ ID NO: 29421 - protein, 466 aa, Artificial Sequence; identical to SEQ ID NO: 29413
  derived and/or modified protein sequence (wt) from neuraminidase__InfluenzaB__AGX19539

SEQ ID NO: 29422 - protein, 466 aa, Artificial Sequence
  derived and/or modified protein sequence (wt) from neuraminidase__InfluenzaB__AGX19550
MLPSTIQTLTLFLTSGGVLLSLYVSASLSYLLYSDILLKFSPTEITAPTMPLDCANASNVHAVNHSATKGVTLLLPEPEWTYPRLSCPGSTFQKALLISPHRFGETKGNSAPLIIREPFIACGPNECKHFALTHYAAQPGGYYNGTRGDRNKLRHLISVKLGKIPTVENSIFHMAAWSGSACHDGKEWTYIGVDGPDNNALLKIKYGEAYTDTYHSYANNILRTQESACNCIGGNCYLMVTDGSASGVSECRFLKIREGRIIKEIFPTGRVKHTEECTCGFASNKTIECACRDNSYTAKRPFVKLNVETDTAEIRLMCTDTYLDTPRPDDGSITGPCESNGDKGSGGIKGGFVHQRMASKIGRWYSRTMSKTERMGMGLYVKYDGDPWADSDALAFSGVMVSMNEPGWYSFGFEIKDKKCDVPCIGIEMVHDGGKETWHSAATAIYCLMGSGQLLWDTVTGVDMAL

SEQ ID NO: 29423 - protein, 466 aa, Artificial Sequence
  derived and/or modified protein sequence (wt) from neuraminidase__InfluenzaB__AGX19561
MLPSTIQTLTLFLTSGGVLLSLYVSASLSYLLYSDILLKFSPTEITAPTMPLDCANASNVHAVNHSATKGVTLLLPEPEWTYPRLSCPGSTFQKALLISPHRFGETKGNSAPLIIREPFIACGPNECKHFALTHYAAQPRGYYNGTRGDRNKLRHLISVKLGKIPTVENSIFHMAAWSGSACHDGKEWTYIGVDGPDNNALLKIKYGEAYTDTYHSYANNILRTQESACNCIGGNCYLMVTDGSASGVSECRFLKIREGRIIKEIFPTGRVKHTEECTCGFASNKTIECACRDNSYTAKRPFVKLNVETDTAEIRLMCTDTYLDTPRPDDGSITGPCESNGDKGSGGIKGGFVHQRMASKIGRWYSRTMSKTERMGMGLYVKYDGDPWADSDALAFSGVMVSMKEPGWYSFGFEIKDKKCDVPCIGIEMVHDGGKETWHSAATAIYCLMGSGQLLWDTVTGVDMAL

SEQ ID NO: 29424 - protein, 466 aa, Artificial Sequence
  derived and/or modified protein sequence (wt) from neuraminidase__InfluenzaB__AGX19572
MLPSTIQTLTLFLTSGGVLLSLYVSASLSYLLYSDILLKFSPTEITAPTMPLDCANASNVQAVNRSATKGVTLLLPEPEWTYPRLSCPGSTFQKALLISPHRFGETKGNSAPLIIREPFIACGPNECKHFALTHYAAQPGGYYNGTRGDRNKLRHLISVKLGKIPTVENSIFHMAAWSGSACHDGKEWTYIGVDGPDNNALLKVKYGEAYTDTYHSYANKILRTQESACNCIGGNCYLMITDGSASGVSECRFLKIREGRIIKEIFPTGRVKHTEECTCGFASNKTIECACRDNSYTAKRPFVKLNVETDTAEIRLMCTDTYLDTPRPNDGSITGPCESNGDKGSGGIKGGFVHQRMESKIGRWYSRTMSKTERMGMGLYVKYDGDPWADSDALAFSGVMVSMKEPGWYSFGFEIKDKKCDVPCIGIEMVHDGGKETWHSAATAIYCLMGSGQLLWDTVTGVNMAL

SEQ ID NO: 29425 - protein, 466 aa, Artificial Sequence; identical to SEQ ID NO: 28961
  derived and/or modified protein sequence (wt) from neuraminidase__InfluenzaB__AGX19583

SEQ ID NO: 29426 - protein, 466 aa, Artificial Sequence; identical to SEQ ID NO: 28961
  derived and/or modified protein sequence (wt) from neuraminidase__InfluenzaB__AGX19594

SEQ ID NO: 29427 - protein, 466 aa, Artificial Sequence; identical to SEQ ID NO: 28961
  derived and/or modified protein sequence (wt) from neuraminidase__InfluenzaB__AGX19605

SEQ ID NO: 29428 - protein, 466 aa, Artificial Sequence; identical to SEQ ID NO: 28961
  derived and/or modified protein sequence (wt) from neuraminidase__InfluenzaB__AGX19616

SEQ ID NO: 29429 - protein, 466 aa, Artificial Sequence; identical to SEQ ID NO: 29413
  derived and/or modified protein sequence (wt) from neuraminidase__InfluenzaB__AGX19627

SEQ ID NO: 29430 - protein, 466 aa, Artificial Sequence; identical to SEQ ID NO: 28961
  derived and/or modified protein sequence (wt) from neuraminidase__InfluenzaB__AGX19638

SEQ ID NO: 29431 - protein, 466 aa, Artificial Sequence; identical to SEQ ID NO: 29413
  derived and/or modified protein sequence (wt) from neuraminidase__InfluenzaB__AGX19649

SEQ ID NO: 29432 - protein, 466 aa, Artificial Sequence; identical to SEQ ID NO: 29413
  derived and/or modified protein sequence (wt) from neuraminidase__InfluenzaB__AGX19660

SEQ ID NO: 29433 - protein, 466 aa, Artificial Sequence; identical to SEQ ID NO: 28961
  derived and/or modified protein sequence (wt) from neuraminidase__InfluenzaB__AGX19671

SEQ ID NO: 29434 - protein, 466 aa, Artificial Sequence; identical to SEQ ID NO: 28961
  derived and/or modified protein sequence (wt) from neuraminidase__InfluenzaB__AGX19682

SEQ ID NO: 29435 - protein, 466 aa, Artificial Sequence; identical to SEQ ID NO: 29413
  derived and/or modified protein sequence (wt) from neuraminidase__InfluenzaB__AGX19704

SEQ ID NO: 29436 - protein, 466 aa, Artificial Sequence
  derived and/or modified protein sequence (wt) from neuraminidase__InfluenzaB__AGX19715
MLPSTIQTLTLFLTSGGVLLSLYVSASLSYLLYSDILLKFSPTEITAPTMPLDCANASNVHAVNRSTTKGVTLLLPEPEWTYPRLSCPGSTFQKALLISPHRFGETKGNSAPLIIREPFIACGPNECKHFALTHYAAQPGGYYNGTRGDRNKLRHLISVKLGKIPTVENSIFHMAAWSGSACHDGKEWTYIGVDGPDNNALLKIKYGEAYTDTYHSYANNILRTQESACNCIGGNCYLMITDGSASGVSECRFLKIREGRIIKEIFPTGRVKHTEECTCGFASNKTIECACRDNSYTAKRPFVKLNVETDTAEIRLMCTDTYLDTPRPDDGSITGPCESNGDKGSGGIKGGFVHQRMASKIGRWYSRTMSKTERMGMGLYVKYDGDPWADSDALAFSGVMVSMKEPGWYSFGFEIKDKKCDVPCIGIEMVHDGGKETWHSAATAIYCLMGSGQLLWDTVTGVDMAL

SEQ ID NO: 29437 - protein, 466 aa, Artificial Sequence; identical to SEQ ID NO: 28961
  derived and/or modified protein sequence (wt) from neuraminidase__InfluenzaB__AGX19726

SEQ ID NO: 29438 - protein, 466 aa, Artificial Sequence; identical to SEQ ID NO: 28961
  derived and/or modified protein sequence (wt) from neuraminidase__InfluenzaB__AGX19737

SEQ ID NO: 29439 - protein, 466 aa, Artificial Sequence; identical to SEQ ID NO: 28961
  derived and/or modified protein sequence (wt) from neuraminidase__InfluenzaB__AGX19748

SEQ ID NO: 29440 - protein, 466 aa, Artificial Sequence; identical to SEQ ID NO: 29413
  derived and/or modified protein sequence (wt) from neuraminidase__InfluenzaB__AGX19759

SEQ ID NO: 29441 - protein, 466 aa, Artificial Sequence; identical to SEQ ID NO: 28961
  derived and/or modified protein sequence (wt) from neuraminidase__InfluenzaB__AGX19770

SEQ ID NO: 29442 - protein, 466 aa, Artificial Sequence; identical to SEQ ID NO: 28961
  derived and/or modified protein sequence (wt) from neuraminidase__InfluenzaB__AGX19781

SEQ ID NO: 29443 - protein, 466 aa, Artificial Sequence; identical to SEQ ID NO: 28961
  derived and/or modified protein sequence (wt) from neuraminidase__InfluenzaB__AGX19792

SEQ ID NO: 29444 - protein, 466 aa, Artificial Sequence; identical to SEQ ID NO: 28961
  derived and/or modified protein sequence (wt) from neuraminidase__InfluenzaB__AGX19803

SEQ ID NO: 29445 - protein, 466 aa, Artificial Sequence; identical to SEQ ID NO: 28961
  derived and/or modified protein sequence (wt) from neuraminidase__InfluenzaB__AGX19814

SEQ ID NO: 29446 - protein, 466 aa, Artificial Sequence
  derived and/or modified protein sequence (wt) from neuraminidase__InfluenzaB__AGX19825
MLPSTIQTLTLFLTSGGVLLSLYVSASLSYLLYSDILLKFSPTEITAPTMPLDCANASNVHAVNHSATKGVTLLLPEPEWTYPRLSCPGSTFQKALLISPHRFGETKGNSAPLIIREPFIACGPNECKHFALTHYAAQPGGYYNGTRGDRNKLRHLISVKLGKIPTVENSIFHMAAWSGSACHDGKEWTYIGVDGPDNNALLKIKYGEAYTDTYHSYANNILRTQESACNCIGGNCYLMVTDGSASGVSECRFLKIREGRIIKEIFPTGRVKHTEECTCGFANNKTIECACRDNSYTAKRPFVKLNVETDTAEIRLMCTDTYLDTPRPDDGSITGPCESNGDKGSGGIKGGFVHQRMASKIGRWYSRTMSKTERMGMGLYVKYDGDPWADSDALAFSGVMVSMKEPGWYSFGFEIKDKKCDVPCIGIEMVHDGGKETWHSAATAIYCLMGSGQLLWDTVTGVDMAL

SEQ ID NO: 29447 - protein, 466 aa, Artificial Sequence; identical to SEQ ID NO: 28961
  derived and/or modified protein sequence (wt) from neuraminidase__InfluenzaB__AGX19836

SEQ ID NO: 29448 - protein, 466 aa, Artificial Sequence; identical to SEQ ID NO: 28961
  derived and/or modified protein sequence (wt) from neuraminidase__InfluenzaB__AGX19847

SEQ ID NO: 29449 - protein, 466 aa, Artificial Sequence; identical to SEQ ID NO: 28961
  derived and/or modified protein sequence (wt) from neuraminidase__InfluenzaB__AGX19858

SEQ ID NO: 29450 - protein, 466 aa, Artificial Sequence; identical to SEQ ID NO: 28961
  derived and/or modified protein sequence (wt) from neuraminidase__InfluenzaB__AGX19869

SEQ ID NO: 29451 - protein, 466 aa, Artificial Sequence; identical to SEQ ID NO: 28961
  derived and/or modified protein sequence (wt) from neuraminidase__InfluenzaB__AGX19880

SEQ ID NO: 29452 - protein, 466 aa, Artificial Sequence; identical to SEQ ID NO: 28961
  derived and/or modified protein sequence (wt) from neuraminidase__InfluenzaB__AGX19891

SEQ ID NO: 29453 - protein, 466 aa, Artificial Sequence; identical to SEQ ID NO: 28961
  derived and/or modified protein sequence (wt) from neuraminidase__InfluenzaB__AGX19902

SEQ ID NO: 29454 - protein, 466 aa, Artificial Sequence
  derived and/or modified protein sequence (wt) from neuraminidase__InfluenzaB__AGX19913
MLPSTIQTLTLFLTSGGVLLSLYVSASLSYLLYSDILLKFSPTEITAPTMPLDCANASNVHAMNHSATKGVTLLLPEPEWTYPRLSCPGSTFQKALLISPHRFGETKGNSAPLIIREPFIACGPNECKHFALTHYAAQPGGYYNGTRGDRNKLRHLISVKLGKIPTVENSIFHMAAWSGSACHDGKEWTYIGVDGPDNNALLKIKYGEAYTDTYHSYANNILRTQESACNCIGGNCYLMVTDGSASGVSECRFLKIREGRIIKEIFPTGRVKHTEECTCGFASNKTIECACRDNSYTAKRPFVKLNVETDTAEIRLMCTDTYLDTPRPDDGSITGPCESNGDKGSGGIKGGFVHQRMASKIGRWYSRTMSKTERMGMGLYVKYDGDPWADSDALAFSGVMVSMKEPGWYSFGFEIKDKKCDVPCIGIEMVHDGGKETWHSAATAIYCLMGSGQLLWDTVTGVDMAL

SEQ ID NO: 29455 - protein, 466 aa, Artificial Sequence; identical to SEQ ID NO: 28961
  derived and/or modified protein sequence (wt) from neuraminidase__InfluenzaB__AGX19924

SEQ ID NO: 29456 - protein, 466 aa, Artificial Sequence; identical to SEQ ID NO: 28961
  derived and/or modified protein sequence (wt) from neuraminidase__InfluenzaB__AGX19935

SEQ ID NO: 29457 - protein, 466 aa, Artificial Sequence; identical to SEQ ID NO: 28961
  derived and/or modified protein sequence (wt) from neuraminidase__InfluenzaB__AGX19946

SEQ ID NO: 29458 - protein, 466 aa, Artificial Sequence; identical to SEQ ID NO: 28961
  derived and/or modified protein sequence (wt) from neuraminidase__InfluenzaB__AGX19957

SEQ ID NO: 29459 - protein, 466 aa, Artificial Sequence
  derived and/or modified protein sequence (wt) from neuraminidase__InfluenzaB__AGX19968
MLPSTIQTLTLFLTSGGVLLSLYVSASLSYLLYSDILLKFSPTEITAPTMPLDCANASNVQAVNRSATKGVTLLLPEPEWTYPRLSCPGSTFQKALLISPHRFGETKGNSAPLIIREPFIACGPNECKHFALTHYAAQPGGYYNGTRGDRNKLRHLISVKLGKIPTVENSIFHMAAWSGSACHDGKEWTYIGVDGPDNDALLKVKYGEAYTDTYHSYANKILRTQESACNCIGGNCYLMITDGSASGVSECRFLKIREGRIIKEIFPTGRVKHTEECTCGFASNKTIECACRDNSYTAKRPFVKLNVETDTAEIRLMCTDTYLDTPRPNDGSITGPCESNGDKGSGGIKGGFVHQRMESKIGRWYSRTMSKTERMGMGLYVKYDGDPWADSDALAFSGVMVSMKEPGWYSFGFEIKDKKCDVPCIGIEMVHDGGKETWHSAATAIYCLMGSGQLLWDTVTGVNMAL

SEQ ID NO: 29460 - protein, 466 aa, Artificial Sequence; identical to SEQ ID NO: 29413
  derived and/or modified protein sequence (wt) from neuraminidase__InfluenzaB__AGX19979

SEQ ID NO: 29461 - protein, 466 aa, Artificial Sequence; identical to SEQ ID NO: 29413
  derived and/or modified protein sequence (wt) from neuraminidase__InfluenzaB__AGX19990

SEQ ID NO: 29462 - protein, 466 aa, Artificial Sequence; identical to SEQ ID NO: 28961
  derived and/or modified protein sequence (wt) from neuraminidase__InfluenzaB__AGX20001

SEQ ID NO: 29463 - protein, 466 aa, Artificial Sequence; identical to SEQ ID NO: 28961
  derived and/or modified protein sequence (wt) from neuraminidase__InfluenzaB__AGX20012

SEQ ID NO: 29464 - protein, 466 aa, Artificial Sequence; identical to SEQ ID NO: 28961
  derived and/or modified protein sequence (wt) from neuraminidase__InfluenzaB__AGX20023

SEQ ID NO: 29465 - protein, 466 aa, Artificial Sequence; identical to SEQ ID NO: 28961
  derived and/or modified protein sequence (wt) from neuraminidase__InfluenzaB__AGX20034

SEQ ID NO: 29466 - protein, 466 aa, Artificial Sequence; identical to SEQ ID NO: 28961
  derived and/or modified protein sequence (wt) from neuraminidase__InfluenzaB__AGX20045

SEQ ID NO: 29467 - protein, 466 aa, Artificial Sequence
  derived and/or modified protein sequence (wt) from neuraminidase__InfluenzaB__AGX20056
MLPSTIQTLTLFLTSGGVLLSLYVSASLSYLLYSDILLKFSPTEITAPTMPLDCANASNVQAVNRSATKGVTLLLPEPEWTYPRLSCPGSTFQKALLISPHRFGETKGNSAPLMIREPFIACGPNECKHFALTHYAAQPGGYYNGTRGDRNKLRHLISVKLGKIPTVENSIFHMAAWSGSACHDGKEWTYIGVDGPDNNALLKVKYGEAYTDTYHSYANKILRTQESACNCIGGNCYLMVTDGSASGVSECRFLKIREGRIIKEIFPTGRVKHTEECTCGFASNKTIECACRDNSYTAKRPFVKLNVETDTAEIRLMCTDTYLDTPRPNDGSITGPCESNGDKGSGGIKGGFVHQRMESKIGRWYSRTMSKTERMGMGLYVKYDGDPWADSDALAFSGVMVSMKEPGWYSFGFEIKDKKCDVPCIGIEMVHDGGKETWHSAATAIYCLMGSGQLLWDTVTGVDMAL

SEQ ID NO: 29468 - protein, 466 aa, Artificial Sequence
  derived and/or modified protein sequence (wt) from neuraminidase__InfluenzaB__AGX20067
MLPSTIQTLTLFLTSGGVLLSLYVSASLSYLLYSDILLKFSPTEITAPTMPLDCANASNVQAVNRSATKGVTLLLPEPEWTYPRLSCPGSTFQKALLISPHRFGETKGNSAPLIIREPFIACGPNECKHFALTHYAAQPGGYYNGTRGDRNKLRHLISVKLGKIPTVENSIFHMAAWSGSACHDGKEWTYIGVDGPDNNALLKVKYGEAYTDTYHSYANKILRTQESACNCIGGNCYLMVTDGSASGVSECRFLKIREGRIIKEIFPTGRVKHTEECTCGFASNKTIECACRDNSYTAKRPFVKLNVETDTAEIRLMCTDTYLDTPRPNDGSITGPCESNGDKGSGGIKGGFVHQRMESKIGRWYSRTMSKTERMGMGLYVKYDGDPWADSDALAFSGVMVSMKEPGWYSFGFEIKDKKCDVPCIGIEMVHDGGKETWHSAATAIYCLMGSGQLLWDTVTGVDMAL

SEQ ID NO: 29469 - protein, 466 aa, Artificial Sequence; identical to SEQ ID NO: 28961
  derived and/or modified protein sequence (wt) from neuraminidase__InfluenzaB__AGX20078

SEQ ID NO: 29470 - protein, 466 aa, Artificial Sequence; identical to SEQ ID NO: 28961
  derived and/or modified protein sequence (wt) from neuraminidase__InfluenzaB__AGX20089

SEQ ID NO: 29471 - protein, 466 aa, Artificial Sequence
  derived and/or modified protein sequence (wt) from neuraminidase__InfluenzaB__AGX20100
MLPSTIQTLTLFLTSGGVLLSLYVSASLSYLLYSDILLKFPSTEITAPTMPLDCANASNVQAVNRSATKGVTLLLPEPEWTYPRLSCPGSTFQKALLISPHRFGETKGNSAPLIIREPFIACGPKECKHFALTHYAAQPGGYYNGTRGDRNKLRHLISVKLGKIPTVENSIFHMAAWSGSACHDGKEWTYIGVDGPDNNAVLKIKYGEAYTDTYHSYANNILRTQESACNCIGGNCYLMITDGSASGVSECRFLKIREGRIIKEIFPTGRIQHTEECTCGFASNKTIECACRDNSYTAKRPFVKLNVETDTAEIRLMCTKTYLDTPRPDDGSITGPCESNGGKGSGGIKGGFVHQRMASKIGRWYSRTMSKTERKGMGLYVKYDGDPWADSDALAFSGVMVSMEEPGWYSFGFEIKDKKCDVPCIGIEMVHDGGKETWHSAATAIYCLMGSGQLLWDTVTGVNMAL

SEQ ID NO: 29472 - protein, 466 aa, Artificial Sequence
  derived and/or modified protein sequence (wt) from neuraminidase__InfluenzaB__AGX20111
MLPSTIQTLTLFLTSGGVLLSLYVSASLSYLLYSDILLKFSPTEITAPTMPLDCANASNVQAVNRSATKGVTLLLPEPEWTYPRLSCPGSTFQKALLISPHRFGETKGNSAPLIIREPFIACGPNECKHFALTHYAAQPGGYYNGTRGDRNKLRHLISVKLGKIPTVENSIFHMAAWSGSACHDGKEWTYIGVDGPDNNALLKVKYGEAYTDTYHSYANKILRTQESACNCIGGNCYLMITDGSASGVSECRFLKIREGRIIKEIFPTGRVKHTEECTCGFASNKTIECACRDNSYTAKRPFVKLNVETDTAEIRLMCTDTYLDTPRPDDGSITGPCESNGDKGSGGIKGGFVHQRMESKIGRWYSRTMSKTERMGMGLYVKYDGDPWADSDALTFSGVMVSMKEPGWYSFGFEIKDKKCDVPCIGIEMVHDGGKETWHSAATAIYCLMGSGQLLWDTVTGVDMAL

SEQ ID NO: 29473 - protein, 466 aa, Artificial Sequence
  derived and/or modified protein sequence (wt) from neuraminidase__InfluenzaB__AGX20122
MLPSTIQTLTLFLTSGGVLLSLYVSALLSYLLYSDILLKFSPTEITAPTMSLDCANASNVQAVNRSATKGVTFLLPEPEWTYPRLSCPGSTFQRALLISPHRFGETKGNSAPLIIREPFIACGPNECKHFALTHYAAQPGGYYNGTRGDRNKLRHLISVKLGKIPTVENSIFHMAAWSGSACHDGKEWTYIGVDGPDNDALLKVKYGEAYTDTYHSYANKILRTQESACNCIGGNCYLMITDGSASGVSECRFLKIREGRIIKEIFPTGRVKHTEECTCGFASNKTIECACRDNSYTAKRPFVKLNVETDTAEIRLMCTDTYLDTPRPDDGSITGPCESNGDKGSGGIKGGFVHQRMESKIGRWYSRTMSKTERMGMGLYVKYDGDPWADSDALAFSGVMVSMKEPGWYSFGFEIKDKKCDVPCIGIEMVHDGGKETWHSAATAIYCLMGSGQLLWDTVTGVDMAL

SEQ ID NO: 29474 - protein, 466 aa, Artificial Sequence
  derived and/or modified protein sequence (wt) from neuraminidase__InfluenzaB__AGX20133
MLPSTIQTLTLFLTSGGVLLSLYVSALLSYLLYSDVLLKFSPTEITAPTMSLDCANASNVQAVNRSATKGVTFLLPEPEWTYPRLSCPGSTFQKALLISPHRFGETKGNSAPLIIREPFIACGPNECKHFALTHYAAQPGGYYNGTRGDRNKLRHLISVKLGKIPTVENSIFHMAAWSGSACHDGKEWTYIGVDGPDNDALLKVKYGEAYTDTYHSYANKILRTQESACNCIGGNCYLMITDGSASGVSECRFLKIREGRIIKEIFPTGRVKHTEECTCGFASNKTIECACRDNSYTAKRPFVKLNVETDTAEIRLMCTDTYLDTPRPDDGSITGPCESNGDKGSGGIKGGFVHQRMESKIGRWYSRTMSKTERMGMGLYVKYDGDPWADSDALAFSGVMVSMKEPGWYSFGFEIKDKKCDVPCIGIEMVHDGGKETWHSAATAIYCLMGSGQLLWDTVTGVDMAL

SEQ ID NO: 29475 - protein, 466 aa, Artificial Sequence
  derived and/or modified protein sequence (wt) from neuraminidase__InfluenzaB__AGX20144
MLPSTIQTLTLFLTSGGVLLSLYVSALLSYLLYSDILLKFSPTEITAPTMSLDCANASNVQAVNRSATKGVTFLLPEPEWTYPRLSCPGSTFQKALLISPHRFGETKGNSAPLIIREPFIACGPNECKHFALTHYAAQPGGYYNGTRGDRNKLRHLISVKLGKIPTVENSIFHMAAWSGSACHDGKEWTYIGVDGPDNDALLKVKYGEAYTDTYHSYANKILRTQESACNCIGGNCYLMITDGSASGISECRFLKIREGRIIKEIFPTGRVKHTEECTCGFASNKTIECACRDNSYTAKRPFVKLNVETDTAEIRLMCTDTYLDTPRPDDGSITGPCESNGDKGSGGIKGGFVHQRMESKIGRWYSRTMSKTERMGMGLYVKYDGDPWADSDALAFSGVMVSMKEPGWYSFGFEIKDKKCDVPCIGIEMVHDGGKETWHSAATAIYCLMGSGQLLWDTVTGVDMAL

SEQ ID NO: 29476 - protein, 466 aa, Artificial Sequence; identical to SEQ ID NO: 29475
  derived and/or modified protein sequence (wt) from neuraminidase__InfluenzaB__AGX20155

SEQ ID NO: 29477 - protein, 466 aa, Artificial Sequence; identical to SEQ ID NO: 29475
  derived and/or modified protein sequence (wt) from neuraminidase__InfluenzaB__AGX20166

SEQ ID NO: 29478 - protein, 466 aa, Artificial Sequence; identical to SEQ ID NO: 28895
  derived and/or modified protein sequence (wt) from neuraminidase__InfluenzaB__AGX20177

SEQ ID NO: 29479 - protein, 466 aa, Artificial Sequence; identical to SEQ ID NO: 28895
  derived and/or modified protein sequence (wt) from neuraminidase__InfluenzaB__AGX20188

SEQ ID NO: 29480 - protein, 466 aa, Artificial Sequence; identical to SEQ ID NO: 28872
  derived and/or modified protein sequence (wt) from neuraminidase__InfluenzaB__AGX20199

SEQ ID NO: 29481 - protein, 466 aa, Artificial Sequence; identical to SEQ ID NO: 28895
  derived and/or modified protein sequence (wt) from neuraminidase__InfluenzaB__AGX20210

SEQ ID NO: 29482 - protein, 466 aa, Artificial Sequence; identical to SEQ ID NO: 29475
  derived and/or modified protein sequence (wt) from neuraminidase__InfluenzaB__AGX20221

SEQ ID NO: 29483 - protein, 466 aa, Artificial Sequence
  derived and/or modified protein sequence (wt) from neuraminidase__InfluenzaB__AGX20232
MLPSTIQTLTLFLTSGGVLLSLYVSASLSYLLYSGILLKFSPTEITAPTMPLDCANASNVQAVNRSATKGVTFLLPEPEWTYPRLSCPGSTFQKALLISPHRFGETKGNSAPLIIREPFIACGPNECKHFALTHYAAQPGGYYNGTRGDRNKLRHLISVKLGKIPTVENSIFHMAAWSGSACHDGKEWTYIGVDGPDNNALLKVKYGEAYTDTYHSYANKILRTQESACNCIGGNCYLMITDGSASGVSECRFLKIREGRIIKEIFPTGRVKHTEECTCGFASNETIECACRDNSYTAKRPFVKLNVETDTAEIRLMCTDTYLDTPRPNDGSITGPCESNGDKGGGGIKGGFVHQRMESKIGRWYSRTMSKTERMGMGLYVKYDGDPWADSDALAFSGVMVSMKEPGWYSFGFEIKDKKCDVPCIGIEMVHDGGKETWHSAATAIYCLMGSGQLLWDTVTGVDMAL

SEQ ID NO: 29484 - protein, 466 aa, Artificial Sequence; identical to SEQ ID NO: 28895
  derived and/or modified protein sequence (wt) from neuraminidase__InfluenzaB__AGX20243

SEQ ID NO: 29485 - protein, 466 aa, Artificial Sequence; identical to SEQ ID NO: 29475
  derived and/or modified protein sequence (wt) from neuraminidase__InfluenzaB__AGX20254

SEQ ID NO: 29486 - protein, 466 aa, Artificial Sequence; identical to SEQ ID NO: 28872
  derived and/or modified protein sequence (wt) from neuraminidase__InfluenzaB__AGX20265

SEQ ID NO: 29487 - protein, 466 aa, Artificial Sequence; identical to SEQ ID NO: 29475
  derived and/or modified protein sequence (wt) from neuraminidase__InfluenzaB__AGX20276

SEQ ID NO: 29488 - protein, 466 aa, Artificial Sequence; identical to SEQ ID NO: 28895
  derived and/or modified protein sequence (wt) from neuraminidase__InfluenzaB__AGX20287

SEQ ID NO: 29489 - protein, 466 aa, Artificial Sequence
  derived and/or modified protein sequence (wt) from neuraminidase__InfluenzaB__AGX20298
MLPSTIQTLTLFLTSGGVLLSLYVSALLSYLLYSDILLKFSPTEITAPTMSLDCANASNVQAVNRSATKGVTFLLPEPEWTYPRLSCPGSTFQKALLISPHRFGETKGNSAPLIIREPFIACGPNECKHFALTHYAAQPGGYYNGTRGDRNKLRHLISVKLGKIPTVENSIFHMAAWSGSACHDGKEWTYIGVDGPDNDALLKVKYGEAYTDTYHSYANKILRTQESACNCIGGNCYLMITDGSASGVSECRFLKIREGRIIKEIFPTGRVKHTEECTCGFASNKTIECACRDNSYTAKRPFVKLNVETDTAEIRLMCTDTYLDTPRPDDGSITGPCESNGDKGSGGIKGGFVHQRMESKIGRWYSRTMSKTERMGMGLYVKYDGDPWADSDALAFSGVMVSMKEPGWYSFGFEIKDKKCDVPCIGIEMVHDGGKETWQSAATAIYCLMGSGQLLWDTVTGVDMAL

SEQ ID NO: 29490 - protein, 466 aa, Artificial Sequence; identical to SEQ ID NO: 28872
  derived and/or modified protein sequence (wt) from neuraminidase__InfluenzaB__AGX20320

SEQ ID NO: 29491 - protein, 466 aa, Artificial Sequence; identical to SEQ ID NO: 28895
  derived and/or modified protein sequence (wt) from neuraminidase__InfluenzaB__AGX20331

SEQ ID NO: 29492 - protein, 466 aa, Artificial Sequence
  derived and/or modified protein sequence (wt) from neuraminidase__InfluenzaB__AGX20342
MLPSTIQTLTLFLTSGGVLLSLYVSASLSYLLYSDILLKFSPTEITAPTMPLDCANASNVQAVNRSATKGVTLLLPEPEWTYPRLSCPGSTFQKALLISPHRFGETKGNSAPLIIREPFIACGPNECKHFALTHYAAQPGGYYNGTRGDRNKLRHLISVKLGKIPTVENSIFHMAAWSGSACHDGKEWTYIGVDGPDNNALLKVKYGEAYTDTYHSYANKILRTQESACNCIGGNCYLMVTDGSASGVSECRFLKIREGRIIKEIFPTGRVKHTEECTCGFASNKTIECACRDNSYTAKRPFVKLNVETDTAEIRLMCTDTYLDTPRPDDGSITGPCESNGDKGSGGIKGGFVHQRMESKIGRWYSRTMSKTERMGMGLYVKYDGDPWADSDALAFSGVMVSMKEPGWYSFGFEIKDKKCDVPCIGIEMVHDGGKETWHSAATAIYCLMGSGQLLWDTVTGVDMAL

SEQ ID NO: 29493 - protein, 466 aa, Artificial Sequence
  derived and/or modified protein sequence (wt) from neuraminidase__InfluenzaB__AGX20353
MLPSTIQTLTLFLTSGGVLLSLYVSALLSYLLYSDILLKFSPTEIIAPTMSLDCANASNVQAVNRSATKGVTFLLPEPEWTYPRLSCPGSTFQKALLISPHRFGETKGNSAPLIIREPFIACGPNECKHFALTHYAAQPGGYYNRTRGDRNKLRHLISVKLGKIPTVENSIFHMAAWSGSACHDGKEWTYIGVDGPDNDALLKVKYGEAYTDTYHSYANKILRTQESACNCIGGNCYLMITDGSASGISECRFLKIREGRIIKEIFPTGRVKHTEECTCGFASNKTIECACRDNSYTAKRPFVKLNVETDTAEIRLMCTDTYLDTPRPDDGSITGPCESNGDKGSGGIKGGFVHQRMESKIGRWYSRTMSKTERMGMGLYVKYDGDPWADSDALAFSGVMVSMKEPGWYSFGFEIKDKKCDVPCIGIEMVHDGGKETWHSAATAIYCLMGSGQLLWDTVTGVDMAL

SEQ ID NO: 29494 - protein, 466 aa, Artificial Sequence; identical to SEQ ID NO: 28895
  derived and/or modified protein sequence (wt) from neuraminidase__InfluenzaB__AGX20364

SEQ ID NO: 29495 - protein, 466 aa, Artificial Sequence; identical to SEQ ID NO: 28890
  derived and/or modified protein sequence (wt) from neuraminidase__InfluenzaB__AGX20375

SEQ ID NO: 29496 - protein, 466 aa, Artificial Sequence
  derived and/or modified protein sequence (wt) from neuraminidase__InfluenzaB__AGX20386
MLPSTIQTLTLFLTSGGVLLSLYVSALLSYLLYSDILLKFSPTEITAPTMSLDCANASNVQAVNRSATKGVTFLLPEPEWTHPRLSCPGSTFQKALLISPHRFGETKGNSAPLIIREPFIACGPNECKHFALTHYAAQPGGYYNGTRGDRNKLRHLISVKLGKIPTVENSIFHMAAWSGSACHDGKEWTYIGVDGPDNDALLKVKYGEAYTDTYHSYANKILRTQESACNCIGGNCYLMITDGSASGISECRFLKIREGRIIKEIFPTGRVKHTEECTCGFASNKTIECACRDNSYTAKRPFVKLNVETDTAEIRLMCTDTYLDTPRPDDGSITGPCESNGDKGSGGIKGGFVHQRMESKIGRWYSRTMSKTERMGMGLYVKYDGDPWADSDALAFSGVMVSMKEPGWYSFGFEIKDKKCDVPCIGIEMVHDGGKETWHSAATAIYCLMGSGQLLWDTVTGVDMAL

SEQ ID NO: 29497 - protein, 466 aa, Artificial Sequence; identical to SEQ ID NO: 28895
  derived and/or modified protein sequence (wt) from neuraminidase__InfluenzaB__AGX20397

SEQ ID NO: 29498 - protein, 466 aa, Artificial Sequence; identical to SEQ ID NO: 28890
  derived and/or modified protein sequence (wt) from neuraminidase__InfluenzaB__AGX20408

SEQ ID NO: 29499 - protein, 466 aa, Artificial Sequence; identical to SEQ ID NO: 28872
  derived and/or modified protein sequence (wt) from neuraminidase__InfluenzaB__AGX20419

SEQ ID NO: 29500 - protein, 466 aa, Artificial Sequence
  derived and/or modified protein sequence (wt) from neuraminidase__InfluenzaB__AGX20430
MLPSTIQTLTLFLTSGGVLLSLYVSALLSYLLYSDILLKFSPTEITAPTMSLDCANASNVQAVNRSATKGVTFLLPEPEWTYPRLSCPGSTFQRALLISPHRFGEAKGNSAPLIIREPFIACGPNECKHFALTHYAAQPGGYYNGTRGDRNKLRHLISVKLGKIPTVENSIFHMAAWSGSACHDGKEWTYIGVDGPDNDALLKVKYGEAYTDTYHSYANKILRTQESACNCIGGNCYLMITDGSASGVSECRFLKIREGRIIKEIFPTGRVKHTEECTCGFASNKTIECACRDNSYTAKRPFVKLNVETDTAEIRLMCTDTYLDTPRPDDGSITGPCESNGDKGSGGIKGGFVHQRMESKIGRWYSRTMSKTERMGMGLYVKYDGDPWADSDALAFSGVMVSMKEPGWYSFGFEIKDKKCDVPCIGIEMVHDGGKETWHSAATAIYCLMGSGQLLWDTVTGVDMAL

SEQ ID NO: 29501 - protein, 466 aa, Artificial Sequence; identical to SEQ ID NO: 28872
  derived and/or modified protein sequence (wt) from neuraminidase__InfluenzaB__AGX20441

SEQ ID NO: 29502 - protein, 466 aa, Artificial Sequence
  derived and/or modified protein sequence (wt) from neuraminidase__InfluenzaB__AGX20452
MLPSTIQTLTLFLTSGGVLLSLYVSASLSYLLYSDILLKFSPTEITAPTMSLDCANASNVQAVNRSATKGVTFLLPEPEWTYPRLSCPGSTFQKALLISPHRFGETKGNSAPLIIREPFIACGPNECKHFALTHYAAQPGGYYNGTRGDRNKLRHLISVKLGKIPTVENSIFHMAAWSGSACHDGKEWTYIGVDGPDNDALLKVKYGEAYTDTYHSYANKILRTQESACNCIGGNCYLMITDGSASGVSECRFLKIREGRIIKEIFPTGRVKHTEECTCGFASNKTIECACRDNSYTAKRPFVKLNVETDTAEIRLMCTDTYLDTPRPDDGSITGPCESNGDKGSGGIKGGFVHQRMESKIGRWYSRTMSKTERMGMGLYVKYDGDPWADSDALAFSGVMVSMKEPGWYSFGFEIRDKKCDVPCIGIEMVHDGGKETWHSAATAIYCLMGSGQLLWDTVTGVDMAL

SEQ ID NO: 29503 - protein, 466 aa, Artificial Sequence; identical to SEQ ID NO: 28895
  derived and/or modified protein sequence (wt) from neuraminidase__InfluenzaB__AGX20463

SEQ ID NO: 29504 - protein, 466 aa, Artificial Sequence; identical to SEQ ID NO: 28895
  derived and/or modified protein sequence (wt) from neuraminidase__InfluenzaB__AGX20474

SEQ ID NO: 29505 - protein, 466 aa, Artificial Sequence; identical to SEQ ID NO: 28895
  derived and/or modified protein sequence (wt) from neuraminidase__InfluenzaB__AGX20485

SEQ ID NO: 29506 - protein, 466 aa, Artificial Sequence; identical to SEQ ID NO: 29475
  derived and/or modified protein sequence (wt) from neuraminidase__InfluenzaB__AGX20496

SEQ ID NO: 29507 - protein, 466 aa, Artificial Sequence; identical to SEQ ID NO: 28895
  derived and/or modified protein sequence (wt) from neuraminidase__InfluenzaB__AGX20507

SEQ ID NO: 29508 - protein, 466 aa, Artificial Sequence; identical to SEQ ID NO: 28895
  derived and/or modified protein sequence (wt) from neuraminidase__InfluenzaB__AGX20518

SEQ ID NO: 29509 - protein, 466 aa, Artificial Sequence
  derived and/or modified protein sequence (wt) from neuraminidase__InfluenzaB__AGX20529
MLPSTIQTLTLFLTSGGVLLSLYVSALLSYLLYSDILLKFSPTEITAPTMSLDCANASNVQAVNRSATKGVTFLLPEPEWTYPRLSCPGSTFQKALLISPHRFGETKGNSAPLIIREPFIACGPNECKHFALTHYAAQPGGYYNGTRGDRNKLRHLISVKLGKIPTVENSIFHMAAWSGSACHDGKEWTYIGVDGPDNDALLKVKYGEAYTDTYHSYANKILRTQESACNCIGGNCYLMITDGSASGVSECRFLKIREGRIIKEIFPTGRVKHTEECTCGFASNKTIECTCRDNSYTAKRPFVKLNVETDTAEIRLMCTDTYLDTPRPDDGSITGPCESNGDKGSGGIKGGFVHQRMESKIGRWYSRTMSKTERMGMGLYVKYDGDPWADSDALAFSGVMVSMKEPGWYSFGFEIKDKKCDVPCIGIEMVHDGGKETWHSAATAIYCLMGSGQLLWDTVTGVDMAL

SEQ ID NO: 29510 - protein, 466 aa, Artificial Sequence; identical to SEQ ID NO: 29473
  derived and/or modified protein sequence (wt) from neuraminidase__InfluenzaB__AGX20540

SEQ ID NO: 29511 - protein, 466 aa, Artificial Sequence; identical to SEQ ID NO: 29119
  derived and/or modified protein sequence (wt) from neuraminidase__InfluenzaB__AGX20551

SEQ ID NO: 29512 - protein, 466 aa, Artificial Sequence; identical to SEQ ID NO: 28872
  derived and/or modified protein sequence (wt) from neuraminidase__InfluenzaB__AGX20562

SEQ ID NO: 29513 - protein, 466 aa, Artificial Sequence; identical to SEQ ID NO: 28895
  derived and/or modified protein sequence (wt) from neuraminidase__InfluenzaB__AGX20573

SEQ ID NO: 29514 - protein, 466 aa, Artificial Sequence
  derived and/or modified protein sequence (wt) from neuraminidase__InfluenzaB__AGX20584
MLPSTIQTLTLFLTSGGVLLSLYVSASLSYLLYSDILLKFSSTEITAPTMPLDCANASNVQAVNRSATKGVTLLLPEPEWTYPRLSCPGSTFQKALLISPHRFGETKGNSAPLIIREPFIACGPNECKHFALTHYAAQPGGYYNGTRGDRNKLRHLISVKLGKIPTVENSIFHMAAWSGSACHDGKEWTYIGVDGPDNNALLKVKYGEAYTDTYHSYANKILRTQESACNCIGGNCYLMITDGSASGVSECRFLKIREGRIIKEIFPTGRVKHTEECTCGFASNKTIECACRDNSYTAKRPFVKLNVETDTAEIRLMCTDTYLDTPRPNDGSITGPCESNGDKGSGGIKGGFVHQRMESRIGRWYSRTMSKTERMGMGLYVKYDGDPWTDSDALTFSGVMVSMKEPGWYSFGFEIKDKKCDVPCIGIEMVHDGGKETWHSAATAIYCLMGSGQLLWDTVTGVDMAL

SEQ ID NO: 29515 - protein, 466 aa, Artificial Sequence; identical to SEQ ID NO: 28895
  derived and/or modified protein sequence (wt) from neuraminidase__InfluenzaB__AGX20595

SEQ ID NO: 29516 - protein, 466 aa, Artificial Sequence; identical to SEQ ID NO: 29473
  derived and/or modified protein sequence (wt) from neuraminidase__InfluenzaB__AGX20606

SEQ ID NO: 29517 - protein, 466 aa, Artificial Sequence; identical to SEQ ID NO: 29473
  derived and/or modified protein sequence (wt) from neuraminidase__InfluenzaB__AGX20617

SEQ ID NO: 29518 - protein, 466 aa, Artificial Sequence; identical to SEQ ID NO: 29500
  derived and/or modified protein sequence (wt) from neuraminidase__InfluenzaB__AGX20628

SEQ ID NO: 29519 - protein, 466 aa, Artificial Sequence; identical to SEQ ID NO: 28900
  derived and/or modified protein sequence (wt) from neuraminidase__InfluenzaB__AGX20639

SEQ ID NO: 29520 - protein, 466 aa, Artificial Sequence
  derived and/or modified protein sequence (wt) from neuraminidase__InfluenzaB__AGX20650
MLPSTIQTLTLFLTSGGVLLSLYVSALLSYLLYSDILLKFSPTEITAPTMSLDCANASNVQAVNRSATKGVTFLLPEPEWTYPRLSCPGSTFQKALLISPHRFGETKGNSAPLIIREPFIACGPNECKHFALTHYAAQPGGYYNGTRGDRNKLRHLISVKLGKIPTVENSIFHMAAWSGSACHDGKEWTYIGVDGPDNDALLKVKYGEAYTDTYHSYANKILRTQESTCNCIGGNCYLMITDGSASGVSECRFLKIREGRIIKEIFPTGRVKHTEECTCGFASNKTIECACRDNSYTAKRPFVKLNVETDTAEIRLMCTDTYLDTPRPDDGSITGPCESNGDKGSGGIKGGFVHQRMESKIGRWYSRTMSKTERMGMGLYVKYDGDPWADSDALAFSGVMVSMKEPGWYSFGFEIKDKKCDVPCIGIEMVHDGGKETWHSAATAIYCLMGSGQLLWDTVTGVDMAL

SEQ ID NO: 29521 - protein, 466 aa, Artificial Sequence
  derived and/or modified protein sequence (wt) from neuraminidase__InfluenzaB__AGX20661
MLPSTIQTLTLFLTSGGVLLSLYVSASLSYLLYSDILLKFSPTEITAPTMPLDCANASNVQAVNRSATKGVTLLLPEPEWTYPRLSCPGSTFQKALLISPHRFGETKGNSAPLIIREPFIACGPNECKHFALTHYAAQPGGYYNGTRGDRNKLRHLISVNLGKIPTVENSIFHMAAWSGSACHDGKEWTYIGVDGPDNNALLKVKYGEAYTDTYHSYANNILRTQESACNCIGGNCYLMITDGSASGVSECRFLKIREGRIIKEIFPTGRVKHTEECTCGFASNKTIECACRDNSYTAKRPFVKLNVETDTAEIRLMCTDTYLDTPRPNDGSITGPCESNGDKGSGGIKGGFVHQRMESKIGRWYSRTMSKTERMGMGLYVKYDGDPWTDSDALAFSGVMVSMKEPGWYSFGFEIKDKKCDVPCIGIEMVHDGGKETWHSAATAIYCLMGSGQLLWDTVTGVDMAL

SEQ ID NO: 29522 - protein, 466 aa, Artificial Sequence; identical to SEQ ID NO: 28956
  derived and/or modified protein sequence (wt) from neuraminidase__InfluenzaB__AGX20683

SEQ ID NO: 29523 - protein, 466 aa, Artificial Sequence; identical to SEQ ID NO: 29119
  derived and/or modified protein sequence (wt) from neuraminidase__InfluenzaB__AGX20694

SEQ ID NO: 29524 - protein, 466 aa, Artificial Sequence
  derived and/or modified protein sequence (wt) from neuraminidase__InfluenzaB__AGX20705
MLPSTIQTLTLFLTSGGVLLSLYVSASLSYLLYSGILLKFSPTEITAPTMPLDCANASDVQAVNRSATKGVTLLLPEPEWTYPRLSCPGSTFQKALLISPHRFGETKGNSAPLIIREPFIACGPNECKHFALTHYAAQPGGYYNGTRGDRNKLRHLISVKLGKIPTVENSIFHMAAWSGSACHDGKEWTYIGVDGPDNNALLKVKYGEAYTDTYHSYANKILRTQESACNCIGGNCYLMITDGSASGVSECRFLKIREGRIIKEIFPTGRVKHTEECTCGFASNKTIECACRDNSYTAKRPFVKLNVETDTAEIRLMCTDTYLDTPRPNDGSITGPCESNGDKGSGGIKGGFVHQRMESKIGRWYSRTMSKTERMGMGLYVKYDGDPWADSDALTFSGVMVSMKEPGWYSFGFEIKDKKCDVPCIGIEMVHDGGKETWHSAATAIYCLMGSGQLLWDTVTGVDMAL

SEQ ID NO: 29525 - protein, 466 aa, Artificial Sequence
  derived and/or modified protein sequence (wt) from neuraminidase__InfluenzaB__AGX20716
MLPSTIQTLTLFLTSGGVLLSLYVSASLSYLLYSDILLKFSPTEITAPTMPLDCANASNVQAVNRSATKGVTLLLPEPEWTYPRLSCPGSTFQKALLISPHRFGETKGNSAPLIIREPFIACGPNECKHFALTHYAAQPGGYYNGTRGDRNKLRHLISVKLGKIPTVENSIFHMAAWSGSACHDGKEWTYIGVDGPDNNALLKVKYGEAYTDTYHSYANKILRTQESACNCIGGNCYLMITDGSASGVSECRFLKIREGRIIKEIFPTGRVKHTEECTCGFASNKTIECACRDNSYTAKRPFVKLNVETDTAEIRLMCTDTYLDTPRPNDGSITGPCESDGDKGSGGIKGGFVHQRIESRIGRWYSRTMSKTERMGMGLYVKYDGDPWADSDALAFSGVMVSMKEPGWYSFGFEIKDKKCDVPCIGIEMVHDGGKETWHSAATAIYCLMGSGQLLWDTVTGVDMAL

SEQ ID NO: 29526 - protein, 466 aa, Artificial Sequence
  derived and/or modified protein sequence (wt) from neuraminidase__InfluenzaB__AGX20727
MLPSTIQTLTLFLTSGGVLLSLYVSALLSYLLYSDILLKFSPTEITAPTMSLDCANASNVQAVNRSATKGVTFLLPEPEWTYPRLSCPGSTFQKALLISPHRFGETKGNSAPLIIREPFIACGPNECKHFALTHYAAQPGGYYNGTRGDRNKLRHLISVKLGKIPTVENSIFHMAAWSGSACHDGKEWTYIGVDGPDNDALLKVKYGEAYTDTYHSYANKILRTQESACNCIGGNCYLMITDGSASGVSECRFLKIREGRIIKEIFPTGRVKHTEECTCGFASNKTIECACRDNSYTAKRPFVKLNVETDTAEIRLMCTDTYLDTPRPDDGSTTGPCESNGDKGSGGIKGGFVHQRMESKIGRWYSRTMSKTERMGMGLYVKYDGDPWADSDALAFSGVMVSMKEPGWYSFGFEIKDKKCDVPCIGIEMVHDGGKETWHSAATAIYCLMGSGQLLWDTVTGVDMAL

SEQ ID NO: 29527 - protein, 466 aa, Artificial Sequence; identical to SEQ ID NO: 29119
  derived and/or modified protein sequence (wt) from neuraminidase__InfluenzaB__AGX20738

SEQ ID NO: 29528 - protein, 466 aa, Artificial Sequence; identical to SEQ ID NO: 28895
  derived and/or modified protein sequence (wt) from neuraminidase__InfluenzaB__AGX20749

SEQ ID NO: 29529 - protein, 466 aa, Artificial Sequence
  derived and/or modified protein sequence (wt) from neuraminidase__InfluenzaB__AGX20760
MLPSTIQTLTLFLTSGGVLLSLYVSASLSYLLYSDILLKFSPTEITAPTMPLDCANASNVQAVNRSATKGVTLLLPEPEWTYPRLSCPGSTFQKALLISPHRFGETKGNSAPLIIREPFIACGPNECKHFALTHYAAQPGGYYNGTRGDRNKLRHLISVKLGKIPTVENSIFHMAAWSGSACHDGKEWTYIGVDGPDNNALLKVKYGEAYTDTYHSYANKILRTQESACNCIGGNCYLMITDGSASGVSECRFLKIREGRIIKEIFPTGRVKHTEECTCGFASNKTIECACRDNSYTAKRPFVKLNVETDTAEIRLMCTDTYLDTPRPNDGSITGPCESDGDKGSGGIKGGFVHQRMESRIGRWYSRTMSKTERMGMGLYVKYDGDPWADSDALAFSGVMVSMKEPGWYSFGFEIKDKKCDVPCIGIEMVHDGGKETWHSAATAIYCLMGSGQLLWDTVTGVDMAL

SEQ ID NO: 29530 - protein, 466 aa, Artificial Sequence; identical to SEQ ID NO: 28895
  derived and/or modified protein sequence (wt) from neuraminidase__InfluenzaB__AGX20771

SEQ ID NO: 29531 - protein, 466 aa, Artificial Sequence
  derived and/or modified protein sequence (wt) from neuraminidase__InfluenzaB__AGX20782
MLPSTIQTLTLFLTSGGVLLSLYVSASLSYLLYSDILLKFSPTEITAPTMPLDCANASNVQAVNHSATKGVTLLLPEPEWTYPRLSCPGSTFQKALLISSHRFGETKGNSAPLIIREPFVACGPNECKHFALTHYAAQPGGYYNGTRGDRNKLRHLISVKLGKIPTVENSIFHMAAWSGSACHDGKEWTYIGVDGPDNNALLKVKYGEAYTDTYHSYANKILRTQESACNCIGGNCYLMITDGSASGVSECRFLKIREGRIIKEIFPTGRVKHTEECTCGFASNKTIECACRDNSYTAKRPFVKLNVETDTAEIRLMCTDTYLDTPRPNDGSITGPCESDGDKGSGGIKGGFVHQRMESKIGRWYSRTMSRTERMGMGLYVKYDGDPWADSDALAFSGVMVSMKEPGWYSFGFEIKDKKCDVPCIGIEMVHDGGKETWHSAATAIYCLMGSGQLLWDTVTGVDMAL

SEQ ID NO: 29532 - protein, 466 aa, Artificial Sequence
  derived and/or modified protein sequence (wt) from neuraminidase__InfluenzaB__AGX20793
MLPSTIQTLTLFLTSGGVLLSLYVSALLSYLLYSDILLKFSPTEITAPTMSLDCANTSNVQAVNRSATKGVTFLLPEPEWTYPRLSCPGSTFQKALLISPHRFGETKGNSAPLIIREPFIACGPNECKHFALTHYAAQPGGYYNGTRGDRNKLRHLISVKLGKIPTVENSIFHMAAWSGSACHDGKEWTYIGVDGPDNDALLKVKYGEAYTDTYHSYANKILRTQESACNCIGGNCYLMITDGSASGVSECRFLKIREGRIIKEIFPTGRVKHTEECTCGFASNKTIECACRDNSYTAKRPFVKLNVETDTAEIRLMCTDTYLDTPRPDDGSITGPCESNGDKGSGGIKGGFVHQRMESKIGRWYSRTMSKTERMGMGLYVKYDGDPWADSDALAFSGVMVSMKEPGWYSFGFEIKDKKCDVPCIGIEMVHDGGKETWHSAATAIYCLMGSGQLLWDTVTGVNMAL

SEQ ID NO: 29533 - protein, 466 aa, Artificial Sequence
  derived and/or modified protein sequence (wt) from neuraminidase__InfluenzaB__AGX20804
MLPSTIQTLTLFITSGGVLLSLYVSALLSYLLYSDILLKFSPTEITAPTMSLDCANASNVQAVNRSATKGVTFLLPEPEWTYPRLSCPGSTFQKALLISPHRFGETKGNSAPLIIREPFIACGPNECKHFALTHYAAQPGGYYNGTRGDRNKLRHLISVKLGKIPTVENSIFHMAAWSGSACHDGKEWTYIGVDGPDNDALLKVKYGEAYTDTYHSYANKILRTQESACNCIGGNCYLMITDGSASGVSECRFLKIREGRIIKEIFPTGRVKHTEECTCGFASNKTIECACRDNSYTAKRPFVKLNVETDTAEIRLMCTDTYLDTPRPDDGSITGPCESNGDKGSGGIKGGFVHQRMESKIGRWYSRTMSKTERMGMGLYVKYDGDPWADSDALAFSGVMVSMKEPGWYSFGFEIKDKKCDVPCIGIEMVHDGGKETWHSAATAIYCLMGSGQLLWDTVTGVDMAL

SEQ ID NO: 29534 - protein, 466 aa, Artificial Sequence; identical to SEQ ID NO: 28956
  derived and/or modified protein sequence (wt) from neuraminidase__InfluenzaB__AGX20815

SEQ ID NO: 29535 - protein, 466 aa, Artificial Sequence; identical to SEQ ID NO: 28956
  derived and/or modified protein sequence (wt) from neuraminidase__InfluenzaB__AGX20826

SEQ ID NO: 29536 - protein, 466 aa, Artificial Sequence; identical to SEQ ID NO: 28956
  derived and/or modified protein sequence (wt) from neuraminidase__InfluenzaB__AGX20837

SEQ ID NO: 29537 - protein, 466 aa, Artificial Sequence; identical to SEQ ID NO: 28956
  derived and/or modified protein sequence (wt) from neuraminidase__InfluenzaB__AGX20848

SEQ ID NO: 29538 - protein, 466 aa, Artificial Sequence
  derived and/or modified protein sequence (wt) from neuraminidase__InfluenzaB__AGX20870
MLPSTIQMLTLFLTSGGVLLSLYVSASLSYLLYSDILLKFSPTEITAPTMPLDCANASNVHAVNRSATKGVTFLLPEPEWTYPRLSCPGSTFQKALLISPHRFGETKGNSAPLIIREPFIACGPNECKHFALTHYAAQPGGYYNGTRGDRNKLRHLISVKLGKIPTVENSIFHMAAWSGSACHDGKEWTYIGVDGPDNNALLKIKYGEAYTDTYHSYANNILRTQESACNCIGGNCYLMITDGSASGVSECRFLKIREGRIIKEIFPTGRVKHTEECTCGFASNKTIECACRDNSYTAKRPFVKLNVETDTAEIRLMCTDTYLDTPRPDDGSITGPCESNGDKGSGGIKGGFVHQRMASKIGRWYSRTMSKTERKGMGLYVKYDGEPWTDSDALAFRGVMVSMKEPGWYSFGFEIKDKKCDVPCIGIEMVHDGGKETWHSAATAIYCLMGSGQLLWDTVTGVDMAL

SEQ ID NO: 29539 - protein, 466 aa, Artificial Sequence
  derived and/or modified protein sequence (wt) from neuraminidase__InfluenzaB__AGX20881
MLPSTIQMLTLFLTSGGVLLSLYVSASLSYLLYSDILLKFSPTEITAPTMPLDCANASNVHAVNRSATKGVTFLLPEPEWTYPRLSCPGSTFQKALLISPHRFGETKGNSAPLIIREPFIACGPNECKHFALTHYAAQPGGYYNGTRGNRNKLRHLISVKLGKIPTVENSIFHMAAWSGSACHDGKEWTYIGVDGPDNNALLKIKYGEAYTDTYHSYANNILRTQESACNCIGGNCYLMITDGSASGVSECRFLKIREGRIIKEIFPTGRVKHTEECTCGFASNKTIECACRDNSYTAKRPFVKLNVETDTAEIRLMCTDTYLDTPRPDDGSITGPCESNGDKGSGGIKGGFVHQRMASKIGRWYSRTMSKTERKGMGLYVKYDGDPWTDSDALAFRGVMVSMKEPGWYSFGFEIKDKKCDVPCIGIEMVHDGGKETWHSAATAIYCLMGSGQLLWDTVTGVDMAL

SEQ ID NO: 29540 - protein, 466 aa, Artificial Sequence
  derived and/or modified protein sequence (wt) from neuraminidase__InfluenzaB__AGX20892
MLPSTIQTLTLFLTSGGVLLSLYVSALLSYLLYSDILLKFSPTEITAPTMSLDCANASNVQAVNRSATKGVTFLLPEPEWTYPRLSCPGSTFQRALLISPHRFGEAKGNSAPLIIREPFIACGPNECKHFALTHYAAQPGGYYNGTRGDRNKLRHLISVKLGKIPTVENSIFHMAAWSGSACHDGKEWTYIGVDGPDNDALLKVKYGEAYTDTYHSYANKILRTQESACNCIGGNCYLMITDGSASGVSECRFLKIREGRIIKEILPTGRVKHTEECTCGFASNKTIECACRDNSYTAKRPFVKLNVETDTAEIRLMCTDTYLDTPRPDDGSITGPCESNGDKGSGGIKGGFVHQRMESKIGRWYSRTMSKTERMGMGLYVKYDGDPWADSDALAFSGVMVSMKEPGWYSFGFEIKDKKCDVPCIGIEMVHDGGKETWHSAATAIYCLMGSGQLLWDTVTGVDMAL

SEQ ID NO: 29541 - protein, 466 aa, Artificial Sequence; identical to SEQ ID NO: 28956
  derived and/or modified protein sequence (wt) from neuraminidase__InfluenzaB__AGX20903

SEQ ID NO: 29542 - protein, 466 aa, Artificial Sequence; identical to SEQ ID NO: 28956
  derived and/or modified protein sequence (wt) from neuraminidase__InfluenzaB__AGX20914

SEQ ID NO: 29543 - protein, 466 aa, Artificial Sequence
  derived and/or modified protein sequence (wt) from neuraminidase__InfluenzaB__AGX20925
MLPSTIQTLTLFLTSGGVLLSLYVSALLSYLLYSDILLKFSPTEITAPTMSLDCANASNVQAVNRSATKGVTFLLPEPEWTYPRLSCPGSTFQKALLISPHRFGETKGNSAPLIIREPFIACGPNECKHFALTHYAAQPGGYYNGTRGDRNKLRHLISVKLGKIPTVENSIFHMAAWSGSACHDGKEWTYIGVDGPDNDALLKVKYGEAYTDTYHSYANKILRTQESACNCIGGNCYLMITDGSASGVSECRFLKIQEGRIIKEIFPTGRVKHTEECTCGFASNKTIECACRDNSYTAKRPFVKLNVETDTAEIRLMCTDTYLDTPRPDDGSITGPCESNGDKGSGGIKGGFVHQRMESKIGRWYSRTMSKTERMGMGLYVKYDGDPWADSDALAFSGVMVSMKEPGWYSFGFEIKDKKCDVPCIGIEMVHDGGKETWHSAATAIYCLMGSGQLLWDTVTGVDMAL

SEQ ID NO: 29544 - protein, 466 aa, Artificial Sequence
  derived and/or modified protein sequence (wt) from neuraminidase__InfluenzaB__AGX20936
MLPSTIQTLTLFLTSGGVLLSLYVSALLSYLLYSDILPKFSPTEITAPTMSLDCANASNVQAVNRSATKGVTFLLPEPEWTYPRLSCPGSTFQKALLISPHRFGETKGNSAPLIIREPFIACGPNECKHFALTHYAAQPGGYYNGTRGDRNKLRHLISVKLGKIPTVENSIFHMAAWSGSACHDGKEWTYIGVDGPDNDALLKVKYGEAYTDTYHSYANKILRTQESACNCIGGNCYLMITDGSASGVSECRFLKIREGRIIKEIFPTGRVKHTEECTCGFASNKTIECACRDNSYTAKRPFVKLNVETDTAEIRLMCTDTYLDTPRPDDGSITGPCESNGDKGSGGIKGGFVHQRMESKIGRWYSRTMSKTERMGMGLYVKYDGDPWADSDALVFSGVMVSMKEPGWYSFGFEIKDKKCDVPCIGIEMVHDGGKETWHSAATAIYCLMGSGQLLWDTVTGVDMAL

SEQ ID NO: 29545 - protein, 466 aa, Artificial Sequence; identical to SEQ ID NO: 28895
  derived and/or modified protein sequence (wt) from neuraminidase__InfluenzaB__AGX20947

SEQ ID NO: 29546 - protein, 466 aa, Artificial Sequence
  derived and/or modified protein sequence (wt) from neuraminidase__InfluenzaB__AGX20958
MLPSTIQTLTLFLTSGGVLLSLYVSALLSYLLYSDILLKFSPTEITTPTMSLDCTNASNVQAVNRSATKGVTFLLPEPEWTYPRLSCPGSTFQKALLISPHRFGETKGNSAPLIIREPFIACGPNECKHFALTHYAAQPGGYYNGTRGDRNKLRHLISVKLGKIPTVENSIFHMAAWSGSACHDGKEWTYIGVDGPDNDALLKVKYGEAYTDTYHSYANKILRTQESACNCIGGNCYLMITDGSASGVSECRFLKIQEGRIIKEIFPTGRVKHTEECTCGFASNKTIECACRDNSYTAKRPFVKLNVETDTAEIRLMCTDTYLDTPRPDDGSITGPCESNGDKGSGGIKGGFVHQRMESKIGRWYSRTMSKTERMGMGLYVKYDGDPWADSDALAFSGVMVSMKEPGWYSFGFEIKDKKCDVPCIGIEMVHDGGKETWHSAATAIYCLMGSGQLLWDTVTGVDMAL

SEQ ID NO: 29547 - protein, 466 aa, Artificial Sequence; identical to SEQ ID NO: 29119
  derived and/or modified protein sequence (wt) from neuraminidase__InfluenzaB__AGX20969

SEQ ID NO: 29548 - protein, 466 aa, Artificial Sequence; identical to SEQ ID NO: 29532
  derived and/or modified protein sequence (wt) from neuraminidase__InfluenzaB__AGX20980

SEQ ID NO: 29549 - protein, 466 aa, Artificial Sequence
  derived and/or modified protein sequence (wt) from neuraminidase__InfluenzaB__AGX20991
MLPSTIQTLTLFLTSGGVLLSLYVSALLSYLLYSDILPKFSPTEITAPTMSLDCANASNVQAVNRSATKGVTFLLPEPEWTYPRLSCPGSTFQKALLISPHRFGETKGNSAPLIIREPFIACGPNECKHFALTHYAAQPGGYYNGTRGDRNKLRHLISVKLGKIPTVENSIFHMAAWSGSACHDGKEWTYIGVDGPDNDALLKVKYGEAYTDTYHSYANKILRTQESACNCIGGNCYLMITDGSASGVSECRFLKIRKGRIIKEIFPTGRVKHTEECTCGFASNKTIECACRDNSYTAKRPFVKLNVETDTAEIRLMCTDTYLDTPRPDDGSITGPCESNGDKGSGGIKGGFVHQRMESKIGRWYSRTMSKTERMGMGLYVKYDGDPWADSDALVFSGVMVSMKEPGWYSFGFEIKDKKCDVPCIGIEMVHDGGKETWHSAATAIYCLMGSGQLLWDTVTGVDMAL

SEQ ID NO: 29550 - protein, 466 aa, Artificial Sequence; identical to SEQ ID NO: 28956
  derived and/or modified protein sequence (wt) from neuraminidase__InfluenzaB__AGX21002

SEQ ID NO: 29551 - protein, 466 aa, Artificial Sequence
  derived and/or modified protein sequence (wt) from neuraminidase__InfluenzaB__AGX21013
MLPSTIQTLTLFLTSGGVLLSLYVSALLSYLLYSDILLKFSPTEITAPTMSLDCANASNVQAVNRSATKGVTFLLPEPEWTYPRLSCPGSTFQKALLISPHRFGETKGNSAPLIIREPFIACGPNECKHFALTHYAAQPGGYYNGTRGDRNKLRHLISVKLGKIPTVENSIFHMAAWSGSACHDGKEWTYIGVDGPDNDALLKVKYGEAYTDTYHSYANKILRTQESACNCIGGNCYLMITDGSASGVSECRFLKIREGRIIKEIFPTGRVKHTEECTCGFASNKTIECACRDNSYTAKRPFVKLNVETDTAEIRLMCTNTYLDTPRPDDGSITGPCESNGDKGSGGIKGGFVHQRMESKIGRWYSRTMSKTERMGMGLYVKYDGDPWADSDALAFSGVMVSMKEPGWYSFGFEIKDKKCDVPCIGIEMVHDGGKETWHSAATAIYCLMGSGQLLWDTVTGVDMAL

SEQ ID NO: 29552 - protein, 466 aa, Artificial Sequence
  derived and/or modified protein sequence (wt) from neuraminidase__InfluenzaB__AGX21024
MLPSTIQTLTLFLTSGGVLLSLYVSASLSYLLYSDILLKFSPTEITAPTMPLDCANASNVQAVNRSATKGVTLLLPEPEWTYPRLSCPGSTFQKALLISPNRFGETKGNSAPLIIREPFIACGPNECKHFALTHYAAQPGGYYNGTRGDRNKLRHLISVKLGKIPTVENSIFHMAAWSGSACHDGKEWTYIGVDGPDNNALLKVKYGEAYTDTYHSYANKILRTQESACNCIGGNCYLMITDGSASGVSECRFLKIREGRIIKEIFPTGRVKHTEECTCGFASNKTIECACRDNSYTAKRPFVKLNVETDTAEVRLMCTDTYLDTPRPNDGSITGPCESDGDKGSGGIKGGFVHQRMESKIGRWYSRTMSKTERMGMGLYVKYDGDPWADSDALTFSGVMVSMKEPGWYSFGFEIKDKKCDVPCIGIEMVHDGGKETWHSAATAIYCLMGSGQLLWDTVTGVDMAL

SEQ ID NO: 29553 - protein, 466 aa, Artificial Sequence; identical to SEQ ID NO: 28956
  derived and/or modified protein sequence (wt) from neuraminidase__InfluenzaB__AGX21035

SEQ ID NO: 29554 - protein, 466 aa, Artificial Sequence; identical to SEQ ID NO: 29119
  derived and/or modified protein sequence (wt) from neuraminidase__InfluenzaB__AGX21046

SEQ ID NO: 29555 - protein, 466 aa, Artificial Sequence; identical to SEQ ID NO: 29122
  derived and/or modified protein sequence (wt) from neuraminidase__InfluenzaB__AGX21057

SEQ ID NO: 29556 - protein, 466 aa, Artificial Sequence; identical to SEQ ID NO: 29540
  derived and/or modified protein sequence (wt) from neuraminidase__InfluenzaB__AGX21068

SEQ ID NO: 29557 - protein, 466 aa, Artificial Sequence
  derived and/or modified protein sequence (wt) from neuraminidase__InfluenzaB__AGX21079
MLPSTIQTLTLFLTSGGVLLSLYVSASLSYLLYSDILLKFSPTEITAPAMPLDCANASNVQAVNRSATKGVTLLLPEPEWTYPRLSCPGSTFQKALLISPHRFGETKGNSAPLIIREPFIACGPNECKHFALTHYAAQPGGYYNGTRGDRNKLRHLISVKLGKIPTVENSIFHMAAWSGSACHDGKEWTYIGVDGPDNNALLKVKYGEAYTDTYHSYASKILRTQESACNCIGGNCYLMITDGSASGVSECRFLKIREGRIIKEIFPTGRVKHTEECTCGFASNKTIECACRDNSYTAKRPFVKLNVETDTAEIRLMCTDTYLDTPRPNDGSITGPCESDGDKGSGGIKGGFVHQRMESKIGRWYSRTMSKTERMGMGLYVKYDGDPWADSDALAFSGVMVSMKEPGWYSFGFEIKDKKCDVPCIGIEMVHDGGKETWHSAATAIYCLMGSGQLLWDTVTGVDMAL

SEQ ID NO: 29558 - protein, 466 aa, Artificial Sequence; identical to SEQ ID NO: 29122
  derived and/or modified protein sequence (wt) from neuraminidase__InfluenzaB__AGX21088

SEQ ID NO: 29559 - protein, 466 aa, Artificial Sequence; identical to SEQ ID NO: 29122
  derived and/or modified protein sequence (wt) from neuraminidase__InfluenzaB__AGX21099

SEQ ID NO: 29560 - protein, 466 aa, Artificial Sequence
  derived and/or modified protein sequence (wt) from neuraminidase__InfluenzaB__AGX21110
MLPSTIQTLTLFLTSGGVLLSLYVSALLSYLLYSDILLKFSPTEITAPTMSLDCANASNVQAVNRFATKGVTFLLPEPEWTYPRLSCPGSTFQKALLISPHRFGETKGNSAPLIIREPFIACGPNECKHFALTHYAAQPGGYYNGTRGDRNKLRHLISVKLGKIPTVENSIFHMAAWSGSACHDGKEWTYIGVDGPDNDALLKVKYGEAYTDTYHSYANKILRTQESACNCIGGNCYLMITDGSASGVSECRFLKIREGRIIKEIFPTGRVKHTEECTCGFASNKTIECACRDNSYTAKRPFVKLNVETDTAEIRLMCTDTYLDTPRPDDGSITGPCESNGDKGSGGIKGGFVHQRMESKIGRWYSRTMSKTERMGMGLYVKYDGDPWADSDALAFSGVMVSMKEPGWYSFGFEIKDKKCDVPCIGIEMVHDGGKETWHSAATAIYCLMGSGQLLWDTVTGVDMAL

SEQ ID NO: 29561 - protein, 466 aa, Artificial Sequence
  derived and/or modified protein sequence (wt) from neuraminidase__InfluenzaB__AGX21121
MLPSTIQTLTLFLTSGGVLLSLYVSALLSYLLYSDILLKFSPTEITAPTMSLDCANASNVQAVNRSATKGVTFLLPEPEWTYPRLSCPGSTFQKALLISPHRFGETKGNSAPLIIREPFIACGPNECKHFALTHYAAQPGGYYNGTRGDRNKLRHLISVKLGKIPTVENSIFHMAAWSGSACHDGKEWTYIGVDGPDNDALLKVKYGEAYTDTYHSYANKILRTQESACNCIGGNCYLMITDGSASGVSECRFLKIREGRITKEIFPTGRVKHTEECTCGFASNKTIECACRDNSYTAKRPFVKLNVETDTAEIRLMCTDTYLDTPRPDDGSITGPCESNGDKGSGGIKGGFVHQRMESKIGRWYSRTMSKTERMGMGLYVKYDGDPWADSDALAFSGVMVSMKEPGWYSFGFEIKDKKCDVPCIGIEMVHDGGKETWHSAATAIYCLMGSGQLLWDTVTGVDMAL

SEQ ID NO: 29562 - protein, 466 aa, Artificial Sequence; identical to SEQ ID NO: 29119
  derived and/or modified protein sequence (wt) from neuraminidase__InfluenzaB__AGX21132

SEQ ID NO: 29563 - protein, 466 aa, Artificial Sequence; identical to SEQ ID NO: 28895
  derived and/or modified protein sequence (wt) from neuraminidase__InfluenzaB__AGX21143

SEQ ID NO: 29564 - protein, 466 aa, Artificial Sequence; identical to SEQ ID NO: 28956
  derived and/or modified protein sequence (wt) from neuraminidase__InfluenzaB__AGX21154

SEQ ID NO: 29565 - protein, 466 aa, Artificial Sequence
  derived and/or modified protein sequence (wt) from neuraminidase__InfluenzaB__AGX21165
MLPSTIQTLTLFLTSGGVLLSLYVSALLSYLLYSDILLKFSPTEITAPTMSLDCANASNVQAVNRSATKGVTFLLPEPEWTYPRLSCPGSTFQKALLISPHRFGETKGNSAPLIIREPFIACGPNECKHFALTHYAAQPGGYYNGTRGDRNKLRHLISVKLGKIPTVENSIFHMAAWSGSACHDGKEWTYIGVDGPDNDALLKVKYGEAYTDTYHSYANKILRTQESACNCIGGNCYLMITDGSASGVSECRFLKIREGRIIKEIFPTGRVKHTEECTCGFASNKTIECACRDNSYTAKRPFVKLNMETDTAEIRLMCTDTYLDTPRPDDGSITGPCESNGDKGSGGIKGGFVHQRMESKIGRWYSRTMSKTERMGMGLYVKYDGDPWADSDALAFSGVMVSMKEPGWYSFGFEIKDKKCDVPCIGIEMVHDGGKETWHSAATAIYCLMGSGQLLWDTVTGVDMAL

SEQ ID NO: 29566 - protein, 466 aa, Artificial Sequence; identical to SEQ ID NO: 28956
  derived and/or modified protein sequence (wt) from neuraminidase__InfluenzaB__AGX21176

SEQ ID NO: 29567 - protein, 466 aa, Artificial Sequence
  derived and/or modified protein sequence (wt) from neuraminidase__InfluenzaB__AGX21187
MLPSTIQTLTLFLTSGGVLLSLYVSASLSYLLYSDILLKFSPTEITAPTMPLDCANASNVQAVNRSATKGVTLLLPEPEWTYPRLSCPGSTFQKALLISPHRFGETKGNSAPLIIREPFIACGPNECKHFALTHYAAQPGGYYNGTRGDRNKLRHLISVKLGKIPTVENSIFHMAAWSGSACHDGKEWTYIGVDGPDNNALLKVKYGEAYTDTYHSYANKILRTQESACNCIGGNCYLMITDGSASGVSECRFLKIREGRIIKEIFPTGRVKHTEECTCGFASNKTIECVCRDNSYTAKRPFVKLNVETDTAEVRLMCTDTYLDTPRPNDGSITGPCESDGDKGSGGIKGGFVHQRMESKIGRWYSRTMSKTERMGMGLYVKYDGDPWADSDALTFSGVMVSMKEPGWYSFGFEIKDKKCDVPCIGIEMVHDGGKETWHSAATAIYCLMGSGQLLWDTVTGVDMAL

SEQ ID NO: 29568 - protein, 466 aa, Artificial Sequence
  derived and/or modified protein sequence (wt) from neuraminidase__InfluenzaB__AGX21198
MLPSTIQMLTLFLTSGGVLLSLYVSASLSYLLYSDILLKFSPTEITAPTMPLDCANASNVHAVNRSATKGVTFLLPEPEWTYPRLSCPGSTFQKALLISPHRFGETKGNSAPLIIREPFIACEPNECKHFALTHYAAQPGGYYNGTRGDRNKLRHLISVKLGKIPTVENSIFHMAAWSGSACHDGKEWTYIGVDGPDNNALLKIKYGEAYTDTYHSYANNILRTQESACNCIGGNCYLMITDGSASGVSECRFLKIREGRIIKEIFPTGRVKHTEECTCGFASNKTIECACRDNSYTAKRPFVKLNVETDTAEIRLMCTDTYLDTPRPDDGSITGPCESNGDKGSGGIKGGFVHQRMASKIGRWYSRTMSKTERKGMGLYVKYDGDPWTDSDALAFRGVMVSMKEPGWYSFGFEIKDKKCDVPCIGIEMVHDGGKETWHSAATAIYCLMGSGQLLWDTVTGVDMAL

SEQ ID NO: 29569 - protein, 466 aa, Artificial Sequence; identical to SEQ ID NO: 28956
  derived and/or modified protein sequence (wt) from neuraminidase__InfluenzaB__AGX21209

SEQ ID NO: 29570 - protein, 466 aa, Artificial Sequence; identical to SEQ ID NO: 29119
  derived and/or modified protein sequence (wt) from neuraminidase__InfluenzaB__AGX21220

SEQ ID NO: 29571 - protein, 466 aa, Artificial Sequence
  derived and/or modified protein sequence (wt) from neuraminidase__InfluenzaB__AGX21231
MLPSTIQTLTLFLTSGGVLLSLYVSALLSYLLYSDILLKFSPTEITAPTMSLDCANASNVQAVNRSATKGVTFLLPESEWTYPRLSCPGSTFQKALLISPHRFGETKGNSAPLIIREPFIACGPNECKHFALTHYAAQPGGYYNGTRGDRNKLRHLISVKLGKIPTVENSIFHMAAWSGSACHDGKEWTYIGVDGPDNDALLKVKYGEAYTDTYHSYANKILRTQESACNCIGGNCYLMITDGSASGVSECRFLKIREGRIIKEIFPTGRVKHTEECTCGFASNKTIECACRDNSYTAKRPFVKLNVETDTAEIRLMCTDTYLDTPRPDDGSITGPCESNGDKGSGGIKGGFVHQRMESKIGRWYSRTMSKTERMGMGLYVKYDGDPWADSDALAFSGVMVSMKEPGWYSFGFEIKDKKCDVPCIGIEMVHDGGKETWHSAATAIYCLMGSGQLLWDTVTGVDMAL

SEQ ID NO: 29572 - protein, 466 aa, Artificial Sequence; identical to SEQ ID NO: 29122
  derived and/or modified protein sequence (wt) from neuraminidase__InfluenzaB__AGX21242

SEQ ID NO: 29573 - protein, 466 aa, Artificial Sequence; identical to SEQ ID NO: 28956
  derived and/or modified protein sequence (wt) from neuraminidase__InfluenzaB__AGX21253

SEQ ID NO: 29574 - protein, 466 aa, Artificial Sequence
  derived and/or modified protein sequence (wt) from neuraminidase__InfluenzaB__AGX21264
MLPSTIQTLTLFLTSGGVLLSLYVSASLSYLLYSDILLKFSTTEITAPTMPLDCANASNVQAVNRSATKGVTLLLPEPEWTYPRLSCPGSTFQKALLISPHRFGENKGNSAPLIIREPFIACGPNECKHFALTHYAAQPGGYYNGTRGDRNKLRHLISVKLGKIPTVENSIFHMAAWSGSACHDGKEWTYIGVDGPDNNALLKVKYGEAYTDTYHSYANKILRTQESACNCIGGNCYLMITDGSASGVSECRFLKIREGRIIKEIFPTGRVKHTEECTCGFASNKTIECACRDNSYTAKRPFVKLNVETDTAEIRLMCTDTYLDTPRPNDGSITGPCESDGDKGSGGIKGGFVHQRMESKIGRWYSRTMSKTERMGMGLYVKYDGDPWADSDALAFSGVMVSMKEPSWYSFGFEIKDKKCDVPCIGIEMVHDGGKETWHSAATAIYCLMGSGQLLWDTVTGVDMAL

SEQ ID NO: 29575 - protein, 466 aa, Artificial Sequence; identical to SEQ ID NO: 28895
  derived and/or modified protein sequence (wt) from neuraminidase__InfluenzaB__AGX21275

SEQ ID NO: 29576 - protein, 466 aa, Artificial Sequence; identical to SEQ ID NO: 28956
  derived and/or modified protein sequence (wt) from neuraminidase__InfluenzaB__AGX21286

SEQ ID NO: 29577 - protein, 466 aa, Artificial Sequence
  derived and/or modified protein sequence (wt) from neuraminidase__InfluenzaB__AGX21297
MLPSTIQTLTLFLTSGGVLLSLYVSASLSYLLYSDILLKFSPTEITAPTMPLDCANASNVQAVNRSATKGVTLLLPEPDWTYPRLSCPGSTFQKALLISPHRFGETKGNSAPLIIREPFIACGPNECKHFALTHYAAQPGGYYNGTRGDRNKLRHLISVKLGKIPTVENSIFHMAAWSGSACHDGKEWTYIGVDGPDNNALLKVKYGEAYTDTYHSYANKILRTQESACNCIGGNCYLMITDGSASGVSECRFLKIREGRIIKEIFPTGRVKHTEECTCGFASNKTIECACRDNSYTAKRPFVKLNVETDTAEVRLMCTDTYLDTPRPNDGSITGPCESDGDKGSGGIKGGFVHQRMESKIGRWYSRTMSKTERMGMGLYVKYDGDPWADSDALTFSGVMVSMKEPGWYSFGFEIKDKKCDVPCIGIEMVHDGGKETWHSAATAIYCLMGSGQLLWDTVTGVDMAL

SEQ ID NO: 29578 - protein, 466 aa, Artificial Sequence
  derived and/or modified protein sequence (wt) from neuraminidase__InfluenzaB__AGX21308
MLPSTIQMLTLFLTSGGVLLSLYVSASLSYLLYSDILLKFSPTEITAPTMPLDCANASNVHAVNRSATKGVTFLLPEPEWTYPRLSCPGSTFQKALLISPHRFGETKGNSAPLIIREPFIACGPNECKHFALTHYAAQPGGYYNGTRGDRNKLRHLISVKLGKIPTVENSIFHMAAWSGSACHDGKEWTYIGVDGPDNNALLKIKYGEAYTDTYHSYANNILRTQESACNCIGGNCYLMITDGSASGVSECRFLKIREGRIIKEIFPTGRVKHTEECTCGFASNKTIECACRDNSYTAKRPFVKLNVETDTAEIRLMCTDTYLDTPRPDDGSITGPCESNGDKGSGGIKGGFVHQRMASKIGRWYSRTMSKTERKGMGLYVKYDGDPWTDSDALALRGVMVSMKEPGWYSFGFEIKDKKCDVPCIGIEMVHDGGKETWHSAATAIYCLMGSGQLLWDTVTGVDMAL

SEQ ID NO: 29579 - protein, 466 aa, Artificial Sequence; identical to SEQ ID NO: 28900
  derived and/or modified protein sequence (wt) from neuraminidase__InfluenzaB__AGX21319

SEQ ID NO: 29580 - protein, 466 aa, Artificial Sequence; identical to SEQ ID NO: 28895
  derived and/or modified protein sequence (wt) from neuraminidase__InfluenzaB__AGX21330

SEQ ID NO: 29581 - protein, 466 aa, Artificial Sequence; identical to SEQ ID NO: 28895
  derived and/or modified protein sequence (wt) from neuraminidase__InfluenzaB__AGX21341

SEQ ID NO: 29582 - protein, 466 aa, Artificial Sequence; identical to SEQ ID NO: 29122
  derived and/or modified protein sequence (wt) from neuraminidase__InfluenzaB__AGX21352

SEQ ID NO: 29583 - protein, 466 aa, Artificial Sequence
  derived and/or modified protein sequence (wt) from neuraminidase__InfluenzaB__AGX21363
MLPSTIQTLTLFLTSGGVLLSLYVSASLSYLLYSDILLKFSPTEITAPTMPLDCANASNVQAVNRSATKGVTLLLPEPEWTYPRLSCPGSTFQKALLISSHRFGETKGNSAPLIIREPFVACGPNECKHFALTHYAAQPGGYYNGTRGDRNKLRHLISVKLGKIPTVENSIFHMAAWSGSACHDGKEWTYIGVDGPDNNALLKVKYGEAYTDTYHSYANKILRTQESACNCIGGNCYLMITDGSASGVSECRFLKIREGRIIKEIFPTGRVKHTEECTCGFASNKTIECACRDNSYTAKRPFVKLNVETDTAEIRLMCTDTYLDTPRPNDGSITGPCESDGDKGSGGIKGGFVHQRMESKIGRWYSRTMSKTERMGMGLYVKYDGDPWADSDALAFSGVMVSMKEPGWYSFGFEIKDKKCDVPCIGIEMVHDGGKETWHSAATAIYCLMGSGQLLWDTVTGVDMAL

SEQ ID NO: 29584 - protein, 466 aa, Artificial Sequence; identical to SEQ ID NO: 28895
  derived and/or modified protein sequence (wt) from neuraminidase__InfluenzaB__AGX21374

SEQ ID NO: 29585 - protein, 466 aa, Artificial Sequence; identical to SEQ ID NO: 28956
  derived and/or modified protein sequence (wt) from neuraminidase__InfluenzaB__AGX21385

SEQ ID NO: 29586 - protein, 466 aa, Artificial Sequence; identical to SEQ ID NO: 28956
  derived and/or modified protein sequence (wt) from neuraminidase__InfluenzaB__AGX21396

SEQ ID NO: 29587 - protein, 466 aa, Artificial Sequence; identical to SEQ ID NO: 28895
  derived and/or modified protein sequence (wt) from neuraminidase__InfluenzaB__AGX21407

SEQ ID NO: 29588 - protein, 466 aa, Artificial Sequence; identical to SEQ ID NO: 28895
  derived and/or modified protein sequence (wt) from neuraminidase__InfluenzaB__AGX21418

SEQ ID NO: 29589 - protein, 466 aa, Artificial Sequence
  derived and/or modified protein sequence (wt) from neuraminidase__InfluenzaB__AGX21429
MLPSTIQTLTLFLTSGGVLLSLYVSALLSYLLHSDILLKFSPTEITAPTMSLDCANASNVQAVNRSVTKGVTFLLPEPEWTYPRLSCPGSTFQKALLISPHRFGETKGNSAPLIIREPFIACGPNECKHFALTHYAAQPGGYYNGTRGDRNKLRHLISVKLGKIPTVENSIFHMAAWSGSACHDGKEWTYIGVDGPDNDALLKVKYGEAYTDTYHSYANKILRTQESACNCIGGNCYLMITDGSASGVSECRFLKIREGRIIKEIFPTGRVKHTEECTCGFASNKTIECACRDNSYTAKRPFVKLNVETDTAEIRLMCTDTYLDTPRPDDGSITGPCESNGDKGSGGIKGGFVHQRMESKIGRWYSRTMSKTERMGMGLYVKYDGDPWADSDALAFSGVMVSMKEPGWYSFGFEIKDKKCDVPCIGIEMVHDGGKETWHSAATAIYCLMGSGQLLWDTVTGVDMAL

SEQ ID NO: 29590 - protein, 466 aa, Artificial Sequence; identical to SEQ ID NO: 28956
  derived and/or modified protein sequence (wt) from neuraminidase__InfluenzaB__AGX21440

SEQ ID NO: 29591 - protein, 466 aa, Artificial Sequence; identical to SEQ ID NO: 28956
  derived and/or modified protein sequence (wt) from neuraminidase__InfluenzaB__AGX21451

SEQ ID NO: 29592 - protein, 466 aa, Artificial Sequence; identical to SEQ ID NO: 29540
  derived and/or modified protein sequence (wt) from neuraminidase__InfluenzaB__AGX21462

SEQ ID NO: 29593 - protein, 466 aa, Artificial Sequence
  derived and/or modified protein sequence (wt) from neuraminidase__InfluenzaB__AGX21473
MLPSTIQTLTLFLTSGGVLLSLYVSALLSYLLYSDILLKFSPTEITAPTMSLDCANASNVQAVNRSATKGVTFLLPEPEWTYPRLSCPGSTFQRALLISPHRFGEAKGNSAPLIIREPFIACGPNECKHFALTHYAAQPGGYYNGTRGDRNKLRHLISVKLGKIPTVENSIFHMAAWSGSACHDGKEWTYIGVDGPDNDALLKVKYGEAYTDTYHSYANKILRTQESACNCIGGNCYLMITDGSASGVSECRFLKIREGRIIKEILPTGRVKHTEECTCGFASNKTIECACRDNSYTAKRPFVKLNVETDTAEIRLMCTDTYLDTPRPDDGSITGPCESNGDKGSGGIKGGFVHQRMESKIGRWYSRTMSKTERMGMGLYVKYDGDPWADSDALVFSGVMVSMKEPGWYSFGFEIKDKKCDVPCIGIEMVHDGGKETWHSAATAIYCLMGSGQLLWDTVTGVDMAL

SEQ ID NO: 29594 - protein, 466 aa, Artificial Sequence; identical to SEQ ID NO: 28900
  derived and/or modified protein sequence (wt) from neuraminidase__InfluenzaB__AGX21484

SEQ ID NO: 29595 - protein, 466 aa, Artificial Sequence; identical to SEQ ID NO: 28956
  derived and/or modified protein sequence (wt) from neuraminidase__InfluenzaB__AGX21495

SEQ ID NO: 29596 - protein, 466 aa, Artificial Sequence; identical to SEQ ID NO: 28956
  derived and/or modified protein sequence (wt) from neuraminidase__InfluenzaB__AGX21506

SEQ ID NO: 29597 - protein, 466 aa, Artificial Sequence
  derived and/or modified protein sequence (wt) from neuraminidase__InfluenzaB__AGX21517
MLPSTIQTLTLFLTSGGVLLSLYVSALLSYLLYSNILLKFSPTEITAPTMSLDCANASNVQAVNRSATKGVTFLLPEPEWTYPRLSCPGSTFQKALLISPHRFGETKGNSAPLIIREPFIACGPNECKHFALTHYAAQPGGYYNGTRGDRNKLRHLISVKLGKIPTVENSIFHMAAWSGSACHDGKEWTYIGVDGPDNDALLKVKYGEAYTDTYHSYANKILRTQESACNCIGGNCYLMITDGSASGVSECRFLKIREGRIIKEIFPTGRVKHTEECTCGFASNKTIECACRDNSYTAKRPFVKLNVETDTAEIRLMCTDTYLDTPRPDDGSITGPCESNGDKGSGGIKGGFVHQRMESKIGRWYSRTMSKTERMGMGLYVKYDGDPWADSDALAFSGVMVSMKEPGWYSFGFEIKDKKCDVPCIGIEMVHDGGKETWHSAATAIYCLMGSGQLLWDTVTGVDMAL

SEQ ID NO: 29598 - protein, 466 aa, Artificial Sequence
  derived and/or modified protein sequence (wt) from neuraminidase__InfluenzaB__AGX21528
MLPSTIQTLTLFLTSGGVLLSLYVSASLSYLLYSDILLKFSPTEITAPTMPLDCANASNVQAVNRSATKGVTLLLPEPEWTYPRLSCPGSTFQKALLISPHRFGETKGNSAPLIIREPFIACGPNECKHFALTHYAAQPGGYYNGTRGDRNKLRHLISVKLGKIPTVENSIFHMAAWSGSACHDGKEWTYIGVDGPDNNALLKVKYGEAYTDTYHSYANKILRTQESACNCIGGNCYLMITDGSASGVSECRFLKIREGRIIKEIFPTGRVKHTEECTCGFASNKTIECACRDNSYTAKRPFVKLNVETDTAEVRLMCTDTYLDTPRPNDGSITGPCESDGDKGSGGIKGGFVHQRMESKIGRWYSRTMSKTERMGMGLYVKYDGDPWADSDALTFSGVMVSMKEPGWYSFGFEIKDKKCDVPCIGIEMVHDSGKETWHSAATAIYCLMGSGQLLWDTVTGVDMAL

SEQ ID NO: 29599 - protein, 466 aa, Artificial Sequence; identical to SEQ ID NO: 28956
  derived and/or modified protein sequence (wt) from neuraminidase__InfluenzaB__AGX21539

SEQ ID NO: 29600 - protein, 466 aa, Artificial Sequence
  derived and/or modified protein sequence (wt) from neuraminidase__InfluenzaB__AGX21550
MLPSTIQTLTLFLTSGGVLLSLYVSASLSYLLYSDILLKFSPTEITAPTMPLDCANASNVQAVNRSATKGVTLLLPEPEWTYPRLSCPGSTFQKALLISPHRFGETKGNSAPLIIREPFIACGPNECKHFALTHYAAQPGGYYNGTRGDRNKLRHLISVKLGKIPTVENSIFHMAAWSGSACHDGKEWTYIGVDGPDNNALLKVKYGEAYTDTYHSYANKILRTQESACNCIGGNCYLMITDGSASGVSECRFLKIREGRIIKEIFPAGRVKHTEECTCGFASNKTIECACRDNSYTAKRPFVKLNVETDTAEVRLMCTDTYLDTPRPNDGSITGPCESDGDKGSGGIKGGFVHQRMESKIGRWYSRTMSKTERMGMGLYVKYDGDPWADSDALTFSGVMVSMKEPGWYSFGFEIKDKKCDVPCIGIEMVHDGGKETWHSAATAIYCLMGSGQLLWDTVTGVDMAL

SEQ ID NO: 29601 - protein, 466 aa, Artificial Sequence
  derived and/or modified protein sequence (wt) from neuraminidase__InfluenzaB__AGX21561
MLPSTIQTLTLFLTSGGVLLSLYVSASLSYLLYSDILLKFSPTEITAPTMPLDCANASNVQAVNRSATKGVTLLLPEPEWTYPRLSCPGSTFQKALLISPHRFGETKGNSAPLIIREPFIACGPNECKHFALTHYAAQPGGYYNGTRGDRNKLRHLISVKLGKIPTVENSIFHMAAWSGSACHDGKEWTYIGVDGPDNNALLKVKYGEAYTDTYHSYANKILRTQESACNCIGGNCYLMITDGSASGVSECRFLKVREGRIIKEIFPTGRVKHTEECTCGFASNKTIECACRDNSYTAKRPFVKLNVETDTAEVRLMCTDTYLDTPRPNDGSITGPCESDGDKGSGGIKGGFVHQRMESKIGRWYSRTMSKTERMGMGLYVKYDGDPWADSDALTFSGVMVSMKEPGWYSFGFEIKDKKCDVPCIGIEMVHDGGKETWHSAATAIYCLMGSGQLLWDTVTGVDMAL

SEQ ID NO: 29602 - protein, 466 aa, Artificial Sequence; identical to SEQ ID NO: 28900
  derived and/or modified protein sequence (wt) from neuraminidase__InfluenzaB__AGX21572

SEQ ID NO: 29603 - protein, 466 aa, Artificial Sequence
  derived and/or modified protein sequence (wt) from neuraminidase__InfluenzaB__AGX21583
MLPSTIQTLTLFLTSGGVLLSLYVSALLSYLLYSDILLKFSPTEITAPTMSLDCANASNVQAVNRSATKGVTFLLPEPEWTYPRLSCPGSTFQRALLISPHRFGEAKGNSAPLIIREPFIACGPNECKHFALTHYAAQPGGYYNGTRGDRNKLRHLISVKLGKIPTVENSIFHMAAWSGSACHDGKEWTYIGVDGPDNDALLKVKYGEAYTDTYHSYANKILRTQESACNCIGGNCYLMITDGSASGVSECRFLKIREGRIIKEILPTGRVKHTEECTCGFASNKTIECACRDNSYTAKRPFVKLNVETDTAEIRLMCTDTYLDTPRPDDGSITGPCESNGDKGSGGIKGGFVHQRMESKIGRWYSRTMSKTERMGMELYVKYDGDPWADSDALAFSGVMVSMKEPGWYSFGFEIKDKKCDVPCIGIEMVHDGGKETWHSAATAIYCLMGSGQLLWDTVTGVDMAL

SEQ ID NO: 29604 - protein, 466 aa, Artificial Sequence; identical to SEQ ID NO: 28900
  derived and/or modified protein sequence (wt) from neuraminidase__InfluenzaB__AGX21594

SEQ ID NO: 29605 - protein, 466 aa, Artificial Sequence; identical to SEQ ID NO: 29122
  derived and/or modified protein sequence (wt) from neuraminidase__InfluenzaB__AGX21605

SEQ ID NO: 29606 - protein, 466 aa, Artificial Sequence
  derived and/or modified protein sequence (wt) from neuraminidase__InfluenzaB__AGX21615
MLPSTIQTLTLFLTSGGVLLSLYVSASLSYLLYSDILLKFSTTEITAPTMPLDCANASNVQAVNRSATKGVTLLLPEPEWTYPRLSCPGSTFQKALLISPHRFGENKGNSAPLIIREPFIACGPNECKHFALTHYAAQPGGYYNGTRGDRNKLRHLISVKLGKIPTVENSIFHMAAWSGSACHDGKEWTYIGVDGPDNNALLKVKYGEAYTDTYHSYANKILRTQESACNCIGGNCYLMITDGSASGVSECRFLKIREGRIIKEIFPTGRVKHTEECTCGFASNKTIECACRDNSYTAKRPFVKLNVETDTAEIRLMCTDTYLDTPRPNDGSITGPCESDGDKGSGGIKGGFVHQRMESKIGRWYSRTMSKTERMGMGLYVKYDGDPWADSDALAFSGVMVSMKEPGWYSFGFEIKDKKCDVPCIGIEMVHDGGKETWHSAATAIYCLMGSGQLLWDTVTGVDMAL

SEQ ID NO: 29607 - protein, 466 aa, Artificial Sequence; identical to SEQ ID NO: 28956
  derived and/or modified protein sequence (wt) from neuraminidase__InfluenzaB__AGX21626

SEQ ID NO: 29608 - protein, 466 aa, Artificial Sequence; identical to SEQ ID NO: 28956
  derived and/or modified protein sequence (wt) from neuraminidase__InfluenzaB__AGX21637

SEQ ID NO: 29609 - protein, 466 aa, Artificial Sequence; identical to SEQ ID NO: 28956
  derived and/or modified protein sequence (wt) from neuraminidase__InfluenzaB__AGX21648

SEQ ID NO: 29610 - protein, 466 aa, Artificial Sequence
  derived and/or modified protein sequence (wt) from neuraminidase__InfluenzaB__AGX21659
MLPSTIQTLTLFLTSGGVLLSLYVSALLSYLLYSDILLKFSPTEITAPTMSLDCANASNVQAVNRSATKGVTFLLPEPEWTYPRLSCPGSTFQKALLISPHRFGETKGNSAPLIIREPFIACGPNECKHFALTHYAAQPGGYYNGTRGDRNKLRHLVSVKLGKIPTVENSIFHMAAWSGSACHDGKEWTYIGVDGPDNDALLKVKYGEAYTDTYHSYANKILRTQESACNCIGGNCYLMITDGSASGVSECRFLKIREGRIIKEIFPTGRVKHTEECTCGFASNKTIECACRDNSYTAKRPFVKLNVETDTAEIRLMCTDTYLDTPRPDDGSITGPCESNGDKGSGGIKGGFVHQRMESKIGRWYSRTMSKTERMGMGLYVKYGGDPWADSDALAFSGVMVSMKEPGWYSFGFEIKDKKCDVPCIGIEMVHDGGKETWHSAATAIYCLMGSGQLLWDTVTGVDMAL

SEQ ID NO: 29611 - protein, 466 aa, Artificial Sequence
  derived and/or modified protein sequence (wt) from neuraminidase__InfluenzaB__AGX21670
MLPSTIQTLTLFLTSGGVLLSLYVSALLSYLLYSDILLKFSPTEITAPTMSLDCANASNVQAVNRSATKGVTFLLPEPEWTYPRLSCPGSTFQKALLISPHRFGETKGNSAPLIIREPFIACGPNECKHFALTHYAAQPGGYYNGTRGDRNKLRHLISVKLGKIPTVENSIFHMAAWSGSACHDGKEWTYIGVDGPDNDALLKVKYGEAYTDTYHSYANKILRTQESACNCIGGNCYLMITDGSASGVSECRFLKIREGRIIKEIFPTGRVKHTEECTCGFASNKTIECACRDNSYTAKRPFVKLNVETDTAEIRLMCTDTYLDTPRPDDGSITGPCESNGDKGSGGIKGGFVHQRMESKIGRWYSRTMSKTERMGMGLYVKYDGDPWADSDALAFSGVMVSMKEPGWYSFGFEIKDKKCDVPCIGTEMVHDGGKETWHSAATAIYCLMGSGQLLWDTVTGVDMAL

SEQ ID NO: 29612 - protein, 466 aa, Artificial Sequence
  derived and/or modified protein sequence (wt) from neuraminidase__InfluenzaB__AGX21681
MLPSTIQMLTLFLTSGGVLLSLYVSASLSYLLYSDILLKFSPTEITAPTMPLDCANASNVHAVNRSATKGVTFLLPEPEWTYPRLSCPGSTFQKALLISPHRFGETKGNSAPLIIREPFIACGPNECKHFALTHYAAQPGGYYNGTRGDRNKLRHLISVKLGKIPTVENSIFHMAAWSGSACHDGKEWTYIGVDGPDNNALLKIKYGEAYTDTYHSYANNILRTQESACNCIGGNCYLMITDGSASGVSECRFLKIREGRIIKEIFPTGRVKHTEECTCGFASNKTIECACRDNSYTAKRPFVKLNVETDTAEIRLMCTDTYLDTPRPDDGSITGPCESNGDKGNGGIKGGFVHQRMASKIGRWYSRTMSKTERKGMGLYVKYDGDPWTDSDALAFRGVMVSMKEPGWYSFGFEIKDKKCDVPCIGIEMVHDGGKETWHSAATAIYCLMGSGQLLWDTVTGVDMAL

SEQ ID NO: 29613 - protein, 466 aa, Artificial Sequence; identical to SEQ ID NO: 28895
  derived and/or modified protein sequence (wt) from neuraminidase__InfluenzaB__AGX21692

SEQ ID NO: 29614 - protein, 466 aa, Artificial Sequence; identical to SEQ ID NO: 29122
  derived and/or modified protein sequence (wt) from neuraminidase__InfluenzaB__AGX21703

SEQ ID NO: 29615 - protein, 466 aa, Artificial Sequence
  derived and/or modified protein sequence (wt) from neuraminidase__InfluenzaB__AGX21714
MLPSTIQTLTLFLTSGGVLLSLYVSASLSYLLYSDILLKFSPTEITAPAMPLDCANASNVQAVNRSATKGLTLLLPEPEWTYPRLSCPGSTFQKALLISPHRFGETKGNSAPLIIREPFIACGPNECKHFALTHYAAQPGGYYNGTRGDRNKLRHLISVKLGKIPTVENSIFHMAAWSGSACHDGKEWTYIGVDGPDNNALLKVKYGEAYTDTYHSYANKILRTQESACNCIGGNCYLMITDGSASGVSECRFLKIREGRIIKEIFPTGRVKHTEECTCGFASNKTIECACRDNSYTAKRPFVKLNVETDTAEIRLMCTDTYLDTPRPNDGSITGPCESDGDKGSGGIKGGFVHQRMESKIGRWYSRTMSKTERMGMGLYVKYDGDPWADSDALAFSGVMVSMKEPGWYSFGFEIKDKKCDVPCIGIEMVHDGGKETWHSAATAIYCLMGSGQLLWDTVTGVDMAL

SEQ ID NO: 29616 - protein, 466 aa, Artificial Sequence
  derived and/or modified protein sequence (wt) from neuraminidase__InfluenzaB__AGX21725
MLPSTIQMLTLFLTSGGVLLSLYVSASLSYLLYSDILLKFSPTEITAPTMPLDCANASNVHAVNRSATKGVTFLLPEPEWTYPRLSCPGSTFQRALLISPHRFGETKGNSAPLIIREPFIACGPNECKHFALTHYAAQPGGYYNGTRGDRNKLRHLISVKLGKIPTVENSIFHMAAWSGSACHDGKEWTYIGVDGPDNNALLKIKYGEAYTDTYHSYANNILRTQESACNCIGGNCYLMITDGSASGVSECRFLKIREGRIIKEIFPTGRVKHTEECTCGFASNKTIECACRDNSYTAKRPFVKLNVETDTAEIRLMCTDTYLDTPRPDDGSITGPCESNGDKGSGGIKGGFVHQRMASKIGRWYSRTMSKTERKGMGLYVKYDGDPWTDSDALAFRGVMVSMKEPGWYSFGFEIKDKKCDVPCIGIEMVHDGGKETWHSAATAIYCLMGSGQLLWDTVTGVDMAL

SEQ ID NO: 29617 - protein, 466 aa, Artificial Sequence
  derived and/or modified protein sequence (wt) from neuraminidase__InfluenzaB__AGX21747
MLPSTIQTLTLFLTSGGVLLSLYVSASLSYLLYSDILLKVSQTEITAPTMPLDCANASNVQAVNRSATKGVTLLLPEPEWTYPRLSCPGSTFQKALLISPHRFGETKGNSAPLIIREPFIACGPKECKHFALTHYAAQPGGYYNGTREDRNKLRHLISVKLGKIPTVENSIFHMAAWSGSACHDGREWTYIGVDGPDSNALLKIKYGEAYTDTYHSYAKNILRTQESACNCIGGDCYLMITDGSASGISECRFLKIREGRIIKEIFPTGRVKHTEECTCGFASNKTIECACRDNSYTAKRPFVKLNVETDTAEIRLMCTETYLDTPRPDDGSITGPCESNGDKGSGGIKGGFVHQRMASKIGRWYSRTMSKTKRMGMGLYVKYDGDPWTDSEALALSGVMVSMEEPGWYSFGFEIKDKKCDVPCIGIEMVHDGGKTTWHSAATAIYCLMGSGQLLWDTVTGVDMAL

SEQ ID NO: 29618 - protein, 466 aa, Artificial Sequence
  derived and/or modified protein sequence (wt) from neuraminidase__InfluenzaB__AGX21758
MLPSTIQTLTLFLTSGGVLLSLYVSASLSYLLYSDILLKFTPTEITVPTMPLDCANASNVQAVNRSATKGVTLLLPEPEWTYPRLSCPGSTFQKALLISPHRFGETKGNSAPLIIREPFIACGPKECKHFALTHYAAQPGGYYNGTREDRNKLRHLISVKLGKIPTVENSIFHMAAWSGSACHDGKEWTYIGVDGPDSNALLKIKYGEAYTDTYHSYANNILRTQESACNCIGGNCYLMITDGSASGISECRFLKIREGRIIKEIFPTGRVKHTEECTCGFASNKTIECACRDNSYTAKRPFVKLNVETDTAEIRLMCTETYLDTPRPDDGSITGPCESNGNKGSGGIKGGFVHQRMASKIGRWYSRTMSKTKRMGMGLYVKYDGDPWTDSDALALSGVMVSMEEPGWYSFGFEIKDKKCDVPCIGIEMVHDGGKETWHSAATAIYCLMGSGQLLWDTVTGVDMAL

SEQ ID NO: 29619 - protein, 466 aa, Artificial Sequence
  derived and/or modified protein sequence (wt) from neuraminidase__InfluenzaB__AGX21769
MLPSTIQTLTLFLTSGGVLLSLYVSASLSYLLYSDILLKFSQTEITAPTMPLDCANASNVQAANRSATKGVTLLLPEPEWTYPRLSCPGSTFQKALLISPHRFGETKGNSAPLIIREPFIACGPKECKHFALTHYAAQPGGYYNGTREDRNKLRHLISVKLGKIPTVENSIFHMAAWSGSACHDGREWTYIGVDGPDSNALLKIKYGEAYTDTYHSYAKNILRTQESACNCIGGDCYLMITDGSASGISECRFLKIREGRIIKEIFPTGRVKHTEECTCGFASNKTIECACRDNSYTAKRPFVKLNVETDTAEIRLMCTKTYLDTPRPNDGSITGPCESDGDKGSGGIKGGFVHQRMASKIGRWYSRTMSKTKRMGMGLYVKYDGDPWTDSEALALSGVMVSMEEPGWYSFGFEIKDKKCDVPCIGIEMVHDGGKTTWHSAATAIYCLMGSGQLLWDTVTGVDMAL

SEQ ID NO: 29620 - protein, 466 aa, Artificial Sequence
  derived and/or modified protein sequence (wt) from neuraminidase__InfluenzaB__AGX21780
MLPSTIQTLTLFLTSGGVLLSLYVSASLSYLLYSDILLKFSQTEITAPTMPLDCANASNVQAVNRSATKGVTLLLPEPEWTYPRLSCPGSTFQKALLISPHRFGETKGNSAPLIIREPFIACGPKECKHFALTHYAAQPGGYYNGTREDRNKLRHLISVKLGKIPTVENSIFHMAAWSGSACHDGREWTYIGVDGPDSNALLKIKYGEAYTDTYHSYAKNILRTQESACNCIGGDCYLMITDGSASGISECRFLKIREGRIIKEIFPTGRVKHTEECTCGFASNKTIECACRDNSYTAKRPFVKLNVETDTAEIRLMCTETYLDTPRPNDGSITGPCESNGDKGSGGIKGGFVHQRMESKIGRWYSRTMSKTKRMGMGLYVKYDGDPWTDSEALALSGVMVSMEEPGWYSFGFEIKDKKCDVPCIGIEMVHDGGKTTWHSAATAIYCLMGSGQLLWDTVTGVDMTL

SEQ ID NO: 29621 - protein, 466 aa, Artificial Sequence
  derived and/or modified protein sequence (wt) from neuraminidase__InfluenzaB__AGX21791
MLPSTIQTLTLFLTSGGVLLSLYVSASLSYLLYSDILLKFSPTEITAPTMPLDCANASNVQAVNRSATKGVTLLLPEPEWTYPRLSCPGSTFQKALLISPHRFGETKGNSAPLIIREPFIACGPKECKHFALTHYAAQPGGYYSGTRGDRNKLRHLISVKLGKIPTVENSIFHMAAWSGSACHDGKEWTYIGVDGPDNNALLKIKYGEAYTDTYHSYANNILRTQESACNCIGGNCYLMITDGSASGISECRFLKIREGRIIKEIFPTGRVKHTEECTCGFASNKTIECACRDNNYTAKRPFVKLNVETDTAEIRLMCTETYLDTPRPDDGSITGPCESNGDKGSGGIKGGFVHQRMASKIGRWYSRTMSKNKRMGMGLYVKYDGDPWADSDALALSGVMVSMEEPGWYSFGFEIKDKKCDVPCIGIEMVHDGGKETWHSAATAIYCLMGSGQLLWDTVTGVDMAL

SEQ ID NO: 29622 - protein, 466 aa, Artificial Sequence
  derived and/or modified protein sequence (wt) from neuraminidase__InfluenzaB__AGX21802
MLPSTIQTLTLFLTSGGVLLSLYVSASLSYLLYSDILLKFSQTEITAPTMPLDCANASNVQAANRSATKGVTLLLPEPEWTYPRLSCPGSTFQKALLISPHRFGETKGNSAPLIIREPFIACGPKECKHFALTHYAAQPGGYYNGTREDRNKLRHLISVKLGKIPTVENSIFHMAAWSGSACHDGREWTYIGVDGPDSNALLKIKYGEAYTDTYHSYAKNILRTQESACNCIGGDCYLMITDGSASGISECRFLKIREGRIIKEIFPTGRVKHTEECTCGFASNKTIECACRDNSYTAKRPFVKLNVETDTAEIRLMCTETYLDTPRPNDGSITGPCESDGDKGSGGIKGGFVHQRMASKIGRWYSRTMSKTKRMGMGLYVKYDGDPWTDSEALALSGVMVSMEEPGWYSFGFEIKDKKCDVPCIGIEMVHDGGKTTWHSAATAIYCLMGSGQLLWDTVTGVDMAL

SEQ ID NO: 29623 - protein, 466 aa, Artificial Sequence
  derived and/or modified protein sequence (wt) from neuraminidase__InfluenzaB__AGX21813
MLPSTIQTLTLFLTSGGVLLSLYVSASLSYLLYSDILLKFSQTEITAPKMPLDCANASNVQAANRSATKGVTLLLPEPEWTYPRLSCPGSTFQKALLISPHRFGETKGNSAPLIIREPFIACGPKECKHFALTHYAAQPGGYYNGTREDRNKLRHLISVKLGKIPTVENSIFHMAAWSGSACHDGREWTYIGVDGPDSNALLKIKYGEAYTDTYHSYAKNILRTQESACNCIGGDCYLMITDGSASGISECRFLKIREGRIIKEIFPTGRVKHTEECTCGFASNKTIECACRDNSYTAKRPFVKLNVETDTAEIRLMCTETYLDTPRPNDGSITGPCESDGDKGSGGIKGGFVHQRMASKIGRWYSRTMSKTKRMGMGLYVKYDGDPWTDSEALALSGVMVSMEEPGWYSFGFEIKDKKCDVPCIGIEMVHDGGKTTWHSAATAIYCLMGSGQLLWDTVTGVDMAL

SEQ ID NO: 29624 - protein, 466 aa, Artificial Sequence
  derived and/or modified protein sequence (wt) from neuraminidase__InfluenzaB__AGX21824
MLPSTIQTLTLFLTSGGVLLSLYVSASLSYLLYSDILLKFSQTEITAPIMPLDCANASNVQAVNRSATKGVTLLLPEPEWTYPRLSCPGSTFQKALLISPHRFGETKGNSAPLIIREPFIACGPKECKHFALTHYAAQPGGYYNGTREDRNKLRHLISVKLGKIPTVENSIFHMAAWSGSACHDGREWTYIGVDGPDSNALLKIKYGEAYTDTYHSYAKNILRTQESACNCIGGDCYLMITDGPASGISECRFLKIREGRIIKEIFPTGRVKNTEECTCGFASNKTIECACRDNSYTAKRPFVKLNVETDTAEIRLMCTETYLDTPRPNDGSITGPCESNGDKGSGGIKGGFVHQRMASKIGRWYSRTMSKTKRMGMGLYVKYDGDPWTDSEALALSGVMVSMEEPGWYSFGFEIKDKKCDVPCIGIEMVHDGGKTTWHSAATAIYCLMGSGQLLWDTVTGVDMAL

SEQ ID NO: 29625 - protein, 466 aa, Artificial Sequence; identical to SEQ ID NO: 28743
  derived and/or modified protein sequence (wt) from neuraminidase__InfluenzaB__AGX21835

SEQ ID NO: 29626 - protein, 466 aa, Artificial Sequence; identical to SEQ ID NO: 29131
  derived and/or modified protein sequence (wt) from neuraminidase__InfluenzaB__AGX21846

SEQ ID NO: 29627 - protein, 466 aa, Artificial Sequence; identical to SEQ ID NO: 29131
  derived and/or modified protein sequence (wt) from neuraminidase__InfluenzaB__AGX21857

SEQ ID NO: 29628 - protein, 466 aa, Artificial Sequence; identical to SEQ ID NO: 28743
  derived and/or modified protein sequence (wt) from neuraminidase__InfluenzaB__AGX21868

SEQ ID NO: 29629 - protein, 466 aa, Artificial Sequence; identical to SEQ ID NO: 29129
  derived and/or modified protein sequence (wt) from neuraminidase__InfluenzaB__AGX21879

SEQ ID NO: 29630 - protein, 466 aa, Artificial Sequence
  derived and/or modified protein sequence (wt) from neuraminidase__InfluenzaB__AGX21890
MLPSTIQTLTLFLTSGGVLLSLYVSASLSYLLYSDILLKFSQTEIIAPIMPLDCANASNVQAVNHSATKGVTLLLPEPEWTYPRLSCPGSTFQKALLISPHRFGETKGNSAPLIIREPFIACGPKECKHFALTHYAAQPGGYYNGTREDRNKLRHLISVKLGKIPTVENSIFHMAAWSGSACHDGREWTYIGVDGPDSNALLKIKYGEAYTDTYHSYAKNILRTQESACNCIGGDCYLMITDGPASGISECRFLKIREGRIIKEIFPTGRVKHTEECTCGFASNKTIECACRDNSYTAKRPFVKLNVETDTAEIRLMCTETYLDTPRPNDGSITGPCESNGDKGSGGIKGGFVHQRMASKIGRWYSRTMSKTKRMGMGLYVKYDGDPWTDSEALALSGVMVSMEEPGWYSFGFEIKDKKCDVPCIGIEMVHDGGKTTWHSAATAIYCLMGSGQLLWDTVTGVDMAL

SEQ ID NO: 29631 - protein, 466 aa, Artificial Sequence; identical to SEQ ID NO: 28743
  derived and/or modified protein sequence (wt) from neuraminidase__InfluenzaB__AGX21901

SEQ ID NO: 29632 - protein, 466 aa, Artificial Sequence; identical to SEQ ID NO: 28743
  derived and/or modified protein sequence (wt) from neuraminidase__InfluenzaB__AGX21912

SEQ ID NO: 29633 - protein, 466 aa, Artificial Sequence
  derived and/or modified protein sequence (wt) from neuraminidase__InfluenzaB__AGX21923
MLPSTIQTLTLFLTSGGVLLSLYVSASLSYLLYSDILLKFSQTEITAPIMPLDCTNASNVQAVNRSATKGVTLLLPEPEWTYPRLSCPGSTFQKALLISPHRFGETKGNSAPLIIREPFIACGPKECKHFALTHYAAQPGGYYNGTREDRNKLRHLISVKLGKIPTVENSIFHMAAWSGSACHDGREWTYIGVDGPDSNALLKIKYGEAYTDTYHSYAKNILRTQESACNCIGGDCYLMITDGPASGISECRFLKIREGRIIKEIFPTGRVKHTEECTCGFASNKTIECACRDNSYTAKRPFVKLNVETDTAEIRLMCTETYLDTPRPNDGSITGPCESNGDKGSGGIKGGFVHQRMASKIGRWYSRTMSKTKRMGMGLYVKYDGDPWTDSEALALSGVMVSMEEPGWYSFGFEIKDKKCDVPCIGIEMVHDGGKTTWHSAATAIYCLMGSGQLLWDTVTGVDMAL

SEQ ID NO: 29634 - protein, 466 aa, Artificial Sequence; identical to SEQ ID NO: 29630
  derived and/or modified protein sequence (wt) from neuraminidase__InfluenzaB__AGX21934

SEQ ID NO: 29635 - protein, 466 aa, Artificial Sequence; identical to SEQ ID NO: 29131
  derived and/or modified protein sequence (wt) from neuraminidase__InfluenzaB__AGX21945

SEQ ID NO: 29636 - protein, 466 aa, Artificial Sequence
  derived and/or modified protein sequence (wt) from neuraminidase__InfluenzaB__AGX21956
MLPSTIQTLTLFLTSGGVLLSLYVSASLSYLLYSDILLKFSQTEITAPIMPLDCANTSNIQAVNRSATKGVTLLLPEPEWTYPRLSCPGSTFQKALLISPHRFGETKGNSAPLIIREPFIACGPKECKHFALTHYAAQPGGYYNGTREDRNKLRHLISVKLGKIPTVENSIFHMAAWSGSACHDGREWTYIGVDGPDSNALLKIKYGEAYTDTYHSYAKNILRTQESACNCIGGDCYLMITDGPASGISECRFLKIREGRIIKEIFPTGRVKHTEECTCGFASNKTIECACRDNSYTAKRPFVKLNVETDTAEIRLMCTETYLDTPRPNDGSITGPCESNGDKGSGGIKGGFVHQRMASKIGRWYSRTMSKTKRMGMGLYVKYDGDPWTDSEALALSGVMVSMEEPGWYSFGFEIKDKKCDVPCIGIEMVHDGGKTTWHSAATAIYCLMGSGQLLWDTVTGVDMAL

SEQ ID NO: 29637 - protein, 466 aa, Artificial Sequence; identical to SEQ ID NO: 29131
  derived and/or modified protein sequence (wt) from neuraminidase__InfluenzaB__AGX21967

SEQ ID NO: 29638 - protein, 466 aa, Artificial Sequence; identical to SEQ ID NO: 28743
  derived and/or modified protein sequence (wt) from neuraminidase__InfluenzaB__AGX21978

SEQ ID NO: 29639 - protein, 466 aa, Artificial Sequence; identical to SEQ ID NO: 29131
  derived and/or modified protein sequence (wt) from neuraminidase__InfluenzaB__AGX21989

SEQ ID NO: 29640 - protein, 466 aa, Artificial Sequence; identical to SEQ ID NO: 29129
  derived and/or modified protein sequence (wt) from neuraminidase__InfluenzaB__AGX22000

SEQ ID NO: 29641 - protein, 466 aa, Artificial Sequence
  derived and/or modified protein sequence (wt) from neuraminidase__InfluenzaB__AGX22011
MLPSTIQTLTLFLTSGGVLLSLYVSASLSYLLYSDILLKFSQTEITAPIMPLDCANASNVQAVNRSATKGVTLLLPEPEWTYPRLSCPGSTFQKALLISPHRFGETKGNSAPLIIREPFIACGPKECKHFALTHYAAKPGGYYNGTREDRNKLRHLISVKLGKIPTVENSIFHMAAWSGSACHDGREWTYIGVDGPDSNALLKIKYGEAYTDTYHSYAKNILRTQESACNCIGGDCYLMITDGPASGISECRFLKIREGRIIKEIFPTGRVKHTEECTCGFASNKTIECACRDNNYTAKRPFVKLNVETDTAEIRLMCTETYLDTPRPNDGSITGPCESNGDKGSGGIKGGFVHQRMASKIGRWYSRTMSKTKRMGMGLYVKYDGDPWTDSEALALSGVMVSMEEPGWYSFGFEIKDKKCDVPCIGIEMVHDGGKTTWHSAATAIYCLMGSGQLLWDTVTGVDMAL

SEQ ID NO: 29642 - protein, 466 aa, Artificial Sequence; identical to SEQ ID NO: 28743
  derived and/or modified protein sequence (wt) from neuraminidase__InfluenzaB__AGX22033

SEQ ID NO: 29643 - protein, 466 aa, Artificial Sequence; identical to SEQ ID NO: 28743
  derived and/or modified protein sequence (wt) from neuraminidase__InfluenzaB__AGX22044

SEQ ID NO: 29644 - protein, 466 aa, Artificial Sequence; identical to SEQ ID NO: 29129
  derived and/or modified protein sequence (wt) from neuraminidase__InfluenzaB__AGX22055

SEQ ID NO: 29645 - protein, 466 aa, Artificial Sequence; identical to SEQ ID NO: 28743
  derived and/or modified protein sequence (wt) from neuraminidase__InfluenzaB__AGX22066

SEQ ID NO: 29646 - protein, 466 aa, Artificial Sequence; identical to SEQ ID NO: 29630
  derived and/or modified protein sequence (wt) from neuraminidase__InfluenzaB__AGX22077

SEQ ID NO: 29647 - protein, 466 aa, Artificial Sequence; identical to SEQ ID NO: 28745
  derived and/or modified protein sequence (wt) from neuraminidase__InfluenzaB__AGX22088

SEQ ID NO: 29648 - protein, 466 aa, Artificial Sequence; identical to SEQ ID NO: 29131
  derived and/or modified protein sequence (wt) from neuraminidase__InfluenzaB__AGX22099

SEQ ID NO: 29649 - protein, 466 aa, Artificial Sequence; identical to SEQ ID NO: 29129
  derived and/or modified protein sequence (wt) from neuraminidase__InfluenzaB__AGX22110

SEQ ID NO: 29650 - protein, 466 aa, Artificial Sequence; identical to SEQ ID NO: 29131
  derived and/or modified protein sequence (wt) from neuraminidase__InfluenzaB__AGX22132

SEQ ID NO: 29651 - protein, 466 aa, Artificial Sequence
  derived and/or modified protein sequence (wt) from neuraminidase__InfluenzaB__AGX22143
MLPSTIQTLTLFLTSGGVLLSLYVSASLSYLLYSDILLKFSQTEITAPIMPLDCANASNVQAVNRSATKGVTLLLPEPEWTYPRLSCPGSTFQKALLISPHRFGETKGNSAPLIIREPFIACGPKECKHFALTHYAAQPGGYYNGTREDRNKLRHLISVKLGKIPTVENSIFHMAAWSGSACHDGREWTYIGVDGPDSNALLKIKYGEAYTDTYHSYAKNILRTQESACNCIGGDCYLMITDGPASGISECRFLKIREGRIIKEIFPTGRVKHTEECTCGFASNKTIECACRDNSYTAKRPFVKLNVETDTAEIRLMCTETYLDTPRPNDGSITGPCESNGDKGSGGIKGGFVHQRMASKIGRWYSRTISKTKRMGMGLYVKYDGDPWTDSEALALSGVMVSMEEPGWYSFGFEIKDKKCDVPCIGIEMVHDGGKTTWHSAATAIYCLMGSGQLLWDTVTGVDMAL

SEQ ID NO: 29652 - protein, 466 aa, Artificial Sequence; identical to SEQ ID NO: 29651
  derived and/or modified protein sequence (wt) from neuraminidase__InfluenzaB__AGX22154

SEQ ID NO: 29653 - protein, 466 aa, Artificial Sequence; identical to SEQ ID NO: 29651
  derived and/or modified protein sequence (wt) from neuraminidase__InfluenzaB__AGX22165

SEQ ID NO: 29654 - protein, 466 aa, Artificial Sequence; identical to SEQ ID NO: 29630
  derived and/or modified protein sequence (wt) from neuraminidase__InfluenzaB__AGX22176

SEQ ID NO: 29655 - protein, 466 aa, Artificial Sequence; identical to SEQ ID NO: 29651
  derived and/or modified protein sequence (wt) from neuraminidase__InfluenzaB__AGX22187

SEQ ID NO: 29656 - protein, 466 aa, Artificial Sequence; identical to SEQ ID NO: 29651
  derived and/or modified protein sequence (wt) from neuraminidase__InfluenzaB__AGX22198

SEQ ID NO: 29657 - protein, 466 aa, Artificial Sequence; identical to SEQ ID NO: 29651
  derived and/or modified protein sequence (wt) from neuraminidase__InfluenzaB__AGX22209

SEQ ID NO: 29658 - protein, 466 aa, Artificial Sequence; identical to SEQ ID NO: 29129
  derived and/or modified protein sequence (wt) from neuraminidase__InfluenzaB__AGX22220

SEQ ID NO: 29659 - protein, 466 aa, Artificial Sequence; identical to SEQ ID NO: 29131
  derived and/or modified protein sequence (wt) from neuraminidase__InfluenzaB__AGX22231

SEQ ID NO: 29660 - protein, 466 aa, Artificial Sequence; identical to SEQ ID NO: 29630
  derived and/or modified protein sequence (wt) from neuraminidase__InfluenzaB__AGX22242

SEQ ID NO: 29661 - protein, 466 aa, Artificial Sequence; identical to SEQ ID NO: 29129
  derived and/or modified protein sequence (wt) from neuraminidase__InfluenzaB__AGX22253

SEQ ID NO: 29662 - protein, 466 aa, Artificial Sequence; identical to SEQ ID NO: 28743
  derived and/or modified protein sequence (wt) from neuraminidase__InfluenzaB__AGX22264

SEQ ID NO: 29663 - protein, 466 aa, Artificial Sequence; identical to SEQ ID NO: 29129
  derived and/or modified protein sequence (wt) from neuraminidase__InfluenzaB__AGX22275

SEQ ID NO: 29664 - protein, 466 aa, Artificial Sequence; identical to SEQ ID NO: 28743
  derived and/or modified protein sequence (wt) from neuraminidase__InfluenzaB__AGX22286

SEQ ID NO: 29665 - protein, 466 aa, Artificial Sequence
  derived and/or modified protein sequence (wt) from neuraminidase__InfluenzaB__AGX22297
MLPSTIQTLTLFLTLGGVLLSLYVSASLSYLLYSDILLKFSQTEITAPIMPLDCANASNVQAVNRSATKGVTLLLPEPEWTYPRLSCPGSTFQKALLISPHRFGETKGNSAPLIIREPFIACGPKECKHFALTHYAAQPGGYYNGTREDRNKLRHLISVKLGKIPTVENSIFHMAAWSGSACHDGREWTYIGVDGPDSNALLKIKYGEAYTDTYHSYAKNILRTQESACNCIGGDCYLMITDGPASGISECRFLKIREGRIIKEIFPTGRVKHTEECTCGFASNKTIECACRDNSYTAKRPFVKLNVETDTAEIRLMCTETYLDTPRPNDGSITGPCESNGDKGSGGIKGGFVHQRMASKIGRWYSRTMSKTKRMGMGLYVKYDGDPWTDSEALALSGVMVSMEEPGWYSFGFEIKDKKCDVPCIGIEMVHDGGKTTWHSAATAIYCLMGSGQLLWDTVTGVDMAL

SEQ ID NO: 29666 - protein, 466 aa, Artificial Sequence; identical to SEQ ID NO: 28743
  derived and/or modified protein sequence (wt) from neuraminidase__InfluenzaB__AGX22308

SEQ ID NO: 29667 - protein, 466 aa, Artificial Sequence
  derived and/or modified protein sequence (wt) from neuraminidase__InfluenzaB__AGX22330
MLPSTIQTLTLFLTSGGVLLSLYVSASLSYLLYSDILLKFSQTEITAPIMPLDCANASNVQAVNRSATKGVTLLLPEPEWTYPRLSCPGSTFQKALLISPHRFGETKGNSAPLIIREPFIACGPKECKHFALTHYAAQPGGYYNGTREDRNKLRHLISVKLGKIPTVENSIFHMTAWSGSACHDGKEWTYIGVDGPDSNALLKIKYGEAYTDTYHSYAKNILRTQESACNCIGGDCYLMITDGPASGISECRFLKIREGRIIKEIFPTGRVKHTEECTCGFASNKTIECACRDNSYTAKRPFVKLNVETDTAEIRLMCTETYLDTPRPNDGSITGPCESDGDKGSGGIKGGFVHQRMATKIGRWYSRTMSKTKRMGMGLYVKYDGDPWTDSEALALSGVMVSMEEPGWYSFGFEIKDKKCDVPCIGIEMVHDGGKTTWHSAATAIYCLMGSGQLLWDTVTGVDMAL

SEQ ID NO: 29668 - protein, 466 aa, Artificial Sequence; identical to SEQ ID NO: 29131
  derived and/or modified protein sequence (wt) from neuraminidase__InfluenzaB__AGX22341

SEQ ID NO: 29669 - protein, 466 aa, Artificial Sequence; identical to SEQ ID NO: 29131
  derived and/or modified protein sequence (wt) from neuraminidase__InfluenzaB__AGX22352

SEQ ID NO: 29670 - protein, 466 aa, Artificial Sequence; identical to SEQ ID NO: 29131
  derived and/or modified protein sequence (wt) from neuraminidase__InfluenzaB__AGX22363

SEQ ID NO: 29671 - protein, 466 aa, Artificial Sequence; identical to SEQ ID NO: 29129
  derived and/or modified protein sequence (wt) from neuraminidase__InfluenzaB__AGX22374

SEQ ID NO: 29672 - protein, 466 aa, Artificial Sequence; identical to SEQ ID NO: 28743
  derived and/or modified protein sequence (wt) from neuraminidase__InfluenzaB__AGX22385

SEQ ID NO: 29673 - protein, 466 aa, Artificial Sequence; identical to SEQ ID NO: 28743
  derived and/or modified protein sequence (wt) from neuraminidase__InfluenzaB__AGX22396

SEQ ID NO: 29674 - protein, 466 aa, Artificial Sequence; identical to SEQ ID NO: 29630
  derived and/or modified protein sequence (wt) from neuraminidase__InfluenzaB__AGX22407

SEQ ID NO: 29675 - protein, 466 aa, Artificial Sequence
  derived and/or modified protein sequence (wt) from neuraminidase__InfluenzaB__AGX22418
MLPSTIQTLTLFLTSGGVLLSLYVSASLSYLLYSDILLKFSQTEIIAPIMPLDCANASNVQAVNHSATKGVTLLLPEPEWTYPRLSCPGSTFQKALLISPHRFGETKGNSAPLIIREPFIACGPKECKHFALTHYAAQPGRYYNGTREDRNKLRHLISVKLGKIPTVENSIFHMAAWSGSACHDGREWTYIGVDGPDSNALLKIKYGEAYTDTYHSYAKNILRTQESACNCIGGDCYLMITDGPASGISECRFLKIREGRIIKEIFPTGRVKHTEECTCGFASNKTIECACRDNSYTAKRPFVKLNVETDTAEIRLMCTETYLDTPRPNDGSITGPCESNGDKGSGGIKGGFVHQRMASKIGRWYSRTMSKTKRMGMGLYVKYDGDPWTDSEALALSGVMVSMEEPGWYSFGFEIKDKKCDVPCIGIEMVHDGGKTTWHSAATAIYCLMGSGQLLWDTVTGVDMAL

SEQ ID NO: 29676 - protein, 466 aa, Artificial Sequence; identical to SEQ ID NO: 29129
  derived and/or modified protein sequence (wt) from neuraminidase__InfluenzaB__AGX22429

SEQ ID NO: 29677 - protein, 466 aa, Artificial Sequence; identical to SEQ ID NO: 29129
  derived and/or modified protein sequence (wt) from neuraminidase__InfluenzaB__AGX22440

SEQ ID NO: 29678 - protein, 466 aa, Artificial Sequence; identical to SEQ ID NO: 29129
  derived and/or modified protein sequence (wt) from neuraminidase__InfluenzaB__AGX22449

SEQ ID NO: 29679 - protein, 466 aa, Artificial Sequence
  derived and/or modified protein sequence (wt) from neuraminidase__InfluenzaB__AGX22460
MLPSTIQTLTLFLTSGGVLLSLYVSASLSYLLYSDILLKFSQTEITAPTMPLDCANASNVQAVNRSATKGVTLLLPELEWTYPRLSCPGSTFQKALLISPHRFGETKGNSAPLIIREPFIACGPKECKHFALTHYAAQPGGYYNGTREDRNKLRHLISVKLGKIPTVENSIFHMAAWSGSACHDGREWTYVGVDGPDSNALLKIKYGEAYTDTYHSYAKNILRTQESACNCIGGDCYLMITDGPASGISECRFLKIREGRIIKEIFPTGRVKHTEECTCGFASNKTIECACRDNSYTAKRPFVKLDVETDTAEIRLMCTETYLDTPRPNDGSITGPCEANGDKGSGGIKGGFVHQRMASKIGRWYSRTMSKTKRMGMGLYVKYDGDPWTDSEALALSGVMVSMEEPGWYSFGFEIKDKKCDVPCIGIEMVHDGGKTTWHSAATAIYCLMGSGQLLWDTVTGVDMAL

SEQ ID NO: 29680 - protein, 466 aa, Artificial Sequence; identical to SEQ ID NO: 28743
  derived and/or modified protein sequence (wt) from neuraminidase__InfluenzaB__AGX22471

SEQ ID NO: 29681 - protein, 466 aa, Artificial Sequence; identical to SEQ ID NO: 28743
  derived and/or modified protein sequence (wt) from neuraminidase__InfluenzaB__AGX22482

SEQ ID NO: 29682 - protein, 466 aa, Artificial Sequence; identical to SEQ ID NO: 28743
  derived and/or modified protein sequence (wt) from neuraminidase__InfluenzaB__AGX22493

SEQ ID NO: 29683 - protein, 466 aa, Artificial Sequence
  derived and/or modified protein sequence (wt) from neuraminidase__InfluenzaB__AGX22504
MLPSTIQTLTLFLTSGGVLLSLYVSASLSYLLYSDILLKFSTTEITAPTIPLDCANASNVQAVNRSATKGVTLLLPEPEWTYPRLSCPGSTFQKALLISPHRFGETKGNSAPLIIREPFIACGPKECKHFALTHYAAQPGGYYNGTREDRNKLRHLISVKLGKIPTVENSIFHMAAWSGSACHDGKEWTYIGVDGPDSNALLKIKYGEAYTDTYHSYANNILRTQESACNCIGGNCYLMITDGSASGISECRFLKIREGRIIKEIFPTGRVKHTEECTCGFASNKTIECACRDNSYTAKRPFVKLNVETDTAEIRLMCTETYLDTPRPDDGSITGPCESNGNKGSGGIKGGFVHQRMASKIGRWYSRTMSKTKRMGMGLYVKYDGDPWTDSDALALSGVMVSMEEPGWYSFGFEIKDKKCDVPCIGIEMVHDGGKETWHSAATAIYCLMGSGQLLWDTVTGVDMAL

SEQ ID NO: 29684 - protein, 466 aa, Artificial Sequence; identical to SEQ ID NO: 29129
  derived and/or modified protein sequence (wt) from neuraminidase__InfluenzaB__AGX22515

SEQ ID NO: 29685 - protein, 466 aa, Artificial Sequence
  derived and/or modified protein sequence (wt) from neuraminidase__InfluenzaB__AGX22526
MLPSTIQTLTLFLTSGGVLLSLYVSASLSYLLYSDILQKFSQTEITAPIMPLDCANASNVQAVNRSATKGVTLLLPEPEWTYPRLSCPGSTFQKALLISPHRFGETKGNSAPLIIREPFIACGPTECKHFALTHYAAQPGGYYNGTREDRNKLRHLISVKLGKIPTVENSIFHMAAWSGSACHDGKEWTYIGVDGPDSNALLKIKYGEAYTDTYHSYAKNILRTQESACNCIGGDCYLMITDGPASGISECRFLKIREGRIIKEIFPTGRVKHTEECTCGFASNKTIECACRDNSYTAKRPFVKLNVETDTAEIRLMCTETYLDTPRPNDGSITGPCESDGDKGSGGIKGGFVHQRMASKIGRWYSRTMSKTKRMGMGLYVKYDGDPWTDSEALALSGVMVSMEEPGWYSFGFEIKDKKCDVPCIGIEMVHDGGKTTWHSAATAIYCLMGSGQLLWDTVTGVDMAL

SEQ ID NO: 29686 - protein, 466 aa, Artificial Sequence; identical to SEQ ID NO: 28788
  derived and/or modified protein sequence (wt) from neuraminidase__InfluenzaB__AGX22548

SEQ ID NO: 29687 - protein, 466 aa, Artificial Sequence; identical to SEQ ID NO: 28627
  derived and/or modified protein sequence (wt) from neuraminidase__InfluenzaB__AGX22559

SEQ ID NO: 29688 - protein, 466 aa, Artificial Sequence; identical to SEQ ID NO: 28788
  derived and/or modified protein sequence (wt) from neuraminidase__InfluenzaB__AGX22570

SEQ ID NO: 29689 - protein, 466 aa, Artificial Sequence
  derived and/or modified protein sequence (wt) from neuraminidase__InfluenzaB__AGX22581
MLPSTIQTLTLFLTSGGVLLSLYVSASLSYLLYSDILLKFSQTEITAPIMPLDCANASNVQAVNRSATKGVTLLLPEPEWTYPRLSCPGSTFQKALLISPHRFGETKGNSAPLIIREPFIACGPKECKHFALTHYAAQPGGYYNGTREDRNKLRHLISVKLGKIPTVENSIFHMAAWSGSACHDGREWTYIGVDGPDNNALLKIKYGEAYTDTYHSYAKNILRTQESACNCIGGDCYLMITDGPASGISECRFLKIREGRIIKEIFPTGRVKHTEECTCGFASNKTIECACRDNNYTAKRPFVKLNVETDTAEIRLMCTETYLDTPRPNDGSITGPCESNGDKGSGGIKGGFVHQRMASKIGRWYSRTMSKTKRMGMGLYVKYDGDPWTDSEALALSGVMVSMEEPGWYSFGFEIKDKKCDVPCIGIEMVHDGGKTTWHSAATAIYCLMGSGQLLWDTVTGVDMAL

SEQ ID NO: 29690 - protein, 466 aa, Artificial Sequence; identical to SEQ ID NO: 28788
  derived and/or modified protein sequence (wt) from neuraminidase__InfluenzaB__AGX22592

SEQ ID NO: 29691 - protein, 466 aa, Artificial Sequence; identical to SEQ ID NO: 28788
  derived and/or modified protein sequence (wt) from neuraminidase__InfluenzaB__AGX22603

SEQ ID NO: 29692 - protein, 466 aa, Artificial Sequence; identical to SEQ ID NO: 29028
  derived and/or modified protein sequence (wt) from neuraminidase__InfluenzaB__AGX22614

SEQ ID NO: 29693 - protein, 466 aa, Artificial Sequence; identical to SEQ ID NO: 28788
  derived and/or modified protein sequence (wt) from neuraminidase__InfluenzaB__AGX22625

SEQ ID NO: 29694 - protein, 466 aa, Artificial Sequence
  derived and/or modified protein sequence (wt) from neuraminidase__InfluenzaB__AGX22636
MLPSTIQTLTLFLTSGGVLLSLYVSASLSYLLYSDILLKFSQTEITAPIMPLDCANASNVQAVNRSAAKGVALLLPEPEWTYPRLSCPGSTFQKALLISPHRFGETKGNSAPLIIREPFIACGPTECKHFALTHYAAQPGGYYNGTREDRNKLRHLISVKLGKIPTVENSIFHMAAWSGSACHDGKEWTYIGVDGPDSNALLKIKYGEAYTDTYHSYAKNILRTQESACNCIGGDCYLMITDGPASGISECRFLKIREGRIIKEIFPTGRVKHTEECTCGFASNKTIECACRDNSYTAKRPFVKLNVETDTAEIRLMCTETYLDTPRPNDGSITGPCESDGDKGSGGIKGGFVHQRMASKIGRWYSRTMSKTKRMGMGLYVKYDGDPWTDSEALALSGVMVSMEEPGWYSFGFEIKDKKCDVPCIGIEMVHDGGKTTWHSAATAIYCLMGSGQLLWDTVTGVDMAL

SEQ ID NO: 29695 - protein, 466 aa, Artificial Sequence; identical to SEQ ID NO: 28788
  derived and/or modified protein sequence (wt) from neuraminidase__InfluenzaB__AGX22647

SEQ ID NO: 29696 - protein, 466 aa, Artificial Sequence; identical to SEQ ID NO: 28627
  derived and/or modified protein sequence (wt) from neuraminidase__InfluenzaB__AGX22658

SEQ ID NO: 29697 - protein, 466 aa, Artificial Sequence; identical to SEQ ID NO: 28788
  derived and/or modified protein sequence (wt) from neuraminidase__InfluenzaB__AGX22669

SEQ ID NO: 29698 - protein, 466 aa, Artificial Sequence; identical to SEQ ID NO: 28788
  derived and/or modified protein sequence (wt) from neuraminidase__InfluenzaB__AGX22680

SEQ ID NO: 29699 - protein, 466 aa, Artificial Sequence; identical to SEQ ID NO: 28788
  derived and/or modified protein sequence (wt) from neuraminidase__InfluenzaB__AGX22691

SEQ ID NO: 29700 - protein, 466 aa, Artificial Sequence; identical to SEQ ID NO: 28788
  derived and/or modified protein sequence (wt) from neuraminidase__InfluenzaB__AGX22702

SEQ ID NO: 29701 - protein, 466 aa, Artificial Sequence; identical to SEQ ID NO: 28788
  derived and/or modified protein sequence (wt) from neuraminidase__InfluenzaB__AGX22713

SEQ ID NO: 29702 - protein, 466 aa, Artificial Sequence
  derived and/or modified protein sequence (wt) from neuraminidase__InfluenzaB__AGX22724
MLPSTIQTLTLFLTSGGVLLSLYVSALLSYLLYSDILLKFSQTEITAPIMPLDCANASNVQAVNRSATKGVTLLLPEPEWTYPRLSCPGSTFQKALLISPHRFGETKGNSAPLIIREPFIACGPKECKHFALTHYAAQPGGYYNGTREDRNKLRHLISVKLGKIPTVENSIFHMAAWSGSACHDGREWTYIGVDGPDSNALLKIKYGEAYTDTYHSYAKNILRTQESACNCIGGDCYLMITDGPASGISECRFLKIREGRIIKEIFPTGRVKHTEECTCGFASNKTIECACRDNSYTAKRPFVKLNVETDTAEIRLMCTETYLDTPRPNDGSITGPCESNGDKGSGGIKGGFVHQRMASKIGRWYSRTMSKTKRMGMGLYVKYDGDPWTDSEALALSGVMVSMEEPGWYSFGFEIKDKKCDVPCIGIEMVHDGGKTTWHSAATAIYCLMGSGQLLWDTVTGVDMAL

SEQ ID NO: 29703 - protein, 466 aa, Artificial Sequence; identical to SEQ ID NO: 28788
  derived and/or modified protein sequence (wt) from neuraminidase__InfluenzaB__AGX22735

SEQ ID NO: 29704 - protein, 466 aa, Artificial Sequence
  derived and/or modified protein sequence (wt) from neuraminidase__InfluenzaB__AGX22746
MLPSTIQTLTLFLTSGGVLLSLYVSASLSYLLYSDILLKFSQTEITAPIMPLDCANASNVQAVNRSATKGVTLLLPEPEWTYPRLSCPGSTFQKALLISPHRFGETKGNSAPLIIREPFIACGPTECKHFALTHYAAQPGGYYNRTREDRNKLRHLISVKLGKIPTVENSIFHMAAWSGSACHDGKEWTYIGVDGPDSNALLKIKYGEAYTDTYHSYAKNILRTQESACNCIGGDCYLMITDGPASGISECRFLKIREGRIIKEIFPTGRVKHTEECTCGFASNKTIECACRDNSYTAKRPFVKLNVETDTAEIRLMCTETYLDTPRPNDGSITGPCESDGDKGSGGIKGGFVHQRMASKIGRWYSRTMSKTKRMGMGLYVKYDGDPWTDSEALALSGVMVSMEEPGWYSFGFEIKDKKCDVPCIGIEMVHDGGKTTWHSAATAIYCLMGSGQLLWDTVTGVDMAL

SEQ ID NO: 29705 - protein, 466 aa, Artificial Sequence; identical to SEQ ID NO: 28788
  derived and/or modified protein sequence (wt) from neuraminidase__InfluenzaB__AGX22757

SEQ ID NO: 29706 - protein, 466 aa, Artificial Sequence; identical to SEQ ID NO: 28788
  derived and/or modified protein sequence (wt) from neuraminidase__InfluenzaB__AGX22768

SEQ ID NO: 29707 - protein, 466 aa, Artificial Sequence; identical to SEQ ID NO: 29129
  derived and/or modified protein sequence (wt) from neuraminidase__InfluenzaB__AGX22779

SEQ ID NO: 29708 - protein, 466 aa, Artificial Sequence; identical to SEQ ID NO: 28788
  derived and/or modified protein sequence (wt) from neuraminidase__InfluenzaB__AGX22790

SEQ ID NO: 29709 - protein, 466 aa, Artificial Sequence
  derived and/or modified protein sequence (wt) from neuraminidase__InfluenzaB__AGX22801
MLPSTIQTLTLFLTSGGVLLSLYVSASLSYLLYSDILLKFSQTEITAPIMPLDCANASNVQAVNRSAAKGVTLLLPEPEWTYPRLSCPGSTFQKALLISPHRFGETKGNSAPLIIREPFIACGPTECKHFALTHYAAQPGGYYNGTRGDRNKLRHLISVKLGKIPTVENSIFHMAAWSGSACHDGKEWTYIGVDGPDSNALLKIKYGEAYTDTYHSYAKNILRTQESACNCIGGNCYLMITDGSASGVSECRFLKIREGRIIKEIFPTGRVKHTEECTCGFASNKTIECACRDNSYTAKRPFVKLNVETDTAEIRLMCTETYLDTPRPNDGSITGPCESDGDKGSGGIKGGFVHQRMASKIGRWYSRTMSKTKRMGMGLYVKYDGDPWTDSEALALSGVMVSMEEPGWYSFGFEIKDKKCDVPCIGIEMVHDGGKTTWHSAATAIYCLMGSGQLLWDTVTGVDMAL

SEQ ID NO: 29710 - protein, 466 aa, Artificial Sequence; identical to SEQ ID NO: 28788
  derived and/or modified protein sequence (wt) from neuraminidase__InfluenzaB__AGX22812

SEQ ID NO: 29711 - protein, 466 aa, Artificial Sequence; identical to SEQ ID NO: 28788
  derived and/or modified protein sequence (wt) from neuraminidase__InfluenzaB__AGX22823

SEQ ID NO: 29712 - protein, 466 aa, Artificial Sequence; identical to SEQ ID NO: 28788
  derived and/or modified protein sequence (wt) from neuraminidase__InfluenzaB__AGX22834

SEQ ID NO: 29713 - protein, 466 aa, Artificial Sequence; identical to SEQ ID NO: 28788
  derived and/or modified protein sequence (wt) from neuraminidase__InfluenzaB__AGX22845

SEQ ID NO: 29714 - protein, 466 aa, Artificial Sequence; identical to SEQ ID NO: 28788
  derived and/or modified protein sequence (wt) from neuraminidase__InfluenzaB__AGX22856

SEQ ID NO: 29715 - protein, 466 aa, Artificial Sequence; identical to SEQ ID NO: 28788
  derived and/or modified protein sequence (wt) from neuraminidase__InfluenzaB__AGX22867

SEQ ID NO: 29716 - protein, 466 aa, Artificial Sequence; identical to SEQ ID NO: 28788
  derived and/or modified protein sequence (wt) from neuraminidase__InfluenzaB__AGX22878

SEQ ID NO: 29717 - protein, 466 aa, Artificial Sequence
  derived and/or modified protein sequence (wt) from neuraminidase__InfluenzaB__AGX22889
MLPSTIQTLTLFLTSGGVLLSLYVSASLSYLLYSDILLKFSQTEITAPIMPLDCANASNVQAVNRSAAKGVTLLLPEPEWTYPRLSCPGSTFQKALLISPHRFGETKGNSAPLIIREPFIACGPTECKHFALTHYAAQPGGYYNGTREDRNKLRHLISVKLGKIPTVENSIFHMAAWSGSACHDGKEWTYIGVDGPDSNALLKIKYGEAYTDTYHSYAKNILRTQESACNCIGGDCYLMITDGPASGISECRFLKIREGRIIKEIFPTGRVKHTEECTCGFASNKTIECACRDNSHTAKRPFVKLNVETDTAEIRLMCTETYLDTPRPNDGSITGPCESDGDKGSGGIKGGFVHQRMASKIGRWYSRTMSKTKRMGMGLYVKYDGDPWTDSEALALSGVMVSMEEPGWYSFGFEIKDKKCDVPCIGIEMVHDGGKTTWHSAATAIYCLMGSGQLLWDTVTGVDMAL

SEQ ID NO: 29718 - protein, 466 aa, Artificial Sequence; identical to SEQ ID NO: 28627
  derived and/or modified protein sequence (wt) from neuraminidase__InfluenzaB__AGX22900

SEQ ID NO: 29719 - protein, 466 aa, Artificial Sequence
  derived and/or modified protein sequence (wt) from neuraminidase__InfluenzaB__AGX22911
MLPSTIQTLTLFLTSGGVLLSLYVSASLSYLLYSDILLKFSQTEITAPIMPLDCANASNVQAVNRSAAKGVTLLLPEPEWTYPRLSCPGSTFQKALLISPHRFGETKGNSAPLIIREPFIACGPTECKHFALTHYAAQPGGYYNGTREDRNKLRHLISVKLGKIPTVENSIFHMAAWSGSACHDGKEWTYIGVDGPDSNALLKIKYGEAYTDTYHSYAKNILRTQESACNCIGGDCYLMITDGPASGTSECRFLKIREGRIIKEIFPTGRVKHTEECTCGFASNKTIECACRDNSYTAKRPFVKLNVETDTAEIRLMCTETYLDTPRPNDGSITGPCESDGDKGSGGIKGGFVHQRMASKIGRWYSRTMSKTKRMGMGLYVKYDGDPWTDSEALALSGVMVSMEEPGWYSFGFEIKDKKCDVPCIGIEMVHDGGKTTWHSAATAIYCLMGSGQLLWDTVTGVDMAL

SEQ ID NO: 29720 - protein, 466 aa, Artificial Sequence
  derived and/or modified protein sequence (wt) from neuraminidase__InfluenzaB__AGX22922
MLPSTIQTLTLFLTSGGVLLSLYVSASLSYLLYSDILLKFSQTEITAPIMPLDCANASNVQAVNRSATKGVTLLLPEPEWTYPRLSCPGSTFQKALLISPHRFGETKGNSAPLIIREPFIACGPTECKHFALTHYAAQPGGYYNGTREDRNKLRHLISVKLGKIPTVENSIFHMAAWSGSACHDGKEWTYIGVDGPDSNALLKIKYGEAYTDTYHSYAKNILRTQESACNCIGGDCYLMITDGPASGISECRFLKIREGRIIKEIFPTGRVKHTEECTCGFASNKTIECACRDNSYTAKRPFVKLNVETDTAEIRLMCTETYLDTPRPNDGSITGPCESDGDKGSGGIKGGFVHQRMASKIGRWYSRTMSKTKRMGMGLYVKYDGDPWTDNEALALSGVMVSMEEPGWYSFGFEIKDKKCDVPCIGIEMVHDGGKTTWHSAATAIYCLMGSGQLLWDTVTGVDMAL

SEQ ID NO: 29721 - protein, 466 aa, Artificial Sequence; identical to SEQ ID NO: 28788
  derived and/or modified protein sequence (wt) from neuraminidase__InfluenzaB__AGX22933

SEQ ID NO: 29722 - protein, 466 aa, Artificial Sequence; identical to SEQ ID NO: 28788
  derived and/or modified protein sequence (wt) from neuraminidase__InfluenzaB__AGX22944

SEQ ID NO: 29723 - protein, 466 aa, Artificial Sequence; identical to SEQ ID NO: 28788
  derived and/or modified protein sequence (wt) from neuraminidase__InfluenzaB__AGX22955

SEQ ID NO: 29724 - protein, 466 aa, Artificial Sequence; identical to SEQ ID NO: 28788
  derived and/or modified protein sequence (wt) from neuraminidase__InfluenzaB__AGX22966

SEQ ID NO: 29725 - protein, 466 aa, Artificial Sequence; identical to SEQ ID NO: 28627
  derived and/or modified protein sequence (wt) from neuraminidase__InfluenzaB__AGX22977

SEQ ID NO: 29726 - protein, 466 aa, Artificial Sequence; identical to SEQ ID NO: 29043
  derived and/or modified protein sequence (wt) from neuraminidase__InfluenzaB__AGX22988

SEQ ID NO: 29727 - protein, 466 aa, Artificial Sequence
  derived and/or modified protein sequence (wt) from neuraminidase__InfluenzaB__AGX22999
MLPSTIQTLTLFLTSGGVLLSLYVSASLSYLLYSDILLKFSQTEITAPIMPLDCANASNVQAVNRSAAKGVTLLLPEPEWAYPRLSCPGSTFQKALLISPHRFGETKGNSAPLIIREPFIACGPTECKHFALTHYAAQPGGYYNGTREDRNKLRHLISVKLGKIPTVENSIFHMAAWSGSACHDGKEWTYIGVDGPDSNALLKIKYGEAYTDTYHSYAKNILRTQESACNCIGGDCYLMITDGPASGISECRFLKIREGRIIKEIFPTGRVKHTEECTCGFASNKTIECACRDNSYTAKRPFVKLNVETDTAEIRLMCTETYLDTPRPNDGSITGPCESDGDKGSGGIKGGFVHQRMASKIGRWYSRTMSKTKRMGMGLYVKYDGDPWTDSEALALSGVMVSMEEPGWYSFGFEIKDKKCDVPCIGIEMVHDGGKTTWHSAATAIYCLMGSGQLLWDTVTGVDMAL

SEQ ID NO: 29728 - protein, 466 aa, Artificial Sequence; identical to SEQ ID NO: 29727
  derived and/or modified protein sequence (wt) from neuraminidase__InfluenzaB__AGX23010

SEQ ID NO: 29729 - protein, 466 aa, Artificial Sequence; identical to SEQ ID NO: 28627
  derived and/or modified protein sequence (wt) from neuraminidase__InfluenzaB__AGX23021

SEQ ID NO: 29730 - protein, 466 aa, Artificial Sequence; identical to SEQ ID NO: 28788
  derived and/or modified protein sequence (wt) from neuraminidase__InfluenzaB__AGX23032

SEQ ID NO: 29731 - protein, 466 aa, Artificial Sequence
  derived and/or modified protein sequence (wt) from neuraminidase__InfluenzaB__AGX23043
MLPSTIQTLTLFLTSGGVLLSLYVSASLSYLLYSDILLKFSQTEITAPIMPLDCANASNVQAVNRSAAKGVTLLLPEPEWTYPRLSCPGSTFQKALLISPHRFGETKGNSAPLIIREPFIACGPTECKHFALTHYAAQPGGYYNGTREDRNKLRHLISVKLGKIPTVENSIFHMAAWSGSACHDGKEWTYIGVDGPDSNALLKIKYGEAYTDTYHSYAKNILRTQESACNCIGGDCYLMITDGPALGISECRFLKIREGRIIKEIFPTGRVKHTEECTCGFASNKTIECACRDNSYTAKRPFVKLNVETDTAEIRLMCTETYLDTPRPNDGSITGPCESDGDKGSGGIKGGFVHQRMASKIGRWYSRTMSKTKRMGMGLYVKYDGDPWTDSEALALSGVMVSMEEPGWYSFGFEIKDKKCDVPCIGIEMVHDGGKTTWHSAATAIYCLMGSGQLLWDTVTGVDMAL

SEQ ID NO: 29732 - protein, 466 aa, Artificial Sequence; identical to SEQ ID NO: 28627
  derived and/or modified protein sequence (wt) from neuraminidase__InfluenzaB__AGX23054

SEQ ID NO: 29733 - protein, 466 aa, Artificial Sequence; identical to SEQ ID NO: 28627
  derived and/or modified protein sequence (wt) from neuraminidase__InfluenzaB__AGX23065

SEQ ID NO: 29734 - protein, 466 aa, Artificial Sequence; identical to SEQ ID NO: 28627
  derived and/or modified protein sequence (wt) from neuraminidase__InfluenzaB__AGX23076

SEQ ID NO: 29735 - protein, 466 aa, Artificial Sequence; identical to SEQ ID NO: 28788
  derived and/or modified protein sequence (wt) from neuraminidase__InfluenzaB__AGX23087

SEQ ID NO: 29736 - protein, 466 aa, Artificial Sequence; identical to SEQ ID NO: 28627
  derived and/or modified protein sequence (wt) from neuraminidase__InfluenzaB__AGX23098

SEQ ID NO: 29737 - protein, 466 aa, Artificial Sequence
  derived and/or modified protein sequence (wt) from neuraminidase__InfluenzaB__AGX23109
MLPSTIQTLTLFLTSGGVLLSLYVSASLSYLLYSDILLKFSQTEITAPIMPLDCANASNVQAVNRSATKGVTLLLPEPEWTYPRLSCPGSTFQKALLISPHRFGETKGNSAPLIIREPFIACGPTECKHFALTHYAAQPGGYYNGTREDRNKLRHLISVKLGKIPTVENSIFHMAAWSGSACHDGKEWTYIGVDGPDSNALLKIKYGEAYTDTYHSYAKNILRTQESACNCIRGDCYLMITDGPASGISECRFLKIREGRIIKEIFPTGRVKHTEECTCGFASNKTIECACRDNSYTAKRPFVKLNVETDTAEIRLMCTETYLDTPRPNDGSITGPCESDGDKGSGGIKGGFVHQRMASKIGRWYSRTMSKTKRMGMGLYVKYDGDPWTDSEALALSGVMVSMEEPGWYSFGFEIKDKKCDVPCIGIEMVHDGGKTTWHSAATAIYCLMGSGQLLWDTVTGVDMAL

SEQ ID NO: 29738 - protein, 466 aa, Artificial Sequence; identical to SEQ ID NO: 28788
  derived and/or modified protein sequence (wt) from neuraminidase__InfluenzaB__AGX23120

SEQ ID NO: 29739 - protein, 466 aa, Artificial Sequence
  derived and/or modified protein sequence (wt) from neuraminidase__InfluenzaB__AGX23131
MLPSTIQTLTLFLTSGGVLLSLYVSASLSYLLYSDILLKFSQTEIIAPIMPLDCANASNVQAVNRSAAKGVTLLLPEPEWTYPRLSCPGSTFQKALLISPHRFGETKGNSAPLIIREPFIACGPTECKHFALTHYAAQPGGYYNGTREDRNKLRHLISVKLGKIPTVENSIFHMAAWSGSACHDGKEWTYIGVDGPDSNALLKIKYGEAYTDTYHSYAKNILRTQESACNCIGGDCYLMITDGPASGISECRFLKIREGRIIKEIFPTGRVKHTEECTCGFASNKTIECACRDNSYTAKRPFVKLNVETDTAEIRLMCTETYLDTPRPNDGSITGPCESDGDKGSGGIKGGFVHQRMASKIGRWYSRTMSKTKRMGMGLYVKYDGDPWTDSEALALSGVMVSMEEPGWYSFGFEIKDKKCDVPCIGIEMVHDGGKTTWHSAATAIYCLMGSGQLLWDTVTGVDMAL

SEQ ID NO: 29740 - protein, 466 aa, Artificial Sequence; identical to SEQ ID NO: 28788
  derived and/or modified protein sequence (wt) from neuraminidase__InfluenzaB__AGX23142

SEQ ID NO: 29741 - protein, 466 aa, Artificial Sequence; identical to SEQ ID NO: 28627
  derived and/or modified protein sequence (wt) from neuraminidase__InfluenzaB__AGX23153

SEQ ID NO: 29742 - protein, 466 aa, Artificial Sequence; identical to SEQ ID NO: 28627
  derived and/or modified protein sequence (wt) from neuraminidase__InfluenzaB__AGX23164

SEQ ID NO: 29743 - protein, 466 aa, Artificial Sequence; identical to SEQ ID NO: 28627
  derived and/or modified protein sequence (wt) from neuraminidase__InfluenzaB__AGX23175

SEQ ID NO: 29744 - protein, 466 aa, Artificial Sequence
  derived and/or modified protein sequence (wt) from neuraminidase__InfluenzaB__AGX23186
MLPSTTQTLTLFLTSGGVLLSLYVSASLSYLLYSDILLKFSQTEITAPIMPLDCANASNVQAVNRSAAKGVTLLLPEPEWTYPRLSCPGSTFQKALLISPHRFGETKGNSAPLIIREPFIACGPTECKHFALTHYAAQPGGYYNGTREDRNKLRHLISVKLGKIPTVENSIFHMAAWSGSACHDGKEWTYIGVDGPDSNALLKIKYGEAYTDTYHSYAKNILRTQESACNCIGGDCYLMITDGPASGISECRFLKIREGRIIKEIFPTGRVKHTEECTCGFASNKTIECACRDNSYTAKRPFVKLNVETDTAEIRLMCTETYLDTPRPNDGSITGPCESDGDKGSGGIKGGFVHQRMASKIGRWYSRTMSKTKRMGMGLYVKYDGDPWTDSEALALSGVMVSMEEPGWYSFGFEIKDKKCDVPCIGIEMVHDGGKTTWHSAATAIYCLMGSGQLLWDTVTGVDMAL

SEQ ID NO: 29745 - protein, 466 aa, Artificial Sequence; identical to SEQ ID NO: 28788
  derived and/or modified protein sequence (wt) from neuraminidase__InfluenzaB__AGX23197

SEQ ID NO: 29746 - protein, 466 aa, Artificial Sequence; identical to SEQ ID NO: 28788
  derived and/or modified protein sequence (wt) from neuraminidase__InfluenzaB__AGX23208

SEQ ID NO: 29747 - protein, 466 aa, Artificial Sequence; identical to SEQ ID NO: 28788
  derived and/or modified protein sequence (wt) from neuraminidase__InfluenzaB__AGX23219

SEQ ID NO: 29748 - protein, 466 aa, Artificial Sequence
  derived and/or modified protein sequence (wt) from neuraminidase__InfluenzaB__AGX23230
MLPSTIQTLTLFLTSGGVLLSLYVSASLSYLLYSDILLKFSQTEITAPIMPLDCANASNVQAVNRSAAKGVTLLLPEPEWTYPRLSCPGSTFQKALLISPHRFGETKGNSAPLIIREPFIACGPTECKHFALTHYAAQPGEYYNGTREDRNKLRHLISVKLGKIPTVENSIFHMAAWSGSACHDGKEWTYIGVDGPDSNALLKIKYGEAYTDTYHSYAKNILRTQESACNCIGGDCYLMITDGPSSGISECRFLKIREGRIIKEIFPTGRVKHTEECTCGFASNKTIECACRDNSYTAKRPFVKLNVETDTAEIRLMCTETYLDTPRPNDGSITGPCESDGDKGSGGIKGGFVHQRMASKIGRWYSRTMSKTKRMGMGLYVKYDGDPWTDSEALALSGVMVSMEEPGWYSFGFEIKDKKCDVPCIGIEMVHDGGKTTWHSAATAIYCLMGSGQLLWDTVTGVDMAL

SEQ ID NO: 29749 - protein, 466 aa, Artificial Sequence; identical to SEQ ID NO: 28627
  derived and/or modified protein sequence (wt) from neuraminidase__InfluenzaB__AGX23241

SEQ ID NO: 29750 - protein, 466 aa, Artificial Sequence; identical to SEQ ID NO: 28788
  derived and/or modified protein sequence (wt) from neuraminidase__InfluenzaB__AGX23252

SEQ ID NO: 29751 - protein, 466 aa, Artificial Sequence; identical to SEQ ID NO: 28788
  derived and/or modified protein sequence (wt) from neuraminidase__InfluenzaB__AGX23263

SEQ ID NO: 29752 - protein, 466 aa, Artificial Sequence; identical to SEQ ID NO: 28788
  derived and/or modified protein sequence (wt) from neuraminidase__InfluenzaB__AGX23274

SEQ ID NO: 29753 - protein, 466 aa, Artificial Sequence; identical to SEQ ID NO: 28627
  derived and/or modified protein sequence (wt) from neuraminidase__InfluenzaB__AGX23285

SEQ ID NO: 29754 - protein, 466 aa, Artificial Sequence; identical to SEQ ID NO: 28788
  derived and/or modified protein sequence (wt) from neuraminidase__InfluenzaB__AGX23296

SEQ ID NO: 29755 - protein, 466 aa, Artificial Sequence
  derived and/or modified protein sequence (wt) from neuraminidase__InfluenzaB__AGX23307
MLPSTIQTLTLFLTSGGVLLSLYVSASLSYLLYSDILLKFSQTEITAPIMPLDCANASNVQAVNRSAAKGVTLLLPEPEWTYPRLSCPGSTFQKALLISPHRFGETKGNSAPLIIREPFIACGPTECKHFALTHYAAQPGGYYNGTREDRNKLRHLISVKLGKIPTVENSIFHMAAWSGSACHDGKEWTYVGVDGPDSNALLKIKYGEAYTDTYHSYAKNILRTQESACNCIGGDCYLMITDGPASGISECRFLKIREGRIIKEIFPTGRVKHTEECTCGFASNKTIECACRDNSYTAKRPFVKLNVETDTAEIRLMCTETYLDTPRPNDGSITGPCESDGDKGSGGIKGGFVHQRMASKIGRWYSRTMSKTKRMGMGLYVKYDGDPWTDSEALALSGVMVSMEEPGWYSFGFEIKDKKCDVPCIGIEMVHDGGKTTWHSAATAIYCLMGSGQLLWDTVTGVDMAL

SEQ ID NO: 29756 - protein, 466 aa, Artificial Sequence; identical to SEQ ID NO: 29755
  derived and/or modified protein sequence (wt) from neuraminidase__InfluenzaB__AGX23318

SEQ ID NO: 29757 - protein, 466 aa, Artificial Sequence; identical to SEQ ID NO: 29755
  derived and/or modified protein sequence (wt) from neuraminidase__InfluenzaB__AGX23329

SEQ ID NO: 29758 - protein, 466 aa, Artificial Sequence; identical to SEQ ID NO: 29755
  derived and/or modified protein sequence (wt) from neuraminidase__InfluenzaB__AGX23340

SEQ ID NO: 29759 - protein, 466 aa, Artificial Sequence; identical to SEQ ID NO: 29755
  derived and/or modified protein sequence (wt) from neuraminidase__InfluenzaB__AGX23351

SEQ ID NO: 29760 - protein, 466 aa, Artificial Sequence; identical to SEQ ID NO: 29755
  derived and/or modified protein sequence (wt) from neuraminidase__InfluenzaB__AGX23362

SEQ ID NO: 29761 - protein, 466 aa, Artificial Sequence; identical to SEQ ID NO: 29755
  derived and/or modified protein sequence (wt) from neuraminidase__InfluenzaB__AGX23373

SEQ ID NO: 29762 - protein, 466 aa, Artificial Sequence; identical to SEQ ID NO: 29755
  derived and/or modified protein sequence (wt) from neuraminidase__InfluenzaB__AGX23384

SEQ ID NO: 29763 - protein, 466 aa, Artificial Sequence
  derived and/or modified protein sequence (wt) from neuraminidase__InfluenzaB__AGX23395
MLPSTIQTLTLFLTSGGVLLSLYVSASLSYLLYSDILLKFSQTEITAPIMPLDCANASNVQAVNRSAAKGVTLLLPEPEWTYPRLSCPGSTFQKALLISPHRFGETKGNSAPLIIREPFIACGPTECKHFALTHYAAQPGGYYNGTREDRNKLRHLISVKLGKIPTVENSIFHMAAWSGSACHDGKEWTYVGVDGPDSNALLKIKYGEAYTDTYHSYAKNILRTQESACNCIGGDCYLMITDGPASGISECRFLKIREGRIIKEIFPTGRVKHTEECTCGFASNKTIECACRDNSYTAKRPFVKLNVETDTAEIRLMCTETYLDTPRPNDGSITGPCESDGDKGSGGIKGGFVHQRMASKIGRWYSRTMSKTKRMGMGLYVKYDGDPWTDSEALALSGVMVSMEEPGWYSFGFEIKDKKCDVPCIGIEMVHDGGKTTWHSAATAIYCLMGSGQLLWNTVTGVDMAL

SEQ ID NO: 29764 - protein, 466 aa, Artificial Sequence
  derived and/or modified protein sequence (wt) from neuraminidase__InfluenzaB__AGX23417
MLPSTIQTLTLFLTSGGVLLSLYVSASLSYLLYSDILLKFSQTEITAPIMPLDCANASNVQAVNRSAAKGVTFLLPEPEWTYPRLSCPGSTFQKALLISPHRFGETKGNSAPLIIREPFIACGPTECKHFALTHYAAQPGGYYNGTREDRNKLRHLISVKLGKIPTVENSIFHMAAWSGSACHDGKEWTYIGVDGPDSNALLKIKYGEAYTDTYHSYAKNILRTQESACNCIGGDCYLMITDGPASGISECRFLKIREGRIIKEIFPTGRVKHTEECTCGFASNKTIECACRDNSYTAKRPFVKLNVETDTAEIRLMCTETYLDTPRPNDGSITGPCESDGDKGSGGIKGGFVHQRMASKIGRWYSRTMSKTKRMGMGLYVKYDGDPWTDSEALALSGVMVSMEEPGWYSFGFEIKDKKCDVPCIGIEMVHDGGKTTWHSAATAIYCLMGSGQLLWDTVTGVDMAL

SEQ ID NO: 29765 - protein, 466 aa, Artificial Sequence; identical to SEQ ID NO: 29764
  derived and/or modified protein sequence (wt) from neuraminidase__InfluenzaB__AGX23428

SEQ ID NO: 29766 - protein, 466 aa, Artificial Sequence; identical to SEQ ID NO: 29147
  derived and/or modified protein sequence (wt) from neuraminidase__InfluenzaB__AGX23450

SEQ ID NO: 29767 - protein, 466 aa, Artificial Sequence
  derived and/or modified protein sequence (wt) from neuraminidase__InfluenzaB__AGX23461
MLPSTIQTLTLFLTSGGVLLSLYVSASLSYLLYSDILLKFSRTEITAPIMPLDCANASNIQAVNRSATKGVTLLLPEPEWTYPRLSCPGSTFQKALLISPHRFGETKGNSAPLIIREPFIACGPKECKHFALTHYAAQPGGYYNGTREDRNKLRHLISVKLGKIPTVENSIFHMAAWSGSACHDGREWTYIGVDGPDSNALLKIKYGEAYTDTYHSYAKNILRTQESACNCIGGDCYLMITDGPASGISECRFLKIREGRIIKEIFPTGRVKHTEECTCGFASNKTIECACRDNSYTAKRPFVKLNVETDTAEIRLMCTETYLDTPRPNDGSITGPCESNGDKGSGGIKGGFVHQRMASKIGRWYSRTMSKTKRMGMGLYVKYDGDPWTDSEALALSGVMVSIEEPGWYSFGFEIKDKKCDVPCIGIEMVHDGGKTTWHSAATAIYCLMGSGQLLWDTVTGVDMAL

SEQ ID NO: 29768 - protein, 466 aa, Artificial Sequence; identical to SEQ ID NO: 29147
  derived and/or modified protein sequence (wt) from neuraminidase__InfluenzaB__AGX23472

SEQ ID NO: 29769 - protein, 466 aa, Artificial Sequence; identical to SEQ ID NO: 28788
  derived and/or modified protein sequence (wt) from neuraminidase__InfluenzaB__AGX23483

SEQ ID NO: 29770 - protein, 466 aa, Artificial Sequence
  derived and/or modified protein sequence (wt) from neuraminidase__InfluenzaB__AGX23494
MLPSTIQTLTLFLTSGGVLLSLYVSASLSYLLYSDILLKFSQTEITAPIMPLDCANASNVQAVNRSAAKGVTLLLPEPEWTYPRLSCPGSTFQKALLISPHRFGETKGNSAPLIIREPFIACGPTECKHFALTHYAAQPGGYYNGTREDRNKLRHLISVKLGKIPTVENSIFHMAAWSGSACHDGKEWTYVGVDGPDSNALLKIKYGEAYTDTYHSYAKNILRTQESACNCIGGDCYLMITDGPASGISECRFLKIREGRIIKEIFPTGRVKHTEECTCGFASNKTIECACRDNSYTAKRPFVKLNVETDTAEIRLMCTETYLDTPRPNDGSITGPCGSDGDKGSGGIKGGFVHQRMASKIGRWYSRTMSKTKRMGMGLYVKYDGDPWTDSEALALSGVMVSMDEPGWYSFGFEIKDKKCDVPCIGIEMVHDGGKTTWHSAATAIYCLMGSGQLLWDTVTGVDMAL

SEQ ID NO: 29771 - protein, 466 aa, Artificial Sequence
  derived and/or modified protein sequence (wt) from neuraminidase__InfluenzaB__AGX23505
MLPSTIQTLTLFLTSGGVLLSLYVSASLSYLLYSDILLKFSQTEITAPIMPLDCANASNVQAVNRSAAKGVTLLLPEPEWTYPRLSCPGSTFQKALLISPHRFGETKGNSAPLIIREPFIACGPTECKHFALTHYAAQPGGYYNGTREDRNKLRHLISVKLGKIPTVENSIFHMAAWSGSACHDGKEWTYIGVDGPDNNALLKIKYGEAYTDTYHSYAKNILRTQESACNCIGGDCYLMITDGPASGISECRFLKIREGRIIKEIFPTGRVKHTEECTCGFASNKTIECACRDNSYTAKRPFVKLNVETDTAEIRLMCTETYLDTPRPNDGSITGPCESDGDKGSGGIKGGFVHQRMASKIGRWYSRTMSKTKRMGMGLYVKYDGDPWTDSEALALSGVMVSMEEPGWYSFGFEIKDKKCDVPCIGIEMVHDGGKTTWHSAATAIYCLMGSGQLLWDTVTGVDMAL

SEQ ID NO: 29772 - protein, 466 aa, Artificial Sequence
  derived and/or modified protein sequence (wt) from neuraminidase__InfluenzaB__AGX23516
MLPSTIQTLTLFLTSGGVLLSLYVSASLSYLLYSDILLKFSQTEITAPIMPLDCANASNVQAVNRSAAKGVTLLLPEPEWTYPRLSCPGSTFQKALLISPHRFGETKGNSAPLIIREPFIACGPTECKHFALTHYAAQPGGYYNGTREDRNKLRHLISVKLGKIPTVENSIFHMAAWSGSACHDGKEWTYIGVDGPDSNALLKIKYGEAYTDTYHSYAKNILRTQESACNCIGGDCYLMITDGPASGVSECRFLKIREGRIIKEIFPTGRVKHTEECTCGFASNKTIECACRDNSYTAKRPFVKLNVETDTAEIRLMCTETYLDTPRPNDGSITGPCESDGDKGSGGIKGGFVHQRMASKIGRWYSRTMSKAKRMGMGLYVKYDGDPWTDSEALALSGVMVSMEEPGWYSFGFEIKDKKCDVPCIGIEMVHDGGKTTWHSAATAIYCLMGSGQLLWDTVTGVDMAL

SEQ ID NO: 29773 - protein, 466 aa, Artificial Sequence; identical to SEQ ID NO: 28788
  derived and/or modified protein sequence (wt) from neuraminidase__InfluenzaB__AGX23527

SEQ ID NO: 29774 - protein, 466 aa, Artificial Sequence
  derived and/or modified protein sequence (wt) from neuraminidase__InfluenzaB__AGX23538
MLPSTIQTLTLFLTSGGVLLSLYVSASLSYLLYSDILLKFSQTEITAPIMPLDCANASNVQAVNRSAAKGVTLLLPKPEWTYPRLSCPGSTFQKALLISPHRFGETKGNSAPLIIREPFIACGPTECKHFALTHYAAQPGGYYNGTREDRNKLRHLISVKLGKIPTVENSIFHMAAWSGSACHDGKEWTYIGVDGPDSNALLKIKYGEAYTDTYHSYAKNILRTQESACNCIGGDCYLMITDGPASGVSECRFLKIREGRIIKEIFPTGRVKHTEECTCGFASNKTIECACRDNSYTAKRPFVKLNVETDTAEIRLMCTETYLDTPRPNDGSITGPCESDGDKGSGGIKGGFVHQRMASKIGRWYSRTMSTTKRMGMGLYVKYDGDPWTDSEALALSGVMVSMEEPGWYSFGFEIKDKKCDVPCIGIEMVHDGGKTTWHSAATAIYCLMGSGQLLWDTVTGVDMAL

SEQ ID NO: 29775 - protein, 466 aa, Artificial Sequence
  derived and/or modified protein sequence (wt) from neuraminidase__InfluenzaB__AGX23549
MLPSTIQTLTLFLTSGGVLLSLYVSASLSYLLYSDILLKFSQTEITAPIMPLDCANASNVQAVNRSAAKGVTLLLPEPEWTYPRLSCPGSTFQKALLISPHRFGETKGNSAPLIIREPFIACGPTECKHFALTHYAAQPGGYYNGTREDRNKLRHLISVKLGKIPTVENSIFHMAAWSGSACHDGKEWTYIGVDGPDSNALLKIKYGEAYTDTYHSYAKNILRTQESACNCIGGDCYLMITDGPASGVSECRFLKIREGRIIKEIFPTGRVKHTEECTCGFASNKTIECACRDNSYTAKRPFVKLNVETDTAEIRLMCTETYLDTPRPNDGSITGPCESDGDKGSGGIKGGFVHQRMASKIGRWYSRTMSTTKRMGMGLYVKYDGDPWTDSEALALSGVMVSMEEPGWYSFGFEIKDKKCDVPCIGIEMVHDGGKTTWHSAATAIYCLMGSGQLLWDTVTGVDMAL

SEQ ID NO: 29776 - protein, 466 aa, Artificial Sequence; identical to SEQ ID NO: 28788
  derived and/or modified protein sequence (wt) from neuraminidase__InfluenzaB__AGX23560

SEQ ID NO: 29777 - protein, 466 aa, Artificial Sequence; identical to SEQ ID NO: 29770
  derived and/or modified protein sequence (wt) from neuraminidase__InfluenzaB__AGX23571

SEQ ID NO: 29778 - protein, 466 aa, Artificial Sequence; identical to SEQ ID NO: 29770
  derived and/or modified protein sequence (wt) from neuraminidase__InfluenzaB__AGX23582

SEQ ID NO: 29779 - protein, 466 aa, Artificial Sequence
  derived and/or modified protein sequence (wt) from neuraminidase__InfluenzaB__AGX23593
MLPSTIQTLTLFLTSGGVLLSLYVSASLSYLLYSDILLKFSQTEITAPIMPLDCANASNVQAVNRSAAKGVTLLLPEPEWTYPRLSCPGSTFQKALLISPHRFGETKGNSAPLIIREPFIACGPTECKHFALTHYAAQPGGYYNGTREDRNKLRHLISVKLGKIPTVENSIFHMAAWSGSACHDGKEWTYIGVDGPDSNALLKIKYGEAYTDTYHSYAKNILRTQESACNCIGGDCYLMITDGPASGISECRFLKIREGRIIKEIFPTGRVKHTEECTCGFASNKTIECACRDNSYTAKRPFVKLNVETDTAEIRLMCTETYLDTPRPNDGSITGPCESDGDKGSGGIKGGFVHQRMASKIGRWYSRTMSKTKRMGMGLYVKYDGDPWTDSEALTLSGVMVSMEEPGWYSFGFEIKDKKCDVPCIGIEMVHDGGKTTWHSAATAIYCLMGSGQLLWDTVTGVDMAL

SEQ ID NO: 29780 - protein, 466 aa, Artificial Sequence; identical to SEQ ID NO: 28788
  derived and/or modified protein sequence (wt) from neuraminidase__InfluenzaB__AGX23604

SEQ ID NO: 29781 - protein, 466 aa, Artificial Sequence
  derived and/or modified protein sequence (wt) from neuraminidase__InfluenzaB__AGX23615
MLPSTIQTLTLFLTSGGVLLSLYVSASLSYLLYSDILLKFSQTEITTPIMPLDCANASNVQAVNRSAAKGVTLLLPEPEWTYPRLSCPGSTFQKALLISPHRFGETKGNSAPLIIREPFIACGPTECKHFALTHYAAQPGGYYNGTREDRNKLRHLISVKLGKIPTVENSIFHMAAWSGSACHDGKEWTYIGVDGPDSNALLKIKYGEAYTDTYHSYAKNILRTQESACNCIGGDCYLMITDGPASGISECRFLKIREGRIIKEIFPTGRVKHTEECTCGFASNKTIECACRDNSYTAKRPFVKLNVETDTAEIRLMCTETYLDTPRPNDGSITGPCESDGDKGSGGIKGGFVHQRMASKIGRWYSRTMSKTKRMGMGLYVKYDGDPWTDSEALALSGVMVSMEEPGWYSFGFEIKDKKCDVPCIGIEMVHDGGKTTWHSAATAIYCLMGSGQLLWDTVTGVDMAL

SEQ ID NO: 29782 - protein, 466 aa, Artificial Sequence; identical to SEQ ID NO: 29770
  derived and/or modified protein sequence (wt) from neuraminidase__InfluenzaB__AGX23626

SEQ ID NO: 29783 - protein, 466 aa, Artificial Sequence; identical to SEQ ID NO: 29147
  derived and/or modified protein sequence (wt) from neuraminidase__InfluenzaB__AGX23637

SEQ ID NO: 29784 - protein, 466 aa, Artificial Sequence; identical to SEQ ID NO: 28788
  derived and/or modified protein sequence (wt) from neuraminidase__InfluenzaB__AGX23659

SEQ ID NO: 29785 - protein, 466 aa, Artificial Sequence; identical to SEQ ID NO: 29147
  derived and/or modified protein sequence (wt) from neuraminidase__InfluenzaB__AGX23670

SEQ ID NO: 29786 - protein, 466 aa, Artificial Sequence; identical to SEQ ID NO: 29147
  derived and/or modified protein sequence (wt) from neuraminidase__InfluenzaB__AGX23681

SEQ ID NO: 29787 - protein, 466 aa, Artificial Sequence; identical to SEQ ID NO: 29147
  derived and/or modified protein sequence (wt) from neuraminidase__InfluenzaB__AGX23692

SEQ ID NO: 29788 - protein, 466 aa, Artificial Sequence; identical to SEQ ID NO: 29147
  derived and/or modified protein sequence (wt) from neuraminidase__InfluenzaB__AGX23703

SEQ ID NO: 29789 - protein, 466 aa, Artificial Sequence
  derived and/or modified protein sequence (wt) from neuraminidase__InfluenzaB__AGX23714
MLPSTIQTLTLFLTSGGVLLSLYVSASLSYLLYSDILLKFSQTEITAPIMPLDCANASNVQAVNRSAAKGVTLLLPEPEWTYPRLSCPGSTFQKALLISPHRFGETKGNSAPLIIREPFIACGPTECKHFALTHYAAQPGGYYNGTREDRNKLRHLISVKLGKIPTVENSIFHMAAWSGSACHDGKEWTYVGVDGPDSNALLKIKYGEAYTDTYHSYEKNILRTQESACNCIGGDCYLMITDGPASGISECRFLKIREGRIIKEIFPTGRVKHTEECTCGFASNKTIECACRDNSYTAKRPFVKLNVETDTAEIRLMCTETYLDTPRPNDGSITGPCGSDGDKGSGGIKGGFVHQRMASKIGRWYSRTMSKTKRMGMGLYVKYDGDPWTDSEALALSGVMVSMDEPGWYSFGFEIKDKKCDVPCIGIEMVHDGGKTTWHSAATAIYCLMGSGQLLWDTVTGVDMAL

SEQ ID NO: 29790 - protein, 466 aa, Artificial Sequence; identical to SEQ ID NO: 29147
  derived and/or modified protein sequence (wt) from neuraminidase__InfluenzaB__AGX23725

SEQ ID NO: 29791 - protein, 466 aa, Artificial Sequence; identical to SEQ ID NO: 29770
  derived and/or modified protein sequence (wt) from neuraminidase__InfluenzaB__AGX23736

SEQ ID NO: 29792 - protein, 466 aa, Artificial Sequence; identical to SEQ ID NO: 29147
  derived and/or modified protein sequence (wt) from neuraminidase__InfluenzaB__AGX23747

SEQ ID NO: 29793 - protein, 466 aa, Artificial Sequence; identical to SEQ ID NO: 29147
  derived and/or modified protein sequence (wt) from neuraminidase__InfluenzaB__AGX23758

SEQ ID NO: 29794 - protein, 466 aa, Artificial Sequence; identical to SEQ ID NO: 29770
  derived and/or modified protein sequence (wt) from neuraminidase__InfluenzaB__AGX23769

SEQ ID NO: 29795 - protein, 466 aa, Artificial Sequence
  derived and/or modified protein sequence (wt) from neuraminidase__InfluenzaB__AGX23780
MLPSTIQTLTLLLTSGGVLLSLYVSASLSYLLYSDILLKFSQTEITAPIMPLDCANASNVQAVNRSAAKGVTLLLPEPEWTYPRLSCPGSTFQKALLISPHRFGETKGNSAPLIIREPFIACGPTECKHFALTHYAAQPGGYYNGTREDRNKLRHLISVKLGKIPTVENSIFHMAAWSGSACHDGKEWTYIGVDGPDSNALLKIKYGEAYTDTYHSYAKNILRTQESACNCIGGDCYLMITDGPASGVSECRFLKIREGRIIKEIFPTGRVKHTEECTCGFASNKTIECACRDNSYTAKRPFVKLNVETDTAEIRLMCTETYLDTPRPNDGSITGPCESDGDKGSGGIKGGFVHQRMASKIGRWYSRTMSKTKRMGMGLYVKYDGDPWTDSEALALSGVMVSMEEPGWYSFGFEIKDKKCDVPCIGIEMVHDGGKTTWHSAATAIYCLMGSGQLLWDTVTGVDMAL

SEQ ID NO: 29796 - protein, 466 aa, Artificial Sequence
  derived and/or modified protein sequence (wt) from neuraminidase__InfluenzaB__AGX23791
MLPSTIQTLTLFLTSGGVLLSLYVSASLSYLLYSDILLKFSQTEITAPIMPLDCANASNAQAVNRSAAKGVTLLLPEPEWTYPRLSCPGSTFQKALLISPHRFGETKGNSAPLIIREPFIACGPTECKHFALTHYAAQPGGYYNGTREDRNKLRHLISVKLGKIPTVENSIFHMAAWSGSACHDGKEWTYIGVDGPDSNALLKIKYGEAYTDTYHSYAKNILRTQESACNCIGGDCYLMITDGPASGVSECRFLKIREGRIIKEIFPTGRVKHTEECTCGFASNKTIECACRDNSYTAKRPFVKLNVETDTAEIRLMCTETYLDTPRPNDGSITGPCESDGDKGSGGIKGGFVHQRMASKIGRWYSRTMSKTKRMGMGLYVKYDGDPWTDSEALALSGVMVSMEEPGWYSFGFEIKDKKCDVPCIGIEMVHDGGKTTWHSAATAIYCLMGSGQLLWDTVTGVDMAL

SEQ ID NO: 29797 - protein, 466 aa, Artificial Sequence; identical to SEQ ID NO: 29770
  derived and/or modified protein sequence (wt) from neuraminidase__InfluenzaB__AGX23802

SEQ ID NO: 29798 - protein, 466 aa, Artificial Sequence; identical to SEQ ID NO: 29770
  derived and/or modified protein sequence (wt) from neuraminidase__InfluenzaB__AGX23813

SEQ ID NO: 29799 - protein, 466 aa, Artificial Sequence; identical to SEQ ID NO: 29770
  derived and/or modified protein sequence (wt) from neuraminidase__InfluenzaB__AGX23824

SEQ ID NO: 29800 - protein, 466 aa, Artificial Sequence; identical to SEQ ID NO: 29770
  derived and/or modified protein sequence (wt) from neuraminidase__InfluenzaB__AGX23846

SEQ ID NO: 29801 - protein, 466 aa, Artificial Sequence; identical to SEQ ID NO: 28788
  derived and/or modified protein sequence (wt) from neuraminidase__InfluenzaB__AGX23857

SEQ ID NO: 29802 - protein, 466 aa, Artificial Sequence; identical to SEQ ID NO: 29770
  derived and/or modified protein sequence (wt) from neuraminidase__InfluenzaB__AGX23868

SEQ ID NO: 29803 - protein, 466 aa, Artificial Sequence
  derived and/or modified protein sequence (wt) from neuraminidase__InfluenzaB__AGX23879
MLPSTIQTLTLFLTSGGVLLSLYVSASLSYLLYSDILLKFSQTEITAPIMPLDCANASNVQAVNRSAAKGVTLLLPEPEWTYPRLSCPGSTFQKALLISPHRFGETKGNSAPLIIREPFIACGPTECKHFALTHYAAQPGGYYNGTREDRNKLRHLISVKLGKIPTVETSIFHMAAWSGSACHDGKEWTYIGVDGPDSNALLKIKYGEAYTDTYHSYAKNILRTQESACNCIGGDCYLMITDGPASGVSECRFLKIREGRIIKEIFPTGRVKHTEECTCGFASNKTIECACRDNSYTAKRPFVKLNVETDTAEIRLMCTETYLDTPRPNDGSITGPCESDGDKGSGGIKGGFVHQRMASKIGRWYSRTMSKTKRMGMGLYVKYDGDPWTDSEALALSGVMVSMEEPGWYSFGFEIKDKKCDVPCIGIEMVHDGGKTTWHSAATAIYCLMGSGQLLWDTVTGVDMAL

SEQ ID NO: 29804 - protein, 466 aa, Artificial Sequence; identical to SEQ ID NO: 29770
  derived and/or modified protein sequence (wt) from neuraminidase__InfluenzaB__AGX23890

SEQ ID NO: 29805 - protein, 466 aa, Artificial Sequence; identical to SEQ ID NO: 28788
  derived and/or modified protein sequence (wt) from neuraminidase__InfluenzaB__AGX23901

SEQ ID NO: 29806 - protein, 466 aa, Artificial Sequence
  derived and/or modified protein sequence (wt) from neuraminidase__InfluenzaB__AGX23912
MLPSTIQTLTLFLTSGGVLLSLYVSASLSYLLYSDILLKFSQTEITAPIMPLDCANASNVQAVNRSAAKGVTLLLPEPEWTYPRLSCPGSTFQKALLISPHRFGETKGNSAPLIIREPFIACGPTECKHFALTHYAAQPGGYYNGTREDRNRLRHLISVKLGKIPTVENSIFHMAAWSGSACHDGKEWTYVGVDGPDSNALLKIKYGEAYTDTYHSYAKNILRTQESACNCIGGDCYLMITDGPASGISECRFLKIREGRIIKEIFPTGRVKHTEECTCGFASNKTIECACRDNSYTAKRPFVKLNVETDTAEIRLMCTETYLDTPRPNDGSITGPCGSDGDKGSGGIKGGFVHQRMASKIGRWYSRTMSKTKRMGMGLYVKYDGDPWTDSEALALSGVMVSMDEPGWYSFGFEIKDKKCDVPCIGIEMVHDGGKTTWHSAATAIYCLMGSGQLLWDTVTGVDMAL

SEQ ID NO: 29807 - protein, 466 aa, Artificial Sequence; identical to SEQ ID NO: 28960
  derived and/or modified protein sequence (wt) from neuraminidase__InfluenzaB__AGX23934

SEQ ID NO: 29808 - protein, 466 aa, Artificial Sequence
  derived and/or modified protein sequence (wt) from neuraminidase__InfluenzaB__AGX23945
MLPSTIQTLTLFLTSGGVLLSLYVSASLSYLLYSDILLKFSQTEITAPIMPLDCANASNVQAVNRSAAKGVTLLLPEPEWTYPRLSCPGSTFQKALLISPHRFGETKGNSAPLIIREPFIACGPTECKHFALTHYAAQPGGYYNGTREDRNKLRHLISVKLGKIPTVENSIFHMAAWSGSACHDGKEWTYVGVDGPDSNALLKIKYGEAYTDTYHSYAKNILRTQESACNCIGGDCYLMITDGPASGISECRFLKIREGRIIKEIFPTGRIKHTEECTCGFASNKTIECACRDNSYTAKRPFVKLNVETDTAEIRLMCTETYLDTPRPNDGSITGPCGSDGDKGSGGIKGGFVHQRMASKIGRWYSRTMSKTKRMGMGLYVKYDGDPWTDSEALALSGVMVSMDEPGWYSFGFEIKDKKCDVPCIGIEMVHDGGKTTWHSAATAIYCLMGSGQLLWDTVTGVDMAL

SEQ ID NO: 29809 - protein, 466 aa, Artificial Sequence
  derived and/or modified protein sequence (wt) from neuraminidase__InfluenzaB__AGX23956
MLPSTIQTLTLFLTSGGVLLSLYVSASLSYLLYSDILLKFSQTEITAPIMPLDCANASNVQAVNRSAAKGVTLLLPEPEWTYPRLSCPGSTFQKALLISPHRFGETKGNSAPLIIREPFIACGPTECKHFALTHYAAQPGGYYNGTREDRNKLRHLISVKLGKIPTVENSIFHMAAWSGSACHDGKEWTYIGIDGPDSNALLKIKYGEAYTDTYHSYAKNILRTQESACNCIGGDCYLMITDGPASGVSECRFLKIREGRIIKEIFPTGRVKHTEECTCGFASNKTIECACRDNSYTAKRPFVKLNVETDTAEIRLMCTETYLDTPRPNDGSITGPCESDGDKGSGGIKGGFVHQRMASKIGRWYSRTMSKTKRMGMGLYVKYDGDPWTDSEALALSGVMVSMEEPGWYSFGFEIKDKKCDVPCIGIEMVHDGGKTTWHSAATAIYCLMGSGQLLWDTVTGVDMAL

SEQ ID NO: 29810 - protein, 466 aa, Artificial Sequence; identical to SEQ ID NO: 29147
  derived and/or modified protein sequence (wt) from neuraminidase__InfluenzaB__AGX23967

SEQ ID NO: 29811 - protein, 466 aa, Artificial Sequence; identical to SEQ ID NO: 28960
  derived and/or modified protein sequence (wt) from neuraminidase__InfluenzaB__AGX23978

SEQ ID NO: 29812 - protein, 466 aa, Artificial Sequence
  derived and/or modified protein sequence (wt) from neuraminidase__InfluenzaB__AGX23989
MLPSTIQTLTLFLTSGGVLLSLYVSASLSYLLYSDILLKFSQTEITAPIMPLDCANASNVQAVNRSAAKGVTLLLPEPEWTYPRLSCPGSTFQKALLISPHRFGETKGNSAPLIIREPFIACGPTECKHFALTHYAAQPGGYYNGTREDRNKLRHLISVKLGKIPTVENSIFHMAAWSGSACHDGKEWTYIGVDGPDSNALLKIKYGEAYTDTYHSYAKNILRTQESACNCIGGDCYLMITDGPASGISECRFLKIREGRIIKEIFPTGRVKHTEECTCGFASNKTIECACRDNRYTAKRPFVKLNVETDKAEIRLMCTETYLDTPRPNDGSITGPCESDGDKGSGGIKGGFVHQRMASKIGRWYSRTMSKTKRMGMGLYVKYDGDPWTDSGALALSGVMVSIEEPGWYSFGFEIKDKKCDVPCIGIEMVHDGGKTTWHSAATAIYCLMGSGQLLWDTVTGVDMAL

SEQ ID NO: 29813 - protein, 466 aa, Artificial Sequence; identical to SEQ ID NO: 29770
  derived and/or modified protein sequence (wt) from neuraminidase__InfluenzaB__AGX24000

SEQ ID NO: 29814 - protein, 466 aa, Artificial Sequence
  derived and/or modified protein sequence (wt) from neuraminidase__InfluenzaB__AGX24011
MLPSTIQTLTLFLTSGGVLLSLYVSASLSYLLYSDILLKFSQTEITAPIMPLDYANASNVQAVNHSAAKGVTLLLPEPEWTYPRLSCPGSTFQKALLISPHRFGETKGNSAPLIIREPFIACGPTECKHFALTHYAAQPGGYYNGTREDRNKLRHLISVKLGKIPTVENSIFHMAAWSGSACHDGKEWTYIGVDGPDSNALLKIKYGEAYIDTYHSYAKNILRTQESACNCIGGDCYLMITDGPASGISECRFLKIREGRIIKEIFPTGRVKHTEECTCGFASNKTIECACRDNSYTAKRPFVKLNVETDTAEIRLMCTETYLDTPRPNDGSITGPCESDGDKGSGGIKGGFVHQRMASKIGRWYSRTMSKTKRMGMGLYVKYDGDPWTDSEALALSGVMVSMEEPGWYSFGFEIKDKKCDVPCIGIEMVHDGGKTTWHSAATAIYCLMGSGQLLWDTVTGVDMAL

SEQ ID NO: 29815 - protein, 466 aa, Artificial Sequence; identical to SEQ ID NO: 28960
  derived and/or modified protein sequence (wt) from neuraminidase__InfluenzaB__AGX24022

SEQ ID NO: 29816 - protein, 466 aa, Artificial Sequence
  derived and/or modified protein sequence (wt) from neuraminidase__InfluenzaB__AGX24033
MLPSTIQTLTLFLTSGGVLLSLYVSASLSYLLYSDILLKFSQTEITAQIMPLDCANASNVQAVNRSAAKGVTLLLPEPEWTYPRLSCPGSTFQKALLISPHRFGETKGNSAPLIIREPFIACGPTECKHFALTHYAAQPGGYYNGTREDRNKLRHLISVKLGKIPTVENSIFHMAAWSGSACHDGKEWTYIGVDGPDSNALLKIKYGEAYTDTYHSYAKNILRTQESACNCIGGDCYLMITDGPASGISECRFLKIREGRIIKEIFPTGRVKHTEECTCGFASNKTIECACRDNRYTAKRPFVKLNVETDKAEIRLMCTETYLDTPRPNDGSITGPCESDGDKGSGGIKGGFVHQRMASKIGRWYSRTMSKTKRMGMGLYVKYDGDPWTDSGALALSGVMVSIEEPGWYSFGFEIKDKKCDVPCIGIEMVHDGGKTTWHSAATAIYCLMGSGQLLWDTVTGVDMAL

SEQ ID NO: 29817 - protein, 466 aa, Artificial Sequence; identical to SEQ ID NO: 28960
  derived and/or modified protein sequence (wt) from neuraminidase__InfluenzaB__AGX24044

SEQ ID NO: 29818 - protein, 466 aa, Artificial Sequence
  derived and/or modified protein sequence (wt) from neuraminidase__InfluenzaB__AGX24055
MLPSTIQTLTLFLTSGGVLLSLYVSASLSYLLYSDILLKFSQTEITAPIMPLDCANASNVQAVNRSATKGVTLLLPELEWTYPRLSCPGSTFQKALLISPHRFGETKGNSAPLIIREPFVACGPTECKHFALTHYAAQPGGYYNGTREDRNKLRHLISVKLGKIPTVENSIFHMAAWSGSACHDGKEWTYIGVDGPNSNALLKIKYGEAYTDTYHSYAKNILRTQESACNCIGGDCYLMITDGPASGVSECRFLKIREGRIIKEIFPTGRVKHTEECTCGFASNKTIECACRDNSYTAKRPFVKLNVETDTAEIRLMCTETYLDTPRPNDGSITGPCESDGDKGSGGIKGGFVHQRMASKIGRWYSRTMSKTKRMGMGLYVKYDGDPWTDSEALALSGVMVSMEEPGWYSFGFEIKDKKCDVPCIGIEMVHDGGKTTWHSAATAIYCLMGSGQLLWDTVTGVDMAL

SEQ ID NO: 29819 - protein, 466 aa, Artificial Sequence; identical to SEQ ID NO: 28817
  derived and/or modified protein sequence (wt) from neuraminidase__InfluenzaB__AGX24066

SEQ ID NO: 29820 - protein, 466 aa, Artificial Sequence
  derived and/or modified protein sequence (wt) from neuraminidase__InfluenzaB__AGX24077
MLPSTIQTLTLFLTSGGVLLSLYVSASLSYLLYSDILLKFSQTEITAPIMPLDCANASNVQAVNRSAAKGVTLLLPEPEWTYPRLSCPGSTFQKALLISPHRFGETKGNSAPLIIREPFIACGPTECKHFALTHYAAQPGGYYNGTREDRNKLRHLISVKLGKIPTVENSIFHMAAWSGSACHDGKEWTYIGVDGPDSNALLKIKYGEAYTDTYHSYAKNILRTQESACNCIGGNCYLMITDGPASGISECRFLKIREGRIIKEIFPTGRVKHTEECTCGFASNKTIECACRDNRYTAKRPFVKLNVETDKAEIRLMCTETYLDTPRPNDGSITGPCESDGDKGSGGIKGGFVHQRMASKIGRWYSRTMSKTKRMGMGLYVKYDGDPWADSGALALSGVMVSIEEPGWYSFGFEIKDKKCDVPCIGIEMVHDGGKTTWHSAATAIYCLMGSGQLLWDTVTGVDMAL

SEQ ID NO: 29821 - protein, 466 aa, Artificial Sequence
  derived and/or modified protein sequence (wt) from neuraminidase__InfluenzaB__AGX24088
MLPSTIQTLTLFITSGGVLLSLYVSASLSYLLYSDILLKFSQTEITAPIMPLDCANASNVQAVNRSAAKGVTLLLPEPEWTYPRLSCPGSTFQKALLISPHRFGETKGNSAPLIIREPFIACGPTECKHFALTHYAAQPGGYYNGTREDRNKLRHLISVKLGKIPTVENSIFHMAAWSGSACHDGKEWTYVGVDGPDSDALLKIKYGEAYTDTYHSYAKNILRTQESACNCIGGDCYLMITDGPASGISECRFLKIREGRIIKEIFPTGRVKHTEECTCGFASNKTIECACRDNSYTAKRPFVKLNVETDTAEIRLMCTETYLDTPRPNDGSITGPCGSDGDKGSGGIKGGFVHQRMASKIGRWYSRTMSKTKRMGMGLYVKYDGDPWTDSEALALSGVMVSMDEPGWYSFGFEIKDKKCDVPCIGIEMVHDGGKTTWHSAATAIYCLMGSGQLLWDTVTGVDMAL

SEQ ID NO: 29822 - protein, 466 aa, Artificial Sequence; identical to SEQ ID NO: 28960
  derived and/or modified protein sequence (wt) from neuraminidase__InfluenzaB__AGX24099

SEQ ID NO: 29823 - protein, 466 aa, Artificial Sequence
  derived and/or modified protein sequence (wt) from neuraminidase__InfluenzaB__AGX24110
MLPSTIQTLTLFLTSGGVLLSLYVSASLSYLLYSDILLKFSQTEITAPIMPLDCANASNVQAVNRSAAKGVTLLLPEPEWTYPRLSCPGSTFQKALLISPHRFGETKGNSAPLIIREPFIACGPTECKHFALTHYAAQPGGYYNGTREDRNKLRHLISVKLGKIPTVENSIFHMAAWSGSACHDGKEWTYVGVDGPDSNALLKIKYGEAYTDTYHSYAKNILRTQESACNCIGGDCYLMITDGPASGISECRFLKIREGRIIKEIFPTGRVKHTEECTCGFASNKTIECTCRDNSYTAKRPFVKLNVETDTAEIRLMCTETYLDTPRPNDGSITGPCGSDGDKGSGGIKGGFVHQRMASKIGRWYSRTMSKTKRMGMGLYVKYDGDPWTDSEALALSGVMVSMDEPGWYSFGFEIKDKKCDVPCIGIEMVHDGGKTTWHSAATAIYCLMGSGQLLWDTVTGVDMAL

SEQ ID NO: 29824 - protein, 466 aa, Artificial Sequence
  derived and/or modified protein sequence (wt) from neuraminidase__InfluenzaB__AGX24121
MLPSTIQTLTLFLTSGGVLLSLYVSASLSYLLYSDILLKFSQTEITAPIMPLDYANASNVQAVNHSAAKGVTLLLPEPEWTYPRLSCPGSTFQKALLISPHRFGETKGNSAPLIIREPFIACGPTECKHFALTHYAAKPGGYYNGTREDRNKLRHLISVKLGKIPTVENSIFHMAAWSGSACHDGKEWTYIGVDGPDSNALLKIKYGEAYTDTYHSYAKNILRTQESACNCIGGDCYLMITDGPASGISECRFLKIREGRIIKEIFPTGRVKHTEECTCGFASNKTIECACRDNSYTAKRPFVKLNVETDTAEIRLMCTETYLDTPRPNDGSITGPCESDGDKGSGGIKGGFVHQRMASKIGRWYSRTMSKTKRMGMGLYVKYDGDPWTDSEALALSGVMVSMEEPGWYSFGFEIKDKKCDVPCIGIEMVHDGGKTTWHSAATAIYCLMGSGQLLWDTVTGVDMAL

SEQ ID NO: 29825 - protein, 466 aa, Artificial Sequence
  derived and/or modified protein sequence (wt) from neuraminidase__InfluenzaB__AGX24132
MLPSTIQTLTLFLTSGGVLLSLYVSASLSYLLYSDILLKFSRTEITAPIMPLDCANASNVQAVNRSATKGVTLPLPEPEWTYPRLSCPGSTFQKALLISPHRFGETKGNSAPLIIREPFIACGPKECKHFALTHYAAQPGGYYNGTREDRNKLRHLISVKLGKIPTVENSIFHMAAWSGSACHDGREWTYIGVDGPDSNALLKIKYGEAYTDTYHSYAKNILRTQESACNCIGGDCYLMITDGPALGISECRFLKIREGRIIKEIFPTGRVKHTEECTCGFASNKTIECACRDNSYTAKRPFVKLNVETDTAEIRLMCTETYLDTPRPNDGSITGPCESNGDKGSGGIKGGFVHQRMASKIGRWYSRTMSKTKRMGMGLYVKYDGDPWTDSEALALSGVMVSMEEPGWYSFGFEIKDKKCDVPCIGIEMVHDGGKTTWHSAATAIYCLMGSGQLLWDTVTGVNMTL

SEQ ID NO: 29826 - protein, 466 aa, Artificial Sequence
  derived and/or modified protein sequence (wt) from neuraminidase__InfluenzaB__AGX24143
MLPSTIQTLTLFLTSGGVLLSLYVSASLSYLLYSDILLKFSQTEITAPIMPLDCANASNVQAVNRSAAKGVTLLLPEPEWTYPRLSCPGSTFQKALLISPHRFGETKGNSAPLIIREPFIACGPTECKHFALTHYAAQPGGYYNGTREDRNKLRHLISVKLGKIPTVENSIFHMAAWSGSACHDGKEWTYIGVDGPDGNALLKIKYGEAYTDTYHSYAKNILRTQESACNCIGGDCYLMITDGPASGISECRFLKIREGRIIKEIFPTGRVKHTEECTCGFASNKTIECACRDNSYTAKRPFVKLNVETDTAEIRLMCTETYLDTPRPNDGSITGPCESDGDKGSGGIKGGFVHQRMASKIGRWYSRTMSKTKRMGMGLYVKYDGDPWTDSEALALSGVMVSMEEPGWYSFGFEIKDKKCDVPCIGIEMVHDGGKTTWHSAATAIYCLMGSGQLLWDTVTGVDMAL

SEQ ID NO: 29827 - protein, 466 aa, Artificial Sequence; identical to SEQ ID NO: 28960
  derived and/or modified protein sequence (wt) from neuraminidase__InfluenzaB__AGX24154

SEQ ID NO: 29828 - protein, 466 aa, Artificial Sequence
  derived and/or modified protein sequence (wt) from neuraminidase__InfluenzaB__AGX24165
MLPSTIQTLTLFLTSGGVLLSLYVSASLSYLLYSDILLKFSQTEITAPIMPLDYANASNVQAVNHSAAKGVTLLLPEPEWTYPRLSCPGSTFQKALLISPHRFGETKGNSAPLIIREPFIACGPTECKHFALTHYAAQPGGYYNGTREDRNKLRHLISVKLGKIPTVENSIFHMAAWSGSACHDGKEWTYIGVDGPDSNALLKIKYGEAYTDTYHSYAKNILRTQESACNCIGGDCYLMITDGPASGISECRFLKIREGRIIKEIFPTGRVKHTEECTCGFASNKTIECACRDNSYTAKRPFVKLNVETDTAEIRLMCTETYLDTPRPNDGSITGPCESDGDKGSGGIKGGFVHQRMASKIGRWYSRTMSKTKRMGMGLYVKYDGDPWTDSEALALNGVMVSMEEPGWYSFGFEIKDKKCDVPCIGIEMVHDGGKTTWHSAATAIYCLMGSGQLLWDTVTGVDMAL

SEQ ID NO: 29829 - protein, 466 aa, Artificial Sequence; identical to SEQ ID NO: 28817
  derived and/or modified protein sequence (wt) from neuraminidase__InfluenzaB__AGX24176

SEQ ID NO: 29830 - protein, 466 aa, Artificial Sequence; identical to SEQ ID NO: 28817
  derived and/or modified protein sequence (wt) from neuraminidase__InfluenzaB__AGX24187

SEQ ID NO: 29831 - protein, 466 aa, Artificial Sequence; identical to SEQ ID NO: 28817
  derived and/or modified protein sequence (wt) from neuraminidase__InfluenzaB__AGX24198

SEQ ID NO: 29832 - protein, 466 aa, Artificial Sequence; identical to SEQ ID NO: 29147
  derived and/or modified protein sequence (wt) from neuraminidase__InfluenzaB__AGX24231

SEQ ID NO: 29833 - protein, 466 aa, Artificial Sequence; identical to SEQ ID NO: 28817
  derived and/or modified protein sequence (wt) from neuraminidase__InfluenzaB__AGX24242

SEQ ID NO: 29834 - protein, 466 aa, Artificial Sequence
  derived and/or modified protein sequence (wt) from neuraminidase__InfluenzaB__AGX24275
MLPSTIQTLTLFLTSGGVLLSLYVSASLSYLLYSDILLKFSQTEITAPIMPLDCANASNVQAVNRSAAKGVTLLLPEPEWTYPRLSCPGSTFQKALLISPHRFGETKGNSAPLIIREPFIACGPTECKHFALTHYAAQPGGYYNGTREDRNKLRHLISVKLGKIPTVENSIFHMAAWSGSACHDGKEWTYIGVDGPDSNALLKIKYGEAYTDTYHSYAKNILRTQESACNCIGGDCYLMITDGPASGISECRFLKIREGRIIKEIFPTGRVKHTEECTCGFASNRTIECACRDNSYTAKRPFVKLNVETDTAEIRLMCTETYLDTPRPNDGSITGPCESDGDKGSGGIKGGFVHQRMASKIGRWYSRTMSKTRRMGMGLYVKYDGDPWTDSEALALSGVMVSMEEPGWYSFGFEIKDKKCDVPCIGIEMVHDGGKTTWHSAATAIYCLMGSGQLLWDTVTGVDMAL

SEQ ID NO: 29835 - protein, 466 aa, Artificial Sequence; identical to SEQ ID NO: 29412
  derived and/or modified protein sequence (wt) from neuraminidase__InfluenzaB__AGX24286

SEQ ID NO: 29836 - protein, 466 aa, Artificial Sequence
  derived and/or modified protein sequence (wt) from neuraminidase__InfluenzaB__AGX24297
MLPSTIQTLTLFLTSGGVLLSLYVSASLSYLLYSDILLKFSQTEITAPIMPLDCANASNVQAVNRSAAKGVTLLLPEPEWTYPRLSCPGSTFQKALLISPHRFGETRGNSAPLIIREPFIACGPTECKHFALTHYAAQPGGYYNGTREDRNKLRHLISVKLGKIPTVENSIFHMAAWSGSACHDGKEWTYIGVDGPDSNALLKIKYGEAYTDTYHSYAKNILRTQESACNCIGGDCYLMITDGPASGISECRFLKIREGRIIKEIFPTGRVKHTEECTCGFASNKTIECACRDNSYTAKRPFVKLNVETDTAEIRLMCTETYLDTPRPNDGSITGPCESDGDKGSGGIKGGFVHQRMASKIGRWYSRTMSKTKRMGMGLYVKYDGDPWTDSEALALSGVMVSMEEPGWYSFGFEIKDKKCDVPCIGIEMVHDGGKTTWHSAATAIYCLMGSGQLLWDTVTGVDMAL

SEQ ID NO: 29837 - protein, 466 aa, Artificial Sequence; identical to SEQ ID NO: 29412
  derived and/or modified protein sequence (wt) from neuraminidase__InfluenzaB__AGX24319

SEQ ID NO: 29838 - protein, 466 aa, Artificial Sequence
  derived and/or modified protein sequence (wt) from neuraminidase__InfluenzaB__AGX24330
MLPSTIQTLTLFLTSGGVLLSLYVSASLSYLLYSDILLKFSQTEITAPIMPLDYANASNVQAVNHSAAKGVTLLLPEPEWTYPRLSCPGSTFQKALLISPHRFGETKGNSAPLIIREPFIACGPTECKHFALTHYAAQPGGYYNGTREDRNKLRHLISVKLGKIPTVENSIFHMAAWSGSACHDGKEWTYIGVDGPDSNALLKIKYGEAYTDTYHSYAKNILRTQESACNCIGGDCYLMITDGPASGISECRFLKIREGRIIKEIFPTGRVKHTEECTCGFASNKTIECTCRDNSYTAKRPFVKLNVETDTAEIRLMCTETYLDTPRPNDGSITGPCESDGDKGSGGIKGGFVHQRMASKIGRWYSRTMSKTKRMGMGLYVKYDGDPWTDSEALALSGVMISMEEPGWYSFGFEIKDKKCDVPCIGIEMVHDGGKTTWYSAATAIYCLMGSGQLLWDTVTGVDMAL

SEQ ID NO: 29839 - protein, 466 aa, Artificial Sequence
  derived and/or modified protein sequence (wt) from neuraminidase__InfluenzaB__AGX24341
MLPSTIQTLTLFLTSGGVLLSLYVSASLSYLLYSDILLKFSRTEITAPIMPLDCANASNVQAVNRSATKGVTLLLPEPEWTYPRLSCPGSTFQKALLISPHRFGETKGNSAPLIIREPFIACGPKECKHFALTHYAAQPGGYYNGTREDRNKLRHLISVKLGKIPTVENSIFHMAAWSGSACHDGREWTYIGVDGPDSNALLKIKYGEAYTDTYHSYAKNILRTQESACNCIGGDCYLMITDGPASGISECRFLKIREGRIIKEIFPTGRVKHTEECTCGFASNKTIECACRDNSYTAKRPFVKLNVETDTAEIRLMCTETYLDTPRPNDGSITGPCESNGDKGSGGIKGGFVHQRMASKIGRWYSRTMSKTKRMGMGLYVKYDGDPWTDSEALTLSGVMVSMEEPGWYSFGFEIKDKKCDVPCIGIEMVHDGGKTTWHSAATAIYCLMGSGQLLWDTVTGVNMTL

SEQ ID NO: 29840 - protein, 466 aa, Artificial Sequence
  derived and/or modified protein sequence (wt) from neuraminidase__InfluenzaB__AGX24352
MLPSTIQTLTLFLTSGGVLLSLYVSASLSYLLYSDILLKFSRTEITAPIMPLDCANASNVQAVNRSATKGVTLLLPEPEWTYPRLSCPGSTFQKALLISPHRFGETKGNSAPLIIREPFIACGPKECKHFALTHYAAQPGGYYNGTREDRNKLRHLISVKLGKIPTVENSIFHMAAWSGSACHDGREWTYIGVDGPDNNALLKIKYGEAYTDTYHSYAKNILRTQESACNCIGGDCYLMITDGPASGISECRFLKIREGRIIKEIFPTGRVKHTEECTCGFASNKTIECACRDNSYTAKRPFVKLNVETDTAEIRLMCTETYLDTPRPNDGSITGPCESNGDKGSGGIKGGFVHQRMASKIGRWYSRTMSKTKRMGMGLYVKYDGDPWTDSEALALSGVMVSMEEPGWYSFGFEIKDKKCDVPCIGIEMVHDGGKTTWHSAATAIYCLMGSGQLLWDTVTGVNMTL

SEQ ID NO: 29841 - protein, 466 aa, Artificial Sequence; identical to SEQ ID NO: 29836
  derived and/or modified protein sequence (wt) from neuraminidase__InfluenzaB__AGX24363

SEQ ID NO: 29842 - protein, 466 aa, Artificial Sequence; identical to SEQ ID NO: 29840
  derived and/or modified protein sequence (wt) from neuraminidase__InfluenzaB__AGX24374

SEQ ID NO: 29843 - protein, 466 aa, Artificial Sequence
  derived and/or modified protein sequence (wt) from neuraminidase__InfluenzaB__AGX24385
MLPSTIQTLTLFLTSGGVLLSLYVSASLSYLLYSDILLKFSRTEITAPTMPLDCANASNVQAVNRSATKGVTLLLPEPEWTYPRLSCPGSTFQKALLISPHRFGETKGNSAPLIIREPFIACGPKECKHFALTHYAAQPGGYYNGTREDRNKLRHLISVKLGKIPTVENSIFHMAAWSGSACHDGREWTYIGVDGPDSNALLKIKYGEAYTDTYHSYAKNILRTQESACNCIGGDCYLMITDGPASGISECRFLKIREGRIIKEIFPTGRVKHTEECTCGFASNKTIECACRDNSYTAKRPFVKLNVETDTAEIRLMCTETYLDTPRPNDGSITGPCESNGDKGSGGIKGGFVHQRMASKIGRWYSRTMSKTKRMGMGLYVKYDGDPWTDSEALALSGVMVSMEEPGWYSFGFEIKDKKCDVPCIGIEMVHDGGKTTWHSAATAIYCLMGSGQLLWDTVTGVNMTL

SEQ ID NO: 29844 - protein, 466 aa, Artificial Sequence
  derived and/or modified protein sequence (wt) from neuraminidase__InfluenzaB__AGX24396
MLPSTIQTLTLFLTSGGVLLSLYVSASLSYLLYSDILLKFSQTEITAPIMPLDCANASNVQAVNRSAAKGVTLLLPEPEWTYPRLSCPGSTFQKALLISPHRFGETKGNSAPLIIREPFIACGPTECKHFALTHYAAQPGGYYNGTREDRNKLRHLISVKLGKIPTVENSIFHMAAWSGSACHDGKEWTYIGVDGPDSNALLKIKYGEAYTDTYHSYAKNILRTQESACNCIGGDCYLMITDGPASGISECRFLKIREGRIIKEIFPTGRVKHTEECTCGFASNKTIECACRDNRYTAKRPFVKLNVETDTAEIRLMCTETYLDTPRPNDGSITGPCESDGDKGSGGIKGGFVHQRMASKIGRWYSRTMSKTKRMGMGLYVKYDGDPWTDSGALALSGVMVSIEEPGWYSFGFEIKDKKCDVPCIGIEMVHDGGKTTWHSAATAIYCLMGSGQLLWDTVTGVDMAL

SEQ ID NO: 29845 - protein, 466 aa, Artificial Sequence; identical to SEQ ID NO: 29844
  derived and/or modified protein sequence (wt) from neuraminidase__InfluenzaB__AGX24407

SEQ ID NO: 29846 - protein, 466 aa, Artificial Sequence; identical to SEQ ID NO: 28817
  derived and/or modified protein sequence (wt) from neuraminidase__InfluenzaB__AGX24418

SEQ ID NO: 29847 - protein, 466 aa, Artificial Sequence; identical to SEQ ID NO: 28788
  derived and/or modified protein sequence (wt) from neuraminidase__InfluenzaB__AGX24429

SEQ ID NO: 29848 - protein, 466 aa, Artificial Sequence
  derived and/or modified protein sequence (wt) from neuraminidase__InfluenzaB__AGX24440
MLPSTIQTLTLFLTSGGVLLSLYVSASLSYLLYSDILLKFSQTEITAPIMPLDCANASNVQAVNRSAAKGVTLLLPEPEWTYPRLSCPGSTFQKALLISPHRFGETKGNSAPLIIREPFIACGTTECKHFALTHYAAQPGGYYNGTREDRNKLRHLISVKLGKIPTVENSIFHMAAWSGSACHDGKEWTYIGVDGPDSNALLKIKYGEAYTDTYHSYAKNILRTQESACNCIGGDCYLMITDGPASGISECRFLKIREGRIIKEIFPTGRVKHTEECTCGFASNKTIECACRDNRYTAKRPFVKLNVETDTAEIRLMCTETYLDTPRPNDGSITGPCESDGDKGSGGIKGGFVHQRMASKIGRWYSRTMSKTKRMGMGLYVKYDGDPWTDSGALALSGVMVSIEEPGWYSFGFEIKDKKCDVPCIGIEMVHDGGKTTWHSAATTIYCLMGSGQLLWDTVTGVDMAL

SEQ ID NO: 29849 - protein, 466 aa, Artificial Sequence; identical to SEQ ID NO: 29412
  derived and/or modified protein sequence (wt) from neuraminidase__InfluenzaB__AGX24451

SEQ ID NO: 29850 - protein, 466 aa, Artificial Sequence
  derived and/or modified protein sequence (wt) from neuraminidase__InfluenzaB__AGX24462
MLPSTIQTLTLFLTSGGVLLSLYVSASLSYLLYSDILLKFSQTEITAPIMPLDYANASNVQAVNHSAAKGVTLLLPEPEWTYPRLSCPGSTFQKALLISPHRFGETKGNSAPLIIREPFIACGPTECKHFALTHYAAQPGGYYNGTREDRNKLRHLISVKLGKIPTVENSIFHMAAWSGSACHDGKEWTYIGVDGPDSNALLKIKYGEAYTDTYHSYAKNILRTQESACNCIGGDCYLMITDGPASGISECRFLKIREGRIIKEIFPTGRVKHTEECTCGFASNKTIECACRDNSYTAKRPFVKLNVETDTAEIRLMCTETYLDTPRPNDGSITGPCESDGDKGSGGIKGGFVHQRMASKIGRWYSRTMSKTKRMGMGLYVKYDGDPWTDSEALALSGVMISMEEPGWYSFGFEIKDKKCDVPCIGIEMVHDGGKTTWHSAATAIYCLMGSGQLLWDTVTGVDMAL

SEQ ID NO: 29851 - protein, 466 aa, Artificial Sequence; identical to SEQ ID NO: 29850
  derived and/or modified protein sequence (wt) from neuraminidase__InfluenzaB__AGX24473

SEQ ID NO: 29852 - protein, 466 aa, Artificial Sequence
  derived and/or modified protein sequence (wt) from neuraminidase__InfluenzaB__AGX24484
MLPSTIQTLTLFLTSGGVLLSLYVSASLSYLLYSDILLKFSQTEITAPIMPLDCANASNVQAVNRSAAKGVTLLLPEPEWTYPRLSCPGSTFQKALLISPHRFGETKGNSAPLIIREPFIACGPTECKHFALTHYAAQPGGYYNGTREDRNKLRHLISVKLGKIPTVENSIFHMAAWSGSACHDGKEWTYIGVDGPDSNALLKIKYGEAYTDTYHSYAKNILRTQESACNCIGGDCYLMITDGPASGISECRFLKIREGRIIKEIFPTGRVKHTEECTCGFASNKTIECACRDNGYTAKRPFVKLNVETDTAEIRLMCTETYLDTPRPNDGSITGPCESDGDKGSGGIKGGFVHQRMASKIGRWYSRTMSKTRRMGMGLYVKYDGDPWTDSEALALSGVMVSMEEPGWYSFGFEIKDKKCDVPCIGIEMVHDGGKTTWHSAATAIYCLMGSGQLLWDTVTGVDMAL

SEQ ID NO: 29853 - protein, 466 aa, Artificial Sequence
  derived and/or modified protein sequence (wt) from neuraminidase__InfluenzaB__AGX24495
MLPSTIQTLTLFLTSGGVLLSLYVSASLSYLLYSDILLKFSQTEITAPIMPLDCANASNVQVVNRSAAKGVTLLLPEPEWTYPRLSCPGSTFQKALLISPHRFGETKGNSAPLIIREPFIACGPTECKHFALTHYAAQPGGYYNGTREDRNKLRHLISVKLGKIPTVENSIFHMAAWSGSACHDGKEWTYIGVDGPDSNALLKIKYGEAYTDTYHSYAKNILRTQESACNCIGGDCYLMITDGPASGISECRFLKIREGRIIKEIFPTGRVKHTEECTCGFASNKTIECACRDNSYTAKRPFVKLNVETDTAEIRLMCTETYLDTPRPNDGSITGPCESDGDKGSGGIKGGFVHQRMASKIGRWYSRTMSKTRRMGMGLYVKYDGDPWTDSEALALSGVMVSMEEPGWYSFGFEIKDKKCDVPCIGIEMVHDGGKTTWHSAATAIYCLMGSGQLLWDTVTGVDMAL

SEQ ID NO: 29854 - protein, 466 aa, Artificial Sequence; identical to SEQ ID NO: 29412
  derived and/or modified protein sequence (wt) from neuraminidase__InfluenzaB__AGX24506

SEQ ID NO: 29855 - protein, 466 aa, Artificial Sequence
  derived and/or modified protein sequence (wt) from neuraminidase__InfluenzaB__AGX24517
MLPSTIQTLTLFLTSGGVLLSLYVSASLSYLLYSDILLKFSQTEITAPIMPLDCANASNVQAVNHSAAKGVTLLLPEPEWTYPRLSCPGSTFQKALLISPHRFGETKGNSAPLIIREPFIACGPTECKHFALTHYAAQPGGYYNGTREDRNKLRHLISVKLGKIPTVENSIFHMAAWSGSACHDGKEWTYIGVDGPDSNALLKIKYGEAYTDTYHSYAKNILRTQESACNCIGGDCYLMITDGPASGVSECRFLKIREGRIIKEIFPTGRVKHTEECTCGFASNKTIECACRDNSYTAKRPFVKLNVETDTAEIRLMCTETYLDTPRPNDGSITGPCESDGDKGSGGIKGGFVHQRMASKIGRWYSRTMSKTKRMGMGLYVKYDGDPWTDSEALALSGVMVSMEEPGWYSFGFEIKDKKCDVPCIGIEMVHDGGKTTWHSAATAIYCLMGSGQLLWDTVTGVDMAL

SEQ ID NO: 29856 - protein, 466 aa, Artificial Sequence; identical to SEQ ID NO: 29412
  derived and/or modified protein sequence (wt) from neuraminidase__InfluenzaB__AGX24528

SEQ ID NO: 29857 - protein, 466 aa, Artificial Sequence; identical to SEQ ID NO: 29840
  derived and/or modified protein sequence (wt) from neuraminidase__InfluenzaB__AGX24539

SEQ ID NO: 29858 - protein, 466 aa, Artificial Sequence
  derived and/or modified protein sequence (wt) from neuraminidase__InfluenzaB__AGX24550
MLPSTIQTLTLFLTSGGVLLSLYVSASLSYLLYSDILLKFSQTEITAPIMPLDCANASNVQAVNRSAAKGVTLLIPEPEWTYPRLSCPGSTFQKALLISPHRFGETKGNSAPLIIREPFIACGPTECKHFALTHYAAQPGGYYNGTREDRNKLRHLISVKLGKIPTVENSIFHMAAWSGSACHDGKEWTYIGVDGPDSNALLKIKYGEAYTDTYHSYAKNILRTQESACNCIGGDCYLMITDGPASGISECRFLKIREGRIIKEIFPTGRVKHTEECTCGFASNKTIECACRDNSYTAKRPFVKLNVETDTAEIRLMCTETYLDTPRPNDGSITGPCESDGDKGSGGIKGGFVHQRMASKIGRWYSRTMSKTKRMGMGLYVKYDGDPWTDSEALALSGVMVSMEEPGWYSFGFEIKDKKCDVPCIGIEMVHDGGKTTWHSAATAIYCLMGSGQLLWDTVTGVDMAL

SEQ ID NO: 29859 - protein, 466 aa, Artificial Sequence; identical to SEQ ID NO: 29850
  derived and/or modified protein sequence (wt) from neuraminidase__InfluenzaB__AGX24561

SEQ ID NO: 29860 - protein, 466 aa, Artificial Sequence; identical to SEQ ID NO: 28817
  derived and/or modified protein sequence (wt) from neuraminidase__InfluenzaB__AGX24572

SEQ ID NO: 29861 - protein, 466 aa, Artificial Sequence
  derived and/or modified protein sequence (wt) from neuraminidase__InfluenzaB__AGX24583
MLPSTIQTLTLFLTSGGVLLSLYVSASLSYLLYSDILLKFSQTEITAPIMPLDCANASNVQAVNRSAAKGVTLLLPEPEWTYPRLSCPGSTFQKALLISPHRFGETKGNSAPLIIREPFIACGPTECKHFALTHYAAQPGGYYNGTREDRNKLRHLISVKLGKIPTVENSIFHMAAWSGSACHDGKEWTYIGVDGPDSNALLKIKYGEAYTDTYHSYAKNILRTQESACNCIGGDCYLMITDGPASGISECRFLKIREGRIIKEIFPTGRVKHTEECTCGFASNKTIECACRDNSYTAKRPFVKLNVETDTAEIRLMCTETYLDTPRPNDGSITGPCESDGDKGSGGIKGGFVHQRMASKIGRWYSRTMSKTRRMGMGLYVKYDGDPWTDSGALALSGVMVSIEEPGWYSFGFEIKDKKCDVPCIGIEMVHDGGKTTWHSAATAIYCLMGSGQLLWDTVTGVDMAL

SEQ ID NO: 29862 - protein, 466 aa, Artificial Sequence; identical to SEQ ID NO: 29412
  derived and/or modified protein sequence (wt) from neuraminidase__InfluenzaB__AGX24594

SEQ ID NO: 29863 - protein, 466 aa, Artificial Sequence; identical to SEQ ID NO: 29412
  derived and/or modified protein sequence (wt) from neuraminidase__InfluenzaB__AGX24605

SEQ ID NO: 29864 - protein, 466 aa, Artificial Sequence; identical to SEQ ID NO: 29412
  derived and/or modified protein sequence (wt) from neuraminidase__InfluenzaB__AGX24616

SEQ ID NO: 29865 - protein, 466 aa, Artificial Sequence; identical to SEQ ID NO: 29836
  derived and/or modified protein sequence (wt) from neuraminidase__InfluenzaB__AGX24627

SEQ ID NO: 29866 - protein, 466 aa, Artificial Sequence; identical to SEQ ID NO: 29412
  derived and/or modified protein sequence (wt) from neuraminidase__InfluenzaB__AGX24638

SEQ ID NO: 29867 - protein, 466 aa, Artificial Sequence
  derived and/or modified protein sequence (wt) from neuraminidase__InfluenzaB__AGX24660
MLPSTIQTLTLFLTSGGVLLSLYVSASLSYLLYSDILLKFSRTEITAPIMPLDCANASNVQAVNRSATKGVTLLLPEPEWTYPRLSCPGSTFQKALLISPHRFGETKGNSAPLIIREPFIACGPKECKHFALTYYAAQPGGYYNGTREDRNKLRHLISVKLGKIPTVENSIFHMAAWSGSACHDGREWTYIGVDGPDSNALLKIKYGEAYTDTYHSYAKNILRTQESACNCIGGDCYLMITDGPASGISECRFLKIREGRIIKEIFPTGRVKHTEECTCGFASNKTIECACRDNSYTAKRPFVKLNVETDTAEIRLMCTETYLDTPRPNDGSITGPCESNGDKGSGGIKGGFVHQRMASKIGRWYSRTMSKTKRMGMGLYVKYDGDPWTDSEALALSGVMVSMEEPGWYSFGFEIKDKKCDVPCIGIEMVHDGGKTTWHSAATAIYCLMGSGQLLWDTVTGVNMTL

SEQ ID NO: 29868 - protein, 466 aa, Artificial Sequence
  derived and/or modified protein sequence (wt) from neuraminidase__InfluenzaB__AGX24671
MLPSTIQTLTLFLTSGGVLLLLYVSASLSYLLYSDILLKFSQTEITAPIMPLDCANASNVQAVNRSAAKGVTLLLPEPEWTYPRLSCPGSTFQKALLISPHRFGETKGNSAPLIIREPFIACGPTECKHFALTHYAAQPGGYYNGTREDRNKLRHLISVKLGKIPTVENSIFHMAAWSGSACHDGKEWTYIGVDGPDSNALLKIKYGEAYTDTYHSYAKNILRTQESACNCIGGDCYLMITDGPASGISECRFLKIREGRIIKEIFPTGRVKHTEECTCGFASNKTIECACRDNSYTAKRPFVKLNVETDTAEIRLMCTETYLDTPRPNDGSITGPCESDGDKGSGGIKGGFVHQRMASKIGRWYSRTMSKTKRMGMGLYVKYDGDPWTDSEALALSGVMVSMEEPGWYSFGFEIKDKKCDIPCIGIEMVHDGGKTTWHSAATAIYCLMGSGQLLWDTVTGVDMAL

SEQ ID NO: 29869 - protein, 466 aa, Artificial Sequence
  derived and/or modified protein sequence (wt) from neuraminidase__InfluenzaB__AGX24682
MLPSTIQTLTLFLTSGGVLLSLYVSASLSYLLYSDILLKFSRTEITAPIMPLDCANASNVQAVNRSATKGVTLLLPEPEWTYPRLSCPGSTFQKALLISPHRFGETKGNSAPLIIREPFIACGPKECKHFALTHYAAQPGGYYNGTREDRNKLRHLISVKLGKIPTVENSIFHMAAWSGSACHDGREWTYIGVDGPDSNALLKIKYGEAYTDTYHSYAKNILRTQESACNCIGGDCYLMITDGPASGISECRFLKIREGRIIKEIFPTGRVKHTEECTCGFASNKTIECACRDNSYTAKRPFVKLNVETDTAEIRLMCTETYLDTPRPNDGSITGPCESNGDKGSGGIKGGFVHQRMASKIGRWYSRTMSKTKRMGMGLYVKYDGDPWTDSEALVLSGVMVSMEEPGWYSFGFEIKDKKCDVPCIGIEMVHDGGKTTWHSAATAIYCLMGSGQLLWDTVTGVNMTL

SEQ ID NO: 29870 - protein, 466 aa, Artificial Sequence; identical to SEQ ID NO: 29412
  derived and/or modified protein sequence (wt) from neuraminidase__InfluenzaB__AGX24693

SEQ ID NO: 29871 - protein, 466 aa, Artificial Sequence; identical to SEQ ID NO: 29412
  derived and/or modified protein sequence (wt) from neuraminidase__InfluenzaB__AGX24704

SEQ ID NO: 29872 - protein, 466 aa, Artificial Sequence; identical to SEQ ID NO: 29412
  derived and/or modified protein sequence (wt) from neuraminidase__InfluenzaB__AGX24715

SEQ ID NO: 29873 - protein, 466 aa, Artificial Sequence
  derived and/or modified protein sequence (wt) from neuraminidase__InfluenzaB__AGX24737
MLPSTIQTLTLFLTSGGVLLSLYVSASLSYLLYSDILLKFSQTEITAPIMPLDCANASNVQAVNRSAAKGVTLLLPEPEWTYPRLSCPGSTFQKALLISPHRFGETKGNSAPLIIREPFIACGTTECKHFALTHYAAQPGGYYNGTREDRNKLRHLISVKLGKIPTVENSIFHMAAWSGSACHDGKEWTYIGVDGPDSNALLKIKYGEAYTDTYHSYAKNILRTQESACNCIGGDCYLMITDGPASGISECRFLKIREGRIIKEIFPTGRVKHTEECTCGFASNKTIECACRDNRYTAKRPFVKLNVETDTAEIRLMCTETYLDTPRPNDGSITGPCESDGDKGSGGIKGGFVHQRMASKIGRWYSRTMSKTKRMGMGLYVKYDGDPWTDSGALALSGVMVSIEEPGWYSFGFEIKDKKCDVPCIGIEMVHDGGKTTWHSAATAIYCLMGSGQLLWDTVTGVDMAL

SEQ ID NO: 29874 - protein, 466 aa, Artificial Sequence
  derived and/or modified protein sequence (wt) from neuraminidase__InfluenzaB__AGX24748
MLPSTIQTLTLFLTSGGVLLSLYVSASLSYLLYSDILLKFSQTEITAPIMPLDCANASNVQAVNRSAAKGVTLLLPEPEWTYPRLSCPGSTFQKALLISPHRFGETKGNSAPLIIREPFIACGPTECKHFALTHYAAQPGRYYNGTREDRNKLRHLISVKLGKIPTVENSIFHMAAWSGSACHDGKEWTYIGVDGPDSNALLKIKYGEAYTDTYHSYAKNILRTQESACNCIGGDCYLMITDGPASGISECRFLKIREGRIIKEIFPTGRVKHTEECTCGFASNKTIECACRDNSYTAKRPFVKLNVETDTAEIRLMCTETYLDTPRPNDGSITGPCESDGDKGSGGIKGGFVHQRMASKIGRWYSRTMSKTKRMGMGLYVKYDGDPWTDSEALALSGVMVSMEEPGWYSFGFEIKDKKCDVPCIGIEMVHDGGKTTWHSAATAVYCLMGSGQLLWDTVTGVDMAL

SEQ ID NO: 29875 - protein, 466 aa, Artificial Sequence
  derived and/or modified protein sequence (wt) from neuraminidase__InfluenzaB__AGX24759
MLPSTIQTLTLFLTSGGVLLSLYVSASLSYLLYSDILLKFSQTEITAPIMPLDCANASNVQAVNRSAAKGVTLLLPEPEWTYPRLSCPGSTFQKALLISPHRFGETKGNSAPLIIREPFIACGPTECKHFALTHYAAQPGGYYNGTREDRNKLRHLISVKLGKIPTVENSIFHMAAWSGSACHDGKEWTYIGVDGPDSNALLKIKYGEAYTDTYHSYAKNILRTQESACNCIGGDCYLMITDGPASGISECRFLKIREGRIIKEIFPTGRVKHTEECTCGFASNKTIECACRDNSYTAKRPFVKLNVETDTAEIRLMCTETYLDTPRPNDGSITGPCESDGDKGSGGIKGGFVHQRMASKIGRWYSRTMSKTKRMGMGLYVKYDGDPWTDSEALALSGVMVSMEEPGWYSFGFEIKDKKCDIPCIGIEMVHDGGKTTWHSAATAIYCLMGSGQLLWDTVTGVDMAL

SEQ ID NO: 29876 - protein, 466 aa, Artificial Sequence; identical to SEQ ID NO: 29412
  derived and/or modified protein sequence (wt) from neuraminidase__InfluenzaB__AGX24770

SEQ ID NO: 29877 - protein, 466 aa, Artificial Sequence; identical to SEQ ID NO: 29874
  derived and/or modified protein sequence (wt) from neuraminidase__InfluenzaB__AGX24781

SEQ ID NO: 29878 - protein, 466 aa, Artificial Sequence; identical to SEQ ID NO: 28788
  derived and/or modified protein sequence (wt) from neuraminidase__InfluenzaB__AGX24792

SEQ ID NO: 29879 - protein, 466 aa, Artificial Sequence; identical to SEQ ID NO: 29836
  derived and/or modified protein sequence (wt) from neuraminidase__InfluenzaB__AGX24803

SEQ ID NO: 29880 - protein, 466 aa, Artificial Sequence; identical to SEQ ID NO: 29412
  derived and/or modified protein sequence (wt) from neuraminidase__InfluenzaB__AGX24814

SEQ ID NO: 29881 - protein, 466 aa, Artificial Sequence
  derived and/or modified protein sequence (wt) from neuraminidase__InfluenzaB__AGX24825
MLPSTIQTLTLFLTSGGVLLSLYVSASLSYLLYSDILLKFSQTEITAPIMPLDCANASNVQAVNRSAAKGVTLLLPEPEWTYPRLSCPGSTFQKALLISPHRFGETKGNSAPLIIREPFIACGPTECKHFALTHYAAQPGEYYNGTREDRNKLRHLISVKLGKIPTVENSIFHMAAWSGSACHDGKEWTYIGVDGPDSNALLKIKYGEAYTDTYHSYAKNILRTQESACNCIGGDCYLMITDGPASGISECRFLKIREGRIIKEIFPTGRVKHTEECTCGFASNKTIECACRDNSYTAKRPFVKLNVETDTAEIRLMCTETYLDTPRPNDGSITGPCESDGDKGSGGIKGGFVHQRMASKIGRWYSRTMSKTRRMGMGLYVKYDGDPWTDSEALALSGVMVSMEEPGWYSFGFEIKDKKCDVPCIGIEMVHDGGKTTWHSAATAIYCLMGSGQLLWDTVTGVDMAL

SEQ ID NO: 29882 - protein, 466 aa, Artificial Sequence; identical to SEQ ID NO: 29412
  derived and/or modified protein sequence (wt) from neuraminidase__InfluenzaB__AGX24836

SEQ ID NO: 29883 - protein, 466 aa, Artificial Sequence
  derived and/or modified protein sequence (wt) from neuraminidase__InfluenzaB__AGX24847
MLPSTIQTLTLFLTSGGVLLSLYVSASLSYLLYSDILLKFSRTEITAPIMPLDCANASNVQAVNRSATKGVTLLLPEPEWTYPRLSCPGSTFQKALLISPHRFGETKGNSAPLIIREPFIACGPKECKHFALTHYAAQPGGYYNGTREDRNKLRHLISVKLGKIPTVENSIFHMAAWSGSACHDGREWTYIGVDGPDSNALLKIKYGEAYTDTYHSYAKNILRTQESACNCIGGDCYLMITDGPASGISECRFLKIREGRIIKEIFPTGRVKHTEECTCGFASNKTIECACRDNSYTAKRPFVKLNVETDTAEIRLMCTETYLDTPRPNDGSITGPCESNGDKGSGGIKGGFVHQRMASKIGRWYSRTMSKTKRMGMGLYVKYDGDPWTDSEALALSGVMVSMEEPGWYSFGFEIKDKKCDVPCIGIEMVHDGGKTTWHSAATAVYCLMGSGQLLWDTVTGVNMTL

SEQ ID NO: 29884 - protein, 466 aa, Artificial Sequence; identical to SEQ ID NO: 28896
  derived and/or modified protein sequence (wt) from neuraminidase__InfluenzaB__AGX24858

SEQ ID NO: 29885 - protein, 466 aa, Artificial Sequence
  derived and/or modified protein sequence (wt) from neuraminidase__InfluenzaB__AGX24869
MLPSTIQTLTLFLTSGGVLLSLYVSASLSYLLYSDILLKFSRTEMTAPIMPLGCANASNVQAVNRSATKGVTLLLPEPEWTYPRLSCPGSTFQKALLISPHRFGETKGNSAPLIIREPFIACGPKECKHFALTHYAAQPGGYYNGTREDRNKLRHLISVKLGKIPTVENSIFHMAAWSGSACHDGREWTYIGVDGPDSNALLKIKYGEAYTDTYHSYAKNILRTQESACNCIGGDCYLMITDGPASGISECRFLKIREGRIIKEIFPTGRVKHTEECTCGFASNKTIECACRDNSYTAKRPFVKLNVETDTAEIRLMCTETYLDTPRPNDGSITGPCESNGDKGSGGIKGGFVHQRMASKIGRWYSRTMSKTKRMGMGLYVKYDGDPWTDSEALALSGVMVSMEEPGWYSFGFEIKDKKCDVPCIGIEMVHDGGKTTWHSAATAIYCLMGSGQLLWDTVTGVNMTL

SEQ ID NO: 29886 - protein, 466 aa, Artificial Sequence
  derived and/or modified protein sequence (wt) from neuraminidase__InfluenzaB__AGX24880
MLPSTIQMLTLFLTSGGVLLSLYVSASLSYLLYSDILLKFSRTEITAPIMPLDCANASNVQAVNRSATKGVTLLLPEPEWTYPRLSCPGSTFQKALLISPHRFGETKGNSAPLIIREPFIACGPKECKHFALTHYAAQPGGYYNGTREDRNKLRHLISVKLGKIPTVENSIFHMAAWSGSACHDGREWTYIGVDGPDSNALLKIKYGEAYTDTYHSYAKNILRTQESACNCIGGDCYLMITDGPASGISECRFLKIREGRIIKEIFPTGRVKHTEECTCGFASNKTIECACRDNSYTAKRPFVKLNVETDTAEIRLMCTETYLDTPRPNDGSITGPCESNGDKGSGGIKGGFVHQRMASKIGRWYSRTMSKTKRMGMGLYVKYDGDPWTDSEALALSGVMVSMEEPGWYSFGFEIKDKKCDVPCIGIEMVHDGGKTTWHSAATAIYCLMGSGQLLWDTVTGVNMTL

SEQ ID NO: 29887 - protein, 466 aa, Artificial Sequence
  derived and/or modified protein sequence (wt) from neuraminidase__InfluenzaB__AGX24902
MLPSTIQTLTLFLTSGGVLLSLYVSALLSYLLYSDILLKFSRTEITAPIMPLDCANASNVQAVNRSATKGVTLLLPEPEWTYPRLSCPGSTFQKALLISPHRFGENKGNSAPLIIREPFIACGPKECKHFALTHYAAQPGGYYNGTREDRNKLRHLISVKLGKIPTVENSIFHMAAWSGSACHDGREWTYIGVDGPDSNALLKIKYGEAYTDTYHSYAKNILRTQESACNCIGGDCYLMITDGPASGISECRFLKIREGRIIKEIFPTGRVKHTEECTCGFASNKTIECACRDNNYTAKRPFVKLNVETDTAEIRLMCTETYLDTPRPNDGSITGPCESNGDKGSGGIKGGFVHQRMASKIGRWYSRTMSKTKRMGMGLYVKYDGDPWTDSEALALSGVMVSMEEPGWYSFGFEIKDKKCDVPCIGIEMVHDGGKTTWHSAATAIYCLMGSGQLLWDTVTGVNMTL

SEQ ID NO: 29888 - protein, 466 aa, Artificial Sequence; identical to SEQ ID NO: 28901
  derived and/or modified protein sequence (wt) from neuraminidase__InfluenzaB__AGX84846

SEQ ID NO: 29889 - protein, 466 aa, Artificial Sequence; identical to SEQ ID NO: 28956
  derived and/or modified protein sequence (wt) from neuraminidase__InfluenzaB__AGX84858

SEQ ID NO: 29890 - protein, 466 aa, Artificial Sequence; identical to SEQ ID NO: 28901
  derived and/or modified protein sequence (wt) from neuraminidase__InfluenzaB__AGX84869

SEQ ID NO: 29891 - protein, 466 aa, Artificial Sequence
  derived and/or modified protein sequence (wt) from neuraminidase__InfluenzaB__AGX84880
MLPSTIQTLTLFLTSGGVLLSLYVSASLSYLLYSDILLKFSPTEITAPTMSLDCANASNVQAVNRSATKGVIFLLPEPEWTYPRLSCPGSTFQKALLISPHRFGETKGNSAPLIIREPFIACGPNECKHFALTHYAAQPGGYYNGTRGDRNKLRHLISVKLGKIPTVENSIFHMAAWSGSACHDGKEWTYIGVDGPDNDALLKVKYGEAYTDTYHSYANKILRTQESACNCIGGNCYLMITDGSASGVSECRFLKIREGRIIKEIFPTGRVKHTEECTCGFASNKTIECACRDNSYTAKRPFVKLNVETDTAEIRLMCTDTYLDTPRPDDGSITGPCESNGDKGSGGIKGGFVHQRMESKIGRWYSRTMSKTERMGMGLYVKYDGDPWADSDALAFSGVMVSMKEPGWYSFGFEIKDKKCDVPCIGIEMVHDGGKETWHSAATAIYCLMGSGQLLWDTVTGVDMAL

SEQ ID NO: 29892 - protein, 466 aa, Artificial Sequence; identical to SEQ ID NO: 28901
  derived and/or modified protein sequence (wt) from neuraminidase__InfluenzaB__AGX84891

SEQ ID NO: 29893 - protein, 466 aa, Artificial Sequence; identical to SEQ ID NO: 28956
  derived and/or modified protein sequence (wt) from neuraminidase__InfluenzaB__AGX84902

SEQ ID NO: 29894 - protein, 466 aa, Artificial Sequence
  derived and/or modified protein sequence (wt) from neuraminidase__InfluenzaB__AGX84924
MLPSTIQTLTLFLTSGGVLLSLYVSALLSYLLYSDILLKFSPTEITAPTMSLDYANASNVQAVNRSATKGVTFLLPEPEWTYPRLSCPGSTFQKALLISPHRFGETKGNSAPLIIREPFIACGPNECKHFALTHYAAQPGGYYNGTRGDRNKLRHLISVKLGKIPTVENSIFHMAAWSGSACHDGKEWTYIGVDGPDNDALLKVKYGEAYTDTYHSYANKILRTQESACNCIGGNCYLMITDGSASGVSECRFLKIREGRIIKEIFPTGRVKHTEECTCGFASNKTIECACRDNSYTAKRPFVKLNVETDTAEIRLMCTDTYLDTPRPDDGSITGPCESNGDKGSGGIKGGFVHQRMESKIGRWYSRTMSKTERMGMGLYVKYDGDPWADSDALAFSGVMVSMKEPGWYSFGFEIKDKKCDVPCIGIEMVHDGGKETWHSAATAIYCLMGSGQLLWDTVTGVDMAL

SEQ ID NO: 29895 - protein, 466 aa, Artificial Sequence
  derived and/or modified protein sequence (wt) from neuraminidase__InfluenzaB__AGY46393
MLPSTIQTLTLFLTSGGVLLSLYVSASLSYLLYSDILLKFPSTEITAPTMPLDCANATNVQAVNRSATKGVTLLLPEPEWTYPRLSCPGSTFQKALLISPHRFGEIKGNSAPLIIREPFIACGPNECKHFALTHYAAQPGGYYNGTREDRNKLRHLISVKLGKIPTVENSIFHMAAWSGSACHDGREWTYIGVDGPDSNALLKIKYGEAYTDTYHSYAKNILRTQESACNCIGGDCYLMITDGPASGISECRFLKIREGRIIKEIFPTGRVKHTEECTCGFASNKTIECACRDNSYTAKRPFVKLNVETDTAEIRLMCTETYLDTPRPNDGSITGPCESNGDKGSGGIKGGFVHQRMASKIGRWYSRTMSKTERMGMGLYVKYDGDPWADSDALAFSGVMVSMEEPGWYSFGFEIKDKKCDVPCIGIEMVHDGGKETWHSAATAIYCLMGSGQLLWDTVTGVNMAL

SEQ ID NO: 29896 - protein, 466 aa, Artificial Sequence
  derived and/or modified protein sequence (wt) from neuraminidase__InfluenzaB__AGY46397
MLPSTIQTLTLFLTSGGVLLSLYVSASLSYLLYSDILLKFSRTEITAPIMPLDCANASNVQAVNRSATKGVTLLLPEPEWTYPRLSCPGSTFQKALLISPHRFGETKGNSAPLIIREPFIACGPNECKHFALTHYAAQPGGYYNGTRGDRNKLRHLISVKLGKIPTVENSIFHMAAWSGSACHDGKEWTYIGVDGPDNNALLKVKYGEAYTDTYHSYANKILRTQESACNCIGGNCYLMITDGSASGVSECRFLKIREGRIIKEIFPTGRVKHTEECTCGFASNKTIECACRDNSYTAKRPFVKLNVETDTAEIRLMCTDTYLDTPRPNDGSITGPCESDGDKGSGGIKGGFVHQRMESKIGRWYSRTMSKTERMGMGLYVKYDGDPWADSDALAFSGVMVSMKEPGWYSFGFEIKDKKCDVPCIGIEMVHDGGKTTWHSAATAIYCLMGSGQLLWDTVTGVNMTL

SEQ ID NO: 29897 - protein, 466 aa, Artificial Sequence
  derived and/or modified protein sequence (wt) from neuraminidase__InfluenzaB__AGY46399
MLPSTIQTLTLFLTSGGVLLSLYVSASLSYLLYSDILLKFSPTEIIAPTTPLDCANASNVQAVNRSATKGVTLLLPEPEWTYPRLSCPGSTFQKALLISPHRFGETKGNSAPLIIREPFIACGPKECKHFALTHYAAQPGGYYNGTREDRNKLRHLISVKLGKIPTVENSIFHMAAWSGSACHDGREWTYIGVDGPDSNALLKIKYGEAYTDTYHSYAKNILRTQESACNCIGGDCYLMITDGPASGISECRFLKIREGRIIKEIFPTGRVKHTEECTCGFASNKTIECACRDNSYTAKRPFVKLNVETDTAEIRLMCTETYLDTPRPNDGSITGPCESNGDKGSGGIKGGFVHQRMASKIGRWYSRTMSKTKRMGMGLYVKYDGDPWADSEALALSGVMVSMEEPGWYSFGFEIKDKKCDVPCIGIEMVHDGGKETWHSAATAIYCLMGSGQLLWDTVTGVDMAL

SEQ ID NO: 29898 - protein, 466 aa, Artificial Sequence
  derived and/or modified protein sequence (wt) from neuraminidase__InfluenzaB__AGY46401
MLPSTIQTLTLFLTSGGVLLSLYVSASLSYLLYSDILLKFSPTEITAPTMPLDCANASNVQAVNRSATKGVTLLLPEPEWTYPRLSCPGSTFQKALLISPHRFGETKGNSAPLIIREPFIACGPKECKHFALTHYAAQPGGYYNGTREDRNKLRHLISVKLGKIPTVENSIFHMAAWSGSACHDGREWTYIGVDGPDSNALLKIKYGEAYTDTYHSYAKNILRTQESACNCIGGDCYLMITDGPASGISECRFLKIREGRIIKEIFPTGRVKHTEECTCGFASNKTIECACRDNSYTAKRPFVKLNVETDTAEIRLMCTETYLDTPRPNDGSITGPCESNGDKGSGGIKGGFVHQRMASKIGRWYSRTMSKTKRMGMGLYVKYDGDPWADSDALAFSGVMVSMKEPGWYSFGFEIKDKKCDVPCIGIEMVHDGGKETWHSAATAIYCLMGSGQLLWDTVTGVDMAL

SEQ ID NO: 29899 - protein, 466 aa, Artificial Sequence; identical to SEQ ID NO: 28616
  derived and/or modified protein sequence (wt) from neuraminidase__InfluenzaB__AGZ59825

SEQ ID NO: 29900 - protein, 466 aa, Artificial Sequence; identical to SEQ ID NO: 28682
  derived and/or modified protein sequence (wt) from neuraminidase__InfluenzaB__AGZ59836

SEQ ID NO: 29901 - protein, 466 aa, Artificial Sequence; identical to SEQ ID NO: 29371
  derived and/or modified protein sequence (wt) from neuraminidase__InfluenzaB__AGZ59847

SEQ ID NO: 29902 - protein, 466 aa, Artificial Sequence
  derived and/or modified protein sequence (wt) from neuraminidase__InfluenzaB__AGZ59858
MLPSTIQTLTLFLTSGGVLLSLYVSASLSYLLYSDILLKFSPTEITAPTMPLDCANASNVHAVNRSATKGVTLLLPEPEWTYPRLSCPGSTFQKALLISPHRFGETKGNSAPLIIREPFIACGPNECKHFALTHYAAQPGGYYNGKRGDRNKLRHLISVKLGKIPTVENSIFHMAAWSGSACHDGKEWTYIGVDGPDNNALLKIKYGEAYTDTYHSYANNILRTQESACNCIGGNCYLMITDGSASGVSECRFLKIREGRIIKEIFPTGRVKHTEECTCGFASNKTIECACRDNSYTAKRPFVKLNVETDTAEIRLMCTDTYLDTPRPDDGSITGPCESNGDKGSGGIKGGFVHQRMASKIGRWYSRTMSKTERMGMGLYVKYDGDPWADSDALAFSGVMVSMKEPGWYSFGFEIKDKKCDVPCIGIEMVHDGGKETWHSAATAIYCLMGSGQLLWDTVTGVDMAL

SEQ ID NO: 29903 - protein, 466 aa, Artificial Sequence
  derived and/or modified protein sequence (wt) from neuraminidase__InfluenzaB__AGZ59869
MLPSTIQTLTLFLTSGGVLLSLYVSASLSYLLYSDILLKFSPTEITAPTMPLDCANASNVQAVNRSATKGVTLLLPEPEWTYPRLSCPGSTFQKAVLISPHRFGETKGNSAPLIIREPFIACGPNECKHFALTHYAAQPGGYYNGTRGDRNKLRHLISVKLGKIPTVENSIFHMAAWSGSACHDGKEWTYIGVDGPDNNALLKIKYGEAYTDTYHSYANKILRTQESACNCIGGNCYLMITDGSASGVSECRFLKIREGRIIKEIFPTGRVKHTEECTCGFASNKTIECACRDNSYTAKRPFVKLNVETDTAEIRLMCTDTYLDTPRPDDGSITGPCESNGDKGSGGIKGGFVHQRMASKIGRWYSRTMSKTERMGMGLYVKYDGDPWADSDALAFSGVMVSMKEPGWYSFGFEIKDKKCDVPCIGIEMVHDGGKETWHSAATAIYCLMGSGQLLWDTVTGVDMAL

SEQ ID NO: 29904 - protein, 466 aa, Artificial Sequence; identical to SEQ ID NO: 29400
  derived and/or modified protein sequence (wt) from neuraminidase__InfluenzaB__AGZ59880

SEQ ID NO: 29905 - protein, 466 aa, Artificial Sequence; identical to SEQ ID NO: 29844
  derived and/or modified protein sequence (wt) from neuraminidase__InfluenzaB__AGZ59891

SEQ ID NO: 29906 - protein, 466 aa, Artificial Sequence; identical to SEQ ID NO: 28961
  derived and/or modified protein sequence (wt) from neuraminidase__InfluenzaB__AGZ59902

SEQ ID NO: 29907 - protein, 466 aa, Artificial Sequence; identical to SEQ ID NO: 28961
  derived and/or modified protein sequence (wt) from neuraminidase__InfluenzaB__AGZ59913

SEQ ID NO: 29908 - protein, 466 aa, Artificial Sequence; identical to SEQ ID NO: 28961
  derived and/or modified protein sequence (wt) from neuraminidase__InfluenzaB__AGZ59924

SEQ ID NO: 29909 - protein, 466 aa, Artificial Sequence; identical to SEQ ID NO: 28961
  derived and/or modified protein sequence (wt) from neuraminidase__InfluenzaB__AGZ59935

SEQ ID NO: 29910 - protein, 466 aa, Artificial Sequence; identical to SEQ ID NO: 28961
  derived and/or modified protein sequence (wt) from neuraminidase__InfluenzaB__AGZ59946

SEQ ID NO: 29911 - protein, 466 aa, Artificial Sequence
  derived and/or modified protein sequence (wt) from neuraminidase__InfluenzaB__AGZ59957
MLPSTIQTLTLFLTSGGVLLSLYVSASLSYLLYSDILLKFSPTEITAPTMPLDCANASNVQAVNRSATKGVTLLLPEPEWTYPRLSCPGSTFQKALLISPHRFGETKGNSAPLIIREPFIACGPNECKHFALTHYAAQPGGYYNGTRGDRNKLRHLISVKLGKIPTVENSIFHMAAWSGSACHDGKEWTYIGVDGPDNNALLKVKYGEAYTDTYHSYANKILRTQESACNCIGGNCYLMITDGSASGVSECRFLKIREGRIIKEIFPTGRVKHTEECTCGFASNKTIECACRDNSYTAKRPFVKLNVETDTAEIRLMCTDTYLDTPRPNDGSITGPCESNGDKGSGGIKGGFVHQRMESKIGRWYSRTMSKTERMGMGLYVKYDGDPWADSDALAFSGVMVSMKEPGWYSFGFEIKDKKCDVPCIGIEMVHDGGKGTWHSAATAIYCLMGSGQLLWDTVTGVDMAL

SEQ ID NO: 29912 - protein, 466 aa, Artificial Sequence; identical to SEQ ID NO: 28961
  derived and/or modified protein sequence (wt) from neuraminidase__InfluenzaB__AGZ59969

SEQ ID NO: 29913 - protein, 466 aa, Artificial Sequence; identical to SEQ ID NO: 28961
  derived and/or modified protein sequence (wt) from neuraminidase__InfluenzaB__AGZ59980

SEQ ID NO: 29914 - protein, 466 aa, Artificial Sequence; identical to SEQ ID NO: 28961
  derived and/or modified protein sequence (wt) from neuraminidase__InfluenzaB__AGZ59991

SEQ ID NO: 29915 - protein, 466 aa, Artificial Sequence; identical to SEQ ID NO: 28961
  derived and/or modified protein sequence (wt) from neuraminidase__InfluenzaB__AGZ60003

SEQ ID NO: 29916 - protein, 466 aa, Artificial Sequence
  derived and/or modified protein sequence (wt) from neuraminidase__InfluenzaB__AGZ60014
MLPSTIQTLTLFLTSGGVLLSLYVSALLSYLLYSDILLKFSPTEITAPTMSLDCANASNVQAVNRSATKGVTFLLPEPEWTYPRLSCPGSTFQRALLISPHRFGEAKGNSAPLIIREPFIACGPNECKHFALTHYAAQPGGYYNGTRGDRNKLRHLISVKLGKIPTVENSIFHMAAWSGSACHDGKEWTYIGVDGPDNDALLKVKYGEAYTDTYHSYANKILRTQESACNCIGGNCYLMITDGSASGVSECRFLKIREGQIIKEIFPTGRVKHTEECTCGFASNKTIECACRDNSYTAKRPFVKLNVETDTAEIRLMCTDTYLDTPRPDDGSITGPCESNGDKGSGGIKGGFVHQRMESKIGRWYSRTMSKTERMGMGLYVKYDGDPWADSDALAFSGVMVSMKEPGWYSFGFEIKDKKCDVPCIGIEMVHDGGKETWHSAATAIYCLMGSGQLLWDTVTGVDMAL

SEQ ID NO: 29917 - protein, 466 aa, Artificial Sequence; identical to SEQ ID NO: 28895
  derived and/or modified protein sequence (wt) from neuraminidase__InfluenzaB__AGZ60025

SEQ ID NO: 29918 - protein, 466 aa, Artificial Sequence
  derived and/or modified protein sequence (wt) from neuraminidase__InfluenzaB__AGZ60037
MLPSTIQTLTLFLTSGGVLLSLYVSALLSYLLYSDILLKFSPTEITAPTMSLDCANASNVQAVNRSATKGVTFLLPEPEWTYPRLSCPGSTFQKALLISPHRFGETKGNSAPLIIREPFIACGPNECKHFALTHYAAQPGGYYNGTRGDRNKLRHLISVKLGKIPTVENSIFHMAAWSGSACHDGKEWTYIGVDGPDNDALLKVKYGEAYTDTYHSYANKILRTQESACNCIGGNCYLMITDGSASGVSECRFLKIREGRIIKEIFPTGRVKHTEECTCGFASNKTIECACRDNSYTAKRPFVKLNVETDTAEIRLMCTDTYLDTPRPDDGSITGPCESNGDKGSGGIKGGFVHQRMESKIGRWYSRTMSKTERMGMGLYVKYDGDPWAESDALAFSGVMVSMKEPGWYSFGFEIKDKKCDVPCIGIEMVHDGGKETWHSAATAIYCLMGSGQLLWDTVTGVDIAL

SEQ ID NO: 29919 - protein, 466 aa, Artificial Sequence; identical to SEQ ID NO: 29131
  derived and/or modified protein sequence (wt) from neuraminidase__InfluenzaB__AGZ60048

SEQ ID NO: 29920 - protein, 466 aa, Artificial Sequence; identical to SEQ ID NO: 29131
  derived and/or modified protein sequence (wt) from neuraminidase__InfluenzaB__AGZ60059

SEQ ID NO: 29921 - protein, 466 aa, Artificial Sequence
  derived and/or modified protein sequence (wt) from neuraminidase__InfluenzaB__AGZ60070
MLPSTIQTLTLFLTSGGVLLSLYVSASLSYLLYSDILLKFSTTEITAPTMPLDCANASNVQAVNHSAAKGVTLLLPEPEWTYPRLSCPGSTFQKALLISPHRFGETKGNSAPLIIREPFIACGPKECKHFALTHYAAQPGGYYNGTREDRNKLRHLISVKLGKIPTVENSIFHMAAWSGSACHDGKEWTYIGVDGPDSNALLKIKYGEAYTDTYHSYAHNILRTQESACNCIGGNCYLMITDGSASGISECRFLKIREGRIIKEIFPTGRVKHTEECTCGFANNKTIECACRDNSYTAKRPFVKLNVETDTAEIRLMCTETYLDTPRPDDGSITGPCESNGNKGSGGIKGGFVHQRMASKIGRWYSRTMSKTKRMGMGLYVKYDGDPWTDSDALVFSGVMISVEEPGWYSFGFEIKDKKCDVPCIGIEMVHDGGKETWHSAATAIYCLMGSGQLLWDTVTGVNMTL

SEQ ID NO: 29922 - protein, 466 aa, Artificial Sequence; identical to SEQ ID NO: 28627
  derived and/or modified protein sequence (wt) from neuraminidase__InfluenzaB__AGZ60081

SEQ ID NO: 29923 - protein, 466 aa, Artificial Sequence; identical to SEQ ID NO: 29147
  derived and/or modified protein sequence (wt) from neuraminidase__InfluenzaB__AGZ60092

SEQ ID NO: 29924 - protein, 466 aa, Artificial Sequence; identical to SEQ ID NO: 29770
  derived and/or modified protein sequence (wt) from neuraminidase__InfluenzaB__AGZ60103

SEQ ID NO: 29925 - protein, 466 aa, Artificial Sequence; identical to SEQ ID NO: 28788
  derived and/or modified protein sequence (wt) from neuraminidase__InfluenzaB__AGZ60135

SEQ ID NO: 29926 - protein, 466 aa, Artificial Sequence; identical to SEQ ID NO: 28960
  derived and/or modified protein sequence (wt) from neuraminidase__InfluenzaB__AGZ60154

SEQ ID NO: 29927 - protein, 466 aa, Artificial Sequence
  derived and/or modified protein sequence (wt) from neuraminidase__InfluenzaB__AGZ60164
MLPSTTQTLTLFLTSGGVLLSLYVSASLSYLLYSDILLKFSQTEITAPIMPLDCANASNVQAVNRSAAKGVTLLLPEPEWTYPRLSCPGSTFQKALLINPHRFGETKGNSAPLIIREPFIACGPTECKHFALTHYAAQPGGYYNGTREDRNKLRHLISVKLGKIPTVENSIFHMAAWSGSACHDGKEWTYIGVDGPDSNALLKIKYGEAYTDTYHSYAKNILRTQESACNCIGGDCYLMITDGPASGISECRFLKIREGRIIKEIFPTGRVKHTEECTCGFASNKTIECACRDNSYTAKRPFVKLNVETDTAEIRLMCTETYLDTPRPNDGSITGPCESDGDKGSGGIKGGFVHQRMASKIGRWYSRTMSKTKRMGMGLYVKYDGDPWTDSEALALSGVMVSMEEPGWYSFGFEIKDKKCDVPCIGIEMVHDGGKTTWHSAATAIYCLMGSGQLLWDTVTGVDMAL

SEQ ID NO: 29928 - protein, 466 aa, Artificial Sequence; identical to SEQ ID NO: 29840
  derived and/or modified protein sequence (wt) from neuraminidase__InfluenzaB__AGZ60176

SEQ ID NO: 29929 - protein, 466 aa, Artificial Sequence; identical to SEQ ID NO: 28817
  derived and/or modified protein sequence (wt) from neuraminidase__InfluenzaB__AGZ60187

SEQ ID NO: 29930 - protein, 466 aa, Artificial Sequence; identical to SEQ ID NO: 28817
  derived and/or modified protein sequence (wt) from neuraminidase__InfluenzaB__AGZ60198

SEQ ID NO: 29931 - protein, 466 aa, Artificial Sequence; identical to SEQ ID NO: 28817
  derived and/or modified protein sequence (wt) from neuraminidase__InfluenzaB__AGZ60210

SEQ ID NO: 29932 - protein, 466 aa, Artificial Sequence
  derived and/or modified protein sequence (wt) from neuraminidase__InfluenzaB__AGZ60221
MLPTTIQTLTLFLTSGGVLLSLYVSASLSYLLYSDILLKFSRTEITAPIMPLDCANASNVQAVNRSATKGVTLLLPEPEWTYPRLSCPGSTFQKALLISPHRFGETKGNSAPLIIREPFIACGPKECKHFALTHYAAQPGGYYNGTREDRNKLRHLISVKLGKIPTVENSIFHMAAWSGSACHDGREWTYIGVDGPDSNALLKIKYGEAYTDTYHSYAKNILRTQESACNCIGGDCYLMITDGPASGISECRFLKIREGRIIKEIFPTGRVKHTEECTCGFASNKTIECACRDNSYTAKRPFVKLNVETDTAEIRLMCTETYLDTPRPNDGSITGPCESNGDKGSGGIKGGFVHQRMASKIGRWYSRTMSKTKRMGMGLYVKYDGDPWTDSEALALSGVMVSMEEPGWYSFGFEIKDKKCDVPCIGIEMVHDGGKTTWHSAATAIYCLMGSGQLLWDTVTGVNMTL

SEQ ID NO: 29933 - protein, 466 aa, Artificial Sequence
  derived and/or modified protein sequence (wt) from neuraminidase__InfluenzaB__AGZ60272
MLPSTIQTLTLFLTSGGVLLSLYVSASLSYLLYSDILLKFSQTEITAPIMPLDCANASNVQAVNRSAAKGVTLLLPKPEWTYPRLSCPGSTFQKALLISPHRFGETKGNSAPLIIREPFIACGPTECKHFALTHYAAQPGGYYNGTREDRNKLRHLISVKLGKIPTVENSIFHMAAWSGSACHDGKEWTYIGVDGPDSNALLKIKYGEAYTDTYHSYAKNILRTQESACNCIGGDCYLMITDGPASGISECRFLKIREGRIIKEIFPTGRVKHTEECTCGFASNKTIECACRDNSYTAKRPFVKLNVETDTAEIRLMCTETYLDTPRPNDGSITGPCESDGDKGSGGIKGGFVHQRMASKIGRWYSRTMSKTKRMGMGLYVKYDGDPWTDSEALALSGVMVSMEEPGWYSFGFEIKDKKCDVPCIGIEMVHDGGKTTWHSAATAIYCLMGSGQLLWDTVTGVDMAL

SEQ ID NO: 29934 - protein, 465 aa, Artificial Sequence
  derived and/or modified protein sequence (wt) from neuraminidase__InfluenzaB__AHL91182
MLPSTIQTLTLFLTSGGVLLSLYVSALLSYLLYSDILLKFSPKIIAPTMSLDCANASNVQAVNHSATKEMKFLPPEPEWTYPRLSCQGSTFQKALLISPHRFGEAKGNSAPLIIREPFIACGPKECKHFALTHYAAQPGGYYNGTREDRNKLRHLISVNLGKIPTVENSIFHMAAWSGSACHDGREWTYIGVDGPDSNALIKIKYGEAYTDTYHSYANNILRTQESACNCIGGDCYLMITDGSASGISKCRFLKIREGRIIKEIFPTGRVEHTEECTCGFASNKTIECACRDNSYTAKRPFVKLNVETDTAEIRLMCTETYLDTPRPDDGSITGPCESNGDKGRGGVKGGFVHQRMASKIGRWYSRTMSKTKRMGMELYVKYDGDPWTDSDALAPSGVMVSMEEPGWYSFGFEIKDKKCDVPCIGIEMVHDGGKRTWHSAATAIYCLMGSGQLLWDTVTGVDMAL

SEQ ID NO: 29935 - protein, 465 aa, Artificial Sequence
  derived and/or modified protein sequence (wt) from neuraminidase__InfluenzaB__AHL91193
MLPSTIQTLTLFLTSGGVLLSLYVSALLSYLLYSDILLKFSPKIIAPTMSLDCANASNVQAVNHSATKEMKFLPSEPEWTYPRLSCQGSTFQKALLISPHRFGEAKGNSAPLIIREPFIACGPKECKHFALTHYAAQPGGYYNGTREDRNKLRHLISVNLGKIPTVENSIFHMAAWSGSACHDGREWTYIGVDGPDSNALIKIKYGEAYTDTYHSYANNILRTQESACNCIGGDCYLMITDGSASGISKCRFLKIREGRIIKEIFPTGRVEHTEECTCGFASNKTIECACRDNSYTAKRPFVKLNVETDTAEIRLMCTETYLDTPRPDDGSITGPCESNGDKGRGGVKGGFVHQRMASKIGRWYSRTMSKTKRMGMELYVKYDGDPWTDSDALAPSGVMVSMEEPGWYSFGFEIKDKKCDVPCIGIEMVHDGGKRTWHSAATAIYCLMGSGQLLWDTVTGVDMAL

SEQ ID NO: 29936 - protein, 465 aa, Artificial Sequence
  derived and/or modified protein sequence (wt) from neuraminidase__InfluenzaB__AHL91204
MLPSTIQTLTLFLTSGGVLLSLYVSALLSYLLYSDVLLKFSPKIIAPTMSLDCANASNVQAVNHSATEEMTFLLPEPEWTYPRLSCQGSTFQKALLISPHRFGEAKGNSAPLIIREPFIACGPKECKHFALTHYAAQPGGYYNGTREDRNKLRHLISVNLGKIPTVENSIFHMAAWSGSACHDGREWTYIGVDGPDSNALIKIKYGEAYTDTYHSYANNILRTQESACNCIGGDCYLMITDGSASGISKCRFLKIREGRIIKEIFPTGRVEHTEECTCGFASNKTIECACRDNIYTAKRPFVKLNVETDTAEIRLMCTETYLDTPRPDDGSITGPCESNGDKGHGGIKGGFVHQRMASKIGRWYSRTMSKTKRMGMELYVKYDGDPWTDSDALAPSGVMVSMEEPGWYSFGFEIKDKKCDVPCIGIEMVHDGGKKTWHSAATAIYCLMGSGQLLWDTVTGVDMAL

SEQ ID NO: 29937 - protein, 465 aa, Artificial Sequence
  derived and/or modified protein sequence (wt) from neuraminidase__InfluenzaB__AHL91215
MLPSTIQTLTLFLTSGGVLLSLYVSTLLSYLLYSDILLKFSPKIIAPTTSLDCANASNVQAVNHSATKEMKFLPTEPEWTYPRLSCQGSTFQKALLISPHRFGEAKGNSAPLIIREPFIACGPKECKHFALTHYAAQPGGYYNGTREDRNKLRHLISVNLGKIPTVENSIFHMAAWSGSACHDGREWTYIGVDGPDSNALIKIKYGEAYTDTYHSYANNILRTQESACNCIGGDCYLMITDGSASGISKCRFLKIREGRIIKEIFPTGRVEHTEECTCGFASNKTIECACRDNSYTAKRPFVKLNVETDTAEIRLMCTETYLDTPRPDDGSITGPCESNGDKGSGGVKGGFVHQRMTSKIGRWYSRTMSKTKRMGMELYVKYDGDPWTDSDALAPSGVMVSMEEPGWYSFGFEIKDKKCDVPCIGIEMVHDGGKRTWHSAATAIYCLMGSGQLLWDTVTGVDMAL

SEQ ID NO: 29938 - protein, 466 aa, Artificial Sequence; identical to SEQ ID NO: 28709
  derived and/or modified protein sequence (wt) from neuraminidase__InfluenzaB__AHL91226

SEQ ID NO: 29939 - protein, 466 aa, Artificial Sequence; identical to SEQ ID NO: 28710
  derived and/or modified protein sequence (wt) from neuraminidase__InfluenzaB__AHL91237

SEQ ID NO: 29940 - protein, 466 aa, Artificial Sequence; identical to SEQ ID NO: 28710
  derived and/or modified protein sequence (wt) from neuraminidase__InfluenzaB__AHL91248

SEQ ID NO: 29941 - protein, 466 aa, Artificial Sequence; identical to SEQ ID NO: 28709
  derived and/or modified protein sequence (wt) from neuraminidase__InfluenzaB__AHL91259

SEQ ID NO: 29942 - protein, 466 aa, Artificial Sequence; identical to SEQ ID NO: 28709
  derived and/or modified protein sequence (wt) from neuraminidase__InfluenzaB__AHL91270

SEQ ID NO: 29943 - protein, 465 aa, Artificial Sequence; identical to SEQ ID NO: 28681
  derived and/or modified protein sequence (wt) from neuraminidase__InfluenzaB__AHL91281

SEQ ID NO: 29944 - protein, 466 aa, Artificial Sequence
  derived and/or modified protein sequence (wt) from neuraminidase__InfluenzaB__AHL91303
MLPSTIQTLTLFLTSGGVLLSLYVSASLSYLLYSDILLKFSPTEITAPTMPLDCANASNVQAVNRSATKGVTLLLPEPEWTYPRLSCPGSTFQKALLISPHRFGETKGNSAPLIIREPFIACGPKECKHFALTHYAAQPGGYYNGTREDRNKLRHLISVKLGKIPTVENSIFHMAAWSGSACHDGREWTYIGVDGPDSNALLKIKYGEAYTDTYHSYANNILRTQESACNCIGGDCYLMITDGSASGINECRFLKIREGRIIKEIFPTGRVEHTEECTCGFASNKTIECACRDNSYTAKRPFVKLNVETDTAEIRLMCTETYLDTPRPDDGSITGPCESNGDKGSGGIKGGFVHQRMASKIGRWYSRTMSKTRRMGMGLYVKYDGDPWTDSDALALSGVMVSMEEPGWYSFGFEIKDKKCDVPCIGIEMVHDGGKKTWHSAATAIYCLMGSGQLLWDTVTGVDMAL

SEQ ID NO: 29945 - protein, 466 aa, Artificial Sequence; identical to SEQ ID NO: 28710
  derived and/or modified protein sequence (wt) from neuraminidase__InfluenzaB__AHL91314

SEQ ID NO: 29946 - protein, 466 aa, Artificial Sequence; identical to SEQ ID NO: 28710
  derived and/or modified protein sequence (wt) from neuraminidase__InfluenzaB__AHL91325

SEQ ID NO: 29947 - protein, 466 aa, Artificial Sequence
  derived and/or modified protein sequence (wt) from neuraminidase__InfluenzaB__AHL91347
MLPSTIQTLTLFLTSGGVLLSLYVSASLSYLLYSDVLLKFSPTEITAPTMPLDCANASNVQAVNRSATKGVTLLLPEPEWTYPRLSCPGSTFQKALLISPHRFGETKGNSAPLIIREPFIACGPKECKHFALTHYAAQPGGYYNGTREDRNKLRHLISVKLGKIPTVENSIFHMAAWSGSACHDGREWTYIGVDGPDSNALLKIKYGEAYTDTYHSYANNILRTQESACNCIGGDCYLMITDGSASGISECRFLKIREGRIVKEIFPTGRVEHTEECTCGFASNKTIECACRDNSYTAKRPFVKLNVETDTAEIRLMCTETYLDTPRPEDGSITGPCESNGDKGSGGIKGGFVHQRMASKIGRWYSRTMSKTKRMGMGLYVKYDGDPWTDSDALALSGVMVSMEEPGWYSFGFEIKDKKCDVPCIGIEMVHDGGKETWHSAATAIYCLMGSGQLLWDTVTGVDMAL

SEQ ID NO: 29948 - protein, 466 aa, Artificial Sequence; identical to SEQ ID NO: 29947
  derived and/or modified protein sequence (wt) from neuraminidase__InfluenzaB__AHL91358

SEQ ID NO: 29949 - protein, 466 aa, Artificial Sequence; identical to SEQ ID NO: 28685
  derived and/or modified protein sequence (wt) from neuraminidase__InfluenzaB__AHL91369

SEQ ID NO: 29950 - protein, 466 aa, Artificial Sequence; identical to SEQ ID NO: 28685
  derived and/or modified protein sequence (wt) from neuraminidase__InfluenzaB__AHL91380

SEQ ID NO: 29951 - protein, 466 aa, Artificial Sequence
  derived and/or modified protein sequence (wt) from neuraminidase__InfluenzaB__AHL91391
MLPSTIQTLTLFLTSGGVLLSLYVSASLSYLLYSDILLKFSPKEITAPTMPLNCANASNVQAVNRSATKGVTLPLPEPEWTYPRLSCPGSTFQKALLISPHRFGETKGNSAPLIIREPFIACGPKECKHFALTHYAAQPGGYYNGTREDRNKLRHLISVKLGKIPTVENSIFHMAAWSGSACHDGREWTYIGVDGPDNNALLKIKYGEAYTDTYHSYANNILRTQESACNCIGGDCYLMITDGSASGISECRFLKIREGRIIKEIFPTGRVEHTEECTCGFASNKTIECACRDNSYTAKRPFVKLNVETDTAEIRLMCTETYLDTPRPDDGSITGPCESNGDKGSGGIKGGFVHQRMASKIGRWYSRTMSKTKRMGMGLYVKYDGDPWIDSDALTLSGVMVSMEEPGWYSFGFEIKDKKCDVPCIGIEMVHDGGKTTWHSAATAIYCLMGSGQLLWDTVTGVDMAL

SEQ ID NO: 29952 - protein, 466 aa, Artificial Sequence
  derived and/or modified protein sequence (wt) from neuraminidase__InfluenzaB__AHL91413
MLPSTIQTLTLFLTSGGVLLSLYVSASLSYLLYSDILLKFTPTEITAPTMPLDCANASNVQAVNLSATKGVTLLLPEPEWTYPRLSCPGSTFQKALLISPHRFGETKGNSAPLIIREPFIACGPKECKHFALTHYAAQPGGYYNGTREDRNKLRHLISVKLGKIPTVENSIFHMAAWSGSACHDGKEWTYIGVDGPDSNALLKIKYGEAYTDTYHSYANNILRTQESACNCIGGNCYLMITDGSASGISECRFLKIREGRIIKEIFPTGRVKHTEECTCGFASNKTIECACRDNSYTAKRPFVKLNVETDTAEIRLMCTETYLDTPRPDDGSITGPCESNGNKGSGGIKGGFVHQRMASKIGRWYSRTMSKTKRMGMGLYVKYDGDPWTDSDALALSGVMVSMEEPGWYSFGFEIKDKKCDVPCIGIEMVHDGGKETWHSAATAIYCLMGSGQLLWDTVTGVDMAL

SEQ ID NO: 29953 - protein, 466 aa, Artificial Sequence
  derived and/or modified protein sequence (wt) from neuraminidase__InfluenzaB__AHL91446
MLPSTIQTLTLFLTSGGVLLSLYVSASLSYLLYSDILLKFSPTEITAPTMPLDCANASNVQAVNRSATKGMTLLLPEPEWTYPRLSCPGSTFQKALLISPHRFGETKGNSAPLIIREPFIACGPKECKHFALTHYAAQPGGYYNGTREDRNKLRHLISVKLGKIPTVENSIFHMAAWSGSACHDGKEWTYIGVDGPDSNALLKIKYGEAYTDTYHSYANNILRTQESACNCIGGNCYLMITDGSASGISECRFLKIREGRIIKEIFPTGRVEHTEECTCGFASNKTIECACRDNSYTAKRPFVKLNVETDTAEIRLMCTETYLDTPRPDDGSITGPCESNGGKGSGGIKGGFVHQRMESKIGRWYSRTMSKTKRMGMGLYVKYDGDPWTDSDALALSGVMVSMEEPGWYSFGFEIKDKECDVPCIGIEMVHDGGKETWHSAATAIYCLMGSGQLLWDTVTGVNMAL

SEQ ID NO: 29954 - protein, 466 aa, Artificial Sequence
  derived and/or modified protein sequence (wt) from neuraminidase__InfluenzaB__AHL91457
MLPSTIQTLTLFLTSGGVLLSLYVSASLSYLLYSDILLKFSPTEITAPIMPLDCANASNVQAVNRSATKGVTLLLPEPEWTYPRLSCPGSTFQKALLISPHRFGETKGNSAPLIIREPFIACGPKECKHFALTHYAAQPGGYYNGTRGDRNKLRHLISVKLGKIPTVENSIFHMAAWSGSACHDGKEWTYIGVDGPDNNALLKIKYGEAYTDTYHSYANNTLRTQESACNCIGGNCYLMITDGSASGISECRFLKIREGRIIKEIFPTGRVKHTEECTCGFASNKTIECACRDNSYTAKRPFVKLNVETDTAEIRLMCTETYLDTPRPDDGSITGPCESNGNKGSGGIKGGFVHQRMASKIGRWYSRTMSKTKRMGMGLYVKYDGDPWTDSDALALSGVMVSMEEPGWYSFGFEIKDKKCDVPCIGIEMVHDGGKETWHSAATAIYCLMGSGQLLWDTVTGVDMAL

SEQ ID NO: 29955 - protein, 466 aa, Artificial Sequence
  derived and/or modified protein sequence (wt) from neuraminidase__InfluenzaB__AHL91468
MLPSTIQTLTLFLTSGGVLLSLYVSASLSYLLYSDILLKFSPTEITAPTMPLDCANASNVQAVNRSATKGVTLLLPEPEWTYPRLSCPGSTFQKALLISPHRFGETKGNSAPLIIREPFIACGPKECKHFALTHYAAQPGGYYNGTREDRNKLRHLISVKLGKIPTVENSIFHMAAWSGSACHDGKEWTYIGVDGPDSNALLKIKYGEAYTDTYHSYANNILRTQESACNCIGGNCYLMITDGSASGISECRFLKIREGRIIKEIFPTGRVKHTEECTCGFASNKTIECACRDNSYTAKRPFVKLNVETDTAEIRLMCTETYLDTPRPDDGSITGPCESNGDKGSGGIKGGFVHQRMASKIGRWYSRTMSKTKRMGMGLYVKYDGDPWTDSDALALSGVMVSVGEPGWYSFGFEIKDKKCDVPCIGIEMVHDGGKETWHSAATAIYCLMGSGQLLWDTVTGVDMAL

SEQ ID NO: 29956 - protein, 466 aa, Artificial Sequence
  derived and/or modified protein sequence (wt) from neuraminidase__InfluenzaB__AHL91479
MLPSTIQTLTLFLTSGGVLLSLYVSASLSYLLYSDILLKFSPTEITAPTMPSDCANASNVQAVNRSATKGVTLLLPEPEWTYPRLSCPGSTFQKALLISPHRFGETKGNSAPLIIREPFIACGPKECKHFALTHYAAQPGGYYNGTRGDRNKLRHLISVKLGKIPTVENSIFHMAAWSGSACHDGKEWTYIGVDGPDSNALLKIKYGEAYTDTYHSYANNILRTQESACNCIGGNCYLMITDGSASGISECRFLKIREGRIIKEIFPTGRVKHTEECTCGFASNKTIECACRDNSYTAKRPFVKLNVETDTAEIRLMCTETYLDTPRPDDGSITGPCESNGDKGSGGIKGGFVHQRMASKIGRWYSRTMSKTKRMGMGLYVKYDGDPWTDSDALALSGVMVSMEEPGWYSFGFEIKDKKCDVPCIGIEMVHDGGKETWHSAATAIYCLMGSGQLLWDTVTGVDMAL

SEQ ID NO: 29957 - protein, 466 aa, Artificial Sequence
  derived and/or modified protein sequence (wt) from neuraminidase__InfluenzaB__AHL91501
MLPSTIQTLTLFLTSGGVLLSLYVSASLSYLLYSDILLKFSPTEITAPTMPLDCANASNVQAVNRSATKGMTLLLPEPEWTYPRLSCPGSTFQKALLISPHRFGETKGNSAPLIIREPFIACGPKECKHFALTHYAAQPGGYYNGTREDRNKLRHLISVKLGKIPTVENSIFHMAAWSGSACHDGKEWTYIGVDGPDSNALLKIKYGEAYTDTYHSYANNILRTQESACNCIGGNCYLMITDGSASGISECRFLKIREGRIIKEIFPTGRVEHTEECTCGFASNKTIECACRDNSYTAKRPFVKLNVETDTAEIRLMCTETYLDTPRPDDGSITGPCESNGGKGSGGIKGGFVHQRMESKIGRWYSRTMSKTKRMGMGLYVKYDGDPWTDSDALALSGVMVSMEEPGWYSFGFEIKDKKCDVPCIGIEMVHDGGKETWHSAATAIYCLMGSGQLLWDTVTGVNMAL

SEQ ID NO: 29958 - protein, 466 aa, Artificial Sequence
  derived and/or modified protein sequence (wt) from neuraminidase__InfluenzaB__AHL91512
MLPSTIQTLTLFLTSGGVLLSLYVSASLSYLLYSDILLKFSPTEITAPTMPLDCANASNVQAVNRSATKGVTLLLPEPEWTYPRLSCPGSIFQKALLISPHRFGETKGNSAPLIIREPFIACGPKECKHFALTHYAAQPGGYYNGTRGDRNKLRHLISVKLGKIPTVENSIFHMAAWSGSACHDGKEWTYIGVDGPDSNALLKIKYGEAYTDTYHSYANNILRTQESACNCIGGNCYLMITDGSASGISECRFLKIREGRIIKEIFPTGRVKHTEECTCGFASNKTIECACRDNSYTAKRPFVKLNVETDTAEIRLMCTETYLDTPRPDDGSITGPCESNGDKGSGGIKGGFVHQRMASKIGRWYSRTMSKTKRMGMGLYVKYDGDPWTDSDALALSGVMVSMEEPGWYSFGFEIKDKKCDVPCIGIEMVHDGGKETWHSAATAIYCLMGSGQLLWDTVTGVDMAL

SEQ ID NO: 29959 - protein, 466 aa, Artificial Sequence
  derived and/or modified protein sequence (wt) from neuraminidase__InfluenzaB__AHL91523
MLPSTIQTLTLFLTSGGVLLSLYVSASLSYLLYSDILLKFSPTEITAPTMPLDCANASNVQAVNRSATKGVTLLLPEPEWTYPRLSCPGSTFQKALLISPHRFGETKGNSAPLIIREPFIACGPKECKHFALTHYAAQPGGYYNGTRGDRNKLRHLISVKLGKIPTVENSIFHMAAWSGSACHDGKEWTYIGVDGPDNNALLKIKYGEAYTDTYHSYANNILRTQESACNCIGGNCYLMITDGSASGISECRFLKIREGRIIKEIFPTGRVKHTEECTCGFASNKTIECACRDNSYTAKRPFVKLNVETDTAEIRLMCTETYLDTPRPDDGSITGPCESNGDKGSGGIKGGFVHQRMASKIGRWYSRTMSKTKRMGMGLYVKYDGDPWTDSDALALSGVMVSMEEPGWYSFGFEIKDKKCDVPCIGIEMVHDGGKETWHSAATAIYCLMGSGQLLWDTVTGVDMAL

SEQ ID NO: 29960 - protein, 466 aa, Artificial Sequence; identical to SEQ ID NO: 29957
  derived and/or modified protein sequence (wt) from neuraminidase__InfluenzaB__AHL91534

SEQ ID NO: 29961 - protein, 466 aa, Artificial Sequence
  derived and/or modified protein sequence (wt) from neuraminidase__InfluenzaB__AHL91545
MLPSTIQTLTLFLTSGGVLLSLYVSASLSYLLYSDILLKFSPTEITAPTMPLDCANASNVQAVNRSATKGVTLLLPEPEWTYPRLSCPGSTFQKALLISPHRFGETKGNSAPLIIREPFIACGPKECKHFALTHYAAQPGGYYNGTRGDRNKLRHLISVKLGKIPTVENSIFHMAAWSGSACHDGKEWTYIGVDGPDSNALLKIKYGEAYTDTYHSYANNILRTQESACNCIGGNCYLMITDGSASGISECRFLKIREGRIIKEIFPTGRVKHTEECTCGFASNKTIECACRDNSYTAKRPFVKLNVETDTAEIRLMCTETYLDTPRPDDGSITGPCESNGDKGSGGIKGGFVHQRMTSKIGRWYSRTMSKTKRMGMGLYVKYDGDPWTDSDALALSGVMVSMEEPGWYSFGFEIKDKKCDVPCIGIEMVHDGGKGTWHSAATAIYCLMGSGQLLWDTVTGVDMAL

SEQ ID NO: 29962 - protein, 466 aa, Artificial Sequence; identical to SEQ ID NO: 29957
  derived and/or modified protein sequence (wt) from neuraminidase__InfluenzaB__AHL91556

SEQ ID NO: 29963 - protein, 466 aa, Artificial Sequence; identical to SEQ ID NO: 29957
  derived and/or modified protein sequence (wt) from neuraminidase__InfluenzaB__AHL91578

SEQ ID NO: 29964 - protein, 466 aa, Artificial Sequence; identical to SEQ ID NO: 28885
  derived and/or modified protein sequence (wt) from neuraminidase__InfluenzaB__AHL91589

SEQ ID NO: 29965 - protein, 466 aa, Artificial Sequence
  derived and/or modified protein sequence (wt) from neuraminidase__InfluenzaB__AHL91600
MLPSTIQTLTLFLTTGGVLLSLYVSASLSYLLYSDILLKFSPTEITAPTMPLDCANASNVQAVNRSATKGVTFLLPEPEWTYPRLSCPGSTFQKALLISPHRFGETKGNSAPLIIREPFIACGPKECKHFALTHYAAQPGGYYNGTRGDRNKLRHLISVKLGKIPTVENSIFHMAAWSGSACHDGKEWTYIGVDGPDSNALLKIKYGEAYTDTYHSYANNILRTQESACNCIGGNCYLMITDGSASGISECRFLKIREGRIIKEIFPTGRVKHTEECTCGFASNKTIECACRDNSYTAKRPFVKLNVETDTAEIRLMCTETYLDTPRPDDGSITGPCESNGDKGSGGIKGGFVHQRMASKIGRWYSRTMSKTKRMGMGLYVKYDGDPWTDSDALALSGVMVSMEEPGWYSFGFEIKDKKCDVPCIGIEMVHDGGKETWHSAATAIYCLMGSGQLLWDTVTGVDMAL

SEQ ID NO: 29966 - protein, 466 aa, Artificial Sequence; identical to SEQ ID NO: 29965
  derived and/or modified protein sequence (wt) from neuraminidase__InfluenzaB__AHL91611

SEQ ID NO: 29967 - protein, 466 aa, Artificial Sequence; identical to SEQ ID NO: 29957
  derived and/or modified protein sequence (wt) from neuraminidase__InfluenzaB__AHL91622

SEQ ID NO: 29968 - protein, 466 aa, Artificial Sequence; identical to SEQ ID NO: 29958
  derived and/or modified protein sequence (wt) from neuraminidase__InfluenzaB__AHL91633

SEQ ID NO: 29969 - protein, 466 aa, Artificial Sequence; identical to SEQ ID NO: 29958
  derived and/or modified protein sequence (wt) from neuraminidase__InfluenzaB__AHL91644

SEQ ID NO: 29970 - protein, 466 aa, Artificial Sequence
  derived and/or modified protein sequence (wt) from neuraminidase__InfluenzaB__AHL91655
MLPSTIQTLTLFLTSGGVLLSLYVSASLSYLLYSDILLKFSPTEITAPTMPLDCANASNVQAVNRSATKEVTLLLPEPEWTYPRLSCPGSTFQKALLISPHRFGETKGNSAPLIIREPFIACGPKECKHFALTHYAAQPGGYYNGTRGDRNKLRHLISVKLGKIPTVENSIFHMAAWSGSACHDGKEWTYIGVDGPDSNALLKIKYGEAYTDTYHSYANNILRTQESACNCIGGNCYLMITDGSASGISECRFLKIREGRIIKEIFPTGRVKHTEECTCGFASNKTIECACRDNSYTAKRPFVKLNVETDTAEIRLMCTETYLDTPRPDDGSITGPCESNGDKGSGGIKGGFVHQRMASKIGRWYSRTMSKTKRMGMGLYVKYDGDPWTDSDALALSGVMVSMEEPGWYSFGFEIKDKKCDVPCIGIEMVHDGGKETWHSAATAIYCLMGSGQLLWDTVTGVDMAL

SEQ ID NO: 29971 - protein, 466 aa, Artificial Sequence; identical to SEQ ID NO: 29957
  derived and/or modified protein sequence (wt) from neuraminidase__InfluenzaB__AHL91666

SEQ ID NO: 29972 - protein, 466 aa, Artificial Sequence; identical to SEQ ID NO: 29958
  derived and/or modified protein sequence (wt) from neuraminidase__InfluenzaB__AHL91677

SEQ ID NO: 29973 - protein, 466 aa, Artificial Sequence; identical to SEQ ID NO: 29959
  derived and/or modified protein sequence (wt) from neuraminidase__InfluenzaB__AHL91688

SEQ ID NO: 29974 - protein, 466 aa, Artificial Sequence; identical to SEQ ID NO: 28687
  derived and/or modified protein sequence (wt) from neuraminidase__InfluenzaB__AHL91699

SEQ ID NO: 29975 - protein, 466 aa, Artificial Sequence
  derived and/or modified protein sequence (wt) from neuraminidase__InfluenzaB__AHL91710
MLPSTIQTLTLFLTSGGVLLSLYVSASLSYLLYSDILLKFSPTEITAPTMPLDCANASNVQAVNHSATKGVTLLLPEPEWTYPRLSCPGSTFQKALLISPHRFGETKGNSAPLIIREPFIACGPKECKHFALTHYAAQPGGYYNGTRGDRNKLRHLISVKLGKIPTVENSIFHMAAWSGSACHDGKEWTYIGVDGPDSNALLKIKYGEAYTDTYHSYANNILRTQESACNCIGGNCYLMITDGSASGISECRFLKIREGRIIKEIFPTGRVKHTEECTCGFASNKTIECACRDNSYTAKRPFVKLNVETDTAEIRLMCTETYLDTPRPDDGSITGPCESNGDKGSGGIKGGFVHQRMASKIGRWYSRTMSKTKRMGMGLYVKYDGDPWTDSDALALSGVMVSMEEPGWYSFGFEIKDKKCDVPCIGIEMVHDGGKETWHSAATAIYCLMGSGQLLWDTVTGVDMAL

SEQ ID NO: 29976 - protein, 466 aa, Artificial Sequence; identical to SEQ ID NO: 28614
  derived and/or modified protein sequence (wt) from neuraminidase__InfluenzaB__AHL91721

SEQ ID NO: 29977 - protein, 466 aa, Artificial Sequence; identical to SEQ ID NO: 28682
  derived and/or modified protein sequence (wt) from neuraminidase__InfluenzaB__AHL91732

SEQ ID NO: 29978 - protein, 466 aa, Artificial Sequence; identical to SEQ ID NO: 28614
  derived and/or modified protein sequence (wt) from neuraminidase__InfluenzaB__AHL91743

SEQ ID NO: 29979 - protein, 466 aa, Artificial Sequence
  derived and/or modified protein sequence (wt) from neuraminidase__InfluenzaB__AHL91754
MLPSTIQTLTLLLTSGGVLLSLYVSASLSYLLYSDILLKFSPTEITAPTMPLDCANASNVQAVNRSATKGVTLLLPEPEWTYPRLSCPGSTFQKALLISPHRFGETKGNSAPLIIREPFIACGPKECKHFALTHYAAQPGGYYNGTRGDRNKLRHLISVKLGKIPTVENSIFHMAAWSGSACHDGKEWTYIGVDGPDSNALLKIKYGEAYTDTYHSYANNILRTQESACNCIGGNCYLMITDGSASGISECRFLKIREGRIIKEIFPTGRVKHTEECTCGFASNKTIECACRDNSYTAKRPFVKLNVETDTAEIRLMCTETYLDTPRPDDGSITGPCESNGDKGSGGIKGGFVHQRMASKIGRWYSRTMSKTKRMGMGLYVKYDGDPWTDSDALALSGVMVSMEEPGWYSFGFEIKDKKCDVPCIGIEMVHDGGKETWHSAATAIYCLMGSGQLLWDTVTGVDMAL

SEQ ID NO: 29980 - protein, 466 aa, Artificial Sequence; identical to SEQ ID NO: 28614
  derived and/or modified protein sequence (wt) from neuraminidase__InfluenzaB__AHL91765

SEQ ID NO: 29981 - protein, 466 aa, Artificial Sequence
  derived and/or modified protein sequence (wt) from neuraminidase__InfluenzaB__AHL91776
MLPSTIQTLTLFLTSGGVLLSLYVSASLSYLLYSDILLKFSPTEITAPTMPLDCANASNVQAVNRSATKGVTLLLPEPEWTYPRLSCPGSTFQKALLISPHRFGETKGNSAPLIIREPFIACGPKECKHFALTHYAAQPGGYYNGTRGDRNKLRHLISVKLGKIPTVETSIFHMAAWSGSACHDGKEWTYIGVDGPDNNALLKIKYGEAYTDTYHSYANNILRTQESACNCIGGNCYLMITDGSASGVSECRFLKIREGRIIKEIFPTGRVKHTEECTCGFASNKTIECACRDNSYTAKRPFVKLNVETDTAEIRLMCTETYLDTPRPDDGSITGPCESNGDKGSGGIKGGFVHQRMASKIGRWYSRTMSKTERMGMGLYVKYDGDPWADSDALALSGVMVSMEEPGWYSFGFEIKDKKCDVPCIGIEMVHDGGKETWHSAATAIYCLMGSGQLLWDTVTGVDMAL

SEQ ID NO: 29982 - protein, 466 aa, Artificial Sequence; identical to SEQ ID NO: 29981
  derived and/or modified protein sequence (wt) from neuraminidase__InfluenzaB__AHL91787

SEQ ID NO: 29983 - protein, 466 aa, Artificial Sequence; identical to SEQ ID NO: 29981
  derived and/or modified protein sequence (wt) from neuraminidase__InfluenzaB__AHL91798

SEQ ID NO: 29984 - protein, 466 aa, Artificial Sequence; identical to SEQ ID NO: 28618
  derived and/or modified protein sequence (wt) from neuraminidase__InfluenzaB__AHL91809

SEQ ID NO: 29985 - protein, 466 aa, Artificial Sequence
  derived and/or modified protein sequence (wt) from neuraminidase__InfluenzaB__AHL91820
MLPSTIQTLTLFLTSGGVLLSLYVSASLSYLLYSDILLKFSPTEITAPTMPLDCANASNVQAVNRSATKGVTLLLPEPEWTYPRLSCPGSTFQKALLISPHRFGETKGNSAPLIIREPFIACGPNECKHFALTHYAAQPGGYYNGTRGDRNKLRHLISVKLGKIPTVENSIFHMAAWSGSACHDGKEWTYIGVDGPDNNALLKIKYGEAYTDTYHSYANNILRTQESACNCIGGNCYLMVTDGSASGVSECRFLKIREGRIIKEIFPTGRVKHTEECTCGFASNKTIECACRDNSYTAKRPFVKLNVETDTAEIRLMCTETYLDTPRPDDGSITGPCESNGDKGSGGIKGGFVHQRMASKIGRWYSRTMSKTERMGMGLYVKYDGDPWADSDALALSGVMVSMEEPGWYSFGFEIKDKKCDVPCIGIEMVHDGGKETWHSAATAIYCLMGSGQLLWDTVTGVDMAL

SEQ ID NO: 29986 - protein, 466 aa, Artificial Sequence
  derived and/or modified protein sequence (wt) from neuraminidase__InfluenzaB__AHL91831
MLPSTIQTLTLFLTSGGVLLSLYVSASLSYLLYSDILLKFSPTEITAPTMPLDCANASNVQAVNRSATKGVTLLLPEPEWTYPRLSCPGSTFQKALLISPHRFGETKGNSAPLIIREPFIACGPNECKHFALTHYAAQPGGYYNGTRGDRNKLRHLISVKLGKIPTVENSIFHMAAWSGSACHDGKEWTYIGVDGPDNNALLKIKYGEAYTDTYHSYANNILRTQESACNCIGGNCYLMITDGSASGVSECRFLKIREGRIIKEIFPTGRVKHTEECTCGFASNKTIECACRDNSYTAKRPFVKLNVETDTAEIRLMCTETYLDTPRPDDGSITGPCESNGDKGSGGIKGGFVHQRMTSKIGRWYSRTMSKTERMGMGLYVKYDGDPWADSDALALSGVMVSMEEPGWYSFGFEIKDKKCDVPCIGIEMVHDGGKETWHSAATAIYCLMGSGQLLWDTVTGVDMAL

SEQ ID NO: 29987 - protein, 466 aa, Artificial Sequence; identical to SEQ ID NO: 29131
  derived and/or modified protein sequence (wt) from neuraminidase__InfluenzaB__AHL91842

SEQ ID NO: 29988 - protein, 466 aa, Artificial Sequence
  derived and/or modified protein sequence (wt) from neuraminidase__InfluenzaB__AHL91853
MLPSTIQTLTLFLTSGGVLLSLYVSASLSYLLYSDILLKFSTTEITAPTMPSDCANASNVQAVNRSATKGVTLLLPEPEWTYPRLSCPGSTFQKALLISPHRFGETKGNSAPLIIREPFIACGPKECKHFALTHYAAQPGGYYNGTREDRNKLRHLISVKLGKIPTVENSIFHMAAWSGSACHDGKEWTYIGVDGPDSNALLKIKYGEAYTDTYHSYANNILRTQESACNCIGGNCYLMITDGSASGISECRFLKIREGRIIKEIFPTGRVKHTEECTCGFASNKTIECACRDNSYTAKRPFVKLNVETDTAEIRLMCTETYLDTPRPDDGSITGPCESNGNKGSGGIKGGFVHQRMASKIGRWYSRTMSKTKRMGMGLYVKYDGDPWTDSDALALSGVMVSMEEPGWYSFGFEIKDKKCDVPCIGIEMVHDGGKETWHSAATAIYCLMGSGQLLWDTVTGVDMAL

SEQ ID NO: 29989 - protein, 466 aa, Artificial Sequence; identical to SEQ ID NO: 29129
  derived and/or modified protein sequence (wt) from neuraminidase__InfluenzaB__AHL91864

SEQ ID NO: 29990 - protein, 466 aa, Artificial Sequence; identical to SEQ ID NO: 29129
  derived and/or modified protein sequence (wt) from neuraminidase__InfluenzaB__AHL91875

SEQ ID NO: 29991 - protein, 466 aa, Artificial Sequence; identical to SEQ ID NO: 28886
  derived and/or modified protein sequence (wt) from neuraminidase__InfluenzaB__AHL91886

SEQ ID NO: 29992 - protein, 466 aa, Artificial Sequence; identical to SEQ ID NO: 28627
  derived and/or modified protein sequence (wt) from neuraminidase__InfluenzaB__AHL91897

SEQ ID NO: 29993 - protein, 466 aa, Artificial Sequence; identical to SEQ ID NO: 28627
  derived and/or modified protein sequence (wt) from neuraminidase__InfluenzaB__AHL91908

SEQ ID NO: 29994 - protein, 466 aa, Artificial Sequence
  derived and/or modified protein sequence (wt) from neuraminidase__InfluenzaB__AHL91919
MLPSTIQTLTLFLTSGGVLLSLYVSASLSYLLYSDILLKFSQTEITAPIMPLDCANASNVQAVNRSATKGVTPLLPEPEWTYPRLSCPGSTFQKALLISPHRFGETKGNSAPLIIREPFIACGPKECKHFALTHYAAQPGGYYNGTREDRNKLRHLISVKLGKIPTVENSIFHMAAWSGSACHDGREWTYIGVDGPDSNALLKIKYGEAYTDTYHSYAKNILRTQESACNCIGGDCYLMITDGPASGISECRFLKIREGRIIKEIFPTGRVKHTEECTCGFASNKTIECACRDNSYTAKRPFVKLNVETDTAEIRLMCTETYLDTPRPNDGSITGPCESNGDKGSGGIKGGFVHQRMASKIGRWYSRTMSKTKRMGMGLYVKYDGDPWTDSEALALSGVMVSMEEPGWYSFGFEIKDKKCDVPCIGIEMVHDGGKTTWHSAATAIYCLMGSGQLLWDTVTGVDMAL

SEQ ID NO: 29995 - protein, 466 aa, Artificial Sequence; identical to SEQ ID NO: 29689
  derived and/or modified protein sequence (wt) from neuraminidase__InfluenzaB__AHL91930

SEQ ID NO: 29996 - protein, 466 aa, Artificial Sequence; identical to SEQ ID NO: 28627
  derived and/or modified protein sequence (wt) from neuraminidase__InfluenzaB__AHL91941

SEQ ID NO: 29997 - protein, 466 aa, Artificial Sequence; identical to SEQ ID NO: 28627
  derived and/or modified protein sequence (wt) from neuraminidase__InfluenzaB__AHL91952

SEQ ID NO: 29998 - protein, 466 aa, Artificial Sequence; identical to SEQ ID NO: 28670
  derived and/or modified protein sequence (wt) from neuraminidase__InfluenzaB__AHL91963

SEQ ID NO: 29999 - protein, 466 aa, Artificial Sequence
  derived and/or modified protein sequence (wt) from neuraminidase__InfluenzaB__AHL91974
MLPSTIQTLTLFLTSGGVLLSLYVSASLSYLLYSDILLKFSPTEITTPTMPLDCANASNVQAVNRSATKGVTLLLPEPEWTYPRLSCPGSTFQKALLISPHRFGETKGNSAPLIIREPFIACGPNECKHFALTHYAAQPGGYYNGTRGDRNKLRHLISVKLGKIPTVENSIFHMAAWSGSACHDGKEWTYIGVDGPDNNALLKIKYGEAYTDTYHSYANNILRTQESACNCIGGNCYLMITDGSASGVSECRFLKIREGRIIKEIFPTGRVKHTEECTCGFASNKTIECACRDNSYTAKRPFVKLNVETDTAEIRLMCTDTYLDTPRPDDGSITGPCESNGDKGSGGIKGGFVHQRMASKIGRWYSRTMSKTERMGMGLYVKYDGDPWADSDALAFSGVMVSMKEPGWYSFGFEIKDKKCDVPCIGIEMVHDGGKETWHSAATAIYCLMGSGQLLWDTVTGVDMAL

SEQ ID NO: 30000 - protein, 466 aa, Artificial Sequence; identical to SEQ ID NO: 28670
  derived and/or modified protein sequence (wt) from neuraminidase__InfluenzaB__AHL91985

SEQ ID NO: 30001 - protein, 466 aa, Artificial Sequence; identical to SEQ ID NO: 28627
  derived and/or modified protein sequence (wt) from neuraminidase__InfluenzaB__AHL91995

SEQ ID NO: 30002 - protein, 466 aa, Artificial Sequence
  derived and/or modified protein sequence (wt) from neuraminidase__InfluenzaB__AHL92006
MLPSTIQTLTLFLTSGGVLLSLYVSASLSYLLYSDILLKFSPTEITAPTMPLDCANASNVQAVNRSATKGVTLLLPEPEWTYPRLSCPGSTFQKALLISPHRFGETKGNSAPLIIREPFIACGPNECKHFALTHYAAQPGGYYNGTRGDRNKLRHLISVKLGKIPTVENSIFHMAAWSGSACHDGKEWTYIGVDGPDNNALLKIKYGEAYTDTYHSYANKILRTQESACNCIGGNCYLMITDGSASGVSECRFLKIREGRIIKEIFPTGRVKHTEECTCGFASNKTIECACRDNSYTAKRPFVKLNVETDTAEIRLMCTDTYLDTPRPDDGSITGPCESNGDKGSGGIKGGFVHQRMASKIGRWYSRTMSKTERMGMGLYVKYDGDPWADSDALAFSGVMVSMKEPGWYSFGFEIKDKKCDVPCIGVEMVHDGGKETWHSAATAIYCLMGSGQLLWDTVTGVDMAL

SEQ ID NO: 30003 - protein, 466 aa, Artificial Sequence; identical to SEQ ID NO: 28635
  derived and/or modified protein sequence (wt) from neuraminidase__InfluenzaB__AHL92017

SEQ ID NO: 30004 - protein, 466 aa, Artificial Sequence; identical to SEQ ID NO: 28635
  derived and/or modified protein sequence (wt) from neuraminidase__InfluenzaB__AHL92028

SEQ ID NO: 30005 - protein, 466 aa, Artificial Sequence
  derived and/or modified protein sequence (wt) from neuraminidase__InfluenzaB__AHL92039
MLPSTIQTLTLFLTSGGVLLSLYVSASLSYLLYSDILLKFSPTEITAPTMPLDCANASNVHAVNRSATKGVTLLLPEPEWIYPRLSCPGSTFQKALLISPHRFGETKGNSAPLIIREPFIACGPNECKHFALTHYAAQPGGYYNGTRGDRNKLRHLISVKLGKIPTVENSIFHMAAWSGSACHDGKEWTYIGVDGPDNNALLKIKYGEAYTDTYHSYANNILRTQESACNCIGGNCYLMITDGSASGVSECRFLKIREGRIIKEIFPTGRVKHTEECTCGFASNKTIECACRDNSYTAKRPFVKLNVETDTAEIRLMCTDTYLDTPRPDDGSITGPCESNGDKGSGGIKGGFVHQRMASKIGRWYSRTMSKTERMGMGLYVKYNGDPWADSDALAFSGVMVSMKEPGWYSFGFEIKDKKCDVPCIGIEMVHDGGKETWHSAATAIYCLMGSGQLLWDTVTGVDMAL

SEQ ID NO: 30006 - protein, 466 aa, Artificial Sequence; identical to SEQ ID NO: 28635
  derived and/or modified protein sequence (wt) from neuraminidase__InfluenzaB__AHL92050

SEQ ID NO: 30007 - protein, 466 aa, Artificial Sequence
  derived and/or modified protein sequence (wt) from neuraminidase__InfluenzaB__AHL92061
MLPSTTQTLTLFLTSGGVLLSLYVSASLSYLLYSDILLKFSPTEITAPTMPLDCANASNVQAVNRSATKGVTLLLPEPEWTYPRLSCPGSTFQKALLISPHRFGETKGNSAPLIIREPFIACGPNECKHFALTHYAAQPGGYYNGTRGDRNKLRHLISVKLGKIPTVENSIFHMAAWSGSACHDGKEWTYIGVDGPDNNALLKIKYGEAYTDTYHSYANKILRTQESACNCIGGNCYLMITDGSASGVSECRFLKIREGRIIKEIFPTGRVKHTEECTCGFASNKTIECACRDNSYTAKRPFVKLNVETDTAEIRLMCTDTYLDTPRPDDGSITGPCESNGDKGSGGIKGGFVHQRMASKIGRWYSRTMSKTERMGMGLYVKYDGDPWADSDALAFSGVMVSMKEPGWYSFGFEIKDKKCDVPCIGIEMVHDGGKETWHSAATAIYCLMGSGQLLWDTVTGVDMAL

SEQ ID NO: 30008 - protein, 466 aa, Artificial Sequence
  derived and/or modified protein sequence (wt) from neuraminidase__InfluenzaB__AHL92072
MLPSTIQTLTLFLTSGGVLLSLYVSASLSYLLYSDILLKFSPTEITAPTMPLDCANASNVQAVNHSATKGVTLLLPEPEWTYPRLSCPGSTFQKALLISPHRFGETKGNSAPLIIREPFIACGPNECKHFALTHYAAQPGGYYNGTRGDRNKLRHLISVKLGKIPTVENSIFHMAAWSGSACHDGKEWTYIGVDGPDNNALLKIKYGEAYTDTYHSYANKILRTQESACNCIGGNCYLMITDGSASGVSECRFLKIREGRIIKEIFPTGRVKHTEECTCGFASNKTIECACRDNSYTAKRPFVKLNVETDTAEIRLMCTDTYLDTPRPDDGSITGPCESNGDKGSGGIKGGFVHQRMASKIGRWYSRTMSKTERMGMGLYVKYDGDPWADSDALAFSGVMVSMKEPGWYSFGFEIKDKKCDVPCIGIEMVHDGGKETWHSAATAIYCLMGSGQLLWDTVTGVDMAL

SEQ ID NO: 30009 - protein, 466 aa, Artificial Sequence; identical to SEQ ID NO: 30008
  derived and/or modified protein sequence (wt) from neuraminidase__InfluenzaB__AHL92083

SEQ ID NO: 30010 - protein, 466 aa, Artificial Sequence; identical to SEQ ID NO: 30008
  derived and/or modified protein sequence (wt) from neuraminidase__InfluenzaB__AHL92094

SEQ ID NO: 30011 - protein, 466 aa, Artificial Sequence
  derived and/or modified protein sequence (wt) from neuraminidase__InfluenzaB__AHL92105
MLPSTIQTLTLFLTSGGVLLSLYVSASLSYLLYSDILLKFSPTEITAPTMPLDCANASNVHAVNRSATKGVTLLLPEPEWTYPRLSCPGSTFQKALLISPHRFGETKGNSAPLIIREPFIACGPNECKHFALTHYAAQPGGYYNGTRGDRNKLRHLISVKLGKIPTVENSIFHMAAWSGSACHDGKEWTYIGVDGPDNNALLKIKYGEAYTDTYHSYANNILRTQESACNCIGGNCYLMITDGSASGVSECRFLKIREGRIIKEIFPTGRVKHTEECTCGFASNKTIECACRDNSYTAKRPFVKLNVETDTAEIRLMCTDTYLDTPRPDDGSITGPCESNGDKGGGGIKGGFVHQRMASKIGRWYSRTMSKTERMGMGLYVKYDGDPWADSDALAFSGVMVSLKEPGWYSFGFEIKDKKCDVPCIGIEMVHDGGKETWHSAATAIYCLMGSGQLLWDTVTGVDMAL

SEQ ID NO: 30012 - protein, 466 aa, Artificial Sequence; identical to SEQ ID NO: 28788
  derived and/or modified protein sequence (wt) from neuraminidase__InfluenzaB__AHL92116

SEQ ID NO: 30013 - protein, 466 aa, Artificial Sequence; identical to SEQ ID NO: 30008
  derived and/or modified protein sequence (wt) from neuraminidase__InfluenzaB__AHL92127

SEQ ID NO: 30014 - protein, 466 aa, Artificial Sequence; identical to SEQ ID NO: 30008
  derived and/or modified protein sequence (wt) from neuraminidase__InfluenzaB__AHL92138

SEQ ID NO: 30015 - protein, 466 aa, Artificial Sequence; identical to SEQ ID NO: 30008
  derived and/or modified protein sequence (wt) from neuraminidase__InfluenzaB__AHL92149

SEQ ID NO: 30016 - protein, 466 aa, Artificial Sequence
  derived and/or modified protein sequence (wt) from neuraminidase__InfluenzaB__AHL92171
MLPSTIQTLTLFLTSGGVLLSLYVSASLSYLLYSDILLKFSPTEITAPTMPLDCANASNVQAVNHSATKGVTLLLPEPEWTYPRLSCPGSTFQKALLVSPHRFGETKGNSAPLIIREPFIACGPNECKHFALTHYAAQPGGYYNGTRGDRNKLRHLISVKLGKIPTVENSIFHMAAWSGSACHDGKEWTYIGVDGPDNNALLKIKYGEAYTDTYHSYANKILRTQESACNCIGGNCYLMITDGSASGVSECRFLKIREGRIIKEIFPTGRVKHTEECTCGFASNKTIECACRDNSYTAKRPFVKLNVETDTAEIRLMCTDTYLDTPRPDDGSITGPCESNGDKGSGGIKGGFVHQRMASKIGRWYSRTMSKTERMGMGLYVKYDGDPWADSDALAFSGVMVSMKEPGWYSFGFEIKDKKCDVPCIGIEMVHDGGKETWHSAATAIYCLMGSGQLLWDTVTGVDMAL

SEQ ID NO: 30017 - protein, 466 aa, Artificial Sequence
  derived and/or modified protein sequence (wt) from neuraminidase__InfluenzaB__AHL92182
MLPSTIQTLTLFLTSGGVLLSLYVSASLSYLLYSDILLKFSPTEITAPTMPLDCANASNVHAVNRSATKGVTLLLPEPEWAYPRLSCPGSTFQKALLISPHRFGETKGNSAPLIIREPFIACGPNECKHFALTHYAAQPGGYYSGTRGDRNKLRHLISVKLGKIPTVENSIFHMAAWSGSACHDGKEWTYIGVDGPDNNALLKIKYGEAYTDTYHSYANNILRTQESACNCIGGNCYLMITDGSASGVSECRFLKIREGRIIKEIFPTGRVKHTEECTCGFASNKTIECACRDNSYTAKRPFVKLNVETDTAEIRLMCTDTYLDTPRPDDGSITGPCESNGDKGSGGIKGGFVHQRMASKIGRWYSRTMSKTERMGMGLYVKYDGDPWADSDALAFSGVMVSMKEPGWYSFGFEIKDKKCDVPCIGIEMVHDGGKETWHSAATAIYCLMGSGQLLWDTVTGVDMAL

SEQ ID NO: 30018 - protein, 466 aa, Artificial Sequence; identical to SEQ ID NO: 30017
  derived and/or modified protein sequence (wt) from neuraminidase__InfluenzaB__AHL92193

SEQ ID NO: 30019 - protein, 466 aa, Artificial Sequence; identical to SEQ ID NO: 28788
  derived and/or modified protein sequence (wt) from neuraminidase__InfluenzaB__AHL92204

SEQ ID NO: 30020 - protein, 466 aa, Artificial Sequence
  derived and/or modified protein sequence (wt) from neuraminidase__InfluenzaB__AHL92215
MLPSTIQTLTLFLTSGGVLLSLYVSASLSYLLYSDILLKFSPTEITAPTMPLDCANASNVQAVNHSATKGVTLLLPEPEWTYPRLSCPGSTFQKALLISPHRFGETKGNSAPLIIREPFIACGPNECKHFALTHYAAQPGGYYNGTRGDRNKLRHLISVKLGKIPTVENSIFHMAAWSGSACHDGKEWTYIGVDGPDNNALLKIKYGEAYTDTYHSYANKILRTQESACNCIGGNCYLMITDGSASGVSECRFLKIREGRIIKEIFPKGRVKHTEECTCGFASNKTIECACRDNSYTAKRPFVKLNVETDTAEIRLMCTDTYLDTPRPDDGSITGPCESNGDKGSGGIKGGFVHQRMASKIGRWYSRTMSKTERMGMGLYVKYDGDPWADSDALAFSGVMVSMKEPGWYSFGFEIKDKKCDVPCIGIEMVHDGGKETWHSAATAIYCLMGSGQLLWDTVTGVDMAL

SEQ ID NO: 30021 - protein, 466 aa, Artificial Sequence; identical to SEQ ID NO: 30008
  derived and/or modified protein sequence (wt) from neuraminidase__InfluenzaB__AHL92226

SEQ ID NO: 30022 - protein, 466 aa, Artificial Sequence; identical to SEQ ID NO: 28788
  derived and/or modified protein sequence (wt) from neuraminidase__InfluenzaB__AHL92237

SEQ ID NO: 30023 - protein, 466 aa, Artificial Sequence; identical to SEQ ID NO: 30008
  derived and/or modified protein sequence (wt) from neuraminidase__InfluenzaB__AHL92248

SEQ ID NO: 30024 - protein, 466 aa, Artificial Sequence
  derived and/or modified protein sequence (wt) from neuraminidase__InfluenzaB__AHL92259
MLPSTIQTLTLFLTSGGVLLSLYVSASLSYLLYSDILLKFSPTEITASTMPLDCANASNVQAVNRSATKGVTLLLPEPEWTYPRLSCPGSTFQKALLISPHRFGETKGNSAPLIIREPFIACGPNECKHFALTHYAAQPGGYYNGTRGDRNKLRHLISVKLGKIPTVENSIFHMAAWSGSACHDGKEWTYIGVDGPDNDALLKIKYGEAYTDTYHSYANKILRTQESACNCIGGNCYLMITDGSASGVSECRFLKIREGRIIKEIFPTGRVKHTEECTCGFASNKTIECACRDNSYTAKRPFVKLNVETDTAEIRLMCTDTYLDTPRPDDGSITGPCESNGDKGSGGIKGGFVHQRMTSKIGRWYSRTMSKTERMGMGLYVKYDGDPWADSDALAFSGVMVSMKEPGWYSFGFEIKDKKCDVPCIGIEMVHDGGKETWHSAATAIYCLMGSGQLLWDTVTGVDMAL

SEQ ID NO: 30025 - protein, 466 aa, Artificial Sequence; identical to SEQ ID NO: 30008
  derived and/or modified protein sequence (wt) from neuraminidase__InfluenzaB__AHL92270

SEQ ID NO: 30026 - protein, 466 aa, Artificial Sequence
  derived and/or modified protein sequence (wt) from neuraminidase__InfluenzaB__AHL92281
MLPSTIQTLTLFLTSGGVLLSLYVSASLSYLLYSDILLKFSPTEITAPTMPLDCANASNVQAANHSATKGVTLLLPEPEWTYPRLSCPGSTFQKALLISPHRFGETKGNSAPLIIREPFIACGPNECKHFALTHYAAQPGGYYNGTRGDRNKLRHLISVKLGKIPTVENSIFHMAAWSGSACHDGKEWTYIGVDGPDNNALLKIKYGEAYTDTYHSYANKILRTQESACNCIGGNCYLMITDGSASGVSECRFLKIREGRIIKEIFPTGRVKHTEECTCGFASNKTIECACRDNSYTAKRPFVKLNVETDTAEIRLMCTDTYLDTPRPDDGSITGPCESNGDKGSGGIKGGFVHQRMASKIGRWYSRTMSKTERMGMGLYVKYDGDPWADSDALAFSGVMVSMKEPGWYSFGFEIKDKKCDVPCIGIEMVHDGGKETWHSAATAIYCLMGSGQLLWDTVTGVDMAL

SEQ ID NO: 30027 - protein, 466 aa, Artificial Sequence
  derived and/or modified protein sequence (wt) from neuraminidase__InfluenzaB__AHL92303
MLPSTIQTLTLFLTSGGVLLSLYVSASLSYLLYSDILLKFSPTEITAPTMPLDCANASNVHAVNRSATKGVTFLLPEPEWTYPRLSCPGSTFQKALLISPHRFGETKGNSAPLIIREPFIACGPNECKHFALTHYAAQPGGYYNGTRGDRNKLRHLISVKLGKIPTVENSIFHMAAWSGSACHDGKEWTYIGVDGPDNNALLKIKYGEAYTDTYHSYANNILRTQESACNCIGGNCYLMITDGSASGVSECRFLKIREGRIIKEIFPTGRVKHTEECTCGFASNKTIECACRDNSYTAKRPFVKLNVETDTAEIRLMCTDTYLDTPRPDDGSITGPCESNGNKGSGGIKGGFVHQRMASKIGRWYSRTMSKTERMGMGLYVKYDGDPWADSDALAFSGVMVSMKEPGWYSFGFEIKDKKCDVPCIGIEMVHDGGKETWHSAATAIYCLMGSGQLLWDTVTGVDMAL

SEQ ID NO: 30028 - protein, 466 aa, Artificial Sequence
  derived and/or modified protein sequence (wt) from neuraminidase__InfluenzaB__AHL92314
MLPSTIQTLTLFLTSGGVLLSLYVSASLSYLLYSDILLKFSQTKITAPIMPLDCANASNVQAVNRSAAKGVTLLLPEPEWTYPRLSCPGSTFQKALLISPHRFGETKGNSAPLIIREPFIACGPTECKHFALTHYAAQPGGYYNGTREDRNKLRHLISVKLGKIPTVENSIFHMAAWSGSACHDGKEWTYVGVDGPDSNALLKIKYGEAYTDTYHSYAKNILRTQESACNCIGGDCYLMITDGPASGISECRFLKIREGRIIKEIFPTGRVKHTEECTCGFASNKTIECACRDNSYTAKRPFVKLNVETDTAEIRLMCTETYLDTPRPNDGSITGPCESDGDKGSGGIKGGFVHQRMASKIGRWYSRTMSKTKRMGMGLYVKYDGDPWTDSEALALSGVMVSMDEPGWYSFGFEIKDKKCDVPCIGIEMVHDGGKTTWHSAATAIYCLMGSGQLLWDTVTGVDMAL

SEQ ID NO: 30029 - protein, 466 aa, Artificial Sequence
  derived and/or modified protein sequence (wt) from neuraminidase__InfluenzaB__AHL92325
MLPSTIQTLTLFLTSGGVLLSLYVSASLSYLLYSDILLKFSQTEITAPIMPLDCANASNVQAVNRSAAKGVTLLLPEPEWTYPRLSCPGSTFQKALLISPHRFGETKGNSAPLIIREPFIACGPTECKHFALTHYAAQPGGYYNGTREDRNKLRHLISVKLGKIPTVENSIFHMAAWSGSACHDGKEWTYIGVDGPDSNALLKIKYGEAYTDTYHSYAKNILRTQESACNCIGGDCYLMITDGPASGISECRFLKIREGRIIKEIFPTGRVKHTEECTCGFASNKTIECACRDNSYTAKRPFVKLNVETDTAEIRLMCTETYLDTPRPNDGSITGPCESDGDKGSGGIKGGFVHQRMASKIGRWYSRTMSKTKRMGMGLYVKYDGDPWTDSEALALSGVMVSMGEPGWYSFGFEIKDKKCDVPCIGIEMVHDGGKTTWHSAATAIYCLMGSGQLLWDTVTGVDMAL

SEQ ID NO: 30030 - protein, 466 aa, Artificial Sequence; identical to SEQ ID NO: 28788
  derived and/or modified protein sequence (wt) from neuraminidase__InfluenzaB__AHL92336

SEQ ID NO: 30031 - protein, 466 aa, Artificial Sequence
  derived and/or modified protein sequence (wt) from neuraminidase__InfluenzaB__AHL92358
MLPSTIQTLTLFLTSGGVLLSLYVSASLSYLLYSDILLKFSQTEITAPIMPLDCANASNVQAVNRSAAKGVTLLLPEPEWTYPRLSCPGSTFQKALLISPHRFGETKGNSAPLIIREPFIACGPKECKHFALTHYAAQPGGYYNGTREDRNKLRHLISVKLGKIPTVENSIFHMAAWSGSACHDGKEWTYVGVDGPDSNALLKIKYGEAYTDTYHSYAKNILRTQESACNCIGGDCYLMITDGPASGISECRFLKIREGRIIKEIFPTGRVKHTEECTCGFASNKTIECACRDNSYTAKRPFVKLNVETDTAEIRLMCTETYLDTPRPNDGSITGPCESDGDKGSGGIKGGFVHQRMASKIGRWYSRTMSKTKRMGMGLYVKYDGDPWTDSEALALSGVMVSMEEPGWYSFGFEIKDKKCDVPCIGIEMVHDGGKTTWHSAATAIYCLMGSGQLLWDTVTGVDMAL

SEQ ID NO: 30032 - protein, 466 aa, Artificial Sequence; identical to SEQ ID NO: 30031
  derived and/or modified protein sequence (wt) from neuraminidase__InfluenzaB__AHL92369

SEQ ID NO: 30033 - protein, 466 aa, Artificial Sequence
  derived and/or modified protein sequence (wt) from neuraminidase__InfluenzaB__AHL92380
MLPSTIQTLTLFLTSGGVLLSLYVSASLSYLLYSDILLKFSRTEITAPIMPLDCANASNVQAVNRSATKGVKLLLPEPEWTYPRLSCPGSTFQKALLISPHRFGETKGNSAPLIIREPFIACGPKECKHFALTHYAAQPGGYYNGTREDRNKLRHLISVKLGKIPTVENSIFHMAAWSGSACHDGREWTYIGVDGPDSNALLKIKYGEAYTDTYHSYAKNILRTQESACNCIGGDCYLMITDGPASGISECRFLKIREGRIIKEIFPTGRVKHTEECTCGFASNKTIECACRDNSYTAKRPFVKLNVETDTAEIRLMCTETYLDTPRPNDGSITGPCESNGDKGSGGIKGGFVHQRMASKIGRWYSRTMSKTKRMGMGLYVKYDGDPWTDSEALALSGVMVSMEEPGWYSFGFEIKDKKCDVPCIGIEMVHDGGKTTWHSAATAIYCLMGSGQLLWDTVTGVNMTL

SEQ ID NO: 30034 - protein, 466 aa, Artificial Sequence
  derived and/or modified protein sequence (wt) from neuraminidase__InfluenzaB__AHL92391
MLPSTIQTLTLFLTSGGVLLSLYVSASLSYLLYSDILLKFSRTEITAPIMPLDCANASNVQAVNRSATKGVTLLLPEPEWTYPRLSCPGSTFQKALLISPHRFGETKGNSAPLIIREPFIACGPKECKHFALTHYAAQPGGYYNGTREDRSKLRHLISVKLGKIPTVENSIFHMAAWSGSACHDGREWTYIGVDGPDSNALLKIKYGEAYTDTYHSYAKNILRTQESACNCIGGDCYLMITDGPASGISECRFLKIREGRIIKEIFPTGRVKHTEECTCGFASNKTIECACRDNSYTAKRPFVKLNVETDTAEIRLMCTETYLDTPRPNDGSITGPCESNGDKGSGGIKGGFVHQRMASKIGRWYSRTMSKTKRMGMGLYVKYDGDPWTDSEALALSGVMVSMEEPGWYSFGFEIKDKKCDVPCIGIEMVHDGGKTTWHSAATAIYCLMGSGQLLWDTVTGVNMTL

SEQ ID NO: 30035 - protein, 466 aa, Artificial Sequence; identical to SEQ ID NO: 28817
  derived and/or modified protein sequence (wt) from neuraminidase__InfluenzaB__AHL92402

SEQ ID NO: 30036 - protein, 466 aa, Artificial Sequence; identical to SEQ ID NO: 28817
  derived and/or modified protein sequence (wt) from neuraminidase__InfluenzaB__AHL92413

SEQ ID NO: 30037 - protein, 466 aa, Artificial Sequence; identical to SEQ ID NO: 28817
  derived and/or modified protein sequence (wt) from neuraminidase__InfluenzaB__AHL92424

SEQ ID NO: 30038 - protein, 466 aa, Artificial Sequence
  derived and/or modified protein sequence (wt) from neuraminidase__InfluenzaB__AHL92435
MLPSTIQTLTLFLTSGGVLLSLYVSASLSYLLYSDILLKFSQTEITAPIMPLDCANASNVQAVNRSAAKGVTLLLPEPEWTYPRLSCPGSTFQKALLISPHRFGETKGNSAPLIIREPFIACGPTECKHFALTHYAAQPGGYYNGTREDRNKLRHLISVKLGKIPTVENSIFHMAAWSGSACHDGKEWTYIGVDGPDSNALLKIKYGEAYTDTYHSYAKNILRTQESACNCIGGDCYLMITDGPASGISECRFLKIREGRIIKEIFPTGRVKHTEECTCGFASNKTIECACRDNSYTAKRPFVKLNVETDTAEIRLMCTETYLDTPRPNDGSITGPCESDGDKGSGGIKGGFVHQRMASKIGRWYSRTMSKTKRMGMGLYVKYDGDPWTDSEALALSGVMISMEEPGWYSFGFEIKDKKCDVPCIGIEMVHDGGKTTWHSAATAIYCLMGSGQLLWDTVTGVDMAL

SEQ ID NO: 30039 - protein, 466 aa, Artificial Sequence; identical to SEQ ID NO: 28817
  derived and/or modified protein sequence (wt) from neuraminidase__InfluenzaB__AHL92446

SEQ ID NO: 30040 - protein, 466 aa, Artificial Sequence; identical to SEQ ID NO: 28817
  derived and/or modified protein sequence (wt) from neuraminidase__InfluenzaB__AHL92457

SEQ ID NO: 30041 - protein, 466 aa, Artificial Sequence; identical to SEQ ID NO: 28817
  derived and/or modified protein sequence (wt) from neuraminidase__InfluenzaB__AHL92468

SEQ ID NO: 30042 - protein, 466 aa, Artificial Sequence; identical to SEQ ID NO: 28817
  derived and/or modified protein sequence (wt) from neuraminidase__InfluenzaB__AHL92479

SEQ ID NO: 30043 - protein, 466 aa, Artificial Sequence; identical to SEQ ID NO: 28788
  derived and/or modified protein sequence (wt) from neuraminidase__InfluenzaB__AHL92490

SEQ ID NO: 30044 - protein, 466 aa, Artificial Sequence; identical to SEQ ID NO: 28817
  derived and/or modified protein sequence (wt) from neuraminidase__InfluenzaB__AHL92501

SEQ ID NO: 30045 - protein, 466 aa, Artificial Sequence
  derived and/or modified protein sequence (wt) from neuraminidase__InfluenzaB__AHL92512
MLPSTIQTLTLFLTSGGVLLSLYVSASLSYLLYSDILLKFSRTEITAPIMPLDCANASNVQAVNRSATKGVTLLLPEPEWTYPRLSCPGSTFQKALLISPHRFGETKGNSAPLIIREPFIACGPKECKHFALTHYAAQPGGYYNGTREDRNKLRHLISVKLGKIPTVENSIFHMVAWSGSACHDGREWTYIGVDGPDSNALLKIKYGEAYTDTYHSYAKNILRTQESACNCIGGDCYLMITDGPASGISECRFLKIREGRIIKEIFPTGRVKHTEECTCGFASNKTIECACRDNSYTAKRPFVKLNVETDTAEIRLMCTETYLDTPRPNDGSITGPCESNGDKGSGGIKGGFVHQRMASKIGRWYSRTMSKTKRMGMGLYVKYDGDPWTDSEALALSGVMVSMEEPGWYSFGFEIKDKKCDVPCIGIEMVHDGGKTTWHSAATAIYCLMGSGQLLWDTVTGVNMTL

SEQ ID NO: 30046 - protein, 466 aa, Artificial Sequence; identical to SEQ ID NO: 28817
  derived and/or modified protein sequence (wt) from neuraminidase__InfluenzaB__AHL92523

SEQ ID NO: 30047 - protein, 466 aa, Artificial Sequence; identical to SEQ ID NO: 28817
  derived and/or modified protein sequence (wt) from neuraminidase__InfluenzaB__AHL92534

SEQ ID NO: 30048 - protein, 466 aa, Artificial Sequence; identical to SEQ ID NO: 28788
  derived and/or modified protein sequence (wt) from neuraminidase__InfluenzaB__AHL92545

SEQ ID NO: 30049 - protein, 466 aa, Artificial Sequence; identical to SEQ ID NO: 28817
  derived and/or modified protein sequence (wt) from neuraminidase__InfluenzaB__AHL92556

SEQ ID NO: 30050 - protein, 466 aa, Artificial Sequence; identical to SEQ ID NO: 28817
  derived and/or modified protein sequence (wt) from neuraminidase__InfluenzaB__AHL92567

SEQ ID NO: 30051 - protein, 466 aa, Artificial Sequence; identical to SEQ ID NO: 28817
  derived and/or modified protein sequence (wt) from neuraminidase__InfluenzaB__AHL92578

SEQ ID NO: 30052 - protein, 466 aa, Artificial Sequence; identical to SEQ ID NO: 28788
  derived and/or modified protein sequence (wt) from neuraminidase__InfluenzaB__AHL92589

SEQ ID NO: 30053 - protein, 466 aa, Artificial Sequence; identical to SEQ ID NO: 28817
  derived and/or modified protein sequence (wt) from neuraminidase__InfluenzaB__AHL92600

SEQ ID NO: 30054 - protein, 466 aa, Artificial Sequence; identical to SEQ ID NO: 29844
  derived and/or modified protein sequence (wt) from neuraminidase__InfluenzaB__AHL92611

SEQ ID NO: 30055 - protein, 466 aa, Artificial Sequence
  derived and/or modified protein sequence (wt) from neuraminidase__InfluenzaB__AHL92622
MLPSTIQTLTLFLTSGGVLLSLYVSASLSYLLYSDILLKFSRTEITAPIMPLDCANASNVQAVNRSATKGVTFLLPEPEWTYPRLSCPGSTFQKALLISPHRFGETKGNSAPLIIREPFIACGPKECKHFALTHYAAQPGGYYNGTREDRNKLRHLISVKLGKIPTVENSIFHMAAWSGSACHDGREWTYIGVDGPDSNALLKIKYGEAYTDTYHSYAKNILRTQESACNCIGGDCYLMITDGPASGISECRFLKIREGRIIKEIFPTGRVKHTEECTCGFASNKTIECACRDNSYTAKRPFVKLNVETDTAEIRLMCTETYLDTPRPNDGSITGPCESNGDKGSGGIKGGFVHQRMASKIGRWYSRTMSKTKRMGMGLYVKYDGDPWTDSEALALSGVMVSMEEPGWYSFGFEIKDKKCDVPCIGIEMVHDGGKTTWHSAATAIYCLMGSGQLLWDTVTGVNMTL

SEQ ID NO: 30056 - protein, 466 aa, Artificial Sequence
  derived and/or modified protein sequence (wt) from neuraminidase__InfluenzaB__AHL92633
MLPSTIQTLTLFLTSGGVLLSLYVSASLSYLLYSDILLKFSRTEITAPIMPLDCANASNVQAVNRSATKGVTFLLPEPEWTYPRLSCPGSTFQKALLISPHRFGETKGNSAPLIIREPFIACGPKECKHFALTHYAAQPGGYYNGTREDRNKLRHLISVKLGKIPIVENSIFHMAAWSGSACHDGREWTYIGVDGPDSNALLKIKYGEAYTDTYHSYAKNILRTQESACNCIGGDCYLMITDGPASGISECRFLKIREGRIIKEIFPTGRVKHTEECTCGFASNKTIECACRDNSYTAKRPFVKLNVETDTAEIRLMCTETYLDTPRPNDGSITGPCESNGDKGSGGIKGGFVHQRMASKIGRWYSRTMSKTKRMGMGLYVKYDGDPWTDSEALALSGVMVSMEEPGWYSFGFEIKDKKCDVPCIGIEMVHDGGKTTWHSAATAIYCLMGSGQLLWDTVTGVNMTL

SEQ ID NO: 30057 - protein, 466 aa, Artificial Sequence; identical to SEQ ID NO: 28788
  derived and/or modified protein sequence (wt) from neuraminidase__InfluenzaB__AHL92644

SEQ ID NO: 30058 - protein, 466 aa, Artificial Sequence; identical to SEQ ID NO: 28788
  derived and/or modified protein sequence (wt) from neuraminidase__InfluenzaB__AHL92655

SEQ ID NO: 30059 - protein, 466 aa, Artificial Sequence; identical to SEQ ID NO: 28817
  derived and/or modified protein sequence (wt) from neuraminidase__InfluenzaB__AHL92666

SEQ ID NO: 30060 - protein, 466 aa, Artificial Sequence; identical to SEQ ID NO: 28817
  derived and/or modified protein sequence (wt) from neuraminidase__InfluenzaB__AHL92677

SEQ ID NO: 30061 - protein, 466 aa, Artificial Sequence; identical to SEQ ID NO: 28788
  derived and/or modified protein sequence (wt) from neuraminidase__InfluenzaB__AHL92688

SEQ ID NO: 30062 - protein, 466 aa, Artificial Sequence; identical to SEQ ID NO: 28817
  derived and/or modified protein sequence (wt) from neuraminidase__InfluenzaB__AHL92699

SEQ ID NO: 30063 - protein, 466 aa, Artificial Sequence; identical to SEQ ID NO: 28817
  derived and/or modified protein sequence (wt) from neuraminidase__InfluenzaB__AHL92710

SEQ ID NO: 30064 - protein, 466 aa, Artificial Sequence; identical to SEQ ID NO: 28817
  derived and/or modified protein sequence (wt) from neuraminidase__InfluenzaB__AHL92721

SEQ ID NO: 30065 - protein, 466 aa, Artificial Sequence; identical to SEQ ID NO: 28817
  derived and/or modified protein sequence (wt) from neuraminidase__InfluenzaB__AHL92732

SEQ ID NO: 30066 - protein, 466 aa, Artificial Sequence; identical to SEQ ID NO: 28817
  derived and/or modified protein sequence (wt) from neuraminidase__InfluenzaB__AHL92743

SEQ ID NO: 30067 - protein, 466 aa, Artificial Sequence; identical to SEQ ID NO: 28817
  derived and/or modified protein sequence (wt) from neuraminidase__InfluenzaB__AHL92754

SEQ ID NO: 30068 - protein, 466 aa, Artificial Sequence; identical to SEQ ID NO: 28817
  derived and/or modified protein sequence (wt) from neuraminidase__InfluenzaB__AHL92765

SEQ ID NO: 30069 - protein, 466 aa, Artificial Sequence; identical to SEQ ID NO: 28817
  derived and/or modified protein sequence (wt) from neuraminidase__InfluenzaB__AHL92776

SEQ ID NO: 30070 - protein, 466 aa, Artificial Sequence; identical to SEQ ID NO: 28817
  derived and/or modified protein sequence (wt) from neuraminidase__InfluenzaB__AHL92787

SEQ ID NO: 30071 - protein, 466 aa, Artificial Sequence; identical to SEQ ID NO: 28817
  derived and/or modified protein sequence (wt) from neuraminidase__InfluenzaB__AHL92798

SEQ ID NO: 30072 - protein, 466 aa, Artificial Sequence
  derived and/or modified protein sequence (wt) from neuraminidase__InfluenzaB__AHL92809
MLPSTIQTLTLFLTSGGVLLSLYVSASLSYLLYSDILLKFSRTEITAPIMPLDCANASNVQAVNRSAIKGVTLLLPEPEWTYPRLSCPGSTFQKALLISPHRFGETKGNSAPLIIREPFIACGPKECKHFALTHYAAQPGGYYNGTREDRNKLRHLISVKLGKIPTVENSIFHMAAWSGSACHDGREWTYIGVDGPDSNALLKIKYGEAYTDTYHSYAKNILRTQESACNCIGGDCYLMITDGPASGISECRFLKIREGRIIKEIFPTGRVKHTEECTCGFASNKTIECACRDNSYTAKRPFVKLNVETDTAEIRLMCTETYLDTPRPNDGSITGPCESNGDKGSGGIKGGFVHQRMASKIGRWYSRTMSKTKRMGMGLYVKYDGDPWTDSEALALSGVMVSMEEPGWYSFGFEIKDKKCDVPCIGIEMVHDGGKTTWHSAATAIYCLMGSGQLLWDTVTGVNMTL

SEQ ID NO: 30073 - protein, 466 aa, Artificial Sequence
  derived and/or modified protein sequence (wt) from neuraminidase__InfluenzaB__AHL92820
MLPSTIQTLTLFLTSGGVLLSLYVSASLSYLLYSDILLKFSRTEITAPIMPLDCANASNVQAVNRSATKGVTLLLPEPEWTYPRLSCPGSTFQKALLISPHRFGETKGNSAPLIIREPFIACGPKECKHFALTHYAAQPGGYYNGTREDRNKLRHLISVKLGKIPTVENSIFHMAAWSGSACHDGREWTYIGVDGPDSNALLKIKYGEAYTDTYHSYAKNILRTQESACNCIGGDCYLMITDGPASGISECRFLKIREGRIIKEIFPTGRVKHTEECTCGFASNKTIECACRDNSYTAKRPFVKLNVETDTAEIRLMCTETYLDTPRPNDGSITGPCESNGDKGSGGIKGGFVHQRMASKIGRWYSRTMSKTKRMGMGLYVKYDGDPWTDSEALALSGVMVSMEEPGWYSFGFEIKDKKCDVPCIGIEMVHDGGKKTWHSAATAIYCLMGSGQLLWDTVTGVNMTL

SEQ ID NO: 30074 - protein, 466 aa, Artificial Sequence
  derived and/or modified protein sequence (wt) from neuraminidase__InfluenzaB__AHL92842
MLPSTIQTLTLFLTSGGVLLSLYVSASLSYLLYSDILLKFSRTEITAPIMPLDCANASNVQAVNRSTTKGVTLLLPEPEWTYPRLSCPGSTFQKALLISPHRFGETKGNSAPLIIREPFIACGPKECKHFALTHYAAQPGGYYNGTREDRNKLRHLISVKLGKIPTVENSIFHMAAWSGSACHDGREWTYIGVDGPDSNALLKIKYGEAYTDTYHSYAKNILRTQESACNCIGGDCYLMITDGPASGISECRFLKIREGRIIKEIFPTGRVKHTEECTCGFASNKTIECACRDNSYTAKRPFVKLNVETDTAEIRLMCTETYLDTPRPNDGSITGPCESNGDKGSGGIKGGFVHQRMASKIGRWYSRTMSKTKRMGMGLYVKYDGDPWTDSEALALSGVMVSMEEPGWYSFGFEIKDKKCDVPCIGIEMVHDGGKTTWHSAATAIYCLMGSGQLLWDTVTGVNMTL

SEQ ID NO: 30075 - protein, 466 aa, Artificial Sequence; identical to SEQ ID NO: 28817
  derived and/or modified protein sequence (wt) from neuraminidase__InfluenzaB__AHL92853

SEQ ID NO: 30076 - protein, 466 aa, Artificial Sequence; identical to SEQ ID NO: 28817
  derived and/or modified protein sequence (wt) from neuraminidase__InfluenzaB__AHL92864

SEQ ID NO: 30077 - protein, 466 aa, Artificial Sequence; identical to SEQ ID NO: 28670
  derived and/or modified protein sequence (wt) from neuraminidase__InfluenzaB__AHL92875

SEQ ID NO: 30078 - protein, 466 aa, Artificial Sequence; identical to SEQ ID NO: 28627
  derived and/or modified protein sequence (wt) from neuraminidase__InfluenzaB__AHL92886

SEQ ID NO: 30079 - protein, 466 aa, Artificial Sequence
  derived and/or modified protein sequence (wt) from neuraminidase__InfluenzaB__AHL92897
MLPSTIQTLTLFLTSGGVLLSLYVSASLSYLLYSDILLKFSPTEITAPTIPLDCANASNVQAVNRSATKGVTLLLPEPEWTYPRLSCPGSTFQKALLISPHRFGETKGNSAPLIIREPFIACGPNECKHFALTHYAAQPGGYYNGTRGDRNKLRHLISVKLGKIPTVENSIFHMAAWSGSACHDGKEWTYIGVDGPDNNALLKIKYGEAYTDTYHSYANNILRTQESACNCIGGNCYLMITDGSASGVSECRFLKIREGRIIKEIFPTGRVKHTEECTCGFASNKTIECACRDNSYTAKRPFVKLNVETDTAEIRLMCTDTYLDTPRPDDGSITGPCESNGDKGSGGIKGGFVHQRMASKIGRWYSRTMSKTERMGMGLYVKYDGDPWADSDALAFSGVMVSMKEPGWYSFGFEIKDKKCDVPCIGIEMVHDGGKETWHSAATAIYCLMGSGQLLWDTVTGVDMAL

SEQ ID NO: 30080 - protein, 466 aa, Artificial Sequence
  derived and/or modified protein sequence (wt) from neuraminidase__InfluenzaB__AHL92908
MLPSTIQTLTLFLTLGGVLLSLYVSASLSYLLYSDILLKFSQTEITAPIMPLDCANASNVQAVNRSATKGVTLLLPEPEWTYPRLSCPGSTFQKALLISPHRFGETKGNSAPLIIREPFIACGPKECKHFALTHYAAQPGGYYNGTREDRNKLRHLISVKLGKIPTVENSIFHMAAWSGSACHDGKEWTYIGVDGPDSNALLKIKYGEAYTDTYHSYAKNILRTQESACNCIGGDCYLMITDGPASGISECRFLKIREGRIIKEIFPTGRVKHTEECTCGFASNKTIECACRDNSYTAKRPFVKLNVETDTAEIRLMCTETYLDTPRPNDGSITGPCESNGDKGSGGIKGGFVHQRMASKIGRWYSRTMSKTKRMGMGLYVKYDGDPWTDSEALALSGVMVSMEEPGWYSFGFEIKDKKCDVPCIGIEMVHDGGKTTWHSAATAVYCLMGSGQLLWDTITGVDMAL

SEQ ID NO: 30081 - protein, 466 aa, Artificial Sequence
  derived and/or modified protein sequence (wt) from neuraminidase__InfluenzaB__AHL92919
MLPSTIQTLTLFLTSGGVLLSLYVSASLSYLLYSDILLKFSPTEITAPTMPLDCANASNVQAVNRSATKGVTLLLPEPEWTYPRLSCPGSTFQKALLISPHRFGETKGNSAPLIIREPFIACGPNECKHFALTHYAAQPGGYYNGTRGDRNKLRHLISVKLGKIPTVENSIFHMAAWSGSACHDGKEWTYIGIDGPDNNALLKIKYGEAYTDTYHSYANNILRTQESACNCIGGNCYLMITDGSASGVSECRFLKIREGRIIKEIFPTGRVKHTEECTCGFASNKTIECACRDNSYTAKRPFVKLNVETDTAEIRLMCTDTYLDTPRPDDGSITGPCESNGDKGSGGIKGGFVHQRMASKIGRWYSRTMSKTERMGMGLYVKYDGDPWADSDALAFSGVMVSMKEPGWYSFGFEIKDKKCDVPCIGIEMVHDGGKETWHSAATAIYCLMGSGQLLWDTVTGVDMAL

SEQ ID NO: 30082 - protein, 466 aa, Artificial Sequence
  derived and/or modified protein sequence (wt) from neuraminidase__InfluenzaB__AHL92930
MLPSTIQTLTLFLTSGGVLLSLYVSASLSYLLYSDILLKFSPTEITAPTMPLDCANASNVQAVNRSATKGVTLLLPEPEWTYPRLSCPGSTFQKALLISPHRFGETKGNSAPLIIREPFIACGPNECKHFALTHYAAQPGGYYNGTRGDRNKLRHLISVKLGKIPTVENSIFHMAAWSGSACHDGKEWTYIGVDGPDNDALLKIKYGEAYTDTYHSYANNILRTQESACNCIGGNCYLMITDGSASGVSECRFLKIREGRIIKEIFPTGRVKHTEECTCGFASNKTIECACRDNSYTAKRPFVKLDVETDTAEIRLMCTDTYLDTPRPDDGSITGPCESNGDKGSGGIKGGFVHQRMASKIGRWYSRTMSKTERMGMGLYVKYDGDPWADSDALAFSGVMVSMKEPGWYSFGFEIKDKKCDVPCIGIEMVHDGGKETWHSAATAIYCLMGSGQLLWDTVTGVDMAL

SEQ ID NO: 30083 - protein, 466 aa, Artificial Sequence; identical to SEQ ID NO: 28627
  derived and/or modified protein sequence (wt) from neuraminidase__InfluenzaB__AHL92941

SEQ ID NO: 30084 - protein, 466 aa, Artificial Sequence; identical to SEQ ID NO: 28635
  derived and/or modified protein sequence (wt) from neuraminidase__InfluenzaB__AHL92952

SEQ ID NO: 30085 - protein, 466 aa, Artificial Sequence; identical to SEQ ID NO: 28635
  derived and/or modified protein sequence (wt) from neuraminidase__InfluenzaB__AHL92963

SEQ ID NO: 30086 - protein, 466 aa, Artificial Sequence
  derived and/or modified protein sequence (wt) from neuraminidase__InfluenzaB__AHL92974
MLPSTIQTLTLFLTSGGVLLSLYVSASLSYLLYSDILLKFSPTEITAPTMPLDCANASNVHAVNRSATKGVTLLLPEPEWTYPRLSCPGSTFQKALLISPHRFGETKGNSAPLIIREPFIACGPNECKHFALTHYAAQPGGYYNGTRGDRNKLRHLISVKLGKIPTVENSIFHMAAWSGSACHDGKEWTYIGVDGPDNNALLKIKYGEAYTDTYHSYANNILRTQESACNCIGGNCYLMITDGSASGVSECRFLKIREGRIIKEIFPTGRVKHTEECTCGFASNKTIECACRDNSYTAKRPFVKLNVETDTAEIRLMCTDTYLDTPRPDDGSITGPCESNGDKGSGGIKGGFVHQRMASKIGRWYSRTMSKTERMGMGLYVKYNGDPWADSDALAFSGVMVSMKEPGWYSFGFEIKDKKCDVPCIGIEMVHDGGKETWHSAATAIYCLMGSGQLLWDTVTGVDMAL

SEQ ID NO: 30087 - protein, 466 aa, Artificial Sequence; identical to SEQ ID NO: 28635
  derived and/or modified protein sequence (wt) from neuraminidase__InfluenzaB__AHL92985

SEQ ID NO: 30088 - protein, 466 aa, Artificial Sequence; identical to SEQ ID NO: 28635
  derived and/or modified protein sequence (wt) from neuraminidase__InfluenzaB__AHL92996

SEQ ID NO: 30089 - protein, 466 aa, Artificial Sequence; identical to SEQ ID NO: 30008
  derived and/or modified protein sequence (wt) from neuraminidase__InfluenzaB__AHL93008

SEQ ID NO: 30090 - protein, 466 aa, Artificial Sequence; identical to SEQ ID NO: 30017
  derived and/or modified protein sequence (wt) from neuraminidase__InfluenzaB__AHL93019

SEQ ID NO: 30091 - protein, 466 aa, Artificial Sequence; identical to SEQ ID NO: 30017
  derived and/or modified protein sequence (wt) from neuraminidase__InfluenzaB__AHL93030

SEQ ID NO: 30092 - protein, 466 aa, Artificial Sequence; identical to SEQ ID NO: 30031
  derived and/or modified protein sequence (wt) from neuraminidase__InfluenzaB__AHL93041

SEQ ID NO: 30093 - protein, 466 aa, Artificial Sequence; identical to SEQ ID NO: 30031
  derived and/or modified protein sequence (wt) from neuraminidase__InfluenzaB__AHL93052

SEQ ID NO: 30094 - protein, 466 aa, Artificial Sequence; identical to SEQ ID NO: 28817
  derived and/or modified protein sequence (wt) from neuraminidase__InfluenzaB__AHL93063

SEQ ID NO: 30095 - protein, 466 aa, Artificial Sequence; identical to SEQ ID NO: 28817
  derived and/or modified protein sequence (wt) from neuraminidase__InfluenzaB__AHL93074

SEQ ID NO: 30096 - protein, 466 aa, Artificial Sequence; identical to SEQ ID NO: 28817
  derived and/or modified protein sequence (wt) from neuraminidase__InfluenzaB__AHL93085

SEQ ID NO: 30097 - protein, 466 aa, Artificial Sequence; identical to SEQ ID NO: 30074
  derived and/or modified protein sequence (wt) from neuraminidase__InfluenzaB__AHL93096

SEQ ID NO: 30098 - protein, 466 aa, Artificial Sequence; identical to SEQ ID NO: 28817
  derived and/or modified protein sequence (wt) from neuraminidase__InfluenzaB__AHL93107

SEQ ID NO: 30099 - protein, 466 aa, Artificial Sequence; identical to SEQ ID NO: 28817
  derived and/or modified protein sequence (wt) from neuraminidase__InfluenzaB__AHL93118

SEQ ID NO: 30100 - protein, 466 aa, Artificial Sequence; identical to SEQ ID NO: 28788
  derived and/or modified protein sequence (wt) from neuraminidase__InfluenzaB__AHL93129

SEQ ID NO: 30101 - protein, 466 aa, Artificial Sequence; identical to SEQ ID NO: 28817
  derived and/or modified protein sequence (wt) from neuraminidase__InfluenzaB__AHL93140

SEQ ID NO: 30102 - protein, 466 aa, Artificial Sequence; identical to SEQ ID NO: 28788
  derived and/or modified protein sequence (wt) from neuraminidase__InfluenzaB__AHL93151

SEQ ID NO: 30103 - protein, 466 aa, Artificial Sequence; identical to SEQ ID NO: 28817
  derived and/or modified protein sequence (wt) from neuraminidase__InfluenzaB__AHL93162

SEQ ID NO: 30104 - protein, 466 aa, Artificial Sequence; identical to SEQ ID NO: 28817
  derived and/or modified protein sequence (wt) from neuraminidase__InfluenzaB__AHL93173

SEQ ID NO: 30105 - protein, 466 aa, Artificial Sequence; identical to SEQ ID NO: 28788
  derived and/or modified protein sequence (wt) from neuraminidase__InfluenzaB__AHL93184

SEQ ID NO: 30106 - protein, 466 aa, Artificial Sequence; identical to SEQ ID NO: 28817
  derived and/or modified protein sequence (wt) from neuraminidase__InfluenzaB__AHL93195

SEQ ID NO: 30107 - protein, 466 aa, Artificial Sequence; identical to SEQ ID NO: 28817
  derived and/or modified protein sequence (wt) from neuraminidase__InfluenzaB__AHL93206

SEQ ID NO: 30108 - protein, 466 aa, Artificial Sequence; identical to SEQ ID NO: 28961
  derived and/or modified protein sequence (wt) from neuraminidase__InfluenzaB__AHL93217

SEQ ID NO: 30109 - protein, 466 aa, Artificial Sequence; identical to SEQ ID NO: 28961
  derived and/or modified protein sequence (wt) from neuraminidase__InfluenzaB__AHL93228

SEQ ID NO: 30110 - protein, 466 aa, Artificial Sequence
  derived and/or modified protein sequence (wt) from neuraminidase__InfluenzaB__AHL93239
MLPSTIQTLTLFLTSGGVLLSLYVSASLSYLLYSDILLKFSPTEITAPTMPLDCANASNVQAVNRSATKGVTFLLPEPEWTYPRLSCPGSTFQKALLISPHRFGETKGNSAPLIIREPFIACGPNECKHFALTHYAAQPGGYYNGTRGDRNKLRHLISVKLGKIPTVENSIFHMAAWSGSACHDGKEWTYIGVDGPDNNALLKVKYGEAYTDTYHSYANKILRTQESACNCIGGNCYLMITDGSASGVSECRFLKIREGRIIKEIFPTGRVKHTEECTCGFASNKTIECACRDNSYTAKRPFVKLNVETDTAEIRLMCTDTYLDTPRPDDGSITGPCESNGDKGSGGIKGGFVHQRMESKIGRWYSRTMSKTERMGMGLYVKYDGDPWADSDALAFSGVMVSMKEPGWYSFGFEIKDKKCDVPCIGIEMVHDGGKETWHSAATAIYCLMGSGQLLWDTVTGVDMAL

SEQ ID NO: 30111 - protein, 466 aa, Artificial Sequence
  derived and/or modified protein sequence (wt) from neuraminidase__InfluenzaB__AHL93250
MLPSTIQMLTLFLTSGGVLLSLYVSASLSYLLYSDILLKFSPTEITAPTMPLDCANASNVHAVNRSATKGVTFLLPEPEWTYPRLSCPGSTFQKALLISPHRFGETKGNSAPLIIREPFIACGPNECKHFALTHYAAQPGGYYNGTRGDRNKLRHLISVKLGKIPTVENSIFHMAAWSGSACHDGKEWTYIGVDGPDNNALLKIKYGEAYTDTYHSYANNILRTQESACNCIGGNCYLMITDGSASGVSECRFLKIREGRIIKEIFPTGRVKHTEECTCGFASNKTIECACRDNSYTAKRPFVKLNVETDTAEIRLMCTDTYLDTPRPDDGSITGPCESNGDKGSGGIKGGFVHQRMASKIGRWYSRTMSKTERMGMGLYVKYDGDPWTDSDALAFRGVMVSMKEPGWYSFGFEIKDKKCDVPCIGIEMVHDGGKETWHSAATAIYCLMGSGQLLWDTVTGVDMAL

SEQ ID NO: 30112 - protein, 466 aa, Artificial Sequence; identical to SEQ ID NO: 28961
  derived and/or modified protein sequence (wt) from neuraminidase__InfluenzaB__AHL93261

SEQ ID NO: 30113 - protein, 466 aa, Artificial Sequence; identical to SEQ ID NO: 28961
  derived and/or modified protein sequence (wt) from neuraminidase__InfluenzaB__AHL93272

SEQ ID NO: 30114 - protein, 466 aa, Artificial Sequence; identical to SEQ ID NO: 28961
  derived and/or modified protein sequence (wt) from neuraminidase__InfluenzaB__AHL93283

SEQ ID NO: 30115 - protein, 466 aa, Artificial Sequence; identical to SEQ ID NO: 28961
  derived and/or modified protein sequence (wt) from neuraminidase__InfluenzaB__AHL93294

SEQ ID NO: 30116 - protein, 466 aa, Artificial Sequence
  derived and/or modified protein sequence (wt) from neuraminidase__InfluenzaB__AHL93305
MLPSTIQTLTLFLTSGGVLLSLYVSASLSYLLYSDILLKFSPTEITAPTMPLDCANASNVQAVNRSATKGVTLLLPEPEWTYPRLSCPGSTFQKALLISPHRFGETKGNSAPLIIREPFVACGPNECKHFALTHYAAQPGGYYNGTRGDRNKLRHLISVKLGKIPTVENSIFHMAAWSGSACHDGKEWTYIGVDGPDNNALLKVKYGEAYTDTYHSYANKILRTQESACNCIGGNCYLMITDGSASGVSECRFLKIREGRIIKEIFPTGRVKHTEECTCGFASNKTIECACRDNSYTAKRPFVKLNVETDTAEIRLMCTDTYLDTPRPNDGSITGPCESNGDKGSGGIKGGFVHQRMESKIGRWYSRTMSKTERMGMGLYVKYDGDPWADSDALAFSGVMVSMKEPGWYSFGFEIKDKKCDVPCIGIEMVHDGGKETWHSAATAIYCLMGSGQLLWDTVTGVDMAL

SEQ ID NO: 30117 - protein, 466 aa, Artificial Sequence; identical to SEQ ID NO: 28961
  derived and/or modified protein sequence (wt) from neuraminidase__InfluenzaB__AHL93316

SEQ ID NO: 30118 - protein, 466 aa, Artificial Sequence
  derived and/or modified protein sequence (wt) from neuraminidase__InfluenzaB__AHL93338
MLPSTIQTLTLFLTSGGVLLSLYVSASLSYLLYSDILLKFSPTEITAPTMPLDCANASNVQAVNRSATKGVTLLLPEPEWTYPRLSCPGSTFQKALLISPHRFGETKGNSAPLIIREPFIACGPNECKHFALTHYAAQPGGYYNGTRGDRNKLRHLISVKLGKIPTVENSIFHMAAWSGSACHDGKEWTYIGVDGPDNNALLKVKYGEAYTDTYHSYANKILRTQESACNCIGGNCYLMITDGSASGVSECRFLKIREGRIIKEIFPTGRVKHTEECTCGFASNKTIECACRDNSYTAKRPFVKLNVETDAAEIRLMCTDTYLDTPRPNDGSITGPCESNGDKGSGGIKGGFVHQRMESKIGRWYSRTMSKTERMGMGLYVKYDGDPWADSDALAFSGVMVSMKEPGWYSFGFEIKDKKCDVPCIGIEMVHDGGKETWHSAATAIYCLMGSGQLLWDTVTGVDMAL

SEQ ID NO: 30119 - protein, 466 aa, Artificial Sequence
  derived and/or modified protein sequence (wt) from neuraminidase__InfluenzaB__AHL93349
MLPSTIQTLTLFLTSGGVLLSLYVSASLSYLLYSDILLKFSPTEITAPTMPLDCANASNVQAVNRSATKGVTLLLPEPEWTYPRLSCQGSTFQKALLISPHRFGETKGNSAPLIIREPFIACGPNECKHFALTHYAAQPGGYYNGTRGDRNKLRHLISVKLGKIPTVENSIFHMAAWSGSACHDGKEWTYIGVDGPDNNALLKVKYGEAYTDTYHSYANKILRTQESACNCIGGNCYLMITDGSASGVSECRFLKIREGRIIKEIFPTGRVKHTEECTCGFASNKTIECACRDNSYTAKRPFVKLNVETDTAEIRLMCTDTYLDTPRPNDGSITGPCESNGDKGSGGIKGGFVHQRMESKIGRWYSRTMSKTERMGMELYVKYDGDPWADSDALAFSGVMVSMKEPGWYSFGFEIKDKKCDVPCIGIEMVHDGGKETWHSAATAIYCLMGSGQLLWDTVTGVNMAL

SEQ ID NO: 30120 - protein, 466 aa, Artificial Sequence; identical to SEQ ID NO: 28961
  derived and/or modified protein sequence (wt) from neuraminidase__InfluenzaB__AHL93371

SEQ ID NO: 30121 - protein, 466 aa, Artificial Sequence
  derived and/or modified protein sequence (wt) from neuraminidase__InfluenzaB__AHL93382
MLPSTIQTLTLFLTSGGVLLSLYVSASLSYLLYSDILLKFSPTEITAPTMPLDCANASNVQAVNRSATKGVTLLLPEPEWTYPRLSCPGSTFQKALLISPHRFGETKGNSAPLIIREPFIACGPNECKHFALTHYAAQPGGYYNGTRGDRNKLRHLISVKLGKIPTVENSIFHMAAWSGSACHDGKEWTYIGVDGPDNNALLKVKYGEAYTDTYHSYANKILRTQESACNCIGGNCYLMITDGSASGVSECRFLKIREGRIIKEIFPTGRVKHTEECTCGFASNKTIECACRDNSYTAKRPFVKLNVETDTAEIRLMCTDTYLDTPRPNDGSITGPCESNGDKGSGGIKGGFVHQRMESKIGRWYSRTMSKTERMGMELYVKYDGDPWADSDALAFSGVMVSMKEPGWYSFGFEIKDKKCDVPCIGIEMVHDGGKETWHSAATAIYCLMGSGQLLWDTVTGVNMAL

SEQ ID NO: 30122 - protein, 466 aa, Artificial Sequence; identical to SEQ ID NO: 28961
  derived and/or modified protein sequence (wt) from neuraminidase__InfluenzaB__AHL93393

SEQ ID NO: 30123 - protein, 466 aa, Artificial Sequence; identical to SEQ ID NO: 28961
  derived and/or modified protein sequence (wt) from neuraminidase__InfluenzaB__AHL93404

SEQ ID NO: 30124 - protein, 466 aa, Artificial Sequence; identical to SEQ ID NO: 28961
  derived and/or modified protein sequence (wt) from neuraminidase__InfluenzaB__AHL93415

SEQ ID NO: 30125 - protein, 466 aa, Artificial Sequence; identical to SEQ ID NO: 28961
  derived and/or modified protein sequence (wt) from neuraminidase__InfluenzaB__AHL93426

SEQ ID NO: 30126 - protein, 466 aa, Artificial Sequence; identical to SEQ ID NO: 28961
  derived and/or modified protein sequence (wt) from neuraminidase__InfluenzaB__AHL93437

SEQ ID NO: 30127 - protein, 466 aa, Artificial Sequence; identical to SEQ ID NO: 30121
  derived and/or modified protein sequence (wt) from neuraminidase__InfluenzaB__AHL93448

SEQ ID NO: 30128 - protein, 467 aa, Artificial Sequence
  derived and/or modified protein sequence (wt) from neuraminidase__InfluenzaB__AHL93459
MLPSTIQTLTLFLTSGGVLLSLYVSASLSYLLYSDILLKFSPTEITAPTMPLDCANASNVQAVNRSATKGVTLLLLPEPEWTYPRLSCPGSTFQKALLISPHRFGETKGNSAPLIIREPFIACGPNECKHFALTHYAAQPGGYYNGTRGDRNKLRHLISVKLGKIPTVENSIFHMAAWSGSACHDGKEWTYIGVDGPDNNALLKVKYGEAYTDTYHSYANKILRTQESACNCIGGNCYLMITDGSASGVSECRFLKIREGRIIKEIFPTGRVKHTEECTCGFASNKTIECACRDNSYTAKRPFVKLNVETDTAEIRLMCTDTYLDTPRPNDGSITGPCESNGDKGSGGIKGGFVHQRMESKIGRWYSRTMSKTERMGMGLYVKYDGDPWADSDALAFSGVMVSMKEPGWYSFGFEIKDKKCDVPCIGIEMVHDGGKETWHSAATAIYCLMGSGQLLWDTVTGVDMAL

SEQ ID NO: 30129 - protein, 466 aa, Artificial Sequence
  derived and/or modified protein sequence (wt) from neuraminidase__InfluenzaB__AHL93470
MLPSTIQTLTLFLTSGGVLLSLYVSASLSYLLYSDILLKFSPTEITAPTMPLDCANASNVQAVNRSATKGVTLLLPEPEWTYPRLSCPGSTFQKALLISPHRFGETKGNSAPLIIREPFIACGPNECKHFALTHYAAQPGGYYNGTRGDRNKLRHLISVKLGKIPTVENSIFHMAAWSGSACHDGKEWTYIGVDGPDNNALLKVKYGEAYTDTYHSYANKILRTQESACNCIGGNCYLMITDGSASGVSECRFLKIREGRIIKEIFPTGRVKHTEECTCGFASNKTIECACRDNSYTAKRPFVKLNVETDTAEIRLMCTDTYLDTPRPNDGSITGPCESNGDKGSGGIKGGFVHQRMESKIGRWYSRTMSKTERMGMGLYVKYDGDPWADSDALTFSGVMVSMKEPGWYSFGFEIKDKKCDVPCIGIEMVHDGGKETWHSAATAIYCLMGSGQLLWDTVTGVDMAL

SEQ ID NO: 30130 - protein, 466 aa, Artificial Sequence; identical to SEQ ID NO: 28898
  derived and/or modified protein sequence (wt) from neuraminidase__InfluenzaB__AHL93481

SEQ ID NO: 30131 - protein, 466 aa, Artificial Sequence; identical to SEQ ID NO: 28956
  derived and/or modified protein sequence (wt) from neuraminidase__InfluenzaB__AHL93492

SEQ ID NO: 30132 - protein, 466 aa, Artificial Sequence; identical to SEQ ID NO: 28817
  derived and/or modified protein sequence (wt) from neuraminidase__InfluenzaB__AHL93503

SEQ ID NO: 30133 - protein, 466 aa, Artificial Sequence
  derived and/or modified protein sequence (wt) from neuraminidase__InfluenzaB__AHL93514
MLPSTIQTLTLFLTSGGVLLSLYVSASLSYLLYSDILLKFSPTEITAPTMPLDCANASNVQAVNRSATKGVTLLLPEPEWTYPRLSCPGSTFQKALLISPHRFGETKGNSAPLIIREPFIACGPNECKHFALTHYAAQPGGYYNGTRGDRNKLRHLISIKLGKIPTVENSIFHMAAWSGSACHDGKEWTYIGVDGPDNNALLKVKYGEAYTDTYHSYANKILRTQESACNCIGGNCYLMITDGSASGVSECRFLKIREGRIIKEIFPTGRVKHTEECTCGFASNKTIECACRDNSYTAKRPFVKLNVETDTAEIRLMCTDTYLDTPRPDDGSITGSCESNGDKGSGGIKGGFVHQRMESKIGRWYSRTMSKTERMGMGLYVKYDGDPWADSDALTFSGVMVSMKEPGWYSFGFEIKDKKCDVPCIGIEMVHDGGKETWHSAATAIYCLMGSGQLLWDTVTGVDMAL

SEQ ID NO: 30134 - protein, 466 aa, Artificial Sequence; identical to SEQ ID NO: 28817
  derived and/or modified protein sequence (wt) from neuraminidase__InfluenzaB__AHL93525

SEQ ID NO: 30135 - protein, 466 aa, Artificial Sequence; identical to SEQ ID NO: 28956
  derived and/or modified protein sequence (wt) from neuraminidase__InfluenzaB__AHL93536

SEQ ID NO: 30136 - protein, 466 aa, Artificial Sequence
  derived and/or modified protein sequence (wt) from neuraminidase__InfluenzaB__AHL93558
MLPSTIQTLTLFLTSGGVLLSLYVSASLSYLLYSDILLKFSPTEITAPAMPLDCANASNVQAVNRSATKGVTLLLPEPEWTYPRLSCPGSTFQKALLISPHRFGETKGNSAPLIIREPFIACGPNECKHFALTHYAAQPGGYYNGTRGDRNKLRHLISVKLGKIPTVENSIFHMAAWSGSACHDGKEWTYIGVDGPDNNALLKVKYGEAYTDTYHSYANKILRTQESACNCIGGNCYLMITDGSASGVSECRFLKIREGRIIKEIFPTGRVKHTEECTCGFASNKTIECACRDNSYTAKRPFVKLNVETDTAEIRLMCTDTYLDTPRPNDGSITGPCESDGDKGSGGIKGGFIHQRMESKIGRWYSRTMSKTERMGMGLYVKYDGDPWADSDALAFSGVMVSMKEPGWYSFGFEIKDKKCDVPCIGIEMVHDGGKETWHSAATAIYCLMGSGQLLWDTVTGVDMAL

SEQ ID NO: 30137 - protein, 466 aa, Artificial Sequence
  derived and/or modified protein sequence (wt) from neuraminidase__InfluenzaB__AHL93569
MLPSTIQTLTLFLTSGGVLLSLYVSASLSYLLYSDILLKFSPTEITAPTMPLDCANASNVQAVNRSATKGVTLLLPEPEWTYPRLSCPGSTFQKALLISPHRFGETKGNSAPLIIREPFIACGPNECKHFALTHYAAQPGGYYNGTRGDRNKLRHLISVKLGKIPTVENSIFHMAAWSGSACHDGKEWTYIGVDGPDNNALLKVKYGEAYTDTYHSYANKILRTQESACNCIGGNCYLMITDGSASGVSECRFLKIREGRIIKEIFPTGRVKHTEECTCGFASNKTIECACRDNSYTAKRPFVKLNVETDTAEIRLMCTDTYLDTPRPNDGSITGPCESDGDKGSGGIKGGFVHQRMESKIGRWYSRTMSKTERMGMGLYVKYDGDPWADSDALTFSGVMVSMKEPGWYSFGFEIKDKKCDVPCIGIEMVHDGGKETWHSAATAIYCLMGSGQLLWDTVTGVDMAL

SEQ ID NO: 30138 - protein, 466 aa, Artificial Sequence; identical to SEQ ID NO: 28956
  derived and/or modified protein sequence (wt) from neuraminidase__InfluenzaB__AHL93580

SEQ ID NO: 30139 - protein, 466 aa, Artificial Sequence; identical to SEQ ID NO: 28956
  derived and/or modified protein sequence (wt) from neuraminidase__InfluenzaB__AHL93591

SEQ ID NO: 30140 - protein, 466 aa, Artificial Sequence
  derived and/or modified protein sequence (wt) from neuraminidase__InfluenzaB__AHL93613
MLPSTIQTLTLFLTSGGVLLSLYVSASLSYLLYSDILLKFSPTEITAPTMPLDCANASNVQAVNRSATKGVTLLLPEPEWTYPRLSCPGSTFQKALLISPHRFGETKGNSAPLIIREPFIACGPNECKHFALTHYAAQPGGYYNGTRGDRNKLRHLISVKLGKIPTVENSIFHMAAWSGSACHDGKEWTYIGVDGPDNNALLKVKYGEAYTDTYHSYANKILRTQESACNCIGGNCYLMVTDGSASGVSECRFLKIREGRIIKEIFPTGRVKHTEECTCGFASNKTIECACRDNSYTAKRPFVKLNVETDTAEIRLMCTDTYLDTPRPDDGSITGPCESNGDKGSGGIKGGFVHQRMESKIGRWYSRTMSKTERMGMGLYVKYDGDPWADSDALVFSGVMVSMKEPGWYSFGFEIKDKKCDVPCIGIEMVHDGGKETWHSAATAIYCLMGSGQLLWDTVTGVDMAL

SEQ ID NO: 30141 - protein, 466 aa, Artificial Sequence; identical to SEQ ID NO: 28956
  derived and/or modified protein sequence (wt) from neuraminidase__InfluenzaB__AHL93624

SEQ ID NO: 30142 - protein, 466 aa, Artificial Sequence; identical to SEQ ID NO: 30140
  derived and/or modified protein sequence (wt) from neuraminidase__InfluenzaB__AHL93635

SEQ ID NO: 30143 - protein, 466 aa, Artificial Sequence; identical to SEQ ID NO: 30140
  derived and/or modified protein sequence (wt) from neuraminidase__InfluenzaB__AHL93646

SEQ ID NO: 30144 - protein, 466 aa, Artificial Sequence; identical to SEQ ID NO: 28817
  derived and/or modified protein sequence (wt) from neuraminidase__InfluenzaB__AHL93657

SEQ ID NO: 30145 - protein, 466 aa, Artificial Sequence; identical to SEQ ID NO: 28956
  derived and/or modified protein sequence (wt) from neuraminidase__InfluenzaB__AHL93668

SEQ ID NO: 30146 - protein, 466 aa, Artificial Sequence
  derived and/or modified protein sequence (wt) from neuraminidase__InfluenzaB__AHL93679
MLPSTIQTLTLFLTSGGVLLSLYVSALLSYLLYSDILLKFSPTEITAPTMSLDCANASNVQAVNRSATKGVTFLLPEPEWTYPRLSCPGSTFQKALLISPHRFGETKGNSAPLIIREPFIACGPNECKHFALTHYAAQPGGYYNGTRGDRNKLRHLISVKLGKIPTVENSIFHMAAWSGSACHDGKEWTYIGVDGPDNDALLKVKYGEAYTDTYHSYANKILRTQESACNCIGGNCYLMITDGSASGVSECRFLKIREGRIIKEILPTGRVKHTEECTCGFASNKTIECACRDNSYTAKRPFVKLNVETDTAEIRLMCTDTYLDTPRPDDGSITGPCESNGDKGSGGIKGGFVHQRMESKIGRWYSRTMSKTERMGMGLYVKYDGDPWADSDALAFSGVMVSMKEPGWYSFGFEIKDKKCDVPCIGIEMVHDGGKETWHSAATAIYCLMGSGQLLWDTVTGVDMAL

SEQ ID NO: 30147 - protein, 466 aa, Artificial Sequence; identical to SEQ ID NO: 30140
  derived and/or modified protein sequence (wt) from neuraminidase__InfluenzaB__AHL93690

SEQ ID NO: 30148 - protein, 466 aa, Artificial Sequence; identical to SEQ ID NO: 30140
  derived and/or modified protein sequence (wt) from neuraminidase__InfluenzaB__AHL93701

SEQ ID NO: 30149 - protein, 466 aa, Artificial Sequence; identical to SEQ ID NO: 30140
  derived and/or modified protein sequence (wt) from neuraminidase__InfluenzaB__AHL93712

SEQ ID NO: 30150 - protein, 466 aa, Artificial Sequence
  derived and/or modified protein sequence (wt) from neuraminidase__InfluenzaB__AHL93723
MLPSTIQMLTLFLTSGGVLLSLYVSASLSYLLYSDILLKFSPTEITAPTMPLDCANASNVHAVNRSATKGVTFLLPEPEWTYPRLSCPGSTFQKALLISPHRFGETKGNSAPLIIREPFIACGPNECKHFALTHYAAQPGGYYNGTRGDRNKLRHLISVKLGKIPTVENSIFHMAAWSGSACHDGKEWTYIGVDGPDNNALLKIKYGEAYTDTYHSYANNILRTQESACNCIGGNCYLMITDGSASGVSECRFLKIREGRIIKEIFPTGRVKHTEECTCGFASNKTIECACRDNSYTAKRPFVKLNVETDTAEIRLMCTDTYLDTPRPDDGSTTGPCESNGDKGSGGIKGGFVHQRMASKIGRWYSRTMSKTERKGMGLYVKYDGDPWTDSDALAFRGVMVSMKEPGWYSFGFEIKDKKCDVPCIGIEMVHDGGKETWHSAATAIYCLMGSGQLLWDTVTGVDMAL

SEQ ID NO: 30151 - protein, 466 aa, Artificial Sequence; identical to SEQ ID NO: 28956
  derived and/or modified protein sequence (wt) from neuraminidase__InfluenzaB__AHL93734

SEQ ID NO: 30152 - protein, 466 aa, Artificial Sequence
  derived and/or modified protein sequence (wt) from neuraminidase__InfluenzaB__AHL93745
MLPSTIQMLTLFLTSGGVLLSLYVSASLSYLLYSDILLKFSPTEITAPTMPLDCANASNVHAVNRSATKGVTFLLPEPEWTYPRLSCPGSTFQKALLISPHRFGETKGNSAPLIIREPFIACGPNECKHFALTHYAAQPGGYYNGTRGDRNKLRHLISVKLGKIPTVENSIFHMAAWSGSACHDGKEWTYIGVDGPDNNALLKIKYGEAYTDTYHSYANNVLRTQESACNCIGGNCYLMITDGSASGVSECRFLKIREGRIIKEIFPTGRVKHTEECTCGFASNKTIECACRDNSYTAKRPFVKLNVETDTAEIRLMCTDTYLDTPRPDDGSITGPCESNGDKGSGGIKGGFVHQRMASKIGRWYSRTMSKTERKGMGLYVKYDGDPWTDSDALAFRGVMVSMKEPGWYSFGFEIKDKKCDVPCIGIEMVHDGGKETWHSAATAIYCLMGSGQLLWDTVTGVDMAL

SEQ ID NO: 30153 - protein, 466 aa, Artificial Sequence; identical to SEQ ID NO: 29119
  derived and/or modified protein sequence (wt) from neuraminidase__InfluenzaB__AHL93756

SEQ ID NO: 30154 - protein, 466 aa, Artificial Sequence; identical to SEQ ID NO: 30140
  derived and/or modified protein sequence (wt) from neuraminidase__InfluenzaB__AHL93767

SEQ ID NO: 30155 - protein, 466 aa, Artificial Sequence
  derived and/or modified protein sequence (wt) from neuraminidase__InfluenzaB__AHL93778
MLPSTIQTLILFLTSGGVLLSLYVSALLSYLLYSDILLKFSPTEITAPTMSLDCANASNVQAVNRSATKGVTFLLPEPEWTYPRLSCPGSIFQKALLISPHRFGETKGNSAPLIIREPFIACGPNECKHFALTHYAAQPGGYYNGTRGDRNKLRHLISVKLGKIPTVENSIFHMAAWSGSACHDGKEWTYIGVDGPDNDALLKVKYGEAYTDTYHSYANKILRTQESACNCIGGNCYLMITDGSASGVSECRFLKIREGRIIKEIFPTGRVKHTEECTCGFASNKTIECACRDNSYTAKRPFVKLNVETDTAEIRLMCTDTYLDTPRPDDGSITGPCESNGDKGSGGIKGGFVHQRMESKIGRWYSRTMSKTERMGMGLYVKYDGDPWADSDALAFSGVMVSMKEPGWYSFGFEIKDKKCDVPCIGIEMVHDGGKETWHSAATAIYCLMGSGQLLWDTVTGVDMAL

SEQ ID NO: 30156 - protein, 466 aa, Artificial Sequence
  derived and/or modified protein sequence (wt) from neuraminidase__InfluenzaB__AHL93789
MLPSTIQTLTLFLTSGGVLLSLYVSASLSYLLYSDILLKFSPTGITAPTMPLDCANASNVQAVNRSATKGVTLLLPEPEWTYPRLSCPGSTFQKALLISPHRFGETKGNSAPLIIREPFIACGPNECKHFALTHYAAQPGGYYNGTRGDRNKLRHLISVKLGKIPTVENSIFHMAAWSGSACHDGKEWTYIGVDGPDNNALLKVKYGEAYTDTYHSYANKILRTQESACNCIGGNCYLMVTDGSASGVSECRFLKIREGRIIKEIFPTGRVKHTEECTCGFASNKTIECACRDNSYTAKRPFVKLNVETDTAEIRLMCTDTYLDTPRPDDGSITGPCESNGDKGSGGIKGGFVHQRMESKIGRWYSRTMSKTERMGMGLYVKYDGDPWADSDALVFSGVMVSMKEPGWYSFGFEIKDKKCDVPCIGIEMVHDGGKETWHSAATAIYCLMGSGQLLWDTVTGVDMAL

SEQ ID NO: 30157 - protein, 466 aa, Artificial Sequence; identical to SEQ ID NO: 28956
  derived and/or modified protein sequence (wt) from neuraminidase__InfluenzaB__AHL93800

SEQ ID NO: 30158 - protein, 466 aa, Artificial Sequence; identical to SEQ ID NO: 28956
  derived and/or modified protein sequence (wt) from neuraminidase__InfluenzaB__AHL93811

SEQ ID NO: 30159 - protein, 466 aa, Artificial Sequence; identical to SEQ ID NO: 29492
  derived and/or modified protein sequence (wt) from neuraminidase__InfluenzaB__AHL93822

SEQ ID NO: 30160 - protein, 466 aa, Artificial Sequence; identical to SEQ ID NO: 28956
  derived and/or modified protein sequence (wt) from neuraminidase__InfluenzaB__AHL93833

SEQ ID NO: 30161 - protein, 466 aa, Artificial Sequence
  derived and/or modified protein sequence (wt) from neuraminidase__InfluenzaB__AHL93844
MLPSTIQTLTLFLTSGGVLLSLYVSASLSYLLYSGILLKFSPTEITAPTMPLDCANASNVQAVNRSATKEVTLLLPEPEWTYPRLSCPGSTFQKALLISPHRFGETKGNSAPLIIREPFIACGPNECKHFALTHYAAQPGGYYNGTRGDRNKLRHLISVKLGKIPTVENSIFHMAAWSGSACHDGKEWTYIGVDGPDDNALLKVKYGEAYTDTYHSYAHKILRTQESACNCIGGNCYLMITDGSASGVSECRFLKIREGRIIKEIFPTGRVKHTEECTCGFASNKTIECACRDNSYTAKRPFVKLNVETDTAEIRLMCTDTYLDTPRPNDGSITGPCESNGDKGSGGIKGGFVHQRMESKIGRWYSRTMSKTERMGMGLYVKYDGDPWADSDALAFSGVMVSMKEPGWYSFGFEIKDKKCDVPCIGIEMVHDGGKETWHSAATAIYCLMGSGQLLWDTVTGVDMAL

SEQ ID NO: 30162 - protein, 466 aa, Artificial Sequence; identical to SEQ ID NO: 28956
  derived and/or modified protein sequence (wt) from neuraminidase__InfluenzaB__AHL93855

SEQ ID NO: 30163 - protein, 466 aa, Artificial Sequence; identical to SEQ ID NO: 28956
  derived and/or modified protein sequence (wt) from neuraminidase__InfluenzaB__AHL93866

SEQ ID NO: 30164 - protein, 466 aa, Artificial Sequence; identical to SEQ ID NO: 28956
  derived and/or modified protein sequence (wt) from neuraminidase__InfluenzaB__AHL93877

SEQ ID NO: 30165 - protein, 466 aa, Artificial Sequence; identical to SEQ ID NO: 28956
  derived and/or modified protein sequence (wt) from neuraminidase__InfluenzaB__AHL93888

SEQ ID NO: 30166 - protein, 466 aa, Artificial Sequence
  derived and/or modified protein sequence (wt) from neuraminidase__InfluenzaB__AHL93899
MLPSTIQMLTLFLTSGGVLLSLYVSASLSYLLYSDILLKFSPTEITAPTMPLDCANASNVHAVNRSATKGVTFLLPEPEWTYPRLSCPGSTFQKALLISPHRFGETKGNSAPLIIREPFIACEPNECKHFALTHYAAQPGGYYNGTRGDRNKLRHLISVKLGKIPTVENSIFHMAAWSGSACHDGKEWTYIGVDGPDNNALLKIKYGEAYTDTYHSYANNILRTQESACNCIGGNCYLMITDGSASGVSECRFLKIREGRIIKEIFPTGRVKHTEECTCGFASNKTIECACRDNSYTAKRPFVKLNVETDTAEIRLMCTDTYLDTPRPDDGSTTGPCESNGDKGSGGIKGGFVHQRMASKIGRWYSRTMSKTERKGMGLYVKYDGDPWTDSDALAFRGVMVSMKEPGWYSFGFEIKDKKCDVPCIGIEMVHDGGKETWHSAATAIYCLMGSGQLLWDTVTGVDMAL

SEQ ID NO: 30167 - protein, 466 aa, Artificial Sequence
  derived and/or modified protein sequence (wt) from neuraminidase__InfluenzaB__AHL93910
MLPSTIQMLTLFLTSGGVLLSLYVSASLSYLLYSDILLKFSPTEITAPTMPLDCANASNVHAVNRSATKGVTFLLPEPEWTYPRLSCPGSTFQKALLISPHRFGETKGNSAPLIIREPFIACGPNECKHFALTHYAAQPGGYYNGTRGDRNKLRHLISVKLGKIPTVENSIFHMAAWSGSACHDGKEWTYIGVDGPDNNALLKIKYGEAYTDTYHSYANNILRTQESACNCIGGNCYLMITDGSASGVSECRFLKIREGRIIKEIFPTGRVKHTEECTCGFASNKTIECTCRDNSYTAKRPFVKLNVETDTAEIRLMCTDTYLDTPRPDDGGITGPCESNGDKGSGGIKGGFVHQRMASKIGRWYSRTMSKTERKGMGLYVKYDGDPWTDSDALAFRGVMVSMKEPGWYSFGFEIKDKKCDVPCIGIEMVHDGGKETWHSAATAIYCLMGSGQLLWDTVTGVDMAL

SEQ ID NO: 30168 - protein, 466 aa, Artificial Sequence; identical to SEQ ID NO: 28956
  derived and/or modified protein sequence (wt) from neuraminidase__InfluenzaB__AHL93921

SEQ ID NO: 30169 - protein, 466 aa, Artificial Sequence
  derived and/or modified protein sequence (wt) from neuraminidase__InfluenzaB__AHL93932
MLPSTIQTLTLFLTSGGVLLSLYVSASLSYLLYSDILLKFSPTEITAPTMPLDCANASNVQAVNRSATKGVTLLLPEPEWTYPRLSCPGSTFQKALLISPHRFGETKGNSAPLIIREPFIACGPNECKHFALTHYAAQPGGYYNGTRGDRNKLRHLISVKLGKIPTVENSIFHMAAWSGSACHDGKEWTYIGVDGPDNNALLKVKYGEAYTDTYHSYANKILRTQESACNCIGGNCYLMVTDGSASGVSECRFLKIREGRIIKEIFPTGRVKHTEECTCGFASNKTIECACRDNSYTAKRPFVKLNVETDTAEIRLMCTDTYLDTPRPDDGSITGPCESNGDKGSGGIKGGFVHQRMESKIGRWYSRTMSKTERMGMELYVKYDGDPWADSDALAFSGVMVSMKEPGWYSFGFEIKDKKCDVPCIGIEMVHDGGKETWHSAATAIYCLMGSGQLLWDTVTGVDMAL

SEQ ID NO: 30170 - protein, 466 aa, Artificial Sequence; identical to SEQ ID NO: 29119
  derived and/or modified protein sequence (wt) from neuraminidase__InfluenzaB__AHL93943

SEQ ID NO: 30171 - protein, 466 aa, Artificial Sequence; identical to SEQ ID NO: 28956
  derived and/or modified protein sequence (wt) from neuraminidase__InfluenzaB__AHL93954

SEQ ID NO: 30172 - protein, 466 aa, Artificial Sequence
  derived and/or modified protein sequence (wt) from neuraminidase__InfluenzaB__AHL93965
MLPSTIQTLTLFLTSGGVLLSLYVSASLSYLLYSDILLKFSPTEITAPAMPLDCANASNVQAVNCSATKGVTLLLPEPEWTYPRLSCPGSTFQKALLISPHRFGETKGNSAPLIIREPFIACGPNECKHFALTHYAAQPGGYYNGTRGDRNKLRHLISVKLGKIPTVENSIFHMAAWSGSACHDGKEWTYIGVDGPDNNALLKVKYGEAYTDTYHSYANKILRTQESACNCIGGNCYLMITDGSASGVSECRFLKIREGRIIKEIFPTGRVKHTEECTCGFASNKTIECACRDNSYTAKRPFVKLNVETDTAEIRLMCTDTYLDTPRPNDGSITGPCESDGDKGNGGIKGGFVHQRMESKIGRWYSRTMSKTERMGMGLYVKYDGDPWADSDALAFSGVMVSMKEPGWYSFGFEIKDKKCDVPCIGIEMVHDGGKETWHSAATAIYCLMGSGQLLWDTVTGVDMAL

SEQ ID NO: 30173 - protein, 466 aa, Artificial Sequence; identical to SEQ ID NO: 28875
  derived and/or modified protein sequence (wt) from neuraminidase__InfluenzaB__AHL93976

SEQ ID NO: 30174 - protein, 466 aa, Artificial Sequence; identical to SEQ ID NO: 30146
  derived and/or modified protein sequence (wt) from neuraminidase__InfluenzaB__AHL93987

SEQ ID NO: 30175 - protein, 466 aa, Artificial Sequence
  derived and/or modified protein sequence (wt) from neuraminidase__InfluenzaB__AHL93998
MLPSTIQTLTLFLTSGGVLLSLYVSASLSYLLYSDILLKFSQTEITAPIMPLDCANASNVQAVNRSAAKGVTLLLPEPEWTYPRLSCPGSTFQKALLISPHRFGEIKGNSAPLIIREPFIACGPTECKHFALTHYAAQPGGYYNGTREDRNKLRHLISVKLGKIPTVENSIFHMAAWSGSACHDGKEWTYIGVDGPDSNALLKIKYGEAYTDTYHSYAKNILRTQESACNCIGGDCYLMITDGPASGVSECRFLKIREGRIIKEIFPTGRVKHTEECTCGFASNKTIECACRDNRYTAKRPFVKLNVETDTAEIRLMCTETYLDTPRPNDGSITGPCESDGDKGSGGIKGGFVHQRMASKIGRWYSRTMSKTKRMGMGLYVKYDGDPWTDSEALALSGVMVSMEEPGWYSFGFEIKDKKCDVPCIGIEMVHDGGKTTWHSAATAIYCLMGSGQLLWDTVTGVDMAL

SEQ ID NO: 30176 - protein, 466 aa, Artificial Sequence
  derived and/or modified protein sequence (wt) from neuraminidase__InfluenzaB__AHL94009
MLPSTIQMLTLFLTSGGVLLSLYVSASLSYLLYSDILLKFSPTEITAPTMPLDCANASNVHAVNRSATKGVTFLLPEPKWTYPRLSCPGSTFQKALLISPHRFGETKGNSAPLIIREPFIACGPNECRHFALTHYAAQPGGYYNGTRGDRNKLRHLISVKLGKIPTVENSIFHMAAWSGSACHDGKEWTYIGVDGPDNNALLKIKYGEAYTDTYHSYANNILRTQESACNCIGGNCYLMITDGSASGVSECRFLKIREGRIIKEIFPTGRVKHTEECTCGFASNKTIECACRDNSYTAKRPFVKLNVETDTAEIRLMCTDTYLDTPRPDDGSITGPCESNGDKGSGGIKGGFVHQRMASKIGRWYSRTMSKTERKGMGLYVKYDGDPWTDSDALAFRGVMVSMKEPGWYSFGFEIKDKKCDVPCIGIEMVHDGGKETWHSAATAIYCLMGSGQLLWDTVTGVDMAL

SEQ ID NO: 30177 - protein, 466 aa, Artificial Sequence; identical to SEQ ID NO: 28956
  derived and/or modified protein sequence (wt) from neuraminidase__InfluenzaB__AHL94020

SEQ ID NO: 30178 - protein, 466 aa, Artificial Sequence; identical to SEQ ID NO: 28956
  derived and/or modified protein sequence (wt) from neuraminidase__InfluenzaB__AHL94031

SEQ ID NO: 30179 - protein, 466 aa, Artificial Sequence; identical to SEQ ID NO: 29119
  derived and/or modified protein sequence (wt) from neuraminidase__InfluenzaB__AHL94042

SEQ ID NO: 30180 - protein, 466 aa, Artificial Sequence
  derived and/or modified protein sequence (wt) from neuraminidase__InfluenzaB__AHL94053
MLPSTIQTLTLFLTSGGVLLSLYLSALLSYLLYSDILLKFSPTEITAPTMSLDCANASNVQAVNRSATKGVTFLLPEPEWTYPRLSCPGSTFQRALLISPHRFGETKGNSAPLIIREPFIACGPNECKHFALTHYAAQPGGYYNGTRGDRNKLRHLISVKLGKIPTVENSIFHMAAWSGSACHDGKEWTYIGVDGPDNDALLKVKYGEAYTDTYHSYANKILRTQESACNCIGGNCYLMITDGSASGVSECRFLKIREGRIIKEIFPTGRVKHTEECTCGFASNKTIECACRDNSYTAKRPFVKLNVETDTAEIRLMCTDTYLDTPRPDDGSITGPCESNGDKGSGGIKGGFVHQRMESKIGRWYSRTMSKTERMGMGLYVKYDGDPWADSDALAFSGVMVSMKEPGWYSFGFEIKDKKCDVPCIGIEMVHDGGKETWHSAATAIYCLMGSGQLLWDTVTGVDMAL

SEQ ID NO: 30181 - protein, 466 aa, Artificial Sequence; identical to SEQ ID NO: 28956
  derived and/or modified protein sequence (wt) from neuraminidase__InfluenzaB__AHL94064

SEQ ID NO: 30182 - protein, 466 aa, Artificial Sequence; identical to SEQ ID NO: 28956
  derived and/or modified protein sequence (wt) from neuraminidase__InfluenzaB__AHL94075

SEQ ID NO: 30183 - protein, 466 aa, Artificial Sequence
  derived and/or modified protein sequence (wt) from neuraminidase__InfluenzaB__AHL94086
MLPSTIQTLTLFLTSGGVLLSLYVSASLSYLLYSDILLKFSRTEITAPIMPLDCANASNVQAVNRSATKGVTFLLPEPEWTYPRLSCPGSTFQKALLISPHRFGETKGNSAPLIIREPFVACGPKECKHFALTHYAAQPGGYYNGTREDRNKLRHLISVKLGKIPTVENSIFHMAAWSGSACHDGREWTYIGVDGPDSNALLKIKYGEAYTDTYHSYAKNILRTQESACNCIGGDCYLMITDGPASGISECRFLKIREGRIIKEIFPTGRVKHTEECTCGFASNKTIECACRDNSYTAKRPFVKLNVETDTAEIRLMCTETYLDTPRPNDGSITGPCESNGDKGSGGIKGGFVHQRMASKIGRWYSRTMSKTKRMGMGLYVKYDGDPWTDSEALALSGVMVSMEEPGWYSFGFEIKDKKCDVPCIGIEMVHDGGKTTWHSAATAIYCLMGSGQLLWDTVTGVNMTL

SEQ ID NO: 30184 - protein, 466 aa, Artificial Sequence; identical to SEQ ID NO: 29119
  derived and/or modified protein sequence (wt) from neuraminidase__InfluenzaB__AHL94095

SEQ ID NO: 30185 - protein, 466 aa, Artificial Sequence; identical to SEQ ID NO: 28956
  derived and/or modified protein sequence (wt) from neuraminidase__InfluenzaB__AHL94106

SEQ ID NO: 30186 - protein, 466 aa, Artificial Sequence
  derived and/or modified protein sequence (wt) from neuraminidase__InfluenzaB__AHL94117
MLPSTIQMLTLFLTSGGVLLSLYVSASLSYLLYSDILLKFSPTEITAPTMPLDCANASNVHAVNRSATKGVTFLLPEPEWTYPRLSCPGSTFQKALLISPHRFGETKGNSAPLIIREPFIACGPNECKHFALTHYAAQPGGYYNGTRGDRNKLRHLISVKLGKIPTVENSIFHMAAWSGSACHDGKEWTYIGVDGPDNNALLKIKYGEAYTDTYHSYANNILRTQESACNCIGGNCYLMITDGSASGVSECRFLKIREGRIIKEIFPTGRVKHTEECTCGFASNKTIECACRDNSYTAKRPFVKLNVETDTAEIRLMCTDTYLDTPRPDDGSITGPCESNGDKGSGGIKGGFVHQRMASKIGRWYSRTMSKTERKGMGLHVKYDGDPWTDSDALAFRGVMVSMKEPGWYSFGFEIKDKKCDVPCIGIEMVHDGGKETWHSAATAIYCLMGSGQLLWDTVTGVNMAL

SEQ ID NO: 30187 - protein, 466 aa, Artificial Sequence; identical to SEQ ID NO: 28956
  derived and/or modified protein sequence (wt) from neuraminidase__InfluenzaB__AHL94128

SEQ ID NO: 30188 - protein, 466 aa, Artificial Sequence
  derived and/or modified protein sequence (wt) from neuraminidase__InfluenzaB__AHL94139
MLPSTIQTLTLFLTSGGVLLSLYVSALLSYLLYSDILLKFSPTEITAPTMSLDCANASNVQAVNRSATKGVTFLLPEPEWTYPRLSCPGSTFQRALLISPHRFGETKGNSAPLIIREPFIACGPNECKHFALTHYAAQPGGYYNGTRGDRNKLRHLISVKLGKIPTVENSIFHMAAWSGSACHDGKEWTYIGVDGPDNDALLKVKYGEAYTDTYHSYANKILRTQESACNCIGGNCYLMITDGSASGVSECRFLKIREGRIIKEIFPTGRVKHTEECTCGFASNKTIECACRDNSYTAKRPFVKLNVETDTAEIKLMCTDTYLDTPRPDDGSITGPCESNGDKGSGGIKGGFVHQRMESKIGRWYSRTMSKTERMGMGLYVKYDGDPWADSDALAFSGVMVSMKEPGWYSFGFEIKDKKCDVPCIGIEMVHDGGKETWHSAATAIYCLMGSGQLLWDTVTGVDMAL

SEQ ID NO: 30189 - protein, 466 aa, Artificial Sequence; identical to SEQ ID NO: 30146
  derived and/or modified protein sequence (wt) from neuraminidase__InfluenzaB__AHL94150

SEQ ID NO: 30190 - protein, 466 aa, Artificial Sequence
  derived and/or modified protein sequence (wt) from neuraminidase__InfluenzaB__AHL94161
MLPSTIQMLTLFLTSGGVLLSLYVSASLSYLLYSDILLKFSPTEITAPTMPLDCANASNVHAVNRSATKGVTFLLPEPEWTYPRLSCPGSTFQKALLISPHRFGETKGNSAPLIIREPFIACGPNECKHFALTHYAAQPGGYYNGTRGDRNKLRHLISVKLGKIPTVENSIFHMAAWSGSACHDGKEWTYIGVDGPDNNALLKIKYGEAYTDTYHSYANNILRTQESACNCIGGNCYLMITDGSASGVSECRFLKIREGRIIKEIFPTGRVKHTEECTCGFASNKTIECACRDNSYTAKRPFVKLNVETDTAKIRLMCTDTYLDTPRPDDGSITGPCESNGDKGSGGIKGGFVHQRMASKIGRWYSRTMSKTERKGMGLYVKYDGDPWTDSDALAFRGVMVSMKEPGWYSFGFEIKDKKCDVPCIGIEMVHDGGKETWHSAATAIYCLMGSGQLLWDTVTGVDMAL

SEQ ID NO: 30191 - protein, 466 aa, Artificial Sequence; identical to SEQ ID NO: 30146
  derived and/or modified protein sequence (wt) from neuraminidase__InfluenzaB__AHL94183

SEQ ID NO: 30192 - protein, 467 aa, Artificial Sequence
  derived and/or modified protein sequence (wt) from neuraminidase__InfluenzaB__AHL94194
MLPSTIQTLTLFLTSGGVLLSLYVSALLSYLLYSDILLKFSPTEITAPTMSLDCANASNVQAVNRSATKGVTFLLLPEPEWTYPRLSCPGSTFQRALLISPHRFGETKGNSAPLIIREPFIACGPNECKHFALTHYAAQPGGYYNGTRGDRNKLRHLISVKLGKIPTVENSIFHMAAWSGSACHDGKEWTYIGVDGPDNDALLKVKYGEAYTDTYHSYANKILRTQESACNCIGGNCYLMITDGSASGVSECRFLKIREGRIIKEIFPTGRVKHTEECTCGFASNKTIECACRDNSYTAKRPFVKLNVETDTAEIRLMCTDTYLDTPRPDDGSITGPCESNGDKGSGGIKGGFVHQRMESKIGRWYSRTMSKTERMGMGLYVKYDGDPWADSDALAFSGVMVSMKEPGWYSFGFEIKDKKCDVPCIGIEMVHDGGKETWHSAATAIYCLMGSGQLLWDTVTGVDMAL

SEQ ID NO: 30193 - protein, 466 aa, Artificial Sequence; identical to SEQ ID NO: 28956
  derived and/or modified protein sequence (wt) from neuraminidase__InfluenzaB__AHL94205

SEQ ID NO: 30194 - protein, 466 aa, Artificial Sequence; identical to SEQ ID NO: 29119
  derived and/or modified protein sequence (wt) from neuraminidase__InfluenzaB__AHL94214

SEQ ID NO: 30195 - protein, 466 aa, Artificial Sequence
  derived and/or modified protein sequence (wt) from neuraminidase__InfluenzaB__AHL94224
MLPSTIQMLTLFLTSGGVLLSLYVSASLSYLLYSDILLKFSPTEITAPTMPLDCANASNVHAVNRSATKGVTFLLPEPEWTYPRLSCPGSTFQKALLISPHRFGETKGNSAPLIIREPFIACGPNECKHFALTHYAAQPGGYYNGTRGDRNKLRHLISVKLGKIPTVENSIFHMAAWSGSACHDGKEWTYIGVDGPDNNALLKIKYGEAYTDTYHSYANNILRTQESACNCIGGNCYLMITDGSASGVSECRFLKIREGRIIKEIFPTGRVKHTEECTCGFASNKTIECACRDNSYTAKRPFVKLNVETDTAEIRLMCTDTYLDTPRPDDGSITGPCESNGDKGSGGIKGGFVHQRMASKIGRWYSRTMSKTERKGMGLYVKYDGDPWIDSDALAFRGVMVSMKEPGWYSFGFEIKDKKCDVPCIGIEMVHDGGKETWHSAATAIYCLMGSGQLLWDTVTGVDMAL

SEQ ID NO: 30196 - protein, 466 aa, Artificial Sequence; identical to SEQ ID NO: 28956
  derived and/or modified protein sequence (wt) from neuraminidase__InfluenzaB__AHL94235

SEQ ID NO: 30197 - protein, 466 aa, Artificial Sequence; identical to SEQ ID NO: 29119
  derived and/or modified protein sequence (wt) from neuraminidase__InfluenzaB__AHL94246

SEQ ID NO: 30198 - protein, 466 aa, Artificial Sequence; identical to SEQ ID NO: 29119
  derived and/or modified protein sequence (wt) from neuraminidase__InfluenzaB__AHL94257

SEQ ID NO: 30199 - protein, 466 aa, Artificial Sequence; identical to SEQ ID NO: 28817
  derived and/or modified protein sequence (wt) from neuraminidase__InfluenzaB__AHL94267

SEQ ID NO: 30200 - protein, 466 aa, Artificial Sequence; identical to SEQ ID NO: 28817
  derived and/or modified protein sequence (wt) from neuraminidase__InfluenzaB__AHL94278

SEQ ID NO: 30201 - protein, 466 aa, Artificial Sequence; identical to SEQ ID NO: 28817
  derived and/or modified protein sequence (wt) from neuraminidase__InfluenzaB__AHL94299

SEQ ID NO: 30202 - protein, 466 aa, Artificial Sequence
  derived and/or modified protein sequence (wt) from neuraminidase__InfluenzaB__AHL94310
MLPSTIQTLTLFLTSGGVLLSLYVSASLSYLLYSDILLKFSRTEITAPIMPLDCANASNVQAVNRSATKGVTPLLPEPEWTYPRLSCPGSTFQKALLISPHRFGETKGNSAPLIIREPFIACGPKECKHFALTHYAAQPGGYYNGTREDRNKLRHLISVKLGKIPTVENSIFHMAAWSGSACHDGREWTYIGVDGPDSNALLKIKYGEAYTDTYHSYAKNILRTQESACNCIGGDCYLMITDGSASGISECRFLKIREGRIIKEIFPTGRVKHTEECTCGFASNKTIECACRDNSYTAKRPFVKLNVETDTAEIRLMCTETYLDTPRPNDGSIAGPCESNGDEGSGGIKGGFVHQRMASKIGRWYSRTMSKTKRMGMGLYVKYDGDPWTDSEALALSGVMVSMEEPGWYSFGFEIKDKKCDVPCIGIEMVHDGGKTTWHSAATAIYCLMGSGQLLWDTVTGVNMTL

SEQ ID NO: 30203 - protein, 466 aa, Artificial Sequence; identical to SEQ ID NO: 30202
  derived and/or modified protein sequence (wt) from neuraminidase__InfluenzaB__AHL94321

SEQ ID NO: 30204 - protein, 466 aa, Artificial Sequence
  derived and/or modified protein sequence (wt) from neuraminidase__InfluenzaB__AHL94332
MLPSTIQTLTLFLTSGGVLLSLYVSASLSYLLYSDILLKFSRTEITAPIMPLDCANASNVQAVNRSATKGVTPLLPEPEWTYPRLSCPGSTFQKALLISPHRFGETKGNSAPLIIREPFIACGPKECKHFALTHYAAQPGGYYNGTREDRNKLRHLISVKLGKIPTVENSIFHMAAWSGSACHDGREWTYIGVDGPDSNALLKIKYGEAYTDTYHSYAKNILRTQESACNCIGGDCYLMITDGPASGISECRFLKIREGRIIKEIFPTGRVKHTEECTCGFASNKTIECACRDNSYTAKRPFVKLNVETDTAEIRLMCTETYLDTPRPNDGSITGPCESNGDEGSGGIKGGFVHQRMASKIGRWYSRTMSKTKRMGMGLYVKYDGDPWTDSEALALSGVMVSMEEPGWYSFGFEIKDKKCDVPCIGIEMVHDGGKTTWHSAATAIYCLMGSGQLLWDTVTGVNMTL

SEQ ID NO: 30205 - protein, 466 aa, Artificial Sequence; identical to SEQ ID NO: 28817
  derived and/or modified protein sequence (wt) from neuraminidase__InfluenzaB__AHL94343

SEQ ID NO: 30206 - protein, 466 aa, Artificial Sequence
  derived and/or modified protein sequence (wt) from neuraminidase__InfluenzaB__AHL94354
MLPSTIQTLTLFLTSGGVLLSLYVSASLSYLLYSDILLKFSPTEITAPTMPLDCANASNVQAVNRSATKGVTLLLPEPEWTYPRLSCPGSTFQKALLISPHRFGETKGNSAPLIIREPFIACGPNECKHFALTHYAAQPGGYYNGTRGDRNKLRHLISVKLGKIPTVENSIFHMAAWSGSACHDGKEWTYIGVDGPDNNALLKVKYGEAYTDTYHSYANKILRTQESACNCIGGNCYLMITDGSASGVSECRFLKIREGRIIKEIFPTGRVKHTEECTCGFASNKTIECACRDNRYTAKRPFVKLNVETDTAEIRLMCTDTYLDTPRPNDGSITGPCESDGDKGSGGIKGGFVHQRMKSKIGRWYSRTMSKTERMGMGLYVKYDGDPWADSDALAFSGVMVSMKEPGWYSFGFEIKDKKCDVPCIGIEMVHDGGKETWHSAATAIYCLMGSGQLLWDTVTGVDMAL

SEQ ID NO: 30207 - protein, 466 aa, Artificial Sequence; identical to SEQ ID NO: 30206
  derived and/or modified protein sequence (wt) from neuraminidase__InfluenzaB__AHL94365

SEQ ID NO: 30208 - protein, 466 aa, Artificial Sequence
  derived and/or modified protein sequence (wt) from neuraminidase__InfluenzaB__AHL94387
MLPSTIQTLTLFLTSGGVLLSLYVSASLSYLLYSDILLKFSPTEITAPTMPLDCANASTVQAVNRSATKGVTLLLPEPEWTYPRLSCPGSTFQKALLISPHRFGETKGNSAPLIIREPFIACGPNECKHFALTHYAAQPGGYYNGTRGDRNKLRHLISVKLGKIPTVENSIFHMAAWSGSACHDGKEWTYLGVDGPDNNALLKVKYGEAYTDTYHSYANKILRTQESACNCIGGNCYLMITDGSASGVSECRFLKIREGRIIKEIFPTGRVKHTEECTCGFASNKTIECACRDNRYTAKRPFVKLNVETDTAEIRLMCTDTYLDTPRPNDGSITGPCESDGDKGSGGIKGGFVHQRMKSKIGRWYSRTMSKTERMGMGLYVKYDGDPWADSDALAFSGVMVSMKEPGWYSFGFEIKDKKCDVPCIGIEMVHDGGKEIWHSAATAIYCLMGSGQLLWDTVTGVDMAL

SEQ ID NO: 30209 - protein, 467 aa, Artificial Sequence
  derived and/or modified protein sequence (wt) from neuraminidase__InfluenzaB__AHL94398
MLPSTIQTLTLFLTSGGVLLSLYVSASLSYLLYSDILLKFSPTEITAPTMPLDCANASNVQAVNRSATKGVTLLLLPEPEWTYPRLSCPGSTFQKALLISPHRFGETKGNSAPLIIREPFIACGPNECKHFALTHYAAQPGGYYNGTRGDRNKLRHLISVKLGKIPTVENSIFHMAAWSGSACHDGKEWTYIGVDGPDNNALLKVKYGEAYTDTYHSYANKILRTQESACNCIGGNCYLMITDGSASGVSECRFLKIREGRIIKEIFPTGRVKHTEECTCGFASNKTIECACRDNRYTAKRPFVKLNVETDTAEIRLMCTDTYLDTPRPNDGSITGPCESDGDKGSGGIKGGFVHQRMKSKIGRWYSRTMSKTERMGMGLYVKYDGDPWADSDALAFSGVMVSMKEPGWYSFGFEIKDKKCDVPCIGIEMVHDGGKETWHSAATAIYCLMGSGQLLWDTVTGVDMAL

SEQ ID NO: 30210 - protein, 466 aa, Artificial Sequence; identical to SEQ ID NO: 30206
  derived and/or modified protein sequence (wt) from neuraminidase__InfluenzaB__AHL94409

SEQ ID NO: 30211 - protein, 466 aa, Artificial Sequence
  derived and/or modified protein sequence (wt) from neuraminidase__InfluenzaB__AHL94431
MLPSTIQTLTLFLTSGGVLLSLYVSASLSYLLYSDILLKFSQTEITAPIMPLDCANASNVQAVNHSAAKGVTLILPEPEWTYPRLSCPGSTFQKALLISPHRFGEIKGNSAPLIIREPFIACGPTECKHFALTHYAAQPGGYYNGTREDRNKLRHLISVKLGKIPTVENSIFHMAAWSGSACHDGKEWTYIGVDGPDSNALLKIKYGEAYTDTYHSYAKNILRTQESACNCIGGDCYLMITDGPASGVSECRFLKIREGRIIKEIFPTGRVKHTEECTCGFASNKTIECACRDNRYTAKRPFVKLNVETDTAEIRLMCTETYLDTPRPNDGSITGPCESDGDKGSGGIKGGFVHQRMASKIGRWYSRTMSKTKRMGMGLYVKYDGDPWTDSEALALSGVMISMEEPGWYSFGFEIKDKKCDVPCIGIEMVHDGGKTTWHSAATAIYCLMGSGQLLWDTVTGVDMAL

SEQ ID NO: 30212 - protein, 466 aa, Artificial Sequence
  derived and/or modified protein sequence (wt) from neuraminidase__InfluenzaB__AHL94442
MLPSTIQTLTLFLTSGGVLLSLYMSASLSYLLYSDILLKFSRTEITAPIMPLDCANASNVQAVNRSATKGVTPLLPEPEWTYPRLSCPGSTFQKALLISPHRFGETKGNSAPLIIREPFIACGPKECKHFALTHYAAQPGGYYNGTREDRNKLRHLISVKLGKIPTVENSIFHMAAWSGSACHDGREWTYIGVDGPDSNALLKIKYGEAYTDTYHSYAKNILRTQESACNCIGGDCYLMITDGSASGISECRFLKIREGRIIKEIFPTGRVKHTEECTCGFASNKTIECACRDNSYTAKRPFVKLNVETDTAEIRLMCTETYLDTPRPNDGSIAGPCESNGDEGSGGIKGGFVHQRMASKIGRWYSRTMSKTKRMGMGLYVKYDGDPWTDSEALALSGVMVSMEEPGWYSFGFEIKDKKCDVPCIGIEMVHDGGKTTWHSAATAIYCLMGSGQLLWDTVTGVNMTL

SEQ ID NO: 30213 - protein, 466 aa, Artificial Sequence; identical to SEQ ID NO: 30202
  derived and/or modified protein sequence (wt) from neuraminidase__InfluenzaB__AHL94464

SEQ ID NO: 30214 - protein, 466 aa, Artificial Sequence; identical to SEQ ID NO: 28817
  derived and/or modified protein sequence (wt) from neuraminidase__InfluenzaB__AHL94475

SEQ ID NO: 30215 - protein, 466 aa, Artificial Sequence; identical to SEQ ID NO: 30206
  derived and/or modified protein sequence (wt) from neuraminidase__InfluenzaB__AHL94486

SEQ ID NO: 30216 - protein, 466 aa, Artificial Sequence; identical to SEQ ID NO: 28817
  derived and/or modified protein sequence (wt) from neuraminidase__InfluenzaB__AHL94497

SEQ ID NO: 30217 - protein, 466 aa, Artificial Sequence; identical to SEQ ID NO: 30202
  derived and/or modified protein sequence (wt) from neuraminidase__InfluenzaB__AHL94508

SEQ ID NO: 30218 - protein, 466 aa, Artificial Sequence
  derived and/or modified protein sequence (wt) from neuraminidase__InfluenzaB__AHL94519
MLPSTIQTLTLFLTSGGVLLSLYVSASLSYLLYSDILLKFSPTEITAPTMPLDCANASNVQAVNRSATKGVTLLLPEPEWTYPRLSCPGSTFQKALLISPHRFGETKGNSAPLIIREPFIACGPNECKHFALTHYAAQPGGYYNGTRGDRNKLRHLISVKLGKIPTVENSIFHMAAWSGSACHDGKEWTYIGVDGPDNNALLKVKYGEAYTDTYHSYANKILRTQESACNCIGGNCYLMITDGSASGVSECRFLKIREGRIIKEIFPTGRVKHTEECTCGFASNKTIECACRDNSYTAKRPFVKLNVETDTAEIRLMCTDTYLDTPRPNDGSITGPCESDGDKGSGGIKGGFVHQRMESKIGRWYSRTMSKTERMGMGLYVKYDGDPWTDSDALAFSGVMVSMKEPGWYSFGFEIKDKKCDVPCIGIEMVHDGGKETWHSAATAIYCLMGSGQLLWDTVTGVDMAL

SEQ ID NO: 30219 - protein, 466 aa, Artificial Sequence; identical to SEQ ID NO: 30202
  derived and/or modified protein sequence (wt) from neuraminidase__InfluenzaB__AHL94530

SEQ ID NO: 30220 - protein, 466 aa, Artificial Sequence; identical to SEQ ID NO: 30206
  derived and/or modified protein sequence (wt) from neuraminidase__InfluenzaB__AHL94541

SEQ ID NO: 30221 - protein, 466 aa, Artificial Sequence
  derived and/or modified protein sequence (wt) from neuraminidase__InfluenzaB__AHL94563
MLPSTIQTLTLFLTLGGVLLSLYVSASLSYLLYSDILLKFSRTEITAPIMPLDCANASNVQAVNRSATKGVTLLLPEPEWTYPRLSCPGSTFQKALLISPHRFGETKGNSAPLIIREPFIACGPKECKHFALTHYAAQPGGYYNGTREDRNKLRHLISVKLGKIPTVENSIFHMAAWSGSACHDGREWTYIGVDGPDSNALLKIKYGEAYTDTYHSYAKNILRTQESACNCIGGDCYLMITDGPASGISECRFLKIREGRIIKEIFPTGRVKHTEECTCGFASNKTIECACRDNSYTAKRPFVKLNVETDTAEIRLMCTETYLDTPRPNDGSITGPCESNGDKGSGGIKGGFVHQRMASKIGRWYSRTMSKTKRMGMGLYVKYDGDPWTDSEALALSGVMVSMEEPGWYSFGFEIKDKKCDVPCIGIEMVHDGGKTTWHSAATAIYCLMGSGQLLWDTVTGVNMTL

SEQ ID NO: 30222 - protein, 466 aa, Artificial Sequence; identical to SEQ ID NO: 30175
  derived and/or modified protein sequence (wt) from neuraminidase__InfluenzaB__AHL94574

SEQ ID NO: 30223 - protein, 466 aa, Artificial Sequence
  derived and/or modified protein sequence (wt) from neuraminidase__InfluenzaB__AHL94585
MLPSTIQTLTLFLTSGGVLLSLYVSASLSYLLYSDILLKFSQTEITAPIMPLDCANASNVQAVNRSAAKGVTLLLPEPEWTYPRLSCPGSTFQKALLISPHRFGEIKGNSAPLIIREPFIACGPTECKHFALTHYAAQPGGYYNGTREDRNKLRHLISVKLGKIPTVENSIFHMAAWSGSACHDGKEWTYIGVDGPDSNALLKIKYGEAYTDTYHSYAKNILRTQESACNCIGGDCYLMITDGPASGVSECRFLKIREGRIIKEIFPKGRVKHTEECTCGFASNKTIECACRDNRYTAKRPFVKLNVETDTAEIRLMCTETYLDTPRPNDGSITGPCESDGDKGSGGIKGGFVHQRMASKIGRWYSRTMSKTKRMGMGLYVKYDGDPWTDSEALALSGVMVSMEEPGWYSFGFEIKDKKCDVPCIGIEMVHDGGKTTWHSAATAIYCLMGSGQLLWDTVTGVDMAL

SEQ ID NO: 30224 - protein, 466 aa, Artificial Sequence; identical to SEQ ID NO: 30175
  derived and/or modified protein sequence (wt) from neuraminidase__InfluenzaB__AHL94596

SEQ ID NO: 30225 - protein, 466 aa, Artificial Sequence
  derived and/or modified protein sequence (wt) from neuraminidase__InfluenzaB__AHL94607
MLPSTIQTLTLFLTSGGVLLSLYVSASLSYLLYSDILLKFSPTEITAPTMPLDCANASNVQAVNRSATKGVTLLLPEPEWTYPRLSCPGSTFQKALLISPHRFGETKGNSAPLIIREPFIACGPNECKHFALTHYAAQPGGYYNGTRGDRNKLRHLISVKLGKIPTVENSIFHMAAWSGSACHDGKEWTYIGVDGPDNNALLKVKYGEAYTDTYHSYANKILRTQESACNCIGGNCYLMITDGSASGVSECRFLKIREGRIIKEIFPTGRVKHTEECTCGFASNKTIECACRDNRYTAKRPFVKLNVETDTAEIRLMCTDTYLDTPRPNDGSITGPCESDGDKGSGGIKGGFVHQRLKSKIGRWYSRTMSKTERMGMGLYVKYDGDPWADSDALTFSGVMVSMKEPGWYSFGFEIKDKKCDVPCIGIEMVHDGGKETWHSAATAIYCLMGSGQLLWDTVTGVDMAL

SEQ ID NO: 30226 - protein, 466 aa, Artificial Sequence; identical to SEQ ID NO: 30206
  derived and/or modified protein sequence (wt) from neuraminidase__InfluenzaB__AHL94618

SEQ ID NO: 30227 - protein, 466 aa, Artificial Sequence; identical to SEQ ID NO: 30202
  derived and/or modified protein sequence (wt) from neuraminidase__InfluenzaB__AHL94628

SEQ ID NO: 30228 - protein, 466 aa, Artificial Sequence; identical to SEQ ID NO: 30206
  derived and/or modified protein sequence (wt) from neuraminidase__InfluenzaB__AHL94639

SEQ ID NO: 30229 - protein, 466 aa, Artificial Sequence
  derived and/or modified protein sequence (wt) from neuraminidase__InfluenzaB__AHL94650
MLPSTIQTLTLFLTSGGVLLSLYVSASLSYLLYSDILLKFSPTEITAPTMPLDCANASNVQAVNRSATKGVTLLLPEPEWTYPRLSCPGSTFQKALLISPHRFGETKGNSAPLIIREPFIACGPNECKHFALTHYAAQPGGYYNGTRGDRNKLRHLISVKLGKIPTVENSIFHMAAWSGSACHDGKEWTYIGVDGPDNNALLKVKYGEAYTDTYHSYANKILRTQESACNCIGGNCYLMITDGSASGVSECRFLKIREGRIIREIFPTGRVKHTEECTCGFASNKTIECACRDNRYTAKRPFVKLNVETDTAEIRLMCTDTYLDTPRPNDGSITGPCESDGDKGSGGIKGGFVHQRMKSKIGRWYSRTMSKTERMGMGLYVKYDGDPWADSDALAFSGVMVSMKEPGWYSFGFEIKDKKCDVPCIGIEMVHDGGKETWHSAATAIYCLMGSGQLLWDTVTGVDMAL

SEQ ID NO: 30230 - protein, 466 aa, Artificial Sequence
  derived and/or modified protein sequence (wt) from neuraminidase__InfluenzaB__AHL94661
MLPSTIQTLTLFLTSGGVLLSLYVSASLSYLLYSDILLKFPSTEITAPTMPLDCANASNVQAVNRSATKGVTLLLPEPEWTYPRLSCPGSTFQKALLISPHRFGETKGNSAPLIIREPFIACGPKECKHFALTHYAAQPGGYYNGTRGDRNKLRHLISVKLGKIPTVENSIFHMAAWSGSACHDGKEWTYIGVDGPDNNALLKIKYGEAYTDTYHSYANNILRTQESACNCIGGNCYLMITDGSASGVSECRFLKIREGRIIKEIFPTGRIQHTEECTCGFASNKTIECACRDNSYTAKRPFVKLNVETDTAEIRLMCTKTYLDTPRPEDGSITGPCESNGGKGSGGIKGGFVHQRMASKIGRWYSRTMSKTERKGMGLYVKYNGDPWADSDALVFSGVMVSMEEPGWYSFGFEIKDKKCDVPCIGIEMVHDGGKETWHSAATAIYCLMGSGQLLWDTVTGVNMTL

SEQ ID NO: 30231 - protein, 466 aa, Artificial Sequence
  derived and/or modified protein sequence (wt) from neuraminidase__InfluenzaB__AHL94672
MLPSTIQTLTLFLTSGGVLLSLYVSASLSYLLYSDILLKFSRTEITAPIMPLDCANASNVQAVNRSATKGVTPLLPEPEWTYPRLSCPGSTFQKALLISPHRFGETKGNSAPLIIREPFIACGPKECKHFALTHYAAQPGGYYNGTREDRNKLRHLISVKLGKIPTVENSIFHMAAWSGSACHDGREWTYIGVDGPDSNALLKIKYGEAYTDTYHSYAKNILRTQESACNCIGGDCYLMITDGSASGISECRFLKIREGRIIKEIFPTGRVKHTEECTCGFASNKTIECACRDNSYTAKRPFVKLNVETDTAEIRLMCTETYLDTPRPNDGSISGPCESNGDEGSGGIKGGFVHQRMASKIGRWYSRTMSKTKRMGMGLYVKYDGDPWTDSEALALSGVMVSMEEPGWYSFGFEIKDKKCDVPCIGIEMVHDGGKTTWHSAATAIYCLMGSGQLLWDTVTGVNMTL

SEQ ID NO: 30232 - protein, 466 aa, Artificial Sequence
  derived and/or modified protein sequence (wt) from neuraminidase__InfluenzaB__AHL94683
MLPSTIQTLTLFLTSGGVLLSLYVSASLSYLLYSDILLKFSRTEITAPIMPLDCANASNVQAVNRSATKGVTPLLPEPEWTYPRLSCPGSTFQKALLISPHRFGETKGNSAPLIIREPFIACGPKECKHFALTHYAAQPGGYYNGTREDRNKLRHLISVKLGKIPTVENSIFHMAAWSGSACHDGREWTYIGVDGPDSNALLKIKYGEAYTDTYHSYAKNILRTQESACNCIGGDCYLMITDGSASGISECRFLKIREGRIIKEIFPTGRVKHTEECTCGFASNKTIECACRDNSYTAKRPFVKLNVETDTAEIRLMCTETYLDTPRPNDGSITGPCESNGGEGSGGIKGGFVHQRMASKIGRWYSRTMSKTKRMGMGLYVKYDGDPWTDSEALALSGVMVSMEEPGWYSFGFEIKDKKCDVPCIGIEMVHDGGKTTWHSAATAIYCLMGSGQLLWDTVTGVNMTL

SEQ ID NO: 30233 - protein, 466 aa, Artificial Sequence
  derived and/or modified protein sequence (wt) from neuraminidase__InfluenzaB__AHL94694
MLPSTIQTLTLFLTSGGVLLSLYVSASLSYLLYSDILLKFSPTEITAPTMPLDCANASNVQAVNRSATKGVTLLLPEPEWTYPRLSCPGSTFQKALLISPHRFGETKGNSAPLIIREPFIACGPNECKHFALTHYAAQPGGYYNGTRGDRNKLRHLISVKLGKIPTVENSIFHMAAWSGSACHDGKEWTYIGVDGPDNNALLKVKYGEAYTDTYHSYANKILRTQESACNCIGGNCYLMITDGSASGVSECRFLKIREGRIIKEIFPTGRVKHTEECTCGFASNKTIECACRDNRYTAKRPFVKLNVETDTAEIRLMCTDTYLDTPRPNDGSITGPCESDGDKGSGGIKGGFVHQRMKSKIGRWYSRTMSKTERMGMGLYVKYDGDPWADSDALTFSGVMVSMKEPGWYSFGFEIKDKKCDVPCIGIEMVHDGGKETWHSAATAIYCLMGSGQLLWDTVTGVDMAL

SEQ ID NO: 30234 - protein, 466 aa, Artificial Sequence; identical to SEQ ID NO: 30206
  derived and/or modified protein sequence (wt) from neuraminidase__InfluenzaB__AHL94705

SEQ ID NO: 30235 - protein, 466 aa, Artificial Sequence; identical to SEQ ID NO: 28817
  derived and/or modified protein sequence (wt) from neuraminidase__InfluenzaB__AHL94716

SEQ ID NO: 30236 - protein, 466 aa, Artificial Sequence
  derived and/or modified protein sequence (wt) from neuraminidase__InfluenzaB__AHL94727
MLPSTIQTLTLFLTSGGVLLSLYVSASLSYLLYSDILLKFPSTEITAPTMPLDCANTSNVQAVNRSATKGVTLLLPEPEWTYPRLSCPGSTFQKALLISPHRFGETKGNSAPLIIREPFIACGPKECKHFALTHYAAQPGGYYNGTRGDRNKLRHLISVKLGKIPTVENSIFHMAAWSGSACHDGKEWTYIGVDGPDNNALLKIKYGEAYTDTYHSYANNILRTQESACNCIGGNCYLMITDGSASGVSECRFLKIREGRIIKEIFPTGRIQHTEECTCGFASNKTIECACRDNSYTAKRPFVKLNVETDTAEIRLMCTKTYLDTPRPEDGSITGPCESNGGKGSGGIKGGFVHQRMASKIGRWYSRTMSKTERKGMGLYVKYNGDPWADSDALVFSGVMVSMEEPGWYSFGFEIKDKKCDVPCIGIEMVHDGGKETWHSAATAIYCLMGSGQLLWDTVTGVNMTL

SEQ ID NO: 30237 - protein, 466 aa, Artificial Sequence; identical to SEQ ID NO: 28817
  derived and/or modified protein sequence (wt) from neuraminidase__InfluenzaB__AHL94738

SEQ ID NO: 30238 - protein, 466 aa, Artificial Sequence
  derived and/or modified protein sequence (wt) from neuraminidase__InfluenzaB__AHL94749
MLPSTIQTLTLFLTSGGVLLSLYVSASLSYLLYSDILLKFSPTEITAPTMPLDCANASNVQAVNRSATKGVTLLLPEPEWTYPRLSCPGSTFQKALLISPHRFGETKGNSAPLIIREPFIACGPNECKHFALTHYAAQPGGYYNGTRGDRNKLRHLISVKLGKIPTVENSIFHMAAWSGSACHDGKEWTYIGVDGPDNNALLKVKYGEAYTDTYHSYANKILRTQESACNCIGGNCYLMITDGSASGVSECRFLKIREGRIIKEIFPTGRVKHTEECTCGFASNKTIECACRDNRYTAKRPFVKLNVETDTAEIRLMCTDTYLDTPRPNDGSITGPCESDGDKGSGGIKGGFVHQRMKSKIGRWYSRTMSKTERMGMGLYVKYDGDPWADSDALAFSGVMVSMKEPGWYSFGFEIKDKKCDVPCIGVEMVHDGGKETWHSAATAIYCLMGSGQLLWDTVTGVDMAL

SEQ ID NO: 30239 - protein, 466 aa, Artificial Sequence
  derived and/or modified protein sequence (wt) from neuraminidase__InfluenzaB__AHL94760
MLPSTIQTLTLFLTSGGVLLSLYVSASLSYLLYSDILLKFSQTEITAPIMPLDCANASNVQAVNHSAAKGVTLLLPEPEWTYPRLSCPGSTFQKALLISPHRFGEIKGNSAPLIIREPFIACGPTECKHFALTHYAAQPGGYYNGTREDRNKLRHLISVKLGKIPTVENSIFHMAAWSGSACHDGKEWTYIGVDGPDSNALLKIKYGEAYTDTYHSYAKNILRTQESACNCIGGDCYLMITDGPASGVSECRFLKIREGRIIKEIFPTGRVKHTEECTCGFASNKTIECACRDNRYTAKRPFVKLNVETDTAEIRLMCTETYLDTPRPNDGSITGPCESDGDKGSGGIKGGFVHQRMASKIGRWYSRTMSKTKRMGMGLYVKYDGDPWTDSEALALSGVMVSMEEPGWYSFGFEIKDKKCDIPCIGIEMVHDGGKTTWHSAATAIYCLMGSGQLLWDTVTGVDMAL

SEQ ID NO: 30240 - protein, 466 aa, Artificial Sequence; identical to SEQ ID NO: 30206
  derived and/or modified protein sequence (wt) from neuraminidase__InfluenzaB__AHL94770

SEQ ID NO: 30241 - protein, 466 aa, Artificial Sequence; identical to SEQ ID NO: 30204
  derived and/or modified protein sequence (wt) from neuraminidase__InfluenzaB__AHL94781

SEQ ID NO: 30242 - protein, 466 aa, Artificial Sequence; identical to SEQ ID NO: 30202
  derived and/or modified protein sequence (wt) from neuraminidase__InfluenzaB__AHL94791

SEQ ID NO: 30243 - protein, 466 aa, Artificial Sequence; identical to SEQ ID NO: 30233
  derived and/or modified protein sequence (wt) from neuraminidase__InfluenzaB__AHL94801

SEQ ID NO: 30244 - protein, 466 aa, Artificial Sequence; identical to SEQ ID NO: 30202
  derived and/or modified protein sequence (wt) from neuraminidase__InfluenzaB__AHL94812

SEQ ID NO: 30245 - protein, 466 aa, Artificial Sequence; identical to SEQ ID NO: 30202
  derived and/or modified protein sequence (wt) from neuraminidase__InfluenzaB__AHL94821

SEQ ID NO: 30246 - protein, 466 aa, Artificial Sequence; identical to SEQ ID NO: 30206
  derived and/or modified protein sequence (wt) from neuraminidase__InfluenzaB__AHL94831

SEQ ID NO: 30247 - protein, 466 aa, Artificial Sequence
  derived and/or modified protein sequence (wt) from neuraminidase__InfluenzaB__AHL94840
MLPSTIQTLTLFLTSGGVLLSLYVSASLSYLLYSGILLKFSRTEITAPIMPLDCANASNVQAVNRSATKGVTLLLPEPEWTYPRLSCPGSTFQKALLISPHRFGETKGNSAPLIIREPFIACGPKECKHFALTHYAAQPGGYYNGTREDRNKLRHLISVKLGKIPTVENSIFHMAAWSGSACHDGREWTYIGVDGPDSNALLKIKYGEAYTDTYHSYAKNILRTQESACNCIGGDCYLMITDGPASGISECRFLKIREGRIIKEIFPTGRVKHTEECTCGFASNKTIECACRDNSYTAKRPFVKLNVETDTAEIRLMCTETYLDTPRPNDGSITGPCESNGDKGSGGIKGGFVHQRMASKIGRWYSRTMSKTKRMGMGLYVKYDGDPWTDSEALALSGVMVSMEEPGWYSFGFEIKDKKCDVPCIGIEMVHDGGKTTWHSAATAIYCLMGSGQLLWDTVTGVNMTL

SEQ ID NO: 30248 - protein, 466 aa, Artificial Sequence
  derived and/or modified protein sequence (wt) from neuraminidase__InfluenzaB__AHL94851
MLPSTIQTLTLFLTSGGVLLSLYVSASLSYLLYSDILLKFSQTEITAPIMPLDCTNASNVQAVNRSAAKGVTLLLPEPEWTYPRLSCPGSTFQKALLISPHRFGEIKGNSAPLIIREPFIACGPTECKHFALTHYAAQPGGYYNGTREDRNKLRHLISVKLGKIPTVENSIFHMAAWSGSACHDGKEWTYIGVDGPDSNALLKIKYGEAYTDTYHSYAKNILRTQESACNCIGGDCYLMITDGPASGVSECRFLKIREGRIIKEIFPTGRVKHTEECTCGFASNKTIECACRDNRYTAKRPFVKLNVETDTAEIRLMCTETYLDTPRPNDGSITGPCESDGDKGSGGIKGGFVHQRMTSKIGRWYSRTMSKTKRMGMGLYVKYDGDPWTDSEALALSGVMVSMEEPGWYSFGFEIKDKKCDVPCIGIEMVHDGGKTTWHSAATAIYCLMGSGQLLWDTVTGVDMAL

SEQ ID NO: 30249 - protein, 466 aa, Artificial Sequence; identical to SEQ ID NO: 28635
  derived and/or modified protein sequence (wt) from neuraminidase__InfluenzaB__AHL94862

SEQ ID NO: 30250 - protein, 466 aa, Artificial Sequence; identical to SEQ ID NO: 28817
  derived and/or modified protein sequence (wt) from neuraminidase__InfluenzaB__AHL94873

SEQ ID NO: 30251 - protein, 466 aa, Artificial Sequence; identical to SEQ ID NO: 30121
  derived and/or modified protein sequence (wt) from neuraminidase__InfluenzaB__AHL94884

SEQ ID NO: 30252 - protein, 466 aa, Artificial Sequence; identical to SEQ ID NO: 28961
  derived and/or modified protein sequence (wt) from neuraminidase__InfluenzaB__AHL94893

SEQ ID NO: 30253 - protein, 466 aa, Artificial Sequence; identical to SEQ ID NO: 28961
  derived and/or modified protein sequence (wt) from neuraminidase__InfluenzaB__AHL94904

SEQ ID NO: 30254 - protein, 466 aa, Artificial Sequence
  derived and/or modified protein sequence (wt) from neuraminidase__InfluenzaB__AHL94915
MLPSTIQTLTLFLTSGGVLLSLYVSASLSYLLYSDILLKFSPTEITAPTMPLDCANASNVQVVNRSATKGVTLLLPEPEWTYPRLSCPGSTFQKALLISPHRFGETKGNSAPLIIREPFIACGPNECKHFALTHYAAQPGGYYNGTRGDRNKLRHLISVKLGKIPTVENSIFHMAAWSGSACHDGKEWTYIGVDGPDNNALLKVKYGEAYTDTYHSYANKILRTQESACNCIGGNCYLMITDGSASGVSECRFLKIREGRIIKEIFPTGRVKHTEECTCGFASNKTIECACRDNSYTAKRPFVKLNVETDTAEIRLMCTDTYLDTPRPDDGSITGPCESNGDKGSGGIKGGFVHQRMESKIGRWYSRTMSKTERMGMGLYVKYDGDPWADSDALAFSGVMVSMKEPGWYSFGFEIKDKKCDVPCIGIEMVHDGGKETWHSAATAIYCLMGSGQLLWDTVTGVDMAL

SEQ ID NO: 30255 - protein, 466 aa, Artificial Sequence; identical to SEQ ID NO: 30121
  derived and/or modified protein sequence (wt) from neuraminidase__InfluenzaB__AHL94926

SEQ ID NO: 30256 - protein, 466 aa, Artificial Sequence
  derived and/or modified protein sequence (wt) from neuraminidase__InfluenzaB__AHL94937
MLPSTIQTLTLFLTSGGVLLSLYVSASLSYLLYSDILLKFSPTEITAPTLPLDCANASNVQAVNRSATKGVTLLLPEPEWTYPRLSCPGSTFQKALLISPHRFGETKGNSAPLIIREPFIACGPNECKHFALTHYAAQPGGYYNGTRGDRNKLRHLISVKLGKIPTVENSIFHMAAWSGSACHDGKEWTYIGVDGPDNNALLKVKYGEAYTDTYHSYANKILRTQESACNCIGGNCYLMITDGSASGVSECRFLKIREGRIIKEIFPTGRVKHTEECTCGFASNKTIECACRDNSYTAKRPFVKLNVETDTAEIRLMCTDTYLDTPRPNDGSITGPCESNGDKGSGGIKGGFVHQRMESKIGRWYSRTMSKTERMGMGLYVKYDGDPWADSDALAFSGVMVSMKEPGWYSFGFEIKDKKCDVPCIGIEMVHDGGKETWHSAATAIYCLMGSGQLLWDTVTGVDMAL

SEQ ID NO: 30257 - protein, 466 aa, Artificial Sequence; identical to SEQ ID NO: 30140
  derived and/or modified protein sequence (wt) from neuraminidase__InfluenzaB__AHL94948

SEQ ID NO: 30258 - protein, 466 aa, Artificial Sequence; identical to SEQ ID NO: 28956
  derived and/or modified protein sequence (wt) from neuraminidase__InfluenzaB__AHL94959

SEQ ID NO: 30259 - protein, 466 aa, Artificial Sequence; identical to SEQ ID NO: 28956
  derived and/or modified protein sequence (wt) from neuraminidase__InfluenzaB__AHL94969

SEQ ID NO: 30260 - protein, 466 aa, Artificial Sequence; identical to SEQ ID NO: 28956
  derived and/or modified protein sequence (wt) from neuraminidase__InfluenzaB__AHL94978

SEQ ID NO: 30261 - protein, 466 aa, Artificial Sequence
  derived and/or modified protein sequence (wt) from neuraminidase__InfluenzaB__AHM00990
MLPSTIQTLTLFLTSGGVLLSLYVSASLSYLLYSDILLKFSQTEITAPIMPLDCTNASNVQAVNHSAAKGVTLLLPEPEWTYPRLSCPGSTFQKALLISPHRFGEIKGNSAPLIIREPFIACGPTECKHFALTHYAAQPGGYYNGTREDRNKLRHLISVKLGKIPTVENSIFHMAAWSGSACHDGKEWTYIGVDGPDSNALLKIKYGEAYTDTYHSYAKNILRTQESACNCIGGDCYLMITDGPASGVSECRFLKIREGRIIKEIFPTGRVKHTEECTCGFASNKTIECACRDNRYTAKRPFVKLNVETDTAEIRLMCTETYLDTPRPNDGSITGPCESDGDKGSGGIKGGFVHQRMASKIGRWYSRTMSKTKRMGMGLYVKYDGDPWTDSEALALSGVMVSMEEPGWYSFGFEIKDKKCDVPCIGIEMVHDGGKTTWHSAATAIYCLMGSGQLLWDTVTGVDMAL

SEQ ID NO: 30262 - protein, 466 aa, Artificial Sequence; identical to SEQ ID NO: 30206
  derived and/or modified protein sequence (wt) from neuraminidase__InfluenzaB__AHM01001

SEQ ID NO: 30263 - protein, 466 aa, Artificial Sequence
  derived and/or modified protein sequence (wt) from neuraminidase__InfluenzaB__AHM01012
MLPSTIQTLTLFLTSGGVLLSLYVSASLSYLLYSDILLKFSPTEITAPTMPLDCANASNVQAVNRSATKGVTLLLPEPEWTYPRLSCPGSTFQKALLISPHRFGETKGNSAPLIIREPFIACGPNECKHFALTHYAAQPGGYYNGTRGDRNKLRHLISVKLGKIPTVENSIFHMAAWSGSACHDGKEWTYIGVDGPDNNALLKVKYGEAYTDTYHSYANKILRTQESACNCIGGNCYLMITDGSASGVSECRFLKIREGRIIKEIFPTGRVKHTEECTCGFASNKTIECACRDNRYTAKRPFVKLNVETDTAEIRLMCTDTYLDTPRPNDGSITGPCESDGDKGSGGIKGGFVHQRMKSKIGRWYSRTMSKTERMGMGLYVKYDGDPWTDSDALAFSGVMVSMKEPGWYSFGFEIKDKKCDVPCIGIEMVHDGGKETWHSAATAIYCLMGSGQLLWDTVTGVDMAL

SEQ ID NO: 30264 - protein, 466 aa, Artificial Sequence; identical to SEQ ID NO: 30206
  derived and/or modified protein sequence (wt) from neuraminidase__InfluenzaB__AHM01023

SEQ ID NO: 30265 - protein, 466 aa, Artificial Sequence; identical to SEQ ID NO: 30206
  derived and/or modified protein sequence (wt) from neuraminidase__InfluenzaB__AHM01034

SEQ ID NO: 30266 - protein, 466 aa, Artificial Sequence
  derived and/or modified protein sequence (wt) from neuraminidase__InfluenzaB__AHM01045
MLPSTIQTLTLFLTSGGVLLSLYVSASLSYLLYSDILLKFSPTEITAPTMPLDCANASNVQAVNRSATKGVTLLLPEPGWTYPRLSCPGSTFQKALLISPHRFGETKGNSAPLIIREPFIACGPNECKHFALTHYAAQPGGYYNGTRGDRNKLRHLISVKLGKIPTVENSIFHMAAWSGSACHDGKEWTYIGVDGPDNNALLKVKYGEAYTDTYHSYANKILRTQESACNCIGGNCYLMITDGSASGVSECRFLKIREGRIIKEIFPTGRVKHTEECTCGFASNKTIECACRDNRYTAKRPFVKLNVETDTAEIRLMCTDTYLDTPRPNDGSITGPCESDGDKGSGGIKGGFVHQRMKSKIGRWYSRTMSKTERMGMGLYVKYDGDPWADSDALAFSGVMVSMKEPGWYSFGFEIKDKKCDVPCIGIEMVHDGGKETWHSAATAIYCLMGSGQLLWDTVAGVDMAL

SEQ ID NO: 30267 - protein, 466 aa, Artificial Sequence
  derived and/or modified protein sequence (wt) from neuraminidase__InfluenzaB__AHM01056
MLPSTTQTLTLFLTSGGVLLSLYVSASLSYLLYSDILLKFSPTEITAPTMPLDCANASNVQAVNRSATKGVTLLLPEPEWTYPRLSCPGSTFQKALLISPHRFGETKGNSAPLIIREPFIACGPNECKHFALTHYAAQPGGYYNGTRGDRNKLRHLISVKLGKIPTVENSIFHMAAWSGSACHDGKEWTYIGVDGPDNNALLKVKYGEAYTDTYHSYANKILRTQESACNCIGGNCYLMITDGSASGVSECRFLKIREGRIIKEIFPTGRVKHTEECTCGFASNKTIECACRDNRYTAKRPFVKLNVETDTAEIRLMCTDTYLDTPRPNDGSITGPCESDGDKGSGGIKGGFVHQRMKSKIGRWYSRTMSKTERMGMGLYVKYDGDPWADSDALVFSGVMVSMKEPGWYSFGFEIKDKKCDVPCIGIEMVHDGGKETWHSAATAIYCLMGSGQLLWDTVTGVDMAL

SEQ ID NO: 30268 - protein, 466 aa, Artificial Sequence; identical to SEQ ID NO: 30206
  derived and/or modified protein sequence (wt) from neuraminidase__InfluenzaB__AHM01067

SEQ ID NO: 30269 - protein, 466 aa, Artificial Sequence; identical to SEQ ID NO: 30175
  derived and/or modified protein sequence (wt) from neuraminidase__InfluenzaB__AHM01078

SEQ ID NO: 30270 - protein, 466 aa, Artificial Sequence
  derived and/or modified protein sequence (wt) from neuraminidase__InfluenzaB__AHM01089
MLPSTIQTLTLFLTSGGVLLSLYVSASLSYLLYSDILLKFSPTEITAPTMPLDCANASNVQAVNRSAAKGVTLLLPEPEWTYPRLSCPGSTFQKALLISPHRFGETKGNSAPLIIREPFIACGPNECKHFALTHYAAQPGGYYNGTRGDRNKLRHLISVKLGKIPTVENSIFHMAAWSGSACHDGKEWTYIGVDGPDNNALLKVKYGEAYTDTYHSYANKILRTQESACNCIGGNCYLMITDGSASGVSECRFLKIREGRIIKEIFPTGRVKHTEECTCGFASNKTIECACRDNRYTAKRPFVKLNVETDTAEIRLMCTDTYLDTPRPNDGSITGPCESDGDKGSGGIKGGFVHQRMKSKIGRWYSRTMSKTERMGMGLYVKYDGDPWADSDALAFSGVMVSMKEPGWYSFGFEIKDKKCDVPCIGIEMVHDGGKETWHSAATAIYCLMGSGQLLWDTVTGVDMAL

SEQ ID NO: 30271 - protein, 466 aa, Artificial Sequence; identical to SEQ ID NO: 30175
  derived and/or modified protein sequence (wt) from neuraminidase__InfluenzaB__AHM01100

SEQ ID NO: 30272 - protein, 466 aa, Artificial Sequence; identical to SEQ ID NO: 30206
  derived and/or modified protein sequence (wt) from neuraminidase__InfluenzaB__AHM01111

SEQ ID NO: 30273 - protein, 466 aa, Artificial Sequence
  derived and/or modified protein sequence (wt) from neuraminidase__InfluenzaB__AHM01122
MLPSTIQTLTLFLTSGGVLLSLYVSASLSYLLYSDILLKFSPTEITAPTMPLDCANASNVQAVNRSATKGVKLLLPEPEWTYPRLSCPGSTFQKALLISPHRFGETKGNSAPLIIREPFIACGPNECKHFALTHYAAQPGGYYNGTRGDRNKLRHLISVKLGKIPTVENSIFHMAAWSGSACHDGKEWTYIGVDGPDNNALLKVKYGEAYTDTYHSYANKILRTQESACNCIGGNCYLMITDGSASGVSECRFLKIREGRIIKEIFPTGRVKHTEECTCGFASNKTIECACRDNRYTAKRPFVKLNVETDTAEIRLMCTDTYLDTPRPNDGSITGPCESDGDKGSGGIKGGFVHQRMKSKIGRWYSRTMSKTERMGMGLYVKYDGDPWADSDALAFSGVMVSMKEPGWYSFGFEIKDKKCDVPCIGIEMVHDGGKETWHSAATAIYCLMGSGQLLWDTVTGVDMAL

SEQ ID NO: 30274 - protein, 466 aa, Artificial Sequence; identical to SEQ ID NO: 30206
  derived and/or modified protein sequence (wt) from neuraminidase__InfluenzaB__AHM01133

SEQ ID NO: 30275 - protein, 466 aa, Artificial Sequence
  derived and/or modified protein sequence (wt) from neuraminidase__InfluenzaB__AHM01144
MLPSTIQTLTLFLTSGGVLLSLYVSASLSYLLYSDILLKFSPTEITAPTMPLDCANASNVQAVNRSAAKGVTLLLPEPEWTYPRLSCPGSTFQKALLISPHRFGETKGNSAPLIIREPFIACGPNECKHFALTHYAAQPGGYYNGTRGDRNKLRHLISVKLGKIPTVENSIFHMAAWSGSACHDGKEWTYIGVDGPDNNALLKVKYGEAYTDTYHSYANKILRTQESACNCIGGNCYLMITDGSASGISECRFLKIREGRIIKEIFPTGRVKHTEECTCGFASNKTIECACRDNRYTAKRPFVKLNVETDTAEIRLMCTDTYLDTPRPNDGSITGPCESDGDKGSGGIKGGFVHQRMKSKIGRWYSRTMSKTERMGMGLYVKYDGDPWADSDALAFSGVMVSMKEPGWYSFGFEIKDKKCDVPCIGIEMVHDGGKETWHSAATAIYCLMGSGQLLWDTVTGVDMAL

SEQ ID NO: 30276 - protein, 466 aa, Artificial Sequence; identical to SEQ ID NO: 30206
  derived and/or modified protein sequence (wt) from neuraminidase__InfluenzaB__AHM01166

SEQ ID NO: 30277 - protein, 466 aa, Artificial Sequence
  derived and/or modified protein sequence (wt) from neuraminidase__InfluenzaB__AHM01188
MLPSTIQTLTLFLTSGGVLLSLYVSASLSYLLYSDILLKFSPTEITAPTMPLDCANASNVQAVNHSATKGVTLLLPEPEWTYPRLSCPGSTFQKALLISPHRFGETKGNSAPLIIREPFIACGPNECKHFALTHYAAQPGGYYNGTRGDRNKLRHLISVKLGKIPTVENSIFHMAAWSGSACHDGKEWTYIGVDGPDNNALLKVKYGEAYTDTYHSYANKILRTQESACNCIGGNCYLMITDGSASGVSECRFLKIREGRIIKEIFPTGRVKHTEECTCGFASNKTIECACRDNRYTAKRPFVKLNVETDTAEIRLMCTDTYLDTPRPNDGSITGPCESDGDKGSGGIKGGFVHQRMKSKIGRWYSRTMSKTERMGMGLYVKYDGDPWADSDALVFSGVMVSMKEPGWYSFGFEIKDKKCDVPCIGIEMVHDGGKETWHSAATAIYCLMGSGQLLWDTVTGVDMAL

SEQ ID NO: 30278 - protein, 466 aa, Artificial Sequence; identical to SEQ ID NO: 30270
  derived and/or modified protein sequence (wt) from neuraminidase__InfluenzaB__AHM01199

SEQ ID NO: 30279 - protein, 466 aa, Artificial Sequence
  derived and/or modified protein sequence (wt) from neuraminidase__InfluenzaB__AHM01210
MLPSTIQTLTLFLTSGGVLLSLYVSASLSYLLYSDILLKFSPTEITAPTMPLDCANASNVQAVNRSATKGVTLLLPEPGWTYPRLSCPGSTFQKALLISPHRFGEAKGNSAPLIIREPFIACGPNECKHFALTHYAAQPGGYYNGTRGDRNKLRHLISVKLGKIPTVENSIFHMAAWSGSACHDGKEWTYIGVDGPDNNALLKVKYGEAYTDTYHSYANKILRTQESACNCIGGNCYLMITDGSASGVSECRFLKIREGRIIKEIFPTGRVKHTEECTCGFASNKTIECACRDNRYTAKRPFVKLNVETDTAEIRLMCTDTYLDTPRPNDGSITGPCESDGDKGSGGIKGGFVHQRMKSKIGRWYSRTMSKTERMGMGLYVKYDGDPWADSDALAFSGVMVSMKEPGWYSFGFEIKDKKCDVPCIGIEMVHDGGKETWHSAATAIYCLMGSGQLLWDTVAGVDMAL

SEQ ID NO: 30280 - protein, 466 aa, Artificial Sequence
  derived and/or modified protein sequence (wt) from neuraminidase__InfluenzaB__AHM01221
MLPSTIQTLTLFLTSGGVLLSLYVSASLSYLLYSDILLKFSPTEITAPTMPLDCANASNFQAVNRSATKGVTFLLPEPEWTYPRLSCPGSTFQKALLISPHRFGETKGNSAPLIIREPFIACGPNECKHFALTHYAAQPGGYYNGTRGDRNKLRHLISVKLGKIPTVENSIFHMAAWSGSACHDGKEWTYIGVDGPDNNALLKVKYGEAYTDTYHSYANKILRTQESACNCIGGNCYLMITDGSASGVSECRFLKIREGRIIKEIFPTGRVKHTEECTCGFASNKTIECACRDNRYTAKRPFVKLNVETDTAEIRLMCTDTYLDTPRPNDGSITGPCESDGDKGSGGIKGGFVHQRMKSKIGRWYSRTMSKTERMGMGLYVKYDGDPWADSDALAFSGVMVSMKEPGWYSFGFEIKDKKCDVPCIGIEMVHDGGKETWHSAATAIYCLMGSGQLLWDTVTGVDMAL

SEQ ID NO: 30281 - protein, 466 aa, Artificial Sequence; identical to SEQ ID NO: 30175
  derived and/or modified protein sequence (wt) from neuraminidase__InfluenzaB__AHM01232

SEQ ID NO: 30282 - protein, 466 aa, Artificial Sequence; identical to SEQ ID NO: 30206
  derived and/or modified protein sequence (wt) from neuraminidase__InfluenzaB__AHM01243

SEQ ID NO: 30283 - protein, 466 aa, Artificial Sequence
  derived and/or modified protein sequence (wt) from neuraminidase__InfluenzaB__AHM01254
MLPSTIQTLTLFLTSGGVLLSLYVSASLSYLLYSDILLKFSPTEITAPTMPLDCANASNVQAVNRSATKGVTLLLPEPEWTYPRLSCPGSTFQKALLISPHRFGETKGNSAPLIIREPFIACGPNECKHFALTHYAAQPGGYYNGTRGDRNKLRHLISVKLGKIPTVENSIFHMAAWSGSACHDGKEWTYIGVDGPDNNALLKVKYGEAYTDTYHSYANKILRTQESACNCIGGNCYLMITDGSASGVSECRFLKIREGRIIKEIFPTGRVKHTEECTCGFASNKTIECACRDNRYTAKRPFVKLNVETDTAEIRLMCTDTYLDTPRPNDGSITGPCESDGDKGSGGIKGGFVHQRMKSKIGRWYSRTMSKTERMGMGLYVKYDGDPWADSDALVFSGVMVSMKEPGWYSFGFEIKDKKCDVPCIGIEMVHDGGKETWHSAATAIYCLMGSGQLLWDTVTGVDMAL

SEQ ID NO: 30284 - protein, 466 aa, Artificial Sequence
  derived and/or modified protein sequence (wt) from neuraminidase__InfluenzaB__AHM01265
MLPSTIQTLTLFLTSGGVLLSLYVSASLSYLLYSDILLKFSPTEITAPTMPLDCANASNVQAVNRSATKGVTLLLPEPEWTYPRLSCPGSTFQKALLISPHRFGETKGNSAPLIIREPFIACGPNECKHFALTHYAAQPGGYYNGTRGDRNKLRHLISVKLGKIPTVENSIFHMAAWSGSACHDGKEWTYIGVDGPDNNALLKVKYGEAYTDTYHSYANKILRTQESACNCIGGNCYLMITDGSASGVSECRFLKIREGRIIKEIFPTGRVKHTEECTCGFASNKTIECACRDNRYTAKRPFVKLNVETDTAEIRLMCTDTYLDTPRPNDGSITGPCESDGDEGSGGIKGGFVHQRMKSKIGRWYSRTMSKTERMGMGLYVKYDGDPWADSDALAFSGVMVSMKEPGWYSFGFEIKDKKCDVPCIGIEMVHDGGKETWHSAATAIYCLMGSGRLLWDTVTGVDMAL

SEQ ID NO: 30285 - protein, 466 aa, Artificial Sequence
  derived and/or modified protein sequence (wt) from neuraminidase__InfluenzaB__AHM01276
MLPSTIQTLTLFLTSGGVLLSLYVSASLSYLLYSDILLKFSQTEITAPIMPLDCTNASNVQAVNRSAAKGVTLLLPEPEWTYPRLSCPGSTFQKALLISPHRFGEIKGNSAPLIIREPFIACGPTECKHFALTHYAAQPGGYYNGTREDRNKLRHLISVKLGKIPTVENSIFHMAAWSGSACHDGKEWTYIGVDGPDSNALLKIKYGEAYTDTYHSYAKNILRTQESACNCIGGDCYLMITDGPASGVSECRFLKIREGRIIKEIFPTGRVKHTEECTCGFASNKTIECACRDNRYTAKRPFVKLNVETDTAEIRLMCTETYLDTPRPNDGSITGPCESDGDKGSGGIKGGFVHQRMASKIGRWYSRTMSKTKRMGMGLYVKYDGDPWTDSEALALSGVMVSMEEPGWYSFGFEIKDKKCDVPCIGIEMVHDGGKTTWHSAATAIYCLMGSGQLLWDTVTGVDMAL

SEQ ID NO: 30286 - protein, 466 aa, Artificial Sequence; identical to SEQ ID NO: 30270
  derived and/or modified protein sequence (wt) from neuraminidase__InfluenzaB__AHM01287

SEQ ID NO: 30287 - protein, 466 aa, Artificial Sequence; identical to SEQ ID NO: 30270
  derived and/or modified protein sequence (wt) from neuraminidase__InfluenzaB__AHM01298

SEQ ID NO: 30288 - protein, 466 aa, Artificial Sequence; identical to SEQ ID NO: 30285
  derived and/or modified protein sequence (wt) from neuraminidase__InfluenzaB__AHM01309

SEQ ID NO: 30289 - protein, 466 aa, Artificial Sequence; identical to SEQ ID NO: 30206
  derived and/or modified protein sequence (wt) from neuraminidase__InfluenzaB__AHM01320

SEQ ID NO: 30290 - protein, 466 aa, Artificial Sequence; identical to SEQ ID NO: 30270
  derived and/or modified protein sequence (wt) from neuraminidase__InfluenzaB__AHM01331

SEQ ID NO: 30291 - protein, 466 aa, Artificial Sequence; identical to SEQ ID NO: 30206
  derived and/or modified protein sequence (wt) from neuraminidase__InfluenzaB__AHM01342

SEQ ID NO: 30292 - protein, 466 aa, Artificial Sequence
  derived and/or modified protein sequence (wt) from neuraminidase__InfluenzaB__AHM01353
MLPSTIQTLTLFLTSGGVLLSLYVSASLSYLLYSDILLKFSPTEITAPTMPLDCANASNVQAVNRSATKGVTLLLPEPGWTYPRLSCPGSTFQKALLISPHRFGETKGNSAPLIIREPFIACGPNECKHFALTHYAAQPGGYYNGTRGDRNKLRHLISVKLGKIPTVENSIFHMAAWSGSACHDGKEWTYIGVDGPDNNALLKVKYGEAYTDTYHSYANKILRTQESACNCIGGNCYLMITDGSASGVSECRFLKIREGRIIKEIFPTGRVKHTEECTCGFASNKTIECACRDNRYTAKRPFVKLNVETDTAEIRLMCTDTYLDTPRPNDGSITGPCESDGDKGSGGIKGGFVHQRMKSKIGRWYSRTMSKTERMGMGLYVKYDGDPWADSDALAFSGVMVSMKEPGWYSFGFEIKDKKCDVPCIGIEMVHDGGKETWHSAATAIYCLMGSGQLLWDTVTGVDMAL

SEQ ID NO: 30293 - protein, 466 aa, Artificial Sequence
  derived and/or modified protein sequence (wt) from neuraminidase__InfluenzaB__AHM01364
MLPSTIQTLTLFLTSGGVLLSLYVSASLSYLLYSDILLKFSPTEITAPTMPLDCANASNVQAVNRSATKGVTLLLPEPEWTYPRLSCPGSTFQKALLISPHRFGETKGNSAPLIIREPFIACGPNECKHFALTHYAAQPGGYYNGTRGDRNKLRHLISVKLGKIPTVENSIFHMAAWSGSACHDGKEWTYIGVDGPDNNALLKVKYGEAYTDTYHSYANKILRTQESACNCIGGNCYLMITDGSASGVSECRFLKIREGRIIKEIFPTGRVKHTEECTCGFASNKTIECACRDNRYTAKRPFVKLNVETDTAEIRLMCTDTYLDTPRPNDGSITGPCESDGDEGSGGIKGGFVHQRMKSKIGRWYSRTMSKTERMGMGLYVKYDGDPWADSDALAFSGVMVSMKEPGWYSFGFEIKDKKCDVPCIGIEMVHDGGKETWHSAATAIYCLMGSGQLLWDTVTGVDMAL

SEQ ID NO: 30294 - protein, 466 aa, Artificial Sequence; identical to SEQ ID NO: 30285
  derived and/or modified protein sequence (wt) from neuraminidase__InfluenzaB__AHM01375

SEQ ID NO: 30295 - protein, 466 aa, Artificial Sequence; identical to SEQ ID NO: 30285
  derived and/or modified protein sequence (wt) from neuraminidase__InfluenzaB__AHM01386

SEQ ID NO: 30296 - protein, 466 aa, Artificial Sequence; identical to SEQ ID NO: 30206
  derived and/or modified protein sequence (wt) from neuraminidase__InfluenzaB__AHM01397

SEQ ID NO: 30297 - protein, 466 aa, Artificial Sequence; identical to SEQ ID NO: 30206
  derived and/or modified protein sequence (wt) from neuraminidase__InfluenzaB__AHM01408

SEQ ID NO: 30298 - protein, 466 aa, Artificial Sequence; identical to SEQ ID NO: 30206
  derived and/or modified protein sequence (wt) from neuraminidase__InfluenzaB__AHM01419

SEQ ID NO: 30299 - protein, 466 aa, Artificial Sequence
  derived and/or modified protein sequence (wt) from neuraminidase__InfluenzaB__AHM01430
MLPSTIQTLTLFLTSGGVLLSLYVSASLSYLLYSDILLKFSPTEITAPTMPLDCANASNVQAVNRSATKGVTLLLPEPEWTYPRLSCPGSTFQKALLISPHRFGETKGNSAPLIIREPFIACGPNECKHFALTHYAAQPGGYYNGTRGDRNKLRHLISVKLGKIPTVENSIFHMAAWSGSACHDGKEWTYIGVDGPDNNALLKVKYGEAYTDTYHSYANKILRTQESACNCIGGNCYLMITDGSASGVSECRFLKIREGRIIKEIFPTGRVKHTEECTCGFASNKTIECACRDNRYTAKRPFVKLNVETDTAEIRLMCTDTYLDTPRPNDGSITGPCESDGDEGSGGIKGGFVHQRMKSKIGRWYSRTMSKTERMGMGLYVKYDGDPWADSDALAFSGVMVSMKEPGWYSFGFEIKDKKCDVPCIGIEMVHDGGKETWHSAATAIYCLMGSGRLLWDTATGVDMAL

SEQ ID NO: 30300 - protein, 466 aa, Artificial Sequence
  derived and/or modified protein sequence (wt) from neuraminidase__InfluenzaB__AHM01441
MLPSTIQTLTLFLTSGGVLLSLYVSASLSYLLYSDILLKFSQTEITAPTMPLDCANASNVQAVNRSAAKGVTLLLPEPEWTYPRLSCPGSTFQKALLISPHRFGEIKGNSAPLIIREPFIACGPTECKHFALTHYAAQPGGYYNGTREDRNKLRHLISVKLGKIPTVENSIFHMAAWSGSACHDGKEWTYIGVDGPDSNALLKIKYGEAYTDTYHSYAKNILRTQESACNCIGGDCYLMITDGPASGVSECRFLKIREGRIIKEIFPTGRVKHTEECTCGFASNKTIECACRDNRYTAKRPFVKLNVETDTAEIRLMCTETYLDTPRPNDGSITGPCESDGDKGSGGIKGGFVHQRMASKIGRWYSRTMSKTKRMGMGLYVKYDGDPWTDSEALALSGVMVSMEEPGWYSFGFEIKDKKCDVPCIGIEMVHDGGKTTWHSAATAIYCLMGSGQLLWDTVTGVDMAL

SEQ ID NO: 30301 - protein, 466 aa, Artificial Sequence; identical to SEQ ID NO: 30206
  derived and/or modified protein sequence (wt) from neuraminidase__InfluenzaB__AHM01463

SEQ ID NO: 30302 - protein, 466 aa, Artificial Sequence
  derived and/or modified protein sequence (wt) from neuraminidase__InfluenzaB__AHM01474
MLPSTIQTLTLFLTSGGVLLSLYVSASLSYLLYSDILLKFSQTEITAPIMPLDCINASNVQAVNRSAAKGVTLLLPEPEWTYPRLSCPGSTFQKALLISPHRFGEIKGNSAPLIIREPFIACGPTECKHFALTHYAAQPGGYYNGTREDRNKLRHLISVKLGKIPTVENSIFHMAAWSGSACHDGKEWTYIGVDGPDSNALLKIKYGEAYTDTYHSYAKNILRTQESACNCIGGDCYLMITDGPASGVSECRFLKIREGRIIKEIFPTGRVKHTEECTCGFASNKTIECACRDNRYTAKRPFVKLNVETDTAEIRLMCTETYLDTPRPNDGSITGPCESDGDKGSGGIKGGFVHQRMASKIGRWYSRTMSKTKRMGMGLYVKYDGDPWTDSEALALSGVMVSMEEPGWYSFGFEIKDKKCDVPCIGIEMVHDGGKTTWHSAATAIYCLMGSGQLLWDTVTGVDMAL

SEQ ID NO: 30303 - protein, 466 aa, Artificial Sequence
  derived and/or modified protein sequence (wt) from neuraminidase__InfluenzaB__AHM01485
MLPSTIQTLTLFLTSGGVLLSLYVSASLSYLLYSDILLKFSPTEITAPIMPLDCTNASNVQAVNRSAAKGVTLLLPEPEWTYPRLSCPGSTFQKALLISPHRFGEIKGNSAPLIIREPFIACGPTECKHFALTHYAAQPGGYYNGTREDRNKLRHLISVKLGKIPTVENSIFHMAAWSGSACHDGKEWTYIGVDGPDSNALLKIKYGEAYTDTYHSYAKNILRTQESACNCIGGDCYLMITDGPASGVSECRFLKIREGRIIKEIFPTGRVKHTEECTCGFASNKTIECACRDNRYTAKRPFVKLNVETDTAEIRLMCTETYLDTPRPNDGSITGPCESDGDKGSGGIKGGFVHQRMASKIGRWYSRTMSKTKRMGMGLYVKYDGDPWTDSEALALSGVMVSMEEPGWYSFGFEIKDKKCDVPCIGIEMVHDGGKTTWHSAATAIYCLMGSGQLLWDTVTGVDMAL

SEQ ID NO: 30304 - protein, 466 aa, Artificial Sequence; identical to SEQ ID NO: 30285
  derived and/or modified protein sequence (wt) from neuraminidase__InfluenzaB__AHM01496

SEQ ID NO: 30305 - protein, 466 aa, Artificial Sequence
  derived and/or modified protein sequence (wt) from neuraminidase__InfluenzaB__AHM01507
MLPSTIQTLTLFLTSGGVLLSLYVSASLSYLLYSDILLKFSQTEITAPIMPLDCANASNVQAVNRSAAKGVTLLLPEPEWTYPRLSCPGSTFQKALLISPHRFGEIKGNSAPLIVREPFIACGPTECKHFALTHYAAQPGGYYNGTREDRNKLRHLISVKLGKIPTVENSIFHMAAWSGSACHDGKEWTYIGVDGPDSNALLKIKYGEAYTDTYHSYAKNILRTQESACNCIGGDCYLMITDGPASGVSECRFLKIREGRIIKEIFPTGRVKHTEECTCGFASNKTIECACRDNRYTAKRPFVKLNVETDTAEIRLMCTETYLDTPRPNDGSITGPCESDGDKGSGGIKGGFVHQRMASKIGRWYSRTMSKTKRMGMGLYVKYDGDPWTDSEALALSGVMVSIEEPGWYSFGFEIKDKKCDVPCIGIEMVHDGGKTTWHSAATAIYCLMGSGQLLWDTVTGVDMAL

SEQ ID NO: 30306 - protein, 466 aa, Artificial Sequence; identical to SEQ ID NO: 30285
  derived and/or modified protein sequence (wt) from neuraminidase__InfluenzaB__AHM01518

SEQ ID NO: 30307 - protein, 466 aa, Artificial Sequence
  derived and/or modified protein sequence (wt) from neuraminidase__InfluenzaB__AHM01529
MLPSTIQTLTLFLTSGGVLLSLYVSASLSYLLYSDILLKFSQTEITAPIMPLDCTNASNVQAVNRSAAKGVTLLLPEPEWTYPRLSCPGSTFQKALLISPHRFGEIKGNSAPLIIREPFIACGPTECKHFALTHYAAQPGGYYNGTREDRNKLRHLISVKLGKIPTVENSIFHMAAWSGSACHDGKEWTYIGVDGPDSNALLKIKYGEAYTDTYHSYAKNILRTQESACNCIGGDCYLMITDGPASGVSECRFLKIREGRIIKEILPTGRVKHTEECTCGFASNKTIECACRDNRYTAKRPFVKLNVETDTAEIRLMCTETYLDTPRPNDGSITGPCESDGDKGSGGIKGGFVHQRMASKIGRWYSRTMSKTKRMGMGLYVKYDGDPWTDSEALALSGVMVSMEEPGWYSFGFEIKDKKCDVPCIGIEMVHDGGKTTWHSAATAIYCLMGSGQLLWDTVTGVDMAL

SEQ ID NO: 30308 - protein, 466 aa, Artificial Sequence; identical to SEQ ID NO: 30175
  derived and/or modified protein sequence (wt) from neuraminidase__InfluenzaB__AHM01540

SEQ ID NO: 30309 - protein, 466 aa, Artificial Sequence; identical to SEQ ID NO: 30285
  derived and/or modified protein sequence (wt) from neuraminidase__InfluenzaB__AHM01551

SEQ ID NO: 30310 - protein, 466 aa, Artificial Sequence; identical to SEQ ID NO: 30285
  derived and/or modified protein sequence (wt) from neuraminidase__InfluenzaB__AHM01562

SEQ ID NO: 30311 - protein, 466 aa, Artificial Sequence; identical to SEQ ID NO: 28792
  derived and/or modified protein sequence (wt) from neuraminidase__InfluenzaB__AHZ13597

SEQ ID NO: 30312 - protein, 467 aa, Artificial Sequence
  derived and/or modified protein sequence (wt) from neuraminidase__InfluenzaB__AHZ36701
MLPSTIQMLTLFLTSGGVLLSLYVSASLSYLLYSDILLKFSPTEITAPTMPLDCANASNVHAVNRSATKGVTFLLLPEPEWTYPRLSCPGSTFQKALLISPHRFGETKGNSAPLIIREPFIACGPNECKHFALTHYAAQPGGYYNGTRGDRNKLRHLISVKLGKIPTVENSIFHMAAWSGSACHDGKEWTYIGVDGPDNNALLKIKYGEAYTDTYHSYANNILRTQESACNCIGGNCYLMITDGSASGVSECRFLKIRKGRIIKEIFPTGRVKHTEECTCGFASNKTIECACRDNSYTAKRPFVKLNVETDTAEIRLMCTDTYLDTPRPDDGSITGPCESNGDKGSGGIKGGFVHQRMASKIGRWYSRTMSKTERMGMGLYVKYDGDPWTDSDALAFRGVMVSMKEPGWYSFGFEIKDKKCDVPCIGIEMVHDGGKETWHSAATAIYCLMGSGQLLWDTVTGVDMAL

SEQ ID NO: 30313 - protein, 467 aa, Artificial Sequence
  derived and/or modified protein sequence (wt) from neuraminidase__InfluenzaB__AHZ36756
MLPSTIQMLTLFLTSGGVLLSLYVSASLSYLLYSDILLKFSPTEITAPTMPLDCANASNVHAVNRSATKGVTFLLLPEPEWTYPRLSCPGSTFQKALLISPHRFGETKGNSAPLIIREPFIACGPNECKHFALTHYAAQPGGYYNGTRGDRNKLRHLISVKLGKIPTVENSIFHMAAWSGSACHDGKEWTYIGVDGPDNNALLKIKYGEAYTDTYHSYANNILRTQESACNCIGGNCYLMITDGSASGVSECRFLKIREGRIIKEIFPTGRVKHTEECTCGFASNKTIECACRDNSYTAKRPFVKLNVETDTAEIRLMCTDTYLDTPRPDDGSITGPCESNGDKGSGGIKGGFVHQRMASKIGRWYSRTMSKTERMGMGLYVKYDGDPWTDSDALAFRGVMVSMKEPGWYSFGFEIKDKKCDVPCIGIEMVHDGGKETWHSAATAIYCLMGSGQLLWDTVTGVDMAL

SEQ ID NO: 30314 - protein, 466 aa, Artificial Sequence
  derived and/or modified protein sequence (wt) from neuraminidase__InfluenzaB__AHZ36767
MLPSTIQTLTLFLTSGGVLLSLYVSASLSYLLYSDILLKFSPTEITAPTRPLDCANASNVQAVNRSATKGVTLLLPEPEWTYPRLSCPGSTFQKALLISPHRFGETKGNSAPLIIREPFIACGPNECKHFALTHYAAQPGGYYNGTRGDRNKLRHLISVKLGKIPTVENSIFHMAAWSGSACHDGKEWTYIGVDGPDNNALLKVKYGEAYTDTYHSYANKILRTQESACNCIGGNCYLMITDGSASGVSECRFLKIREGRIIKEIFPTGRVKHTEECTCGFASNKTIECACRDNRYTAKRPFVKLNVETDTAEIRLMCTDTYLDTPRPNDGSITGPCESDGDKGSGGIKGGFVHQRMKSKIGRWYSRTMSKTERMGMGLYVKYDGDPWADSDALAFSGVMVSMKEPGWYSFGFEIKDKKCDVPCIGIEMVHDGGKETWHSAATAIYCLMGSGQLLWDTVTGVDMAL

SEQ ID NO: 30315 - protein, 466 aa, Artificial Sequence
  derived and/or modified protein sequence (wt) from neuraminidase__InfluenzaB__AHZ36778
MLPSTIQTLTLFLTSGGVLLSLYVSASLSYLLYSDILLKFPSTEITAPTMPLDCANASNVQAVNRSATKGVTLLLPEPEWTYPRLSCPGSTFQKALLISPHRFGETKGNSAPLIIREPFIACGPKECKHFALTHYAAQPGGYYNGTRGDRNKLRHLISVKLGKIPTVENSIFHMAAWSGSACHDGKEWTYIGVDGPDNNALLKIKYGEAYTDTYHSYANNILRTQESACNCIGGNCYLMITDGSASGVSECRFLKIREGRIIKEIFPTGRIQHTEECTCGFASNKTIECACRDNSYTAKRPFVKLNVETDTAEIRLMCTKTYLDTPRPEDGSITGPCESNGGKGSGGIKGGFVHQRMASKIGRWYSRTMSKTERKGMGLYVKYNGDPWADSDALVFSGVMISMEEPGWYSFGFEIKDKKCDVPCIGIEMVHDGGKETWHSAATAIYCLMGSGQLLWDTVTGVNMTL

SEQ ID NO: 30316 - protein, 466 aa, Artificial Sequence
  derived and/or modified protein sequence (wt) from neuraminidase__InfluenzaB__AHZ36789
MLPSTIQTLTLFLTSGGVLLSLYVSASLSYLLYSDILLKFSPTEITAQTMPLDCANASNVQAVNRSATKGVTLLPPEPEWTYPRLSCPGSTFQKALLISPHRFGETKGNSAPLIIREPFIACGPNECKHFALTHYAAQPGGYYNGTRGDRNKLRHLISVKLGKIPTVENSIFHMAAWSGSACHDGKEWTYIGVDGPDNNALLKVKYGEAYTDTYHSYANKILRTQESACNCIGGNCYLMITDGSASGVSECRFLKIREGRIIKEIFPTGRVKHTEECTCGFASNKTIECACRDNRYTAKRPFVKLNVETDTAEIRLMCTDTYLDTPRPNDGSITGPCESDGDKGSGGIKGGFVHQRMKSKIGRWYSRTMSKTERMGMGLYVKYDGDPWADSDALAFSGVMVSMKEPGWYSFGFEMKDKKCDVPCIGIEMVHDGGKETWHSAATAIYCLMGSGQLLWDTVTGVDMAL

SEQ ID NO: 30317 - protein, 466 aa, Artificial Sequence; identical to SEQ ID NO: 30316
  derived and/or modified protein sequence (wt) from neuraminidase__InfluenzaB__AHZ36800

SEQ ID NO: 30318 - protein, 466 aa, Artificial Sequence
  derived and/or modified protein sequence (wt) from neuraminidase__InfluenzaB__AHZ36811
MLPSTIQTLTLFLTSGGVLLSLYVSASLSYLLYSDILLKFSQTEITAPIMPLDCTNASNVQAVNRSAAKGVTLLLPEPEWTYPRLSCPGSTFQKALLISPHRFGEIKGNSAPLIIREPFIACGPTECKHFALTHYAAQPGGYYNGTREDRNKLRHLISVKLGKIPTVENSIFHMAAWSGSACHDGKEWTYIGVDGPDSNALLKIKYGEAYTDTYHSYAKNILRTQESACNCIGGDCYLMITDGPASGVSECRFLKIREGRIIREIFPTGRVKHTEECTCGFASNKTIECACRDNRYTAKRPFVKLNVETDTAEIRLMCTETYLDTPRPNDGSITGPCESDGDKGSGGIKGGFVHQRMASKIGRWYSRTMSKTKRMGMGLYVKYDGDPWTDSEALALSGVMVSMEEPGWYSFGFEIKDKKCDVPCIGIEMVHDGGKTTWHSAATAIYCLMGSGQLLWDTVTGVDMAL

SEQ ID NO: 30319 - protein, 467 aa, Artificial Sequence; identical to SEQ ID NO: 30313
  derived and/or modified protein sequence (wt) from neuraminidase__InfluenzaB__AHZ36822

SEQ ID NO: 30320 - protein, 466 aa, Artificial Sequence
  derived and/or modified protein sequence (wt) from neuraminidase__InfluenzaB__AHZ36833
MLPSTIQTLTLFLTSGGVLLSLYVSASLSYLLYSDILLKFSPTEITAPTRPLDCANASNVQAVNRSATKGVTLLLPEPEWTYPRLSCPGSTFQKALLISPHRFGETKGNSAPLIIREPFIACGPNECKHFALTHYAAQPGGYYNGTRGDRNKLRHLISVKLGKIPTVENSIFHMAAWSGSACHDGKEWTYIGVDGPDNNALLKVKYGEAYTDTYHSYANKILRTQESACNCIGGNCYLMITDGSASGVSECRFLKVREGRIIKEIFPTGRVKHTEECTCGFASNKTIECACRDNRYTAKRPFVKLNVETDTAEIRLMCTDTYLDTPRPNDGSITGPCESDGDKGSGGIKGGFVHQRMKSKIGRWYSRTMSKTERMGMGLYVKYDGDPWADSDALAFSGVMVSMKEPGWYSFGFEIKDKKCDVPCIGIEMVHDGGKETWHSAATAIYCLMGSGQLLWDTVTGVDMAL

SEQ ID NO: 30321 - protein, 466 aa, Artificial Sequence
  derived and/or modified protein sequence (wt) from neuraminidase__InfluenzaB__AHZ36844
MLPSTIQTLTLFLTSGGVLLSLYVSASLSYLLYSDILLKFSPTEITAPTRPLDCANASNVQAVNRSATKEVTLLLPEPEWTYPRLSCPGSTFQKALLISPHRFGETKGNSAPLIIREPFIACGPNECKHFALTHYAAQPGGYYNGTRGDRNKLRHLISVKLGKIPTVENSIFHMAAWSGSACHDGKEWTYIGVDGPDNNALLKVKYGEAYTDTYHSYANKILRTQESACNCIGGNCYLMITDGSASGVSECRFLKIREGRIIKEIFPTGRVKHTEECTCGFASNKTIECACRDNRYTAKRPFVKLNVETDTAEIRLMCTDTYLDTPRPNDGSITGPCESDGDKGSGGIKGGFVHQRMKSKIGRWYSRTMSKTERMGMGLYVKYDGDPWADSDALAFSGVMVSMKEPGWYSFGFEIKDKKCDVPCIGIEMVHDGGKETWHSAATAIYCLMGSGQLLWDTVTGVDMAL

SEQ ID NO: 30322 - protein, 466 aa, Artificial Sequence
  derived and/or modified protein sequence (wt) from neuraminidase__InfluenzaB__AHZ36855
MLPSTIQTLTLFLTSGGVLLSLYVSASLSYLLYSDILLKFSPTEITVQTMPLDCANASNVQAVNRSATKGVTLLPPEPEWTYPRLSCPGSTFQKALLISPHRFGETKGNSAPLIIREPFIACGPNECKHFALTHYAAQPGGYYNGTRGDRNKLRHLISVKLGKIPTVENSIFHMAAWSGSACHDGKEWTYIGVDGPDNNALLKVKYGEAYTDTYHSYANKILRTQESACNCIGGNCYLMITDGSASGVSECRFLKIREGRIIKEIFPTGRVKHTEECTCGFASNKTIECACRDNRYTAKRPFVKLNVETDTAEIRLMCTDTYLDTPRPNDGSITGPCESDGDKGSGGIKGGFVHQRMKSKIGRWYSRTMSKTERMGMGLYVKYDGDPWADSDALAFSGVMVSMKEPGWYSFGFEMKDKKCDVPCIGIEMVHDGGKETWHSAATAIYCLMGSGQLLWDTVTGVDMAL

SEQ ID NO: 30323 - protein, 467 aa, Artificial Sequence; identical to SEQ ID NO: 30313
  derived and/or modified protein sequence (wt) from neuraminidase__InfluenzaB__AHZ36866

SEQ ID NO: 30324 - protein, 466 aa, Artificial Sequence
  derived and/or modified protein sequence (wt) from neuraminidase__InfluenzaB__AHZ36877
MLPSTIQTLTLFLTSGGVLLSLYVSASLSYLLYSDILLKFSPPEITAPTMPLDCANASNVQAVNRSATKGVTLLLPEPEWTYPRLSCPGSTFQKALLISPHRFGETKGNSAPLIIREPFIACGPNECKHFALTHYAAQPGGYYNGTRGDRNKLRHLISVKLGKIPTVENSIFHMAAWSGSACHDGKEWTYIGVDGPDNNALLKVKYGEAYTDTYHSYANKILRTQESACNCIGGNCYLMITDGSASGVSECRFLKIREGRIIKEIFPTGRVKHTEECTCGFASNKTIECACRDNRYTAKRPFVKLNVETDTAEIRLMCTDTYLDTPRPNDGSITGPCESDGDKGSGGIKGGFVHQRMKSKIGRWYSRTMSKTERMGMGLYVKYDGDPWADSDALAFSGVMVSMKEPGWYSFGFEIKDKKCDVPCIGIEMVHDGGKETWHSAATAIYCLMGSGQLLWDTVTGVDMAL

SEQ ID NO: 30325 - protein, 467 aa, Artificial Sequence; identical to SEQ ID NO: 30313
  derived and/or modified protein sequence (wt) from neuraminidase__InfluenzaB__AHZ36888

SEQ ID NO: 30326 - protein, 467 aa, Artificial Sequence; identical to SEQ ID NO: 30313
  derived and/or modified protein sequence (wt) from neuraminidase__InfluenzaB__AHZ36899

SEQ ID NO: 30327 - protein, 467 aa, Artificial Sequence; identical to SEQ ID NO: 30313
  derived and/or modified protein sequence (wt) from neuraminidase__InfluenzaB__AHZ36910

SEQ ID NO: 30328 - protein, 466 aa, Artificial Sequence; identical to SEQ ID NO: 30315
  derived and/or modified protein sequence (wt) from neuraminidase__InfluenzaB__AHZ36921

SEQ ID NO: 30329 - protein, 466 aa, Artificial Sequence
  derived and/or modified protein sequence (wt) from neuraminidase__InfluenzaB__AHZ36932
MLPSTIQTLTLFLTSGGVLLSLYVSASLSYLLYSDILLKFSPTEITAQTMPLDCANASNVQAVNRSATKGVTLLPPEPEWTYPRLSCPGSTFQKALLISPHRFGETKGNSAPLIIREPFIACGPNECKHFALTHYAAQPGGYYNGTRGDRNKLRHLISVKLGKIPTVENSIFHMAAWSGSACHDGKEWTYIGVDGPDNNALLKVKYGEAYTDTYHSYANKILRTQESACNCIGGNCYLMITDGSASGVSECRFLKIREGRIIKEIFPTGRVKHTEECTCGFASNKTMECACRDNRYTAKRPFVKLNVETDTAEIRLMCTDTYLDTPRPNDGSITGPCESDGDKGSGGIKGGFVHQRMKSKIGRWYSRTMSKTERMGMGLYVKYDGDPWADSDALAFSGVMVSMKEPGWYSFGFEMKDKKCDVPCIGIEMVHDGGKETWHSAATAIYCLMGSGQLLWDTVTGVDMAL

SEQ ID NO: 30330 - protein, 466 aa, Artificial Sequence
  derived and/or modified protein sequence (wt) from neuraminidase__InfluenzaB__AHZ36943
MLPSTIQTLTLFLTSGGVLLSLYVSASLSYLLYSDILLKFSPTEITAPTMPLDCANASNVQAVNRSATKGVTLLPPEPEWTYPRLSCPGSTFQKALLISPHRFGETKGNSAPLIIREPFIACGPNECKHFALTHYAAQPGGYYNGTRGDRNKLRHLISVKLGKIPTVENSIFHMAAWSGSACHDGKEWTYIGVDGPDNNALLKVKYGEAYTDTYHSYANKILRTQESACNCIGGNCYLMITDGSASGVSECRFLKIREGRIIKEIFPTGRVKHTEECTCGFASNKTIECACRDNRYTAKRPFVKLNVETDTAEIRLMCTDTYLDTPRPNDGSITGPCESDGDKGSGGIKGGFVHQRMKSKIGRWYSRTMSKTERMGMGLYVKYDGDPWADSDALAFSGVMVSMKEPGWYSFGFEMKDRKCDVPCIGIEMVHDGGKETWHSAATAIYCLMGSGQLLWDTVTGVDMAL

SEQ ID NO: 30331 - protein, 467 aa, Artificial Sequence; identical to SEQ ID NO: 30313
  derived and/or modified protein sequence (wt) from neuraminidase__InfluenzaB__AHZ36954

SEQ ID NO: 30332 - protein, 466 aa, Artificial Sequence
  derived and/or modified protein sequence (wt) from neuraminidase__InfluenzaB__AHZ36965
MLPSTIQTLTLFLTSGGVLLSLYVSASLSYLLYSDILLKFSPPEINAPTMPLDCANASNVQAVNRSATKGVTLLLPEPEWTYPRLSCPGSTFQKALLISPHRFGETKGNSAPLIIREPFIACGPNECKHFALTHYAAQPGGYYNGTRGDRNKLRHLISVKLGKIPTVENSIFHMAAWSGSACHDGKEWTYIGVDGPDNNALLKVKYGEAYTDTYHSYANKILRTQESACNCIGGNCYLMITDGSASGVSECRFLKIREGRIIKEIFPTGRVKHTEECTCGFASNKTIECACRDNRYTAKRPFVKLNVETDTAEIRLMCTDTYLDTPRPNDGSITGPCESDGDKGSGGIKGGFVHQRMKSKIGRWYSRTMSKTERMGMGLYVKYDGDPWADSDALAFSGVMVSMKEPGWYSFGFEIKDKKCDVPCIGIEMVHDGGKETWHSAATAIYCLMGSGQLLWDTVTGVDMAL

SEQ ID NO: 30333 - protein, 467 aa, Artificial Sequence; identical to SEQ ID NO: 30313
  derived and/or modified protein sequence (wt) from neuraminidase__InfluenzaB__AHZ36976

SEQ ID NO: 30334 - protein, 467 aa, Artificial Sequence; identical to SEQ ID NO: 30313
  derived and/or modified protein sequence (wt) from neuraminidase__InfluenzaB__AHZ36987

SEQ ID NO: 30335 - protein, 466 aa, Artificial Sequence; identical to SEQ ID NO: 30316
  derived and/or modified protein sequence (wt) from neuraminidase__InfluenzaB__AHZ36998

SEQ ID NO: 30336 - protein, 466 aa, Artificial Sequence
  derived and/or modified protein sequence (wt) from neuraminidase__InfluenzaB__AHZ37009
MLPSTIQTLTLFLTLGGVLLSLYVSASLSYLLYSDILLKFSPTEITAPTMPLGCANASNVQAVNRSATKGVTLLLPEPEWTYPRLSCPGSTFQKALLISPHRFGETKGNSAPLIIREPFIACGPNECKHFALTHYAAQPGGYYNGTRGDRNKLRHLISVKLGKIPTVENSIFHMAAWSGSACHDGKEWTYIGVDGPDNNALLKVKYGEAYTDTYHSYANKILRTQESACNCIGGNCYLMITDGSASGVSECRFLKIREGRIIKEIFPTGRVKHTEECTCGFASNKTIECACRDNRYTAKRPFVKLNVEADTAEIRLMCTDTYLDTPRPNDGSITGPCESDGDKGSGGIKGGFVHQRMKSKIGRWYSRTMSKTERMGMGLYVKYDGDPWADSDALAFSGVMVSMKEPGWYSFGFEIKDKKCDVPCIGIEMVHDGGKETWHSAATAIYCLMGSGQLLWDTVTGVDMAL

SEQ ID NO: 30337 - protein, 466 aa, Artificial Sequence; identical to SEQ ID NO: 30314
  derived and/or modified protein sequence (wt) from neuraminidase__InfluenzaB__AHZ37020

SEQ ID NO: 30338 - protein, 466 aa, Artificial Sequence; identical to SEQ ID NO: 30316
  derived and/or modified protein sequence (wt) from neuraminidase__InfluenzaB__AHZ37031

SEQ ID NO: 30339 - protein, 466 aa, Artificial Sequence; identical to SEQ ID NO: 30314
  derived and/or modified protein sequence (wt) from neuraminidase__InfluenzaB__AHZ37042

SEQ ID NO: 30340 - protein, 466 aa, Artificial Sequence; identical to SEQ ID NO: 30316
  derived and/or modified protein sequence (wt) from neuraminidase__InfluenzaB__AHZ37064

SEQ ID NO: 30341 - protein, 466 aa, Artificial Sequence; identical to SEQ ID NO: 30314
  derived and/or modified protein sequence (wt) from neuraminidase__InfluenzaB__AHZ37075

SEQ ID NO: 30342 - protein, 466 aa, Artificial Sequence; identical to SEQ ID NO: 30314
  derived and/or modified protein sequence (wt) from neuraminidase__InfluenzaB__AHZ37086

SEQ ID NO: 30343 - protein, 466 aa, Artificial Sequence
  derived and/or modified protein sequence (wt) from neuraminidase__InfluenzaB__AHZ37097
MLPSTIQTLTLFLTSGGVLLSLYVSASLSYLLYSDILLKFSPTEITAPTMPLDCANASNVQAVNRSATKGVTLLPPEPEWTYPRLSCPGSTFQKALLISPHRFGETKGNSAPLIIREPFIACGPNECKHFALTHYAAQPGGYYNGTRGDRNKLRHLISVKLGKIPTVENSIFHMAAWSGSACHDGKEWTYIGVDGPDNNALLKVKYGEAYTDTYHSYANKILRTQESACNCIGGNCYLMITDGSASGVSECRFLKIREGRIIKEIFPTGRVKHTEECTCGFASNKTIECACRDNRYTAKRPFVKLNVETDTAEIRLMCTDTYLDTPRPNDGSITGPCESDGDKGSGGIKGGFVHQRMKSKIGRWYSRTMSKTERMGMGLYVKYDGDPWADSDALAFSGVMVSMKEPGWYSFGFEMKDKKCDVPCIGIEMVHDGGKETWHSAATAIYCLMGSGQLLWDTVTGVDMAL

SEQ ID NO: 30344 - protein, 466 aa, Artificial Sequence; identical to SEQ ID NO: 30314
  derived and/or modified protein sequence (wt) from neuraminidase__InfluenzaB__AHZ37108

SEQ ID NO: 30345 - protein, 466 aa, Artificial Sequence
  derived and/or modified protein sequence (wt) from neuraminidase__InfluenzaB__AHZ41774
MLPSTIQMLTLFLTSGGVLLSLYVSASLSYLLYSDILLKFSPTEITAPTMPLDCANASNVHAVNRSATKGVTFLLPEPEWTYPRLSCPGSTFQKALLISPHRFGETKGNSAPLIIREPFIACGSNECRHFALTHYAAQPGGYYNGTRGDRNKLRHLISVKLGKIPTVENSIFHMAAWSGSACHDGKEWTYIGVDGPDNNALLKIKYGEAYTDTYHSYANNILRTQESACNCIGGNCYLMITDGSASGVSECRFLKIREGRIIKEIFPTGRVKHTEECTCGFASNKTIECACRDNSYTAKRPFVKLNVETDTAEIRLMCTDTYLDTPRPDDGSITGPCESNGDKGSGGIKGGFVHQRMASKIGRWYSRTMSKTERKGMGLYVKYDGDPWTDNDALAFRGVMVSMKEPGWYSFGFEIKDKKCDVPCIGIEMVHDGGKETWHSAATAIYCLMGSGQLLWDTVTGVDMAL

SEQ ID NO: 30346 - protein, 466 aa, Artificial Sequence; identical to SEQ ID NO: 28956
  derived and/or modified protein sequence (wt) from neuraminidase__InfluenzaB__AHZ41785

SEQ ID NO: 30347 - protein, 466 aa, Artificial Sequence; identical to SEQ ID NO: 28956
  derived and/or modified protein sequence (wt) from neuraminidase__InfluenzaB__AHZ41796

SEQ ID NO: 30348 - protein, 466 aa, Artificial Sequence
  derived and/or modified protein sequence (wt) from neuraminidase__InfluenzaB__AHZ41807
MLPSTIQMLTLFLTSGGVLLSLYVSASLSYLLYSDILLKFSPTEITAPTMPLDCANASNVHAVNRSATKGVTFLLPEPEWTYPRLSCPGSTFQKALLISPHRFGETKGNSAPLIIREPFIACGPNECKHFALTHYAAQPGGYYNGTRGDRNKLRHLISVKLGKIPTVENSIFHMAAWSGSACHDGKEWTYIGVDGPDNNALLKIKYGEAYTDTYHSYANNILRTQESACNCIEGNCYLMITDGSASGVSECRFLKIREGRIIKEIFPTGRVKHTEECTCGFASNKTIECACRDNSYTAKRPFVKLNVETDTAEIRLMCTDTYLDTPRPDDGSITGPCESNGDKGSGGIKGGFVHQRMASKIGRWYSRTMSKTERKGMGLYVKYDGDPWTDSDALAFRGVMVSMKEPGWYSFGFEIKDKKCDVPCIGIEMVHDGGKETWHSAATAIYCLMGSGQLLWDTVTGVDMAL

SEQ ID NO: 30349 - protein, 466 aa, Artificial Sequence
  derived and/or modified protein sequence (wt) from neuraminidase__InfluenzaB__AHZ41818
MLPSTIQTLTLFLTSGGVLLSLYVSASLSYLLYSDILLKFSPTEITAPTMPLDCANASNVQAVNRSATKGVTLLLPEPEWTYPRLSCPGSTFQKALLISPHRFGETKGNSAPLIIREPFIACGPNECKHFALTHYAAQPGGYYNGTRGDRNKLRHLISVKLGKIPTVENSIFHMAAWSGSACHDGKEWTYIGVDGPDNNALLKVKYGEAYTDTYHSYANKILRTQESACNCIGGNCYLMVTDGSASGVSECRFLKIREGRIIKEIFPTGRVKHTEECTCGFASNKTIECACRDNSYTAKRPFVKLNVETDTAEIRLMCTDTYLDTPRPDDGSITGPCESNGDKGSGGIKGGFVHQRMESKIGRWYSRTMSKTERMGMGLYVKYDGDPWADSDALVFSGVMVSMKEPGWYSFGFEIKDKKCDVPCIGIEMVHDGGKETWHSAATAIYCLMGSGQLLWDTVTGVNMAL

SEQ ID NO: 30350 - protein, 466 aa, Artificial Sequence; identical to SEQ ID NO: 28956
  derived and/or modified protein sequence (wt) from neuraminidase__InfluenzaB__AHZ41829

SEQ ID NO: 30351 - protein, 466 aa, Artificial Sequence
  derived and/or modified protein sequence (wt) from neuraminidase__InfluenzaB__AHZ41840
MLPSTIQMLTLFLTSGGVLLSLYVSASLSYLLYSDILLKFSPTEITAPTMPLDCANASNVHAVNRSATKGVTFLLPEPEWTYPRLSCPGSTFQKALLISPHRFGETKGNSAPLIIREPFIACGPNECRHFALTHYAAQPGGYYNGTRGDRNKLRHLISVKLGKIPTVENSIFHMAAWSGSACHDGKEWTYIGVDGPDNNALLKIKYGEAYTDTYHSYANNILRTQESACNCIGGNCYLMITDGSASGVSECRFLKIREGRIIKEIFPTGRVKHTEECTCGFASNKTIECACRDNSYTAKRPFVKLNVETDTAEIRLMCTDTYLDTPRPDDGSITGPCESNGDKGSGGIKGGFVHQRMASKIGRWYSRTMSKTERKGMGLYVKYDGDPWTDSDALAFRGVMVSMKEPGWYSFGFEIKDKKCDVPCIGIEMVHDGGKETWHSAATAIYCLMGSGQLLWDTVTGVDMAL

SEQ ID NO: 30352 - protein, 466 aa, Artificial Sequence; identical to SEQ ID NO: 28956
  derived and/or modified protein sequence (wt) from neuraminidase__InfluenzaB__AHZ41851

SEQ ID NO: 30353 - protein, 466 aa, Artificial Sequence; identical to SEQ ID NO: 30202
  derived and/or modified protein sequence (wt) from neuraminidase__InfluenzaB__AHZ41862

SEQ ID NO: 30354 - protein, 466 aa, Artificial Sequence
  derived and/or modified protein sequence (wt) from neuraminidase__InfluenzaB__AHZ41873
MLPSTIQTLTLFLTSGGVLLSLYVSASLSYLLYSDILLKFSPTEITAPTMPLDCANASNAQAVNRSATKGVTLLLPEPEWTYPRLSCPGSTFQKALLISPHRFGETKGNSAPLIIREPFIACGPNECKHFALTHYAAQPGGYYNGTRGDRNKLRHLISVKLGKIPTVENSIFHMAAWSGSACHDGKEWTYIGVDGPDNNALLKVKYGEAYTDTYHSYANKILRTQESACNCIGGNCYLMITDGSASGVSECRFLKIREGRIIKEIFPTGRVKHTEECTCGFASNKTIECACRDNRYTAKRPFVKLNVETDTAEIRLMCTDTYLDTPRPNDGSITGPCESDGDKGSGGIKGGFVHQRMKSKIGRWYSRTMSKTERMGMGLYVKYDGDPWADSDALTFSGVMVSMKEPGWYSFGFEIKDKKCDVPCIGIEMVHDGGKETWHSAATAIYCLMGSGQLLWDTVTGVDMAL

SEQ ID NO: 30355 - protein, 466 aa, Artificial Sequence; identical to SEQ ID NO: 28792
  derived and/or modified protein sequence (wt) from neuraminidase__InfluenzaB__AIL94981

SEQ ID NO: 30356 - protein, 466 aa, Artificial Sequence; identical to SEQ ID NO: 28792
  derived and/or modified protein sequence (wt) from neuraminidase__InfluenzaB__AIL94992

SEQ ID NO: 30357 - protein, 466 aa, Artificial Sequence; identical to SEQ ID NO: 28817
  derived and/or modified protein sequence (wt) from neuraminidase__InfluenzaB__AIL95003

SEQ ID NO: 30358 - protein, 466 aa, Artificial Sequence
  derived and/or modified protein sequence (wt) from neuraminidase__InfluenzaB__AIL95014
MLPSTIQTLTLFLTSGGVLLSLYVSASLSYLLYSDILLKFSQTEITAPIMPLDCANASNVQAVNRSAAKGVTLLLPEPEWTYPRLSCPGSTFQKALLISPHRFGETKGNSAPLIIREPFIACGPTECKHFALTHYAAQPGGYYNGTREDRNKLRHLISVKLGKIPTVENSIFHMAAWSGSACHDGKEWTYIGVDGPDSNALLKIKYGEAYTDTYHSYAKNILRTQESACNCIGGDCYLMITDGPASGVSECRFLKIREGRIIKEIFPTGRVKHTEECTCGFASNKTIECACRDNSYTAKRPFVKLNVETDTAEIRLMCTETYLDTPRPNDGSITGPCESDGDKGSGGIKGGFVHQRMASKIGRWYSRTMSKTKRMGMGLYVKYDGDPWTDSEALALSGVMVSMEEPGWYSFGFEIKDKKCDVPCIGIEMVHDGGKTTWHSAATAIYCLMGSGQLLWDTVTGVDMTL

SEQ ID NO: 30359 - protein, 466 aa, Artificial Sequence; identical to SEQ ID NO: 28817
  derived and/or modified protein sequence (wt) from neuraminidase__InfluenzaB__AIL95025

SEQ ID NO: 30360 - protein, 466 aa, Artificial Sequence
  derived and/or modified protein sequence (wt) from neuraminidase__InfluenzaB__AIL95036
MLSSTIQTLTLFLTSGGVLLSLYVSASLSYLLYSDILLKFSPKEITAPTMPLDCANASNVQAVNHSATKGVTLLLPEPEWTYPRLSCPGSTFQKALLISPHRFGETKGNSAPLIIREPFIACGPNECKHFALTHYAAQPGGYYNGTRGDRNKLRHLISVKLGKIPTVENSIFHMAAWSGSACHDGKEWTYIGVDGPDNNALLKVKYGEAYTDTYHSYANKILRTQESACNCIGGNCYLMITDGSASGVSECRFLKIREGRIIKEIFPTGRVKHTEECTCGFASNKTIECACRDNSYTAKRPFVKLNVETDTAEIRLMCTDTYLDTPRPDDGSITGPCESNGDKGSGGIKGGFVHQRMESKIGRWYSRTMSKTERMGMGLYVKYDGDPWADSDALAFSGVMVSMKEPGWYSFGFEIKDKKCDVPCIGIEMVHDGGKETWHSAATAIYCLMGSGQLLWDTVTGVDMAL

SEQ ID NO: 30361 - protein, 466 aa, Artificial Sequence; identical to SEQ ID NO: 28817
  derived and/or modified protein sequence (wt) from neuraminidase__InfluenzaB__AIL95047

SEQ ID NO: 30362 - protein, 466 aa, Artificial Sequence; identical to SEQ ID NO: 28926
  derived and/or modified protein sequence (wt) from neuraminidase__InfluenzaB__AIL95058

SEQ ID NO: 30363 - protein, 466 aa, Artificial Sequence; identical to SEQ ID NO: 28875
  derived and/or modified protein sequence (wt) from neuraminidase__InfluenzaB__AIL95069

SEQ ID NO: 30364 - protein, 466 aa, Artificial Sequence
  derived and/or modified protein sequence (wt) from neuraminidase__InfluenzaB__AIL95080
MLPSTIQTLTLFLTSGGVLLSLYVSASLSYLLYSDILLKFSPKEITAPTMPLDCANASNVQAVNHSATKGVTLLLPEPEWTYPRLSCPGSTFQKALLISPHRFGETKGNSAPLIIREPFIACGPNECKHFALTHYAAQPGGYYNGTRGDRNKLRHLISVKLGKIPTVENSIFHMAAWSGSACNDGKEWTYIGVDGPDNNALLKVKYGEAYTDTYHSYANKILRTQESACNCIGGNCYLMITDGSASGVSECRFLKIREGRIIKEIFPTGRVKHTEECTCGFASNKTIECACRDNSYTAKRPFVKLNVETDTAEIRLMCTDTYLDTPRPDDGSITGPCESNGDKGSGGIKGGFVHQRMESKIGRWYSRTMSKTERMGMGLYVKYDGDPWADSDALAFSGVMVSMKEPGWYSFGFEIKDKKCDVPCIGIEMVHDGGKETWHSAATAIYCLMGSGQLLWDTVTGVDMAL

SEQ ID NO: 30365 - protein, 466 aa, Artificial Sequence; identical to SEQ ID NO: 28875
  derived and/or modified protein sequence (wt) from neuraminidase__InfluenzaB__AIL95091

SEQ ID NO: 30366 - protein, 466 aa, Artificial Sequence; identical to SEQ ID NO: 28817
  derived and/or modified protein sequence (wt) from neuraminidase__InfluenzaB__AIL95102

SEQ ID NO: 30367 - protein, 466 aa, Artificial Sequence
  derived and/or modified protein sequence (wt) from neuraminidase__InfluenzaB__AIL95113
MLPSTIQTLTLFLTSGGVLLSLYVSASLSYLLYSDILLKFSPTGITAPTMPLDCANASNVQAVNRSATKGVTLLPPEPEWTYPRLSCPGSTFQKALLISPHRFGETKGNSAPLIIREPFIACGPNECKHFALTHYAAQPGGYYNGTRGDRNKLRHLISVKLGKIPTVENSIFHMAAWSGSACHDGKEWTYIGVDGPDNNALLKVKYGEAYTDTYHSYANKILRTQESACNCIGGNCYLMITDGSASGVSECRFLKIREGRIIKEIFPTGRVKHTEECTCGFASNKTIECACRDNRYTAKRPFVKLNVETDTAEIRLMCTDTYLDTPRPNDGSITGPCESDGDKGSGGIKGGFVHQRMKSKIGRWYSRTMSKTERMGMGLYVKYDGDPWADSDALAFSGVMVSMKEPGWYSFGFEMKDKKCDVPCIGIEMVHDGGKETWHSAATAIYCLMGSGQLLWDTVTGVDMAL

SEQ ID NO: 30368 - protein, 466 aa, Artificial Sequence; identical to SEQ ID NO: 30314
  derived and/or modified protein sequence (wt) from neuraminidase__InfluenzaB__AIL95124

SEQ ID NO: 30369 - protein, 466 aa, Artificial Sequence
  derived and/or modified protein sequence (wt) from neuraminidase__InfluenzaB__AKA54777
MLPSTIQTLTLFLTSGGVLLSLYVSASLSYLLYSDILLKFSRTEVTAPIMPLDCANASNVQAVNRSATKGVTPLLPEPEWTYPRLSCPGSTFQKALLISPHRFGETKGNSAPLIIREPFIACGPKECKHFALTHYAAQPGGYYNGTREDRNKLRHLISVKLGKIPTVENSIFHMAAWSGSACHDGREWTYIGVDGPDSNALLKIKYGEAYTDTYHSYAKNILRTQESACNCIGGDCYLMITDGPASGISECRFLKIREGRIIKEIFPTGRVKHTEECTCGFASNKTIECACRDNSYTAKRPFVKLNVETDTAEIRLMCTKTYLDTPRPNDGSITGPCESDGDEGSGGIKGGFVHQRMASKTGRWYSRTMSKTKRMGMGLYVKYDGDPWTDSEALALSGVMVSMEEPGWYSFGFEIKDKKCDVPCIGIEMVHDGGKTTWHSAATAIYCLMGSGQLLWDTVTGVNMTL

SEQ ID NO: 30370 - protein, 466 aa, Artificial Sequence
  derived and/or modified protein sequence (wt) from neuraminidase__InfluenzaB__AKA54781
MLPSTIQTLTLFLTSGGVLLSLYVSASLSYLLYLDILLKFPSTEITAPTMPLDCANASNVQAVNRSATKGVTFLLPEPEWTYPRLSCPGSTFQKALLISPHRFGETKGNSAPLIIREPFIACGPKECKHFALTHYAAQPGGYYNGTRGDRNKLRHLISVKLGKIPTVENSIFHMAAWSGSACHDGKEWTYIGVDGPDNNALLKIKYGEAYTDTYHSYANNILRTQESACNCIGGNCYLMITDGSASGVSECRFLKIREGRIMKEIFPTGRTQHTEECTCGFASNKTIECVCRDNSYTAKRPFVKLNVETDTAEIRLMCTKTYLDTPRPDDGSITGPCESNGGKGSGGIKGGFVHQRMASKIGRWYSRTMSKTERKGMGLYVKYNGDPWADSDALTFSGVMVSMEEPGWYSFGFEIKDKKCDVPCIGIEMVHDGGKETWHSAATAIYCLMGSGQLLWDTVTGVNMTL

SEQ ID NO: 30371 - protein, 466 aa, Artificial Sequence
  derived and/or modified protein sequence (wt) from neuraminidase__InfluenzaB__AKA54783
MLPSTIQTLTLFLTSGGVLLSLYVSASLSYLLYSDILLKFSRTEVTAPIMPLDCANASNVQAVNRSATKGVTPLFPEPEWTYPRLSCPGSTFQKALLISPHRFGETKGNSAPLIIREPFIACGPKECKHFALTHYAAQPGGYYNGTREDRNKLRHLISVKLGKIPTVENSIFHMAAWSGSACHDGREWTYIGVDGPDSNALLKIKYGEAYTDTYHSYAKNILRTQESACNCIGGDCYLMITDGPASGISECRFLKIREGRIIKEIFPTGRVKHTEECTCGFASNKTIECACRDNSYTAKRPFVKLNVETDTAEIRLMCTKTYLDTPRPNDGSITGPCESDGDEGSGGIKGGFVHQRMASKIGRWYSRTMSKTKRMGMGLYVKYDGDPWTDSEALALSGVMVSMEEPGWYSFGFEIKDKKCDVPCIGIEMVHDGGKTTWHSAATAIYCLMGSGQLLWDTVTGVNMTL

SEQ ID NO: 30372 - protein, 466 aa, Artificial Sequence
  derived and/or modified protein sequence (wt) from neuraminidase__InfluenzaB__AKA54785
MLPSTIQTLTLFLTSGGVLLSLYVSASLSYLLYSDILLKFSRTEVTAPIMPLDCANASNVQAVNRSATKGVTPLLPEPEWTYPRLSCPGSTFQKALLISPHRFGETKGNSAPLIIREPFIACGPKECKHFALTHYAAQPGGYYNGTREDRNKLRHLISVKLGKIPTVENSIFHMAAWSGSACHDGREWTYIGVDGPDSNALLKIKYGEAYTDTYHSYAKNILRTQESACNCIGGDCYLMITDGPASGISECRFLKIREGRIIKEIFPTGRVKHTEECTCGFASNKTIECACRDNSYTAKRPFVKLNVETDTAEIRLMCTKTYLDTPRPNDGSITGPCESDGNEGSGGIKGGFVHQRMASKIGRWYSRTMSKTKRMGMGLYVKYDGDPWTDSEALALSGVMVSMEEPGWYSFGFEIKDKKCDVPCIGIEMVHDGGKTTWHSAATAIYCLMGSGQLLWDTVTGVNMTL

SEQ ID NO: 30373 - protein, 466 aa, Artificial Sequence
  derived and/or modified protein sequence (wt) from neuraminidase__InfluenzaB__AKA54787
MLPSTIQTLTLFLTSGGVLLSLYVSASLSYLLYSDILLKFSQTEITAPIMPLDCANASNVQAVNHSAAKGVTLLLPEPEWTYPRLSCPGSTFQKALLISPHRFGEIKGNSAPLIIREPFIACGPTECKHFALTHYAAQPGGYYNGTREDRNKLRHLISVKLGKIPTVENSIFHMAAWSGSACHDGKEWTYIGVDGPDSNALLKIKYGEAYTDTYHSYAKNILRTQESACNCIGGDCYLMITDGPASGVSECRFLKIREGRIIKEIFPTGRVKHTEECTCGFASNKTIECACRDNRYTAKRPFVKLNVETDTAEIRLMCTETYLDTPRPNDGSITGPCESDGDKGSGGIKGGFVHQRMASKIGRWYSRTMSKTKRMGMGLYVKYDGDPWTDSEALALSGVMVSMEEPGWYSFGFEIKDKKCDVPCIGIEMVHDGGKTTWHSAATAIYCLMGSGQLLWDTVTGVDMAL

SEQ ID NO: 30374 - protein, 466 aa, Artificial Sequence
  derived and/or modified protein sequence (wt) from neuraminidase__InfluenzaB__AKA54789
MLPSTIQTLTLFLTSGGVLLSLYVSASLSYLLYSDILLKFSRTEVTAPIMPLDCANASNVQAVNRSATKGVTPLLPEPEWTYPRLSCPGSTFQKALLISPHRFGETKGNSAPLIIREPFIACGPKECKHFALTHYAAQPGGYYNGTREDRNKLRHLISVKLGKIPTVENSIFHMAAWSGSACHDGREWTYIGVDGPDSNALLKIKYGEAYTDTYHSYAKNILRTQESACNCIGGDCYLMITDGPASGISECRFLKIREGRIIKEIFPTGRVKHTEECTCGFASNKTIECACRDNSYTAKRPFVKLNVETDTAEIRLMCTKTYLDTPRPNDGSITGPCESDGDEGSGGIKGGFVHQRMASKIGRWYSRTMSKTKRMGMGLYVKYDGDPWTDSEALALSGVMVSMEEPGWYSFGFEIKDKKCDVPCIGIEMVHDGGKTTWHSAATAIYCLMGSGQLLWDTVTGVNMTL

SEQ ID NO: 30375 - protein, 466 aa, Artificial Sequence
  derived and/or modified protein sequence (wt) from neuraminidase__InfluenzaB__AKA54791
MLPSTIQTLTLFLTSGGVLLSLYVSASLSYLLYSDILLKFSRTEVTAPIMPLDCANASNAQAVNRSATKGVTPLLPEPEWTYPRLSCPGSTFQKALLISPHRFGETKGNSAPLIIREPFIACGPKECKHFALTHYAAQPGGYYNGTREDRNKLRHLISVKLGKIPTVENSIFHMAAWSGSACHDGREWTYIGVDGPDSNALLKIKYGEAYTDTYHSYAKNILRTQESACNCIGGDCYLMITDGPASGISECRFLKIREGRIIKEIFPTGRVKHTEECTCGFASNKTIECACRDNSYTAKRPFVKLNVETDTAEIRLMCTKTYLDTPRPNDGSITGPCESDGDEGSGGIKGGFVHQRMASKIGRWYSRTMSKTKRMGMGLYVKYDGDPWTDSEALALSGVMVSMEEPGWYSFGFEIKDKKCDVPCIGIEMVHDGGKTTWHSAATAIYCLMGSGQLLWDTVTGVNITL

SEQ ID NO: 30376 - protein, 466 aa, Artificial Sequence; identical to SEQ ID NO: 30373
  derived and/or modified protein sequence (wt) from neuraminidase__InfluenzaB__AKA54793

SEQ ID NO: 30377 - protein, 466 aa, Artificial Sequence; identical to SEQ ID NO: 30373
  derived and/or modified protein sequence (wt) from neuraminidase__InfluenzaB__AKA54795

SEQ ID NO: 30378 - protein, 466 aa, Artificial Sequence; identical to SEQ ID NO: 30374
  derived and/or modified protein sequence (wt) from neuraminidase__InfluenzaB__AKA54797

SEQ ID NO: 30379 - protein, 466 aa, Artificial Sequence
  derived and/or modified protein sequence (wt) from neuraminidase__InfluenzaB__AKA54799
MLPSTIQTLTLFLTSGGVLLSLYVSASLSYLLYSDILLKFSQTEITAPIMPLDCANASNVQAVNHSAAKGVTLLLPEPEWTYPRLSCPGSTFQKALLISPHRFGEIKGNSAPLIIREPFIACGPTECKHFALTHYAAQPGGYYNGTREDRNKLRHLISVKLGKIPTVENSIFHMAAWSGSACHDGKEWTYIGVDGPDSNALLKIKYGEAYTDTYHSYEKNILRTQESACNCIGGDCYLMITDGPASGVSECRFLKIREGRIIKEIFPTGRVKHTEECTCGFASNKTIECACRDNRYTAKRPFVKLNVETDTAEIRLMCTETYLDTPRPNDGSITGPCESDGDKGSGGIKGGFVHQRMASKIGRWYSRTMSKTKRMGMGLYVKYDGDPWTDSEALALSGVMVSMEEPGWYSFGFEIKDKKCDVPCIGIEMVHDGGKTTWHSAATAIYCLMGSGQLLWDTVTGVDMAL

SEQ ID NO: 30380 - protein, 466 aa, Artificial Sequence; identical to SEQ ID NO: 30374
  derived and/or modified protein sequence (wt) from neuraminidase__InfluenzaB__AKA54801

SEQ ID NO: 30381 - protein, 466 aa, Artificial Sequence
  derived and/or modified protein sequence (wt) from neuraminidase__InfluenzaB__AKA54803
MLPSTIQTLTLFLTSGGVLLSLYVSASLSYLLYSDILLKFSRTEVTAPIMPLDCANASNVQAVNRSATNGVTPLLPEPEWTYPRLSCPGSTFQKALLISPHRFGETKGNSAPLIIREPFIACGPKECKHFALTHYAAQPGGYYNGTREDRNKLRHLISVKLGKIPTVENSIFHMAAWSGSACHDGREWTYIGVDGPDSNALLKIKYGEAYTDTYHSYAKNILRTQESACNCIGGDCYLMITDGPASGISECRFLKIREGRIIKEIFPTGRVKHTEECTCGFASNKTIECACRDNSYTAKRPFVKLNVETDTAEIRLMCTKTYLDTPRPNDGSITGPCESDGDEGSGGIKGGFVHQRMASKIGRWYSRTMSKTKRMGMGLYVKYDGDPWTDSEALALSGVMVSMEEPGWYSFGFEIKDKKCDVPCIGIEMVHDGGKTTWHSAATAIYCLMGSGQLLWDTVTGVNMTL

SEQ ID NO: 30382 - protein, 466 aa, Artificial Sequence; identical to SEQ ID NO: 30374
  derived and/or modified protein sequence (wt) from neuraminidase__InfluenzaB__AKA54805

SEQ ID NO: 30383 - protein, 466 aa, Artificial Sequence
  derived and/or modified protein sequence (wt) from neuraminidase__InfluenzaB__AKA54807
MLPSTIQTLTLFLTSGGVLLSLYVSASLSYLLYSDILLKFSRTEVTAPIMPLDCANASNVQAVNRSATKGVTPLLPEPEWTYPRLSCPGSTFQKALLISPHRFGETKGNSAPLIIREPFIACGPKECKHFALTHYAAQPGGYYNGTREDRNKLRHLISVKLGKIPTVENSIFHMAAWSGSACHDGREWTYIGVDGPDSNALLKIKYGEAYTDTYHSYAKNILRTQESACNCIGGDCYLMITDGPASGISECRFLKIREGRIIKEIFPTGRVKHTEECTCGFASNKTIECACRDNSYTAKRPFVKLNVETDTAEIRLMCTKTYLDTPRPNDGSITGPCESDGDEGSGGIKGGFVHQRMASKIGRWYSRTMSKTKRMGMGLYVKYDGDPWTDSEALALSGVMVSMEEPGWYSFGFEIKDKKCDVPCIGIEMVHDGGKTTWHSAATAIYCLMGSGQLLWDTVTGVNITL

SEQ ID NO: 30384 - protein, 466 aa, Artificial Sequence
  derived and/or modified protein sequence (wt) from neuraminidase__InfluenzaB__AKA54809
MLPSTIQTLTLFLTSGGVLLSLYVSASLSYLLYSDILLKFSRTEVTAPIMPLDCANASNVQAVNRSATKGVTPLLPEPEWTYPRLSCPGSTFQKALLISPHRFGETKGNSAPLIIREPFIACGPKECKHFALTHYAAQPGGYYNGTREDRNKLRHLISVKLGKIPTVENSIFHMAAWSGSACHDGREWTYIGVDGPDSNALLKIKYGEAYTDTYHSYAKNILRTQESACNCIGGDCYLMITDGPASGISECRFLKIREGRIIKEIFPTGRVKHTEECTCGFASNKTIECACRDNSYTAKRPFVKLNVETDTAEIRLMCTKTYLDTPRPNDGSITGPCESDGDEGSGGIKGGFVHQRMAFKIGRWYSRTMSKTKRMGMGLYVKYDGDPWTDSEALALSGVMVSMEEPGWYSFGFEIKDKKCDVPCIGIEMVHDGGKTTWHSAATAIYCLMGSGQLLWDTVTGVNMTL

SEQ ID NO: 30385 - protein, 466 aa, Artificial Sequence; identical to SEQ ID NO: 30374
  derived and/or modified protein sequence (wt) from neuraminidase__InfluenzaB__AKA54811

SEQ ID NO: 30386 - protein, 466 aa, Artificial Sequence
  derived and/or modified protein sequence (wt) from neuraminidase__InfluenzaB__AKA54813
MLPSTIQTLTLFLTSGGVLLSLYVSASLSYLLYSDILLKFSRTEVTAPIMPLDCANASNVQAVNRSATKGVTPLLPEPEWTYPRLSCPGSTFQKALLISPHRFGETKGNSAPLIIREPFIACGPKECKHFALTHYAAQPGGYYNGTREDRNKLRHLISVKLGKIPTVENSIFHMAAWSGSACHDGREWTYIGVDGPDSNALLKIKYGEAYTDTYHSYAKNILRTQESACNCIGGDCYLMITDGPASGISECRFLKIREGRIIKEIFPTGRVKHTEECTCGFASNKTIECACRDNSYTAKRPFVKLNVETDTAEIRLMCTKTYLDTPRPNDGSITGPCESDGDEGSGGIKGGFVHQRMASKIGRWYSRTMSKTKRMGMGLYVKYDGDPWTDSEALALSGVMVSIEEPGWYSFGFEIKDKKCDVPCIGIEMVHDGGKTTWHSAATAIYCLMGSGQLLWDTVTGVNMTL

SEQ ID NO: 30387 - protein, 466 aa, Artificial Sequence; identical to SEQ ID NO: 30374
  derived and/or modified protein sequence (wt) from neuraminidase__InfluenzaB__AKA54815

SEQ ID NO: 30388 - protein, 466 aa, Artificial Sequence
  derived and/or modified protein sequence (wt) from neuraminidase__InfluenzaB__AKA54817
MLPSTIQTLTLFLTSGGVLLSLYVSASLSYLLYSDILLKFSRTEVTAPIMPLDCANASNVQAVNRSATKGVTPLLPEPEWTYPRLSCPGSTFQKALLISPHRFGETKGNSAPLIIREPFIACGPKECKHFALTHYAAQPGGYYNGTREDRNKLRHLISVKLGKIPTVENSIFHMAAWSGSACHDGREWTYIGVDGPDSNALLKIKYGEAYTDTYHSYAKNILRTQESACNCIGGDCYLMITDGPASGISECRFLKIREGRIIKEIFPTGRVKHTEECTCGFASNKTIECACRDNSYTAKRPFVKLNVETDTAEIRLMCTKTYLDTPRPNDGSITGPCESDGDEGSGGIKGGFVHQRMASKIGRWYSRTMSKTKRMGMGLYVKYDGDPWTDSEALALSGVMVSMEEPGWYSFGFEIKDKKCDVPCIGVEMVHDGGKTTWHSAATAIYCLMGSGQLLWDTVTGVNMTL

SEQ ID NO: 30389 - protein, 466 aa, Artificial Sequence; identical to SEQ ID NO: 30374
  derived and/or modified protein sequence (wt) from neuraminidase__InfluenzaB__AKA54819

SEQ ID NO: 30390 - protein, 466 aa, Artificial Sequence; identical to SEQ ID NO: 30374
  derived and/or modified protein sequence (wt) from neuraminidase__InfluenzaB__AKA54821

SEQ ID NO: 30391 - protein, 466 aa, Artificial Sequence; identical to SEQ ID NO: 30374
  derived and/or modified protein sequence (wt) from neuraminidase__InfluenzaB__AKA54823

SEQ ID NO: 30392 - protein, 466 aa, Artificial Sequence; identical to SEQ ID NO: 30374
  derived and/or modified protein sequence (wt) from neuraminidase__InfluenzaB__AKA54825

SEQ ID NO: 30393 - protein, 466 aa, Artificial Sequence; identical to SEQ ID NO: 30374
  derived and/or modified protein sequence (wt) from neuraminidase__InfluenzaB__AKA54827

SEQ ID NO: 30394 - protein, 466 aa, Artificial Sequence
  derived and/or modified protein sequence (wt) from neuraminidase__InfluenzaB__AKA54829
MLPSTIQTLTLFLTSGGVLLSLYVSASLSYLLYSDILLKLSRTEVTAPIMPLDCANASNVQAVNRSATKGVTPLLPEPEWTYPRLSCPGSTFQKTLLISPHRFGETKGNSAPLIIREPFIACGPKECKHFALTHYAAQPGGYYNGTREDRNKLRHLISVKLGKIPTVENSIFHMAAWSGSACHDGREWTYIGVDGPDSNALLKIKYGEAYTDTYHSYAKNILRTQESACNCIGGDCYLMITDGPASGISECRFLKIREGRIIKEIFPTGRVKHTEECTCGFASNKTIECACRDNSYTAKRPFVKLNVETDTAEIRLMCTKTYLDTPRPNDGSITGPCESDGDEGSGGIKGGFVHQRMASKIGRWYSRTMSKTKRMGMGLYVKYDGDPWTDSEALALSGVMVSMEEPGWYSFGFEIKDKKCDVPCIGIEMVHDGGKTTWHSAATAIYCLMGSGQLLWDTVTGVNMTL

SEQ ID NO: 30395 - protein, 466 aa, Artificial Sequence
  derived and/or modified protein sequence (wt) from neuraminidase__InfluenzaB__AKA54831
MLPSTIQTLTLFLTSGGVLLSLYVSASLSYLLYSDILLKFSRTEVTAPIMPLDCANASNVQAVNRSATKGVTPLLPEPEWTYPRLSCPGSTFQKALLISPHRFGETKGNSAPLIIREPFIACGPKECKHFALTHYAAQPGGYYNGTREDRNKLRHLISVKLGKIPTVENSIFHMAAWSGSACHDGREWTYIGVDGQDSNALLKIKYGEAYTDTYHSYAKNILRTQESACNCIGGDCYLMITDGPASGISECRFLKIREGRIIKEIFPTGRVKHTEECTCGFASNKTIECACRDNSYTAKRPFVKLNVETDTAEIRLMCTKTYLDTPRPNDGSITGPCESDGDEGSGGIKGGFVHQRMASKIGRWYSRTMSKTKRMGMGLYVKYDGDPWTDSEALALSGVMVSMEEPGWYSFGFEIKDKKCDVPCIGIEMVHDGGKTTWHSAATAIYCLMGSGQLLWDTVTGVNMTL

SEQ ID NO: 30396 - protein, 466 aa, Artificial Sequence; identical to SEQ ID NO: 30374
  derived and/or modified protein sequence (wt) from neuraminidase__InfluenzaB__AKA54833

SEQ ID NO: 30397 - protein, 466 aa, Artificial Sequence
  derived and/or modified protein sequence (wt) from neuraminidase__InfluenzaB__AKA54837
MLPSTIQTLTLFLTSGGVLLSLYVSASLSYLLYSDILLKFSPTEITAPTMPLDCANASNVQAVNRSATKGVTLLLPEPEWTYPRLSCPGSTFQKALLISPHRFGETNGNSAPLIVREPFIACGPNECKHFALTHYAAQPGGYYNGTRGDRNKLRHLISVKLGKIPTVENSIFHMAAWSGSACHDGKEWTYIGVDGPDNNALLKVKYGEAYTDTYHSYANKILRTQESACNCIGGNCYLMITDGSASGVSECRFLKIREGRIIKEIFPTGRVKHTEECTCGFASNKTIECACRDNRYTAKRPFVKLNVETDTAEIRLMCTDTYLDTPRPNDGSITGPCESDGNEGSGGIKGGFVHQRMKSKIGRWYSRTMSKTERMGMGLYVKYDGDPWADSDALAFSGVMVSMKEPGWYSFGFEIKDKKCDVPCIGIEMVHDGGKETWHSAATAIYCLMGSGQLLWDTVTGVDMAL

SEQ ID NO: 30398 - protein, 466 aa, Artificial Sequence
  derived and/or modified protein sequence (wt) from neuraminidase__InfluenzaB__AKA54839
MLPSTIQTLTLFLTSGGVLLSLYVSASLSYLLYSDILLKFSPTEITAPTMPLDCANASNVQAVNRSATKEVTLLLPEPEWTYPRLSCPGSTFQKALLISPHRFGETKGNSAPLIIREPFIACGPNECKHFALTHYAAQPGGYYNGTRGDRNKLRHLISVKLGKIPTVENSIFHMAAWSGSACHDGKEWTYIGVDGPDNNALLKVKYGEAYTDTYHSYANKILRTQESACNCIGGNCYLMITDGSASGVSECRFLKIREGRIIKEIFPTGRVKHTEECTCGFASNKTIECACRDNRYTAKRPFVKLNVETDTAEIRLMCTDTYLDTPRPNDGSITGPCESDGDKGSGGIKGGFVHQRMKSKIGRWYSRTMSKTERMGMGLYVKYDGDPWADSDALAFSGVMVSMKEPGWYSFGFEIKDKKCDVPCIGIEMVHDGGKETWHSAATAIYCLMGSGQLLWDTVTGVDMAL

SEQ ID NO: 30399 - protein, 466 aa, Artificial Sequence
  derived and/or modified protein sequence (wt) from neuraminidase__InfluenzaB__AKA54841
MLPSTIQTLTLFLTSGGVLLSLYVSASLSYLLYSDILLKFSPTEITAPTMPLDCANASNVQAVNRSATKGVTLLLPEPEWTYPRLSCPGSTFQKALLISPHRFGETKGNSAPLIIREPFIACGPNECKHFALTHYAAQPGGYYNGTRGDRNKLRHLISVKLGKIPTVENSIFHMAAWSGSACHDGKEWTYIGVDGPDNNALLKVKYGEAYTDTYHSYANKILRTQESACNCIGGNCYLMITDGSASGVSECRFLKIREGRIIKEIFPTGRVKHTEECTCGFASNKTIECACRDNRYTAKRPFVKLNVETDTAEIRLMCTDTYLDTPRPNDGSITGPCESDGDEGSGGIKGGFVHQRMKSKIGRWYSRTMSKTERMGMGLYVKYDGDPWADSDALAFSGVMVSVKEPGWYSFGFEIKDKKCDVPCIGIEMVHDGGKETWHSAATAIYCLMGSGQLLWDTVTGVDIAL

SEQ ID NO: 30400 - protein, 466 aa, Artificial Sequence
  derived and/or modified protein sequence (wt) from neuraminidase__InfluenzaB__AKA54843
MLPSTIQTLTLFLTSGGVLLSLYVSASLSYLLYSDILLKFSPTEITAPTMPLDCANASNVQAVNRSATKGVTLLLPEPEWTYPRLSCPGSTFQKALLISPHRFGETKGNSAPLIIREPFIACGPNECKHFALTHYAAQPGGYYNGTRGDRNKLRHLISVKLGKIPTVENSIFHMAAWSGSACHDGKEWTYIGVDGPDNNALLKVKYGEAYTDTYHSYANKILRTQESACNCIGGNCYLMITDGSASGVSECRFLKIREGRIIKEIFPTGRVKHTEECTCGFASNKTIECACRDNRYTAKRPFVKLNVETDTAEIRLMCTDTYLDTPRPNDGSITGPCESDGDEGSGGIKGGFVHQRMKSKIGRWYSRTMSKTERMGMGLYVKYDGDPWADSDALAFSGVMVSVKEPGWYSFGFEIKDKKCDVPCIGIEMVHDGGKETWHSAATAIYCLMGSGQLLWDTVTGVDMAL

SEQ ID NO: 30401 - protein, 466 aa, Artificial Sequence
  derived and/or modified protein sequence (wt) from neuraminidase__InfluenzaB__AKA54845
MLPSTIQTLTLFLTSGGVLLSLYVSASLSYLLYSDILLKFSPTEITAPTMPLDCANASNVQAVNRSATKGVTLLLPEPEWTYPRLSCPGSTFQKALLISPHRFGETNGNSAPLIIREPFIACGPNECKHFALTHYAAQPGGYYNGTRGDRNKLRHLISVKLGKIPTVENSIFHMAAWSGSACHDGKEWTYIGVDGPDNNALLKVKYGEAYTDTYHSYANKILRTQESACNCIGGNCYLMITDGSASGVSECRFLKIREGRIIKEIFPTGRVKHTEECTCGFASNKTIECACRDNRYTAKRPFVKLNVETDTAEIRLMCTDTYLDTPRPNDGSITGPCESDGDEGSGGIKGGFVHQRMKSKIGRWYSRTMSKTERMGMGLYVKYDGDPWADSDALAFSGVMVSMKEPGWYSFGFEIKDKKCDVPCIGIEMVHDGGKETWHSAATAIYCLMGSGQLLWDTVTGVDMAL

SEQ ID NO: 30402 - protein, 466 aa, Artificial Sequence; identical to SEQ ID NO: 30206
  derived and/or modified protein sequence (wt) from neuraminidase__InfluenzaB__AKA54847

SEQ ID NO: 30403 - protein, 466 aa, Artificial Sequence
  derived and/or modified protein sequence (wt) from neuraminidase__InfluenzaB__AKA54849
MLPSTIQTLTLFLTSGGVLLSLYVSASLSYLLYSDILLKFSSTEITAPTMPLDCANASNVQAVNRSATKGVTLLLPEPEWTYPRLSCPGSTFQKALLISPHRFGETNGNSAPLIIREPFIACGPNECKHFALTHYAAQPGGYYNGTRGDRNKLRHLISVKLGKIPTVENSIFHMAAWSGSACHDGKEWTYIGVDGPDNNALLKVKYGEAYTDTYHSYANKILRTQESACNCIGGNCYLMITDGSASGVSECRFLKIREGRIIKEIFPTGRVKHTEECTCGFASNKTIECACRDNRYTAKRPFVKLNVETDTAEIRLMCTDTYLDTPRPNDGSITGPCESDGDEGGGGIKGGFVHQRMKSKIGRWYSRTMSKTERMGMGLYVKYDGDPWADSDALAFSGVMVSMKEPGWYSFGFEIKDKKCDVPCIGIEMVHDGGKETWHSAATAIYCLMGSGQLLWDTVTGVDMAL

SEQ ID NO: 30404 - protein, 466 aa, Artificial Sequence
  derived and/or modified protein sequence (wt) from neuraminidase__InfluenzaB__AKA54851
MLPSTIQTLTLFLTSGGVLLSLYVSASLSYLLYSDILLKFSPTEITAPTMPLDCANASNVQAVNRSATKGVTLLLPEPEWTYPRLSCPGSTFQKALLISPHRFGETKGNSAPLIIREPFIACGPNECKHFALTHYAAQPGGYYNGTRGDRNKLRHLISVKLGKIPTVENSIFHMAAWSGSACHDGKEWTYIGVDGPDNNALLKVKYGEAYIDTYHSYANKILRTQESACNCIGGNCYLMITDGSASGVSECRFLKIREGRIIKEIFPTGRVKHTEECTCGFASNKTIECACRDNRYTAKRPFVKLNVETDTAEIRLMCTDTYLDTPRPNDGSITGPCESDGDKGSGGIKGGFVHQRMKSKIGRWYSRTMSKTERMGMGLYVKYDGDPWADSDALAFSGVMVSMKEPGWYSFGFEIKDKKCDVPCIGIEMVHDGGKETWHSAATAIYCLMGSGQLLWDTVTGVDMAL

SEQ ID NO: 30405 - protein, 466 aa, Artificial Sequence
  derived and/or modified protein sequence (wt) from neuraminidase__InfluenzaB__AKA54853
MLPSTIQTLTLFLTSGGVLLSLYVSASLSYLLYSDILLKFSPTEITAPTMPLDCANASNVQAVNRSATKGVTLLLPEPEWTYPRLSCPGSTFQKALLISPHRFGETKGNSAPLIIREPFIACGPNECKHFALTHYAAQPGGYYNGTRGDRNKLRHLISVKLGKIPTVENSIFHMAAWSGSACHDGKEWTYIGVDGPDNNALLKVKYGEAYTDTYHSYANKILRTQESACNCIGGNCYLMITDGSASGVSECRFLKIREGRIIKEIFPTGRVKHTEECTCGFASNKTIECACRDNRYTAKRPFVKLNVETDTAEIRLMCTDTYLDTPRPNDGSITGPCESDGDEGSGGVKGGFVHQRMKSKIGRWYSRTMSKTERMGMGLYVKYDGDPWADSDALAFSGVMVSVKEPGWYSFGFEIKDKKCDVPCIGIEMVHDGGKETWHSAATAIYCLMGSGQLLWDTVTGVDMAL

SEQ ID NO: 30406 - protein, 466 aa, Artificial Sequence
  derived and/or modified protein sequence (wt) from neuraminidase__InfluenzaB__AKA54855
MLPSTIQTLTLFLTSGGVLLSLYVSASLSYLLYSDILLKFSPTEITAPTMPLDCANASNVQAVNRSATKGVTLLLPEPEWTYPRLSCPGSTFQKALLISPHRFGETKGNSAPLIIREPFIACGPNECKHFALTHYAAQPGGYYNGTRGDRNKLRHLISVKLGKIPTVENSIFHMAAWSGSACHDGKEWTYIGVDGPDNNALLKVKYGEAYTDTYHSYANKILRTQESACNCIGGNCYLMITDGSASGVSECRFLKIREGRIIKEIFPTGRVKHTEECTCGFASNKTIECACRDNRYTAKRPFVKLDVETDTAEIRLMCTDTYLDTPRPNDGSITGPCESDGDKGSGGIKGGFVHQRMKSKIGRWYSRTMSKTERMGMGLYVKYDGDPWADSDALAFSGVMVSMKEPGWYSFGFEIKDKKCDVPCIGIEMVHDGGKETWHSAATAIYCLMGSGQLLWDTVTGVDMAL

SEQ ID NO: 30407 - protein, 466 aa, Artificial Sequence
  derived and/or modified protein sequence (wt) from neuraminidase__InfluenzaB__AKT07927
MPPSTIQTLTLFLTSGGVLLSLYVSASLSYLLYSDILLKFSPTEITAPTMPLDCANASNVQAVNRSATKGVTLLLPEPEWTYPRLSCPGSTFQKALLISPHRFGETRGNSAPLIIREPFIACGPNECKHFALTHYAAQPGGYYNGTRGDRNKLRHLISVKLGKIPTVENSIFHMAAWSGSACHDGKEWTYIGVDGPDNNALLKVKYGEAYTDTYHSYANKILRTQESACNCIGGNCYLMITDGSASGVSECRFLKIREGRIIKEIFPTGRVKHTEECTCGFASNKTIECACRDNSYTAKRPFVKLNVETDTAEIRLMCTDTYLDTPRPNDGSITGPCESDGDKGSGGIKGGFVHQRMESKIGRWYSRTMSKTERMGMGLYVKYDGDPWTDSDALAFGGVMVSMKEPGWYSFGFEIKDKKCDVPCIGIEMVHDGGKETWHSAATAIYCLMGSGQLLWDTVTGVDMAL

SEQ ID NO: 30408 - protein, 466 aa, Artificial Sequence; identical to SEQ ID NO: 29119
  derived and/or modified protein sequence (wt) from neuraminidase__InfluenzaB__AKT07931

SEQ ID NO: 30409 - protein, 466 aa, Artificial Sequence
  derived and/or modified protein sequence (wt) from neuraminidase__InfluenzaB__AKT07933
MLPSTIQTLTLFLTSGGVLLSLYVSASLSYLLYSDILLKFSPTEITAPAMPLDCANASNVQAVNRSATKGVTFLLPEPEWTYPRLSCPGSTFQKALLISPHRFGETKGNSAPLIIREPFIACGPNECKHFALTHYAAQPGGYYNGTRGDRNKLRHLISVKLGKIPTVENSIFHMAAWSGSACHDGKEWTYIGVDGPDNNALLKVKYGEAYTDTYHSYANKILRTQESACNCIGGNCYLMITDGSASGVSECRFLKIREGRIIKEIFPTGRVKHTEECTCGFASNKTIECACRDNSYTAKRPFVKLNVETDTAEIRLMCTDTYLDTPRPNDGSITGPCESDGDKGSGGIKGGFVHQRMESKIGRWYSRTMSKTERMGMGLYVKYDGDPWADSDALAFSGVMVSMKEPGWYSFGFEIKDKKCDVPCIGIEMVHDGGKETWHSAATAIYCLMGSGQLLWDTVTGVDMAL

SEQ ID NO: 30410 - protein, 466 aa, Artificial Sequence; identical to SEQ ID NO: 29119
  derived and/or modified protein sequence (wt) from neuraminidase__InfluenzaB__AKT07935

SEQ ID NO: 30411 - protein, 466 aa, Artificial Sequence; identical to SEQ ID NO: 29119
  derived and/or modified protein sequence (wt) from neuraminidase__InfluenzaB__AKT07937

SEQ ID NO: 30412 - protein, 466 aa, Artificial Sequence; identical to SEQ ID NO: 28961
  derived and/or modified protein sequence (wt) from neuraminidase__InfluenzaB__AKT07939

SEQ ID NO: 30413 - protein, 466 aa, Artificial Sequence; identical to SEQ ID NO: 29119
  derived and/or modified protein sequence (wt) from neuraminidase__InfluenzaB__AKT07941

SEQ ID NO: 30414 - protein, 466 aa, Artificial Sequence; identical to SEQ ID NO: 29119
  derived and/or modified protein sequence (wt) from neuraminidase__InfluenzaB__AKT07945

SEQ ID NO: 30415 - protein, 466 aa, Artificial Sequence
  derived and/or modified protein sequence (wt) from neuraminidase__InfluenzaB__AKT07947
MLPSTIQTLTLFLTSGGVLLSLYVSASLSYLLYSDILLKFSPTEITAPAMPLDCANASNVQAVNRSATKGVTLLLPEPEWTYPRLSCPGSTFQKALLISPHRFGETKGNSAPLIIREPFIACGPNECKHFALTHYAAQPGGYYNGTRGDRNKLRHLISVKLGKIPTVENSIFHMAAWSGSACHDGKEWTYIGVDGPDNNALLKVKYGEAYTDTYHSYANKILRTQESACNCIGGNCYLMITDGSASGVSECRFLKIREGRIIKEIFPTGRVKHTEECTCGFASNKTIECACRDNSYTAKRPFVKLNVETDTAEIRLMCTDTYLDTPRPNDGSITGPCESDGDKGSGGIKGGFVHQRMESKIGRWYSRTMSKTERMGMGLYVKYDGDPWADSDALAFSGVMVSMKEPGWYSFGFEIKDKKCDVPCIGVDMVHDCGKETWHSAATAIYCLMGSGQLLWDTVTGVDMAL

SEQ ID NO: 30416 - protein, 466 aa, Artificial Sequence; identical to SEQ ID NO: 30374
  derived and/or modified protein sequence (wt) from neuraminidase__InfluenzaB__AKU40585

SEQ ID NO: 30417 - protein, 466 aa, Artificial Sequence; identical to SEQ ID NO: 30374
  derived and/or modified protein sequence (wt) from neuraminidase__InfluenzaB__AKU40596

SEQ ID NO: 30418 - protein, 466 aa, Artificial Sequence
  derived and/or modified protein sequence (wt) from neuraminidase__InfluenzaB__AKU40607
MLPSTIQTLTLFLTSGGVLLSLYVSASLSYLLYSDILLKFSRTEVTAPITPLDCANASNAQAVNRSATKGVTPLLPEPEWTYPRLSCPGSTFQKALLISPHRFGETKGNSAPLIIREPFIACGPKECKHFALTHYAAQPGGYYNGTREDRNKLRHLISVKLGKIPTVENSIFHMAAWSGSACHDGREWTYIGVDGPDSNALLKIKYGEAYTDTYHSYAKNILRTQESACNCIGGDCYLMITDGPASGISECRFLKIREGRIIKEIFPTGRVKHTEECTCGFASNKTIECACRDNSYTAKRPFVKLNVETDTAEIRLMCTKTYLDTPRPNDGSITGPCESDGDEGSGGIKGGFVHQRMASKIGRWYSRTMSKTKRMGMGLYVKYDGDPWTDSEALALSGVMVSMEEPGWYSFGFEIKDKKCDVPCIGIEMVHDGGKTTWHSAATAIYCLMGSGQLLWDTVTGVNMTL

SEQ ID NO: 30419 - protein, 466 aa, Artificial Sequence
  derived and/or modified protein sequence (wt) from neuraminidase__InfluenzaB__AKU40618
MLPSTIQTLTLFLTSGGVLLSLYVSASLSYLLYSDILLKFSRTEVTAPIMPLDCANASNVQAVNRSATKGVTPLLPEPEWTYPRLSCPGSTFQKALLISPHRFGETKGNSAPLIIREPFIACGPKECKHFALTHYAAQPGGYYNGTREDRNKLRHLISVKLGKIPTVENSIFHMAAWSGSACHDGREWTYIGVDGPDSNALLKIKYGEAYTDTYHSYAKNILRTQESACNCIGGDCYLMITDGPASGISECRFLKIREGRIIKEIFPTGRVKHTEECTCGFASNKTIECACRDNSYTAKRPFVKLNVETDTAEIRLMCTKTYLDTPRPNDGSITGPCESDGDEGSGGIKGGFVHQRMASKIGRWYSRTMSKTKRMGMGLYVKYDGDPWTDSEALALSGVMVSMEEPGWYSFGFEIKDNKCDVPCIGIEMVHDGGKTTWHSAATAIYCLMGSGQLLWDTVTGVNMTL

SEQ ID NO: 30420 - protein, 466 aa, Artificial Sequence
  derived and/or modified protein sequence (wt) from neuraminidase__InfluenzaB__AKU40640
MLPSTIQTLTLFLTSGGVLLSLYVSASLSYLLYSDILLKFSRTEIAAPIMPLDCANASNVQAVNRSATKGVALLLPEPEWTYPRLSCPGSTFQKALLISPHRFGETKGNSAPLIIREPFIACGPKECKHFALTHYAAQPGGYYNGTREDRNKLRHLISVKLGKIPTVENSIFHMAAWSGSACHDGREWTYIGVDGPDNNALLKIKYGEAYTDTYHSYAKNILRTQESACNCIGGDCYLMITDGPASGISECRFLKIREGRIIKEIFPTGRVKHTEECTCGFASNKTIECACRDNSYTAKRPFVKLNVETDTAEIRLMCTETYLDTPRPNDGSITGPCESNGDKGSGGIKGGFVHQRMASKIGRWYSRTMSKTKRMGMGLYVKYDGDPWTDSEALALSGVMVSMEEPGWYSFGFEIKDKKCDVPCIGIEMVHDGGKTTWHSAATAIYCLMGSGQLLWDTVTGVNMTL

SEQ ID NO: 30421 - protein, 466 aa, Artificial Sequence; identical to SEQ ID NO: 30374
  derived and/or modified protein sequence (wt) from neuraminidase__InfluenzaB__AKU40662

SEQ ID NO: 30422 - protein, 466 aa, Artificial Sequence
  derived and/or modified protein sequence (wt) from neuraminidase__InfluenzaB__AKU40673
MLPSTIQTLTLFLTSGGVLLSLYVSASLSYLLYSDILLKFSRTEVTAPIMPLDCANASNVQAVNRSATKGVTPLLPESEWTYPRLSCPGSTFQKALLISPHRFGETKGNSAPLIIREPFIACGPKECKHFALTHYAAQPGGYYNGTREDRNKLRHLISVKLGKIPTVENSIFHMAAWSGSACHDGREWTYIGVDGPDSNALLKIKYGEAYTDTYHSYAKNILRTQESACNCIGGDCYLMITDGPASGISECRFLKIREGRIIKEIFPTGRVKHTEECTCGFASNKTIECACRDNSYTAKRPFVKLNVETDTAEIRLMCTKTYLDTPRPNDGSITGPCESDGDEGSGGIKGGFVHQRMASKIGRWYSRTMSKTKRMGMGLYVKYDGDPWTDSEALALSGVMVSMEEPGWYSFGFEIKDKKCDVPCIGIEMVHDGGKTTWHSAATAIYCLMGSGQLLWDTVTGVNMTL

SEQ ID NO: 30423 - protein, 466 aa, Artificial Sequence; identical to SEQ ID NO: 30374
  derived and/or modified protein sequence (wt) from neuraminidase__InfluenzaB__AKU40684

SEQ ID NO: 30424 - protein, 466 aa, Artificial Sequence; identical to SEQ ID NO: 30374
  derived and/or modified protein sequence (wt) from neuraminidase__InfluenzaB__AKU40695

SEQ ID NO: 30425 - protein, 466 aa, Artificial Sequence; identical to SEQ ID NO: 30374
  derived and/or modified protein sequence (wt) from neuraminidase__InfluenzaB__AKU40706

SEQ ID NO: 30426 - protein, 466 aa, Artificial Sequence; identical to SEQ ID NO: 30374
  derived and/or modified protein sequence (wt) from neuraminidase__InfluenzaB__AKU40717

SEQ ID NO: 30427 - protein, 466 aa, Artificial Sequence
  derived and/or modified protein sequence (wt) from neuraminidase__InfluenzaB__AKU40728
MLPSTIQTLTLFLTSGGVLLSLYVSASLSYLLYSDILLKFSRTEVTAPIMPLDCANASNAQAVNRSATKGVTPLLPEPEWTYPRLSCPGSTFQKALLISPHRFGETKGNSAPLIIREPFIACGPKECKHFALTHYAAQPGGYYNGTREDRNKLRHLISVKLGKIPTVENSIFHMAAWSGSACHDGREWTYIGVDGPDSNALLKIKYGEAYTDTYHSYAKNILRTQESACNCIGGDCYLMITDGPASGISECRFLKIREGRIIKEIFPTGRVKHTEECTCGFASNKTIECACRDNSYTAKRPFVKLNVETDTAEIRLMCTKTYLDTPRPNDGSITGPCESDGDEGSGGIKGGFVHQRMASKIGRWYSRTMSKTKRMGMGLYVKYDGDPWTDSEALALSGVMVSMEEPGWYSFGFEIKDKKCDVPCIGIEMVHDGGKTTWHSAATAIYCLMGSGQLLWDTVTGVNMTL

SEQ ID NO: 30428 - protein, 466 aa, Artificial Sequence
  derived and/or modified protein sequence (wt) from neuraminidase__InfluenzaB__AKU40739
MLPSTIQTLTLFLTSGGVLLSLYVSASLSYLLYSDILLKFSRTEVTAPIMPLDCANASNVQAVNRSATKGVTPLLPEPEWTYPRLSCPGSTFQKALLISPHRFGETKGNSAPLIIREPFIACGPKECKHFALTHYAAQPGGYYNGTREDRNKLRHLISVKLGKIPTVENSIFHMAAWSGSACHDGREWTYIGVDGPDSNALLKIKYGETYTDTYHSYAKNILRTQESACNCIGGDCYLMITDGPASGISECRFLKIREGRIIKEIFPTGRVKHTEECTCGFASNKTIECACRDNSYTAKRPFVKLNVETDTAEIRLMCTKTYLDTPRPNDGSITGPCESDGDEGSGGIKGGFVHQRMASKIGRWYSRTMSKTKRMGMGLYVKYDGDPWTDSEALALSGVMVSMEEPGWYSFGFEIKDKKCDVPCIGIEMVHDGGKTTWHSAATAIYCLMGSGQLLWDTVTGVNMTL

SEQ ID NO: 30429 - protein, 466 aa, Artificial Sequence
  derived and/or modified protein sequence (wt) from neuraminidase__InfluenzaB__AKU40750
MLPSTIQTLTLFLTSGGVLLSLYVSASLSYLLYSDILLKFSRTEVTAPIMPLDCANASNVQAVNRSATKGVIPLLPEPEWTYPRLSCPGSTFQKALLISPHRFGETKGNSAPLIIREPFIACGPKECKHFALTHYAAQPGGYYNGTREDRNKLRHLISVKLGKIPTVENSIFHMAAWSGSACHDGREWTYIGVDGPDSNALLKIKYGEAYTDTYHSYAKNILRTQESACNCIGGDCYLMITDGPASGISECRFLKIREGRIIKEIFPTGRVKHTEECTCGFASNKTIECACRDNSYTAKRPFVKLNVETDTAEIRLMCTKTYLDTPRPNDGSITGPCESDGDEGSGGIKGGFVHQRMASKIGRWYSRTMSKTKRMGMGLYVKYDGDPWTDSEALALSGVMVSMEEPGWYSFGFEIKDKKCDVPCIGIEMVHDGGKTTWHSAATAIYCLMGSGQLLWDTVTGVNMTL

SEQ ID NO: 30430 - protein, 466 aa, Artificial Sequence; identical to SEQ ID NO: 30374
  derived and/or modified protein sequence (wt) from neuraminidase__InfluenzaB__AKU40761

SEQ ID NO: 30431 - protein, 466 aa, Artificial Sequence; identical to SEQ ID NO: 30374
  derived and/or modified protein sequence (wt) from neuraminidase__InfluenzaB__AKU40772

SEQ ID NO: 30432 - protein, 466 aa, Artificial Sequence; identical to SEQ ID NO: 30374
  derived and/or modified protein sequence (wt) from neuraminidase__InfluenzaB__AKU40783

SEQ ID NO: 30433 - protein, 466 aa, Artificial Sequence
  derived and/or modified protein sequence (wt) from neuraminidase__InfluenzaB__AKU40794
MLPSTIQTLTLFLTSGGVLLSLYVSASLSYLLYSDILLKFSRTEVTAPIMPLDCANTSNVQAVNRSATKGVTPLLPEPEWTYPRLSCPGSTFQKALLISPHRFGETKGKSAPLIIREPFIACGPKECKHFALTHYAAQPGGYYNGTREDRNKLRHLISVKLGKIPTVENSIFHMAAWSGSACHDGREWTYIGVDGPDSNALLKIKYGEAYTDTYHSYAKNILRTQESACNCIGGDCYLMITDGPASGISECRFLKIREGRIIKEIFPTGRVKHTEECTCGFASNKTIECACRDNSYTAKRPFVKLNVETDTAEIRLMCTKTYLDTPRPNDGSITGPCESDGDEGSGGIKGGFVHQRMASKIGRWYSRTMSKTKRMGMGLYVKYDGDPWTDSEALALSGVMVSMEEPGWYSFGFEIKDKKCDVPCIGIEMVHDGGKTTWHSAATAIYCLMGSGQLLWDTVTGVNMTL

SEQ ID NO: 30434 - protein, 466 aa, Artificial Sequence; identical to SEQ ID NO: 30374
  derived and/or modified protein sequence (wt) from neuraminidase__InfluenzaB__AKU40805

SEQ ID NO: 30435 - protein, 466 aa, Artificial Sequence; identical to SEQ ID NO: 30374
  derived and/or modified protein sequence (wt) from neuraminidase__InfluenzaB__AKU40816

SEQ ID NO: 30436 - protein, 466 aa, Artificial Sequence; identical to SEQ ID NO: 30374
  derived and/or modified protein sequence (wt) from neuraminidase__InfluenzaB__AKU40827

SEQ ID NO: 30437 - protein, 466 aa, Artificial Sequence; identical to SEQ ID NO: 30374
  derived and/or modified protein sequence (wt) from neuraminidase__InfluenzaB__AKU40838

SEQ ID NO: 30438 - protein, 466 aa, Artificial Sequence; identical to SEQ ID NO: 30374
  derived and/or modified protein sequence (wt) from neuraminidase__InfluenzaB__AKU40849

SEQ ID NO: 30439 - protein, 466 aa, Artificial Sequence; identical to SEQ ID NO: 30374
  derived and/or modified protein sequence (wt) from neuraminidase__InfluenzaB__AKU40860

SEQ ID NO: 30440 - protein, 466 aa, Artificial Sequence
  derived and/or modified protein sequence (wt) from neuraminidase__InfluenzaB__AKU40871
MLPSTIQTLTLFLTSGGVLLSLYVSASLSYLLYSDILLKFSRTEVTAPIMPLDCANASNVQAVNRSATKGVAPLLPEPEWTYPRLSCPGSTFQKALLISPHRFGETKGNSAPLIIREPFIACGPKECKHFALTHYAAQPGGYYNGTREDRNKLRHLISVKLGKIPTVENSIFHMAAWSGSACHDGREWTYIGVDGPDSNALLKIKYGEAYTDTYHSYAKNILRTQESACNCIGGDCYLMITDGPASGISECRFLKIREGRIIKEIFPTGRVKHTEECTCGFASNKTIECACRDNSYTAKRPFVKLNVETDTAEIRLMCTKTYLDTPRPNDGSITGPCESDGDEGSGGIKGGFVHQRMASKIGRWYSRTMSKTKRMGMGLYVKYDGDPWTDSEALTLSGVMVSMEEPGWYSFGFEIKDKKCDVPCIGIEMVHDGGKTTWHSAATAIYCLMGSGQLLWDTVTGVNMTL

SEQ ID NO: 30441 - protein, 466 aa, Artificial Sequence; identical to SEQ ID NO: 30374
  derived and/or modified protein sequence (wt) from neuraminidase__InfluenzaB__AKU40882

SEQ ID NO: 30442 - protein, 466 aa, Artificial Sequence
  derived and/or modified protein sequence (wt) from neuraminidase__InfluenzaB__AKU40893
MLPSTIQTLTLFLTSGGVLLSLYVSASLSYLLYSDILLKFSPTEITAPTMPLDCANASNVQAVNRSATKGVTLLLPEPEWTYPRLSCPGSTFQKALLISPHRFGETKGNSAPLIIREPFIACGPNECKHFALTHYAAQPGGYYNGTRGDRNKLRHLISVKLGKIPTVENSIFHMAAWSGSACHDGKEWTYIGVDGPDNNALLKVKYGEAYTDTYHSYANKILRTQESACNCIGGNCYLMITDGSASGVSECRFLKIREGRIIKEIFPTGRVKHTEECTCGFASNKTIECACRDNRYTAKRPFVKLNVETDTAEIRLMCTDTYLDTPRPNDGSITGPCESDGDKGSGGIKGGFVHQRMKSKIGRWYSRTMSKTERMGMGLYVKYDGDPWADSGALAFSGVMVSMKEPGWYSFGFEIKDKKCDVPCIGIEMVHDGGKETWHSAATAIYCLMGSGQLLWDTVTGVDMAL

SEQ ID NO: 30443 - protein, 466 aa, Artificial Sequence; identical to SEQ ID NO: 30374
  derived and/or modified protein sequence (wt) from neuraminidase__InfluenzaB__AKU40904

SEQ ID NO: 30444 - protein, 466 aa, Artificial Sequence
  derived and/or modified protein sequence (wt) from neuraminidase__InfluenzaB__AKU40915
MLPSTIQTLTLFLTSGGVLLSLYVSASLSYLLYSDILLKFSRTEVTAPIMPLDCANASNVQAVNRSATKGVTPLLPEPEWTYPRLSCPGSTFQKALLISPHRFGETKGNSAPLIIREPFIACGPKECKHFALTHYAAQPGGYYNGTREDRNKLRHLISVKLGKIPTVENSIFHMAAWSGSACHDGREWTYIGVDGPDSNALLKIKYGEAYTDTYHSYAKNILRTQESACNCIGGDCYLMITDGPASGISECRFLKIREGRIIKEIFPTGRVKHTEECTCGFASNKTIECACRDNSYTAKRPFVKLNVETDTAEIRLMCTKTYLDTPRPNDGSITGPCESDGDEGSGGIKGGFVHQRMASKIGRWYSRTMSKTKRMGMGLYVKYDGDPWTDSEALALSGVMVPMEEPGWYSFGFEIKDKKCDVPCIGIEMVHDGGKTTWHSAATAIYCLMGSGQLLWDTVTGVNMTL

SEQ ID NO: 30445 - protein, 466 aa, Artificial Sequence; identical to SEQ ID NO: 30374
  derived and/or modified protein sequence (wt) from neuraminidase__InfluenzaB__AKU40926

SEQ ID NO: 30446 - protein, 466 aa, Artificial Sequence; identical to SEQ ID NO: 30428
  derived and/or modified protein sequence (wt) from neuraminidase__InfluenzaB__AKU40937

SEQ ID NO: 30447 - protein, 466 aa, Artificial Sequence; identical to SEQ ID NO: 30374
  derived and/or modified protein sequence (wt) from neuraminidase__InfluenzaB__AKU40948

SEQ ID NO: 30448 - protein, 466 aa, Artificial Sequence; identical to SEQ ID NO: 30374
  derived and/or modified protein sequence (wt) from neuraminidase__InfluenzaB__AKU40959

SEQ ID NO: 30449 - protein, 466 aa, Artificial Sequence; identical to SEQ ID NO: 30374
  derived and/or modified protein sequence (wt) from neuraminidase__InfluenzaB__AKU40970

SEQ ID NO: 30450 - protein, 466 aa, Artificial Sequence; identical to SEQ ID NO: 30374
  derived and/or modified protein sequence (wt) from neuraminidase__InfluenzaB__AKU40981

SEQ ID NO: 30451 - protein, 466 aa, Artificial Sequence; identical to SEQ ID NO: 30374
  derived and/or modified protein sequence (wt) from neuraminidase__InfluenzaB__AKU40991

SEQ ID NO: 30452 - protein, 466 aa, Artificial Sequence; identical to SEQ ID NO: 30374
  derived and/or modified protein sequence (wt) from neuraminidase__InfluenzaB__AKU41002

SEQ ID NO: 30453 - protein, 466 aa, Artificial Sequence; identical to SEQ ID NO: 30374
  derived and/or modified protein sequence (wt) from neuraminidase__InfluenzaB__AKU41013

SEQ ID NO: 30454 - protein, 466 aa, Artificial Sequence; identical to SEQ ID NO: 30374
  derived and/or modified protein sequence (wt) from neuraminidase__InfluenzaB__AKU41024

SEQ ID NO: 30455 - protein, 466 aa, Artificial Sequence; identical to SEQ ID NO: 28961
  derived and/or modified protein sequence (wt) from neuraminidase__InfluenzaB__EPI173278

SEQ ID NO: 30456 - protein, 466 aa, Artificial Sequence; identical to SEQ ID NO: 28961
  derived and/or modified protein sequence (wt) from neuraminidase__InfluenzaB__EPI498049

SEQ ID NO: 30457 - protein, 466 aa, Artificial Sequence; identical to SEQ ID NO: 28961
  derived and/or modified protein sequence (wt) from neuraminidase__InfluenzaB__AFH57913

SEQ ID NO: 30458 - protein, 466 aa, Artificial Sequence; identical to SEQ ID NO: 28961
  derived and/or modified protein sequence (wt) from neuraminidase__InfluenzaB__EPI827074

SEQ ID NO: 30459 - protein, 466 aa, Artificial Sequence; identical to SEQ ID NO: 28961
  derived and/or modified protein sequence (wt) from neuraminidase__InfluenzaB__EPI244698

SEQ ID NO: 30460 - protein, 466 aa, Artificial Sequence; identical to SEQ ID NO: 28961
  derived and/or modified protein sequence (wt) from neuraminidase__InfluenzaB__EPI244701

SEQ ID NO: 30461 - protein, 466 aa, Artificial Sequence; identical to SEQ ID NO: 30374
  derived and/or modified protein sequence (wt) from neuraminidase__InfluenzaB__EPI540672

SEQ ID NO: 30462 - protein, 466 aa, Artificial Sequence; identical to SEQ ID NO: 30374
  derived and/or modified protein sequence (wt) from neuraminidase__InfluenzaB__EPI829465

SEQ ID NO: 30463 - protein, 466 aa, Artificial Sequence
  derived and/or modified protein sequence (wt) from neuraminidase__InfluenzaB__EPI684428
MLPSTIQTLTLFLTSGGVLLSLYVSASLSYLLYSDILLKFSRTEVTAPTMPLDCANASNVQAVNRSTTKGVTPLFPEPEWTYPRLSCPGSTFQKALLISPHRFGETKGNSAPLIIREPFIACGPKECKHFALTHYAAQPGGYYNGTREDRNKLRHLISVKLGKIPTVENSIFHMAAWSGSACHDGREWTYIGVDGPDSNALLKIKYGEAYTDTYHSYAKNILRTQESACNCIGGDCYLMITDGPASGVSECRFLKIREGRIIKEIFPTGRVKHTEECTCGFASNKTIECACRDNRYTAKRPFVKLNVETDTAEIRLMCTKTYLDTPRPNDGSITGPCESDGDEGSGGIKGGFVHQRMASKIGRWYSRTMSKTKRMGMGLYVKYDGDPWTDSEALALSGVMVSMEEPGWYSFGFEIKDKKCDVPCIGIEMVHDGGKTTWHSAATAIYCLMGSGQLLWDTVTGVNMTL

SEQ ID NO: 30464 - protein, 466 aa, Artificial Sequence; identical to SEQ ID NO: 28983
  derived and/or modified protein sequence (wt) from neuraminidase__InfluenzaB__AFH58451

SEQ ID NO: 30465 - protein, 466 aa, Artificial Sequence; identical to SEQ ID NO: 28961
  derived and/or modified protein sequence (wt) from neuraminidase__InfluenzaB__EPI173280

SEQ ID NO: 30466 - protein, 466 aa, Artificial Sequence; identical to SEQ ID NO: 28961
  derived and/or modified protein sequence (wt) from neuraminidase__InfluenzaB__EPI186302

SEQ ID NO: 30467 - protein, 466 aa, Artificial Sequence
  derived and/or modified protein sequence (wt) from neuraminidase__InfluenzaB__EPI636339
MLPSTIQTLTLFLTSGGVLLSLYVSASLSYLLYSDILLKFSPTEITAPTMPLDCANASNVQAVNRSATKGVTLLLPEPEWTYPRLSCPGSTFQKALLISPHRFGETKGNSAPLIIREPFVACGPNECKHFALTHYAAQPGGYYNGTRGDRNKLRHLISVKLGKIPTVENSIFHMAAWSGSACHDGKEWTYIGVDGPDNNALLKVKYGEAYTDTYHSYANNILRTQESACNCIGGNCYLMITDGSASGVSECRFLKIREGRIIKEIFPTGRVKHTEECTCGFASNKTIECACRDNRYTAKRPFVKLNVETDTAEIRLMCTDTYLDTPRPNDGSITGPCESDGDKGSGGIKGGFVHQRMKSKIGRWYSRTMSKTERMGMGLYVKYGGDPWADSDALAFSGVMVSMKEPGWYSFGFEIKDKKCDVPCIGIEMVHDGGKETWHSAATAIYCLMGSGQLLWDTVTGVDMAL

SEQ ID NO: 30468 - protein, 466 aa, Artificial Sequence; identical to SEQ ID NO: 30467
  derived and/or modified protein sequence (wt) from neuraminidase__InfluenzaB__EPI645996

SEQ ID NO: 30469 - protein, 466 aa, Artificial Sequence
  derived and/or modified protein sequence (wt) from neuraminidase__InfluenzaB__EPI539770
MLPSTIQTLTLFLTSGGVLLSLYVSASLSYLLYSDILLKFSRTEVTAPIMPLDCANASNAQAVNRSATKGVTPLLPEPEWTYPRLSCPGSTFQKALLISPHRFGETKGNSAPLIIREPFIACGPKECKHFALTHYAAQPGGYYNGTREDRNKLRHLISVKLGKIPTVENSIFHMAAWSGSACHDGREWTYIGVDGPDSNALLKIKYGEAYTDTYHSYAKNILRTQESACNCIGGDCYLMITDGPASGISECRFLKIREGRIIKEIFPTGRVKHTEECTCGFASNKTIECACRDNSYTAKRPFVKLNVETDTAEIRLMCTKTYLDTPRPNDGSITGPCESDGDEGSGGIKGGFVHQRMASKIGRWYSRTMSKTKRMGMGLYVKYDGDPWTDSEALALSGVMVSMEEPGWYSFGFEIKDKKCDVPCIGIEMVHDGGKTTWHSAATTIYCLMGSGQLLWDTVTGVNITL

SEQ ID NO: 30470 - protein, 466 aa, Artificial Sequence; identical to SEQ ID NO: 30469
  derived and/or modified protein sequence (wt) from neuraminidase__InfluenzaB__EPI551248

SEQ ID NO: 30471 - protein, 466 aa, Artificial Sequence; identical to SEQ ID NO: 30469
  derived and/or modified protein sequence (wt) from neuraminidase__InfluenzaB__EPI544258

SEQ ID NO: 30472 - protein, 466 aa, Artificial Sequence; identical to SEQ ID NO: 30374
  derived and/or modified protein sequence (wt) from neuraminidase__InfluenzaB__EPI592698

SEQ ID NO: 30473 - protein, 466 aa, Artificial Sequence; identical to SEQ ID NO: 30374
  derived and/or modified protein sequence (wt) from neuraminidase__InfluenzaB__EPI592706

SEQ ID NO: 30474 - protein, 466 aa, Artificial Sequence
  derived and/or modified protein sequence (wt) from neuraminidase__InfluenzaB__EPI693093
MLPSTIQTLTLFLTSGGVLLSLYVSASLSYLLYSDILLKFSRTEVTAPIMPLDCANASNVQAVNRSATKGVTPLLPEPEWTYPRLSCPGSTFQKALLISPHRFGETKGNSAPLIIREPFIACGPKECKHFALTHYAAQPGGYYNGTREDRNKLRHLISVKLGKIPTVENSIFHMAAWSGSACHDGREWTYIGVDGPDSNALLKIKYGEAYTDTYHSYAKNILRTQESACNCIGGDCYLMITDGPASGISECRFLKIREGRIIKEIFPTGRVKHTEECTCGFASNKTIECACRDNSYTAKRPFVKLNVETDTAEIRLMCTKTYLDTPRPNDGSITGPCESDGDEGSGGIKGGFVHQRMESKIGRWYSRTMSKTKRMGMGLYVKYDGDPWTDSEALALSGVMVSMEEPGWYSFGFEIKDKKCDVPCIGIEMVHDGGKTTWHSAATAIYCLMGSGQLLWDTVTGVNMTL

SEQ ID NO: 30475 - protein, 466 aa, Artificial Sequence
  derived and/or modified protein sequence (wt) from neuraminidase__InfluenzaB__EPI678795
MLPSTIQTLTLFLTSGGVLLSLYVSASLSYLLYSDILLKFSPTEITAPTMPLDCANASNVQAVNRSATKGVTFLLPEPEWTYPRLSCPGSTFQKALLISPHRFGETKGNSAPLIIREPFVACGPNECKHFALTHYAAQPGGYYNGTRGDRNKLRHLISVKLGKIPTVENSIFHMAAWSGSACHDGKEWTYIGVDGPDNNALLKVKYGEAYTDTYHSYANNILRTQESACNCIGGNCYLMITDGSASGVSECRFLKIREGRIIKEIFPTGRVKHTEECTCGFASNKTIECACRDNRYTAKRPFVKLNVETDTAEIRLMCTDTYLDTPRPNDGSITGPCESDGDKGSGGIKGGFVHQRMKSKIGRWYSRTMSKTERMGMGLYVKYGGNPWADSDALTFSGVMVSMKEPGWYSFGFEIKDKKCDVPCIGIEMVHDGGKETWHSAATAIYCLMGSGQLLWDTVTGVDMAL

SEQ ID NO: 30476 - protein, 466 aa, Artificial Sequence; identical to SEQ ID NO: 30475
  derived and/or modified protein sequence (wt) from neuraminidase__InfluenzaB__EPI721063

SEQ ID NO: 30477 - protein, 466 aa, Artificial Sequence; identical to SEQ ID NO: 28895
  derived and/or modified protein sequence (wt) from neuraminidase__InfluenzaB__EPI328903

SEQ ID NO: 30478 - protein, 466 aa, Artificial Sequence
  derived and/or modified protein sequence (wt) from neuraminidase__InfluenzaB__EPI543192
MLPSTIQTLTLFLTSGGVLLSLYVSASLSYLLYLDILLKFPSTEITAPTMPLDCANASNVQAVNRSATKGVTLLLPEPEWTYPRLSCPGSTFQKALLISPHRFGETKGNSAPLIIREPFIACGPKECKHFALTHYAAQPGGYYNGTRGDRNKLRHLISVKLGKIPTVENSIFHMAAWSGSACHDGKEWTYIGVDGPDNNALLKIKYGEAYTDTYHSYANNILRTQESACNCIGGNCYLMITDGSASGVSECRFLKIREGRIMKEIFPTGRTQHTEECTCGFASNKTIECACRDNSYTAKRPFVKLNVETDTAEIRLMCTKTYLDTPRPDDGSITGPCESNGGKGSGGIKGGFVHQRMASKIGRWYSRTMSKTERKGMGLYIKYNGDPWADSDALTFSGVMVSMEEPGWYSFGFEIKDKKCDVPCIGIEMVHDGGKETWHSAATAIYCLMGSGQLLWDTVTGVNMTL

SEQ ID NO: 30479 - protein, 466 aa, Artificial Sequence; identical to SEQ ID NO: 30478
  derived and/or modified protein sequence (wt) from neuraminidase__InfluenzaB__EPI500360

SEQ ID NO: 30480 - protein, 466 aa, Artificial Sequence
  derived and/or modified protein sequence (wt) from neuraminidase__InfluenzaB__EPI543186
MLPSTIQTLTLFLTSGGVLLSLYVSASLSYLLYSDILLKFSRTEVTAPIMPLDCANASNVQAVNRSATKGVTPLLPEPEWTYPRLSCPGSTFQKALLISPHRFGETKGNSAPLIIREPFIACGPKECKHFALTHYAAQPGGYYNGTREDRNKLRHLISVKLGKIPTVENSIFHMAAWSGSACHDGREWTYIGVDGPDSNALLKIKYGEAYTDTYHSYAKNILRTQESACNCIGGDCYLMITDGPASGISECRFLKIREGRIIKEIFPTGRVKHTEECTCGFASNKTIECACRDNSYTAKRPFVKLNVETDTAEIRLMCTKTYLDTPRPNDGSITGPCESDGDEGSGGIKGGFVHQRMASKIGRWYSRTMSKTKRMGMGLYVKYDGDPWTDSEALALSGVMVSMEEPGWYSFGFEIKDKKCDVPCIGIEMVHDGGKTTWHSAATVIYCLMGSGQLLWDTVTGVNMTL

SEQ ID NO: 30481 - protein, 466 aa, Artificial Sequence; identical to SEQ ID NO: 30480
  derived and/or modified protein sequence (wt) from neuraminidase__InfluenzaB__EPI536448

SEQ ID NO: 30482 - protein, 466 aa, Artificial Sequence
  derived and/or modified protein sequence (wt) from neuraminidase__InfluenzaB__NP_056663
MLPSTVQTLTLLLTSGGVLLSLYVSASLSYLLYSDVLLKFSSTKTTAPTMSLECTNASNAQTVNHSATKEMTFPPPEPEWTYPRLSCQGSTFQKALLISPHRFGEIKGNSAPLIIREPFVACGPKECRHFALTHYAAQPGGYYNGTRKDRNKLRHLVSVKLGKIPTVENSIFHMAAWSGSACHDGREWTYIGVDGPDNDALVKIKYGEAYTDTYHSYAHNILRTQESACNCIGGDCYLMITDGSASGISKCRFLKIREGRIIKEILPTGRVEHTEECTCGFASNKTIECACRDNSYTAKRPFVKLNVETDTAEIRLMCTKTYLDTPRPDDGSIAGPCESNGDKWLGGIKGGFVHQRMASKIGRWYSRTMSKTNRMGMELYVKYDGDPWTDSDALTLSGVMVSIEEPGWYSFGFEIKDKKCDVPCIGIEMVHDGGKDTWHSAATAIYCLMGSGQLLWDTVTGVDMAL

SEQ ID NO: 30483 - protein, 466 aa, Artificial Sequence
  derived and/or modified protein sequence (wt) from neuraminidase__InfluenzaB__ABG85180
MLPSTVQTLTLLLTSGGVLLSLYVSASLSYLLYSDVLLKFSSTKTTAPTMSLECTNASNAQTVNYSATKEMTFPPPEPEWTYPRLSCQGSTFQKALLISPHRFGEIKGNSAPLIIREPFVACGPKECRHFALTHYAAQPGGYYHGTRKDRNKLRHLVSVKLGKIPTVENSIFHMAAWSGSACHDGREWTYIGVDGPDNDALVKIKYGEAYTDTYHSYAHNILRTQESACNCIGGDCYLMITDGSASGISKCRFLKIREGRIIKEILPTGRVEHTEECTCGFASNKTIECACRDNSYTAKRPFVKLNVETDTAEIRLMCTKTYLDTPRPDDGSIAGPCESNGDKGLGGIKGGFVHQRMAFKIGRWYSRTMSKTNRMGMELYVKYDGDPWTDSDALTLSGVMVSIEEPGWYSFGFEIKDKKCDVPCIGIEMVHDGGEDTWHSAATAIYCLMGSGQLLWDTVTGIDMAL

SEQ ID NO: 30484 - protein, 466 aa, Artificial Sequence; identical to SEQ ID NO: 30373
  derived and/or modified protein sequence (wt) from neuraminidase__InfluenzaB__EPI376345

SEQ ID NO: 30485 - protein, 466 aa, Artificial Sequence; identical to SEQ ID NO: 30373
  derived and/or modified protein sequence (wt) from neuraminidase__InfluenzaB__EPI368424

SEQ ID NO: 30486 - protein, 466 aa, Artificial Sequence
  derived and/or modified protein sequence (wt) from neuraminidase__InfluenzaB__EPI331150
MLPSTIQTLTLFLTSGGVLLSLYVSASLSYLLYSDILLKFSPTEITAPTMPLDCANASNVQAMNRSATKGVTLLLPEPEWTYPRLSCPGSTFQKALLISPHRFGETKGNSAPLIIREPFIACGPNECKHFALTHYAAQPGGYYNGTRGDRNKLRHLISVKLGKIPTVENSIFHMAAWSGSACHDGKEWTYIGVDGPDNNALLKVKYGEAYTDTYHSYANKILRTQESACNCIGGNCYLMITDGSASGVSECRFLKIREGRIIKEIFPTGRVKHTEECTCGFASNKTIECACRDNSYTAKRPFVKLNVETDTAEIRLMCTDTYLDTPRPNDGSITGPCESDGDKGSGGIKGGFVHQRMESKIGRWYSRTMSKTERMGMGLYVKYDGDPWADSDALAFSGVMVSMKEPGWYSFGFEIKDKKCDVPCIGIEMVHDGGKETWHSAATAIYCLMGSGQLLWDTVTGVDMAL

SEQ ID NO: 30487 - protein, 466 aa, Artificial Sequence; identical to SEQ ID NO: 30486
  derived and/or modified protein sequence (wt) from neuraminidase__InfluenzaB__EPI358089

SEQ ID NO: 30488 - protein, 466 aa, Artificial Sequence; identical to SEQ ID NO: 28632
  derived and/or modified protein sequence (wt) from neuraminidase__InfluenzaB__ABL76698

SEQ ID NO: 30489 - protein, 466 aa, Artificial Sequence
  derived and/or modified protein sequence (wt) from neuraminidase__InfluenzaB__AAD42328
MLPSTIQTLTLFLTSGGVLLSLYVSASLSYLLYSDILLKFSPTEITAPTMPLDCANASNVQAVNRSATKGMTLLLPEPEWTYPRLSCPGSTFQKALLISPHRFGETRGNSAPLTIREPFIACGPKECKHFALTHYAAQPGGYYNGTREDRNKLRHLISVKLGKIPTVENSIFHMAAWSGSACHDGREWTYIGVDGPDSNALIKIKYGEAYTDTYHSYANNILRTQESACNCIGGDCYLMITDGSASGISKCRFLKIREGRIIKEIFPTGRVEHTEECTCGFASNKTIECACRDNSYTAKRPFVKLNVETDTAEIRLMCTETYLDTPRPDDGSITGPCESNGDKGRGGIKGGFVHQRMASKIGRWYSRTMSKTKRMGMELYVKYDGDPWIDSDALAPSGVMVSMEEPGWYSFGFEIKDKKCDVPCIGIEMVHDGGKKTWHSAATAIYCLMGSGQLLWDTVTGVDRSV

SEQ ID NO: 30490 - protein, 466 aa, Artificial Sequence; identical to SEQ ID NO: 30175
  derived and/or modified protein sequence (wt) from neuraminidase__InfluenzaB__EPI541349

SEQ ID NO: 30491 - protein, 466 aa, Artificial Sequence; identical to SEQ ID NO: 30374
  derived and/or modified protein sequence (wt) from neuraminidase__InfluenzaB__EPI541759

SEQ ID NO: 30492 - protein, 466 aa, Artificial Sequence; identical to SEQ ID NO: 30467
  derived and/or modified protein sequence (wt) from neuraminidase__InfluenzaB__EPI826201

SEQ ID NO: 30493 - protein, 466 aa, Artificial Sequence; identical to SEQ ID NO: 30206
  derived and/or modified protein sequence (wt) from neuraminidase__InfluenzaB__EPI477398

SEQ ID NO: 30494 - protein, 466 aa, Artificial Sequence; identical to SEQ ID NO: 30206
  derived and/or modified protein sequence (wt) from neuraminidase__InfluenzaB__EPI492570

SEQ ID NO: 30495 - protein, 466 aa, Artificial Sequence; identical to SEQ ID NO: 30206
  derived and/or modified protein sequence (wt) from neuraminidase__InfluenzaB__EPI498339

SEQ ID NO: 30496 - protein, 466 aa, Artificial Sequence; identical to SEQ ID NO: 30427
  derived and/or modified protein sequence (wt) from neuraminidase__InfluenzaB__EPI538118

SEQ ID NO: 30497 - protein, 466 aa, Artificial Sequence; identical to SEQ ID NO: 30427
  derived and/or modified protein sequence (wt) from neuraminidase__InfluenzaB__EPI538124

SEQ ID NO: 30498 - protein, 466 aa, Artificial Sequence; identical to SEQ ID NO: 30427
  derived and/or modified protein sequence (wt) from neuraminidase__InfluenzaB__EPI556421

SEQ ID NO: 30499 - protein, 466 aa, Artificial Sequence; identical to SEQ ID NO: 30427
  derived and/or modified protein sequence (wt) from neuraminidase__InfluenzaB__EPI614609

SEQ ID NO: 30500 - protein, 466 aa, Artificial Sequence; identical to SEQ ID NO: 28671
  derived and/or modified protein sequence (wt) from neuraminidase__InfluenzaB__BAB32609

SEQ ID NO: 30501 - protein, 466 aa, Artificial Sequence; identical to SEQ ID NO: 28817
  derived and/or modified protein sequence (wt) from neuraminidase__InfluenzaB__EPI271544

SEQ ID NO: 30502 - protein, 466 aa, Artificial Sequence; identical to SEQ ID NO: 28817
  derived and/or modified protein sequence (wt) from neuraminidase__InfluenzaB__AFH57957

SEQ ID NO: 30503 - protein, 466 aa, Artificial Sequence; identical to SEQ ID NO: 28817
  derived and/or modified protein sequence (wt) from neuraminidase__InfluenzaB__EPI294881

SEQ ID NO: 30504 - protein, 466 aa, Artificial Sequence; identical to SEQ ID NO: 28672
  derived and/or modified protein sequence (wt) from neuraminidase__InfluenzaB__ABL77259

SEQ ID NO: 30505 - protein, 524 aa, Artificial Sequence
  derived and/or modified protein sequence (wt) from glycoprotein__RABV__AB009663.2
MVPQALLLVPILGFSLCFGKFPIYTIPDTLGPWSPIDIHHLSCPNNLVVEDEGCTNLSGFSYMELKVGYTSAIKVNGFTCTGVVTEAETYTNFVGYVTTTFKRKHFRPTPDACRAAYNWKMAGDPRYEESLHSPYPDYHWLRTVKTTKESLVIISPSVADLDPYDNSLHSRVFPSGKCSGITRSSVYCSTNHDYTVWMPEILRLGTSCDIFTNSRGKRVSKGSTTCGFIDERGLYKSLKGACKLKLCGVLGLRLMDGTWVSMQTSNETKWCPPNQLVNLHDLRSDELEHLVIEELVKKREECLDALESIITTKSVSFRRLSHLRKLVPGFGKAYTIFNKTLMEAEAHYKSVRTWNEIIPSKGCLRVGGRCHPHVNGVFFNGIILGPDGHVLIPEMQSSLLQQHIELLESSVIPLMHPLADPFTVFKDGDETEDFIEVHLPDVHEQVSGVDLGLPNWGKYVLLSAGTLIALVLIIFLMTCCRKVDRPESTQRSLRGTGRNVSVTSQSGKFINSWESYKSGGETGL

SEQ ID NO: 30506 - protein, 524 aa, Artificial Sequence
  derived and/or modified protein sequence (wt) from glycoprotein__RABV__AB044824.1
MVPQALLLVPILGFSSCFGKFPIYTIPDTLGPWSPIDIHHLSCPNNLVVEDEGCTNLSGFSYMELKVGYISAIKVNGFTCTGVVTEAETYTNFVGYVTTTFKRKHFRPTPDACRAAYNWKMAGDPRYEESLHSPYPDYHWLRTVKTTKESLVIISPSVADLDPYDNSLHSRVFPSGKCSGITVSSVYCSTNHDYTVWMPESLRLGTSCDIFTNSRGKRASKGSKTCGFVDERGLYKSLKGACKLKLCGVLGLRLMDGTWVAMQTSNETKWCPPDQLVNLHDLRSDEIEHLVIEELVKKREECLDALESIITTKSVSFRRLSYLRKLVPGFGKAYTIFNKTLMEAEAHYKSVRTWNEIIPSKGCLRVGGRCHPHVNGVFFNGIILGPDGHVLIPEMQSSLLQQHIELLESSVIPLMHPLADPFTVFKDGDETEDFIEVHLPDVHEQVSGVDLGLPNWGEYVLLSAGTLIALMLIIFLMTCCRKVDRPESTQRSLRGTGRNVSVTSQSGKFIPSWESYKSGGETGL

SEQ ID NO: 30507 - protein, 524 aa, Artificial Sequence
  derived and/or modified protein sequence (wt) from glycoprotein__RABV__AB052666.1
MIPQALLFVPLLVFSLCFGKFPIYTIPDKLGPWSPIDIHHLSCPNNLVVEDEGCTNLSGFSYMELKVGYISAIKVNGFTCTGVVTEAETYTNFVGYVTTTFKRKHFRPTPDACRAAYNWKMAGDPRYEESLHNPYPDYHWLRTVKTTKESLVIISPSVSDLDPYDKSLHSRVFPSGKCSGITVSSTYCPTNHDYTIWMPENPRLGTSCDIFTNSRGKRASKGSKTCGFVDERGLYKSLKGACKLKLCGVLGLRLMDGTWAAIQTSDEVKWCPPDQLVNIHDFRSDEIEHLVVEELVKKREECLDALESIMTTKSVSFRRLSHLRKLVPGFGKAYTIFNKTLMEADAHYKSVRTWNEIIPSKGCLRVGGRCHPHVNGVFFNGIILGPDGHVLIPEMQSSLLQQHMELLESSVIPLMHPLADPSTVFKDGDEAEDFVEVHLPDVHKQVSGVDLGLPSWGKYVLMSVGAMIALMLMIFLMTCCRKANGAESIQHRLGETGRKVSVTSQSGRVISSWESYKSGGETKL

SEQ ID NO: 30508 - protein, 524 aa, Artificial Sequence
  derived and/or modified protein sequence (wt) from glycoprotein__RABV__AB085828.1
MVPQVLLFAPLLVSPLCFGKFPIYTIPDKLGPWSPIDLHHLSCPNNLVVEDEGCTNLSGFSYMELKVGYISAIKVNGFTCTGVVTEAETYTNFVGYVTTTFKRKHFRPTPDACRAAYNWKMAGDPRYEESLHNPYPDYHWLRTVKTTKESLVIISPSVTDLDPYDKSLHSRVFPGGNCSGITVSSTYCSTNHDYTIWMPENLRLGTSCDIFTHSRGKRASKGDKTCGFVDERGLYKSLKGACKLKLCGVLGLRLMDGTWVAMQTSDETKWCPPGQLVNLHDFRSDEIEHLVEEELVKKREECLDALESIMTTKSVSFRRLSHLRKLVPGFGKAYTIFNKTLMEADAHYKSVQTWNEIIPSKGCLRVGERCHPHVNGVFFNGIILGSDGHVLIPEMQSSLLQQHMELLESSVIPLMHPLADPSTVFKDGDEVEDFVEVHLPDVHKQVSGVDLGLPKWGKYVLMIAGALIALMLIIFLMTCCRRVNRPESTQSNLGGTGRNVSVPSQSGKVISSWESYKSGGETRL

SEQ ID NO: 30509 - protein, 524 aa, Artificial Sequence
  derived and/or modified protein sequence (wt) from glycoprotein__RABV__AB110656.1
MVPQALLFVPLLAFSFCFGKFPIYTIPDKLGPWSPIDIHHLSCPNNLVVEDEGCTNLSGFSYMELKVGYISAIKVNGFTCTGVVTEAETYTNFVGYVTTTFKRKHFRPTPDACRSAYNWKMAGDPRYEESLHNPYPDYHWLRTVKTTKESLVIISPSVADLDPYDKSLHSRVFPNGKCSGITVSSTYCSTNHDYTIWLPENPRLGTSCDIFTNSRGKRASKGGKTCGFVDERGLYKSLKGACKLKLCGVLGLRLMDGTWVAMLTSDETKWCPPDQLVNLHDFRSDEIEHLVVEELVKKREECLDALESIMTTKSVSFRRLSHLRKLVPGFGKAYTIFNKTLMEADAHYKSIRTWNEIIPSKGCLRVGGRCHPHVNGVFFNGIILGPDGHVLIPEMQSSLLQQHMELLESSVIPLMHPLADPSTVFKDGDEAEDFVEVHLPDVHKQVSGVDLGLPNWGKYVLMSAGVLIALMLTIFLMTCCRRVNRPDSTQRSLGMTGRKVSVTSQSGKVISSWESYKSGGETRL

SEQ ID NO: 30510 - protein, 524 aa, Artificial Sequence
  derived and/or modified protein sequence (wt) from glycoprotein__RABV__AB110657.1
MVPQALLFVPLLAFSFCFGKFPIYTIPDKLGPWSPIDIHHLSCPNNLVVEDEGCTNLSGFSYMELKVGYISAIKVNGFTCTGVVTEAETYTNFVGYVTTTFKRKHFRPTPDACRSAYNWKMAGDPRYEESLHNPYPDYHWLRTVKTTKESLVIISPSVADLDPYDKSLHSRVFPNGKCSGITVSSTYCSTNHDYTIWLPENPRLGTSCDIFTNSRGKRASKGGKTCGFVDERGLYKSLKGACKLKLCGVLGLRLMDGTWVAMQTSDETKWCPPDQLVNLHDFRSDEIEHLVVEELVKKREECLDALESIMTTKSVSFRRLSHLRKLVPGFGKAYTIFNKTLMEADAHYKSIRTWNEIIPSKGCLRVGGRCHPHVNGVFFNGIILGPDGHVLIPEMQSSLLQQHMELLESSVIPLMHPLADPSTVFKDGDEAEDFVEVHLPDVHKQVSGVDLGLPNWGKYVLMSAGVLIALMLTIFLMTCCRRVNRPDSTQRSLGMTGRKVSVTSQSGKVISSWESYKSGGETRL

SEQ ID NO: 30511 - protein, 524 aa, Artificial Sequence
  derived and/or modified protein sequence (wt) from glycoprotein__RABV__AB110658.1
MVPQALLFVPLLAFSFCFGKFPIYTIPDKLGPWSPIDIHHLSCPNNLVVEDEGCTNLSGFSYMELKVGYISAIKVNGFTCTGVVTEAETYTNFVGYVTTTFKRKHFRPTPDACRSAYNWKMAGDPRYEESLHNPYPDYHWLRTVKTTKESLVIISPSVADLDPYDKSLHSRVFPNGKCSGITVSSTYCSTNHDYTIWLPENPRLGTSCDIFTNSRGKRASKGSKTCGFVDERGLYKSLKGACKLKLCGVLGLRLMDGTWVAMQTSDETKWCSPDQLVNLHDFRSDEIEHLVVEELVKKREECLDALESIMTTKSVSFRRLSHLRKLVPGFGKAYTIFNKTLMEADAHYKSIRTWNEIIPSKGCLRVGGRCHPHVNGVFFNGIILGPDGHVLIPEMQSSLLQQHMELLESSVIPLMHPLADPSTVFKDGDEAEDFVEVHLPDVHKQVSGVDLGLPNWGKYVLMSAGVLIALMLTIFLMTCCRRVNRPDSTQRSLGMTGRKVSVTSQSGKVISSWESYKSGGETRL

SEQ ID NO: 30512 - protein, 524 aa, Artificial Sequence
  derived and/or modified protein sequence (wt) from glycoprotein__RABV__AB110659.1
MVPQALLFVPLLAFSFCFGKFPIYTIPDKLGPWSPIDIHHLSCPNNLVVEDEGCTNLSGFSYMELKVGYISAIKVNGFTCTGVVTEAETYTNFVGYVTTTFKRKHFRPTPDACRSAYNWKMAGDPRYEESLHNPYPDYHWLRTVKTTKESLVIISPSVADLDPYDKSLHSRVFPNGKCSGITVSSTYCSTNHDYTIWLPENPRLGTSCDIFTNSRGKRASKGSKTCGFVDERGLYKSLKGACKLKLCGVLGLRLMDGTWVAMQTSDETKWCPPDQLVNLHDFRSDEIEHLVVEELVKKREECLDALESIMTTKSVSFRRLSHLRKLVPGFGKAYTIFNKTLMEADAHYKSIRTWNEIIPSKGCLRVGGRCHPHVNGVFFYGIILGPDGHVLIPEMQSSLLQQHMELLESSVIPLMHPLADPSTVFKDGDEAEDFVEVHLPDVHKQVSGVDLGLPNWGKYVLMSAGVLIALMLTIFLMTCCRRVNRPDSTQRSLGMTGRKVSVTSQSGKVISSWESYKSGGETRL

SEQ ID NO: 30513 - protein, 524 aa, Artificial Sequence
  derived and/or modified protein sequence (wt) from glycoprotein__RABV__AB110660.1
MVPQALLFVPLLAFSFCFGKFPIYTIPDKLGPWSPIDIHHLSCPNNLVVEDEGCANLSGFSYMELKVGYISAIKVNGFTCTGVVTEAETYTNFVGYVTTTFKRKHFRPTPDACRSAYNWKMAGDPRYEESLHNPYPDYHWLRTVKTTKESLVIISPSVADLDPYDKSLHSRVFPNGKCSGITVSSTYCSTNHDYTIWLPENPRLGTSCDIFTNSRGKRASKGGKTCGFVDERGLYKSLKGACKLKLCGVLGLRLMDGTWVAMQTSDETKWCPPDQLVNLHDFRSDEIEHLVVEELVKKREECLDALESIMTTKSVSFRGLSHLRKLVPGFGKAYTIFNKTLMEADAHYKSIRTWNEIIPSKGCLTVGGRCHPHVNGVFFNGIILGPDGHVLIPEMQSSLLQQHMELLESSVIPLMHPLADPSTVFKDGDEAEDFVEVHLPDVHKQVSGVDLGLPNWGKYVLMSAGVLIALMLTIFLMTCCRRVNGPDSTQRSLGMTGRKVSVTSQSGKVISSWESYKSGGETRL

SEQ ID NO: 30514 - protein, 524 aa, Artificial Sequence
  derived and/or modified protein sequence (wt) from glycoprotein__RABV__AB110661.1
MVPQALLFVPLLAFSFCFGKFPIYTIPDKLGPWSPIDIHHLSCPNNLVVEDEGCTNLSGFSYMELKVGYISAIKVNGFTCTGVVTEAETYTNFVGYVTTTFKRKHFRPTPDACRSAYNWKMAGDPRYEESLHNPYPDYHWLRTVKTTKESLVIISPSVADLDPYDKSLHSRVFPNGKCSGITVSSTYCSTNHDYTIWLPENPRLGTSCDIFTNSRGKRASKGGKTCGFVDERGLYKSLKGACKLKLCGVLGLTLMDGTWVAMQTSDETKWCPPDQLVNLHDFRSDEIEHLVVEELVKKREECLDALESIMTTKSVSFRRLSHLRKLVPGFGKAYTIFNKTLMEADAHYKSIRTWNEIIPSKGCLRVGGRCHPHVNGVFFHGIILGPDGHVLIPEMQSSLLQQHMELLESSVIPLMHPLADPSTVFKDGDEAEDFVEVHLPDVHKQVSGVDLGLPNWGKYVLMSAGVLIALMLTIFLMTCCRRVNRPDSTQRSLGMTGRKVSVTSQSGKVISSWESYKSGGETRL

SEQ ID NO: 30515 - protein, 524 aa, Artificial Sequence
  derived and/or modified protein sequence (wt) from glycoprotein__RABV__AB110662.1
MILQALLFVPLLISSLCLGKFPIYTIPDKLGPWSPIDIHHLSCPNNLVVEDEGCTNLSGFSYMELKVGYISAIKVNGFTCTGVVTEAETYTNFVGYVTTTFKRKHFRPIPDACRAAYNWKMAGDPRYEESLQNPYPDYHWLRTVKTTKESLIIISPSVADLDPYDKSLHSRVFPGGKCLGITVSSTYCSTNHDYTIWMPEEPRLGTSCDIFTSSKGKKASKGGKTCGFVDERGLYKSLKGACKLKLCGVLGLRLMDGTWVSIPTSDDTKWCPPDQLVNLHDFHSDEIEHLVVEELVKKREECLDALESIMTTKSVSFRRLSYLRKLVPGFGKAYTIFNKTLMEADAHYKSVRTWNEIIPSKGCLKVRERCHPPVDGVFFNGIILGPDGNVLIPEMQSSLLQQHMELLESSVIPLMHPLADPSTVFKEGDEAEDFVEVHLPDVHKQISGVDLGLPSWGKYLLMIAGGLATLVLIICSMACCRRTKRTESRRRGSRESEKKVTATPQTRKVVSSWELYKSEGDARL

SEQ ID NO: 30516 - protein, 524 aa, Artificial Sequence
  derived and/or modified protein sequence (wt) from glycoprotein__RABV__AB110663.1
MILQALLFVPLLISSLCLGKFPIYTIPDKLGPWSPIDIHHLSCPNNLVVEDEGCTNLSGFSYMELKVGYISAIKVNGFTCTGVVTEAETYTNFVGYVTTTFKRKHFRPIPDACRAAYNWKMAGDPRYEESLQNPYPDYHWLRTVKTTKESLIIISPSVADLDPYDKSLHSRVFPGGKCLGITVSSTYCSTNHDYTIWMPEEPRLGTSCDIFTSSKGKKASKGGKTCGFVDERGLYKSLKGACKLKLCGVLGLRLMDGTWVSIQTSDDTKWCPPDQLVNLHDFHSDEIEHLVVEELVKKREECLDALESIMTTKSVSFRRLSYLRKLVPGFGKAYTIFNKTLMEADAHYKSVRTWNEIIPSKGCLKVRERCHPPVDGVFFNGIILGPDGNVLIPEMQSSLLQQHMELLESSVIPLMHPLADPSTVFKEGDEAEDFVEVHLPDVHKQISGVDLGLPSWGKYLLMIAGGLAALVLIICSMACCRRTKRTESRRRGSGESEKKVTATPQTRKVVSSWELYKSEGDARL

SEQ ID NO: 30517 - protein, 524 aa, Artificial Sequence
  derived and/or modified protein sequence (wt) from glycoprotein__RABV__AB110664.1
MILQALLFVPLLISSLCLGKFPIYTIPDKLGPWSPIDIHHLSCPNNLVVEDEGCTNLSGFSYMELKVGYISAIKVNGFTCTGVVTEAETYTNFVGYVTTTFKRKHFRPIPDACRAAYNWKMAGDPRYEESLQNPYPDYHWLRTVKTTKESLIIISPSVADLDPYDKSLHSRVFPGGKCLGITVSSTYCSTNHDYTIWMPEEPRLGTSCDIFTSSKGKKASKGGRTCGFVDERGLYKSLKGACKLKLCGVLGLRLMDGTWVSIQTSDDTKWCPPDQLVNLHDFHSDEIEHLVVEELVKKREECLDALESIMTTKSVSFRRLSYLRKLVPGFGKAYTIFNKTLMEADAHYKSVRTWNEIIPSKWCLKVRERCHPPVDGVFFNGIILGPDGNVLIPEMQSSLLQQHMELLESSVIPLMHPLADPSTVFKEGDEAEDFVEVHLPDVHKQISGVDLGLPSWGKYLLMIAGGLATLVLIICSMACCRRTKRTESRRRGSGESEKKVTATPQTRKVVSSWELYKSEGDARL

SEQ ID NO: 30518 - protein, 524 aa, Artificial Sequence
  derived and/or modified protein sequence (wt) from glycoprotein__RABV__AB110665.1
MILQALLFVPLLISSLCLGKFPIYTIPDKLGPWSPIDIHHLSCPNNLVVEDEGCTNLSGFSYMELKVGYISAIKVSGFTCTGVVTEAETYTNFVGYVTTTFKRKHFRPIPDACRAAYNWKMAGDPRYEESLHNPYPDYHWLRTVKTTKESLIIISPSVADLDPYDKSLHSRVFPGGKCLGITVSSTYCSTNHDYTIWMPEEPRLGTSCDIFTSSKGKKASKGGKTCGFVDERGLYKSLKGACKLKLCGVLGLRLMDGTWVSIQTSDNTKWCPPDQLVNLHDFHSDEIEHLVVEELVKKREECLDALESIMTTKSVSFRRLSYLRKLVPGFGKAYTIFNKTLMEADAHYKSVRTWNEIIPSKGCLKVRERCHPPVDGVFFNGIILGPDGNVLIPEMQSSLLQQHMELLESSVIPLMHPLADPSTVFKEGDEAEDFVEVHLPDVHKQISGVDLGLPSWGKYLLMIAGGLATLVLIICSMACCRRTKRTESRRRGSGESEKKVTVTPQTGKVVSSWELYKSEGDARL

SEQ ID NO: 30519 - protein, 524 aa, Artificial Sequence
  derived and/or modified protein sequence (wt) from glycoprotein__RABV__AB110666.1
MILQALLFVPFLISSLCLGKFPIYTIPDKLGPWSPIDIHHLSCPNNLVVEDEGCTNLSGFSYMELKVGYISAIKVNGFTCTGVVTEAETYTNFVGYVTTTFKRKHFRPIPDACRAAYNWKMAGDPRYEESLQNPYPDYHWLRTVKTTKESLIIISPSVADLDPYDKSLHSRVFPGGKCLGITVSSTYCSTNHDYTIWMPEEPRLGTSCDIFTSSKGKKASKGGKTCGFVDERGLYKSLKGACKLKLCGVLGLRLMDGTWVSIPTSDDTKWCPPDQLVNLHDFHSDEIEHLVVEELVKKREECLDALESIMTTKSVSFRRLSYLRKLVPGFGKAYTIFNKTLMEADAHYKSVRTWNEIIPSKGCLKVRERCHPPVDGVFFNGIILGPDGNVLIPEMQSSLLQQHMELLESSVIPLMHPLADPSTVFKEGDEAEDFVEVHLPDVHKQISGVDLGLPSWGKYLLMIAGGLATLVLIICSMACCRRTKRTESRRRGSGESGEKVTTTPQTRKVVSSWELYKSEGDARL

SEQ ID NO: 30520 - protein, 524 aa, Artificial Sequence
  derived and/or modified protein sequence (wt) from glycoprotein__RABV__AB110667.1
MILQALLFVPLLISSSCLGKFPIYTIPDKLGPWSPIDIHHLSCPNNLVVEDEGCTNLSGFSYMELKVGYISAIKVNGFTCTGVVTEAETYTNFVGYVTTTFKRKHFHPIPDACRAAYNWKMAGDPRYEESLQNPYPDYHWLRTVKTTKESLIIISPSVADLDPYDKSLHSRVFPGGKCLGITVSSTYCSTNHDYTIWMPEEPRLGTSCDIFTSSKGKKASKGGKTCGFVDERGLYKSLKGACKLKLCGVLGLRLMDGTWVSIQTSDDTKWCPPDQLVNLHDFHSDEIEHLVVEELVKKREECLDALESIMTTKSVSFRRLSYLRKLVPGFGKAYTIFNKTLMEADAHYKSVRTWNEIIPSKGCLKVRERCHPPVDGVFFNGIILGPDGNVLIPEMQSSLLQQHMELLESSVIPLMHPLADPSTVFKEGDEAEDFVEVHLPDVHKQISGVDLGLPSWGKYLLMIAGGLATLVLIICSMACCRRTKRTESRRRGSGESGKKATATPQTRKVVSSWELYKSEGDARL

SEQ ID NO: 30521 - protein, 524 aa, Artificial Sequence
  derived and/or modified protein sequence (wt) from glycoprotein__RABV__AB110668.1
MILQALLFVPLLISSLCLGKFPIYTIPDKLGPWSPIDIHHLSCPNNLVVEDEGCTNLSGFSYMELKVGYISAIKVNGFTCTGVVTEAETYTNFVGYVTTTFKRKHFRPIPDACRAAYNWKMAGDPRYEESLQNPYPDYHWLRTVKTTKESLIIISPSVADLDPYDKSLHSRVFPGGKCLGITVSSTYCSTNHDYTIWMPEEPRLGTSCDIFTSSKGKKASKGGKTCGFVDERGLYKSLKGACKLKLCGVLGLRLMDGTWVSIQTSDDTKWCPPDQLVNLHDFHSDEIEHLVVEELVKKREECLDALESIMTTKSVSFRRLSYLRKLVPGFGKAYTIFNKTLMEADAHYKSVRTWNEIIPSKGCLKVRERCHPPVDGVFFNGIILGPDGNVLIPEMQSSLLQQHMELLESSVIPLMHPLADPSTVFKEGDEAEDFVEVHLPDVHKQISGVDLGLPSWGKYLLMIAGGLAALVLIICSMACCRRTKRTGSRRRGSGESEKKVTATPQTRKVVSSWELYKSEGDARL

SEQ ID NO: 30522 - protein, 524 aa, Artificial Sequence
  derived and/or modified protein sequence (wt) from glycoprotein__RABV__AB110669.1
MILQALLFVPLLISSLCLGKFPIYTIPDKLGPWSPIDIHHLSCPNNLVVEDEGCTNLSGFSYMELKVGYISAIKVNGFTCTGVVTEAETYTNFVGYVTTTFKRKHFRPIPDACRAAYNWKMAGDPRYEESLQNPYPDYHWLRTVKTTKESLIIISPSVADLDPYDKSLHSRVFPGGKCLGITVSSTYCSTNHDYTIWMPEEPRLGTSCDIFTSSKGKKASKGGKTCGFVDERGLYKSLKGACKLKLCGVLGLRLMDGTWVSIQHPDDTKWCPPDQLVNLPDFPSDEIEHLVLEELVKKREECLDALESIMTTKSVSFRRLSYLRKLVPGFGKAYTIFNKTLMEADAHYKSVRTWNEIIPSKGCLKVRERCHPPVDEVFFNGIILGPDGNVLIPEMQSSLLQQHMELLESSVIPLMHPLADPSTVFKEGDEAEDFVEVHLPDVHKQISGVDLGLPSWGKYLLMIAGGLAALVLIICSMACCRRTKRTESRRRGSGESEKKVTATPQNRKVVSSWELYKSEGDARL

SEQ ID NO: 30523 - protein, 524 aa, Artificial Sequence
  derived and/or modified protein sequence (wt) from glycoprotein__RABV__AB128149.1
MVPQALLLVPILGFSSCFGKFPIYTIPDTLGPWSPIDIHHLSCPNNLVVEDEGCTNLSGFSYMELKVGRISAIKVNGFTCTGVVTEAETYTNFVGYVTTTFKRKHFRPTPDACRAAYNWKMAGDPRYEESLHSPYPDYHWLRTVKTTKESLVIISPSVADLDPYDNSLHSRVFPSGKCSGITVSSVYCSTNHDYTVWMPEILRLGTSCDIFTNSRGKRASKGSKTCGFVDERGLYKSLKGACKLKLCGVLGLRLMDGTWVAMQTSNETKWCPPDQLVNLHDLRSDEIEHLVIEELVKKREECLDALESIITTKSVSFRRLSYLRKLVPGFGKAYTIFNKTLMEAEAHYKSVRTWNEIIPSKGCLRVGGRCHPHVNGVFFNGIILGPDGHVLIPEMQSSLLQQHIELLESSVIPLMHPLADPFTVFKDGDETEDFIEVHLPDVHEQVSGVDLGLPNWGEYVLLSAGTLIALMLIIFLMTCCRKVDRPESTQRSLRGTGRNVSVTSQSGKFIPSWESYKSGGETGL

SEQ ID NO: 30524 - protein, 524 aa, Artificial Sequence
  derived and/or modified protein sequence (wt) from glycoprotein__RABV__AB285215.1
MVPQALLFAPLLVFSLCFGKFPIYTIPDKLGPWSPIDIHHLSCPNNLVVEDEGCTNLSGFSYMELKVGYISAIKVNGFTCTGVVTEAETYTNFVGYVTTTFKRKHFRPIPDACRAAYNWKMAGDPRYEESLHNPYPDYHWLRTVKTTKESLVIISPSVADLDPYDKSLHSRVFPSGKCSGITVSSTYCSTNHDYTIWMPENPRLGTSCDIFTNSRGKRASKGGKTCGFVDERGLYKSLKGACKLKLCGVLGLRLMDGTWVAMQTSDETKWCPPDQLVNMHDFRSDEIEHLVVEELVKKREECLDALESIMTTKSVSFRRLSHLRKLVPGFGKAYTIFNKTLMEADAHYKSVRTWNEIIPSKGCLRVGGRCHPHVNGVFFNGIILGPDGHVLIPEMQSSLLQQHMELLESSVIPLMHPLADPSTVFKDGDEAEDFVEVHLPDVHKQVSGVDLGLPNWGKYVLLSAGTLIALMLIIFLMTCCRRVNRPESTQRSLGGTGRKVSVTSQSGKVISSWESYKSGGETRL

SEQ ID NO: 30525 - protein, 524 aa, Artificial Sequence
  derived and/or modified protein sequence (wt) from glycoprotein__RABV__AB362483.1
MVPQALLFVPLLVFSLCFGKFPIYTIPDKLGPWSPIDIHHLSCPNNLVVEDEGCTNLSGFSYMELKVGYISAIKVNGFTCTGVVTEAETYTNFVGYVTTTFKRKHFRPTPDACRAAYNWKMAGDPRYEESLHNPYPDYHWLRTVKTTKESLVIISPSVADLDPYDKSLHSRVFPSGKCSGITVSSTYCSTNHDYTIWMPENPRLGTSCDIFTNSRGKRASKGSKTCGFVDERGLYKSLKGACKLKLCGVLGLRLVDGTWIAMQTSDEIKWCPPDQLVNLHDFRSDEIEHLVVEELVKKREECLDALESIVTTKSVSFRRLSHLRKLVPGFGKAYTIFNKTLMEADAHYKSIRTWNEIIPSKGCLRVGGRCHPHVNGVFFNGIILGPDGHVLIPEMQSSLLQQHMELLESSVVPLMHPLADPSTVFKDGDEAEDFIEVHLPDVHKQVSGVDLGLPDWGKYVLMSAGVLIALMLIISLMTCCRGVHRPNSIQHRLGGTGRKVSVTSQSGKVISSWESYKSGGETRL

SEQ ID NO: 30526 - protein, 524 aa, Artificial Sequence
  derived and/or modified protein sequence (wt) from glycoprotein__RABV__AB458799.1
MVPQVLLFVPLLVFSSCFGKFPIYTIPDKLGPWSPIDIHHLSCPNNLVVEDEGCTNLSGFSYMELKVGYISAIKVNGFTCTGVVTEAETYTNFVGYVTTTFKRKHFRPMPDACRAAYNWKMAGDPRYEESLHNPYPDYHWLRTVKTTKESLVIISPSVADLDPYDKSLHSRVFPGGKCSGITVSSTCCSTNHDYTIWMPENPRLGTSCDIFTNSRGKRASKGGKTCGFVDERGLYKSLKGACKLKLCGVLGLRLMDGTWVAIQTSDEIKWCSPDQLVNLHDFHSDEIEHLVVEELVKKREECLDALETIMTTKSVSFRRLSHLRKLVPGFGKAYTIFNKTLMEADAHYKSIRTWNEIIPSKGCLRVGGRCHPHVNGVFFNGIILGPDGHVLIPEMQSSLLHQHMELLESSVIPLMHPLADPSTVFKDGDEAEDFVEVHLPDVHKQISGVDLGLPNWGKYVLISAGALTALMLMIFLMTCCRKANRAESIQHNPGETGRKVSVTSHNGRVISSWESYKSGGETKL

SEQ ID NO: 30527 - protein, 524 aa, Artificial Sequence
  derived and/or modified protein sequence (wt) from glycoprotein__RABV__AB458800.1
MVPQALLFVPLLAIPLCFGKFPIYTIPDKLGPWSPIDIHHLSCPNNLVVEDEGCTNLSGFSYMELKVGYISAIKVNGFTCTGVVTEAETYTNFVGYVTTTFKRKHFRPTPDACRSAYNWKMAGDPRYEESLHNPYPDYHWLRTVKTTKESFVIISPSVADLDPYDKSLHSRVFPRGKCSGITVSSTYCSTNHDYTIWMPENPRLGTSCDIFTNSRGKRASKGSKTCGFVDERGLYKSLKGACKLKLCGVLGLRLMDGTWVAIQTSDETKWCPPDQLVNLHDFHSDEIEHLVVEELVKKREECLDALESIMTTKSVSFRRLSHLRKLVPGFGKAYTIFNKTLMEADAHYKSVRTWNEIIPSKGCLRVGGRCHPHVNGVFFNGIILGPDGHVLIPEMQSSLLQQHMELLESSVIPLMHPLADPSTVFKDGDEAEDFVEVHLPDVHKQVSGVDLGLPSWGKYVLMSAGILTALMLMIFLMTCCRRTNRAESIQHSLGETGRKVSVTSQSGRVISSWESYKSGGETKL

SEQ ID NO: 30528 - protein, 524 aa, Artificial Sequence; identical to SEQ ID NO: 30527
  derived and/or modified protein sequence (wt) from glycoprotein__RABV__AB458801.1

SEQ ID NO: 30529 - protein, 524 aa, Artificial Sequence; identical to SEQ ID NO: 30527
  derived and/or modified protein sequence (wt) from glycoprotein__RABV__AB458802.1

SEQ ID NO: 30530 - protein, 524 aa, Artificial Sequence; identical to SEQ ID NO: 30526
  derived and/or modified protein sequence (wt) from glycoprotein__RABV__AB458803.1

SEQ ID NO: 30531 - protein, 524 aa, Artificial Sequence
  derived and/or modified protein sequence (wt) from glycoprotein__RABV__AB458804.1
MIPQVLLFVPLLVFSSCFGKFPIYTIPDKLGPWSPIDIHHLSCPNNLVVEDEGCTNLSGFSYMELKVGYISAIKVNGFTCTGVVTEAETYTNFVGYVTTTFKRKHFRPMPDACRAAYNWKMAGDPRYEESLHNPYPDYHWLRTVKTTKESLVIISPSVADLDPYDKSLHSRVFPGGKCSGITVSSTCCSTNHDYTIWMPENPRLGTSCDIFTNSRGKRASKGGKTCGFVDERGLYKSLKGACKLKLCGVLGLRLMDGTWVAIQTSDEIKWCSPDQLVNLHDFHSDEIEHLVVEELVKKREECLDALETIMTTKSVSFRRLSHLRKLVPGFGKAYTIFNKTLMEADAHYKSIRTWNEIIPSKGCLRVGGRCHPHVNGVFFNGIILGPDGHVLIPEMQSSLLHQHMELLESSVIPLMHPLADPSTVFKDGDEAEDFVEVHLPDVHKQISGVDLGLPNWGKYVLTSAGALTALMLMIFLMTCCRKTNRAESIQRSPGETERKVSVTSHNGRVISSWESYKSGGETKL

SEQ ID NO: 30532 - protein, 524 aa, Artificial Sequence
  derived and/or modified protein sequence (wt) from glycoprotein__RABV__AB458805.1
MVPQVLLFVPLLVFSSCFGKFPIYTIPDKLGPWSPIDIHHLSCPNNLVVEDEGCTNLSGFSYMELKVGYISAIKVNGFTCTGVVTEAETYTNFVGYVTTTFKRKHFRPTPDACRAAYNWKMAGDPRYEESLHNPYPDYHWLRTVKTTKESLVIISPSVADLDPYDKSLHSRVFPGGKCSGITVSSTCCSTNHDYTIWMPENPRLGTSCDIFTNSRGKRASKGGKTCGFVDERGLYKSLKGACKLKLCGVLGLRLMDGTWVAIQTSDEIKWCSPDQLVNLHDFHSDEIEHLVVEELVKKREECLDALETIMTTKSVSFRRLSHLRKLVPGFGKAYTIFNKTLMEADAHYKSIRTWNEIIPSKGCLRVGGRCHPHVNGVFFNGIILGPDGHVLIPEMQSSLLHQHMELLESSVIPLMHPLADPSTVFKDGDEAEDFVEVHLPDVHKQISGVDLGLPNWGKYVLISAGALTALMLMIFLMTFCRKANRAESIQHNPGETGRKVSVTSHNGRVISSWESYKSGGETKL

SEQ ID NO: 30533 - protein, 524 aa, Artificial Sequence; identical to SEQ ID NO: 30527
  derived and/or modified protein sequence (wt) from glycoprotein__RABV__AB458806.1

SEQ ID NO: 30534 - protein, 524 aa, Artificial Sequence
  derived and/or modified protein sequence (wt) from glycoprotein__RABV__AB496676.1
MILQALLFVPLLISSLCLGKFPIYTIPDKLGPWSPIDIHHLSCPNNLVVEDEGCTNLSGFSYMELKVGYISAIKVNGFTCTGVVTEAETYTNFVGYVTTTFKRKHFRPVPDACRAAYNWKMAGDPRYEESLQNPYPDYHWLRTVKTTKESLIIISPSVADLDPYDKSLHSRVFPGGKCLGITVSSTYCSTNHDYTIWMPEEPRLGTSCDIFTSSKGKKASKGGKTCGFVDERGLYKSLKGACKLKLCGVLGLRLMDGTWVSIQTSDDTKWCPPDQLVNLHDFHSDEIEHLVVEELVKKREECLDALESIMTTKSVSFRRLSYLRKLVPGFGKAYTIFNKTLMEADAHYKSVRTWNEIIPSKGCLKVRERCHPPVDGVFFNGIILGPDGNVLIPEMQSSLLQQHMELLESSVIPLMHPLADPSTVFKEGDEAEDFVEVHLPDVHKQISGVDLGLPSWGKYLLMIAGGLAALVLIICSMACCRRTKRTESRRRGSGESEKKVAATPQTRKVISSWELYKSEGDARL

SEQ ID NO: 30535 - protein, 524 aa, Artificial Sequence
  derived and/or modified protein sequence (wt) from glycoprotein__RABV__AB496677.1
MILQALLFVPLLISSLCLGKFPIYTIPDKLGPWSPIDIHHLSCPNNLVVEDEGCTNLSGFSYMELKVGYISAIKVNGFTCTGVVTEAETYTNFVGYVTTTFKRKHFRPVPDACRAAYNWKITGDPRYEESLQNPYPDYHWLRTVKTTKESLIIISPSVADLDPYDKSLHSRVFPGGKCLGITVSSTYCSTNHDYTIWMPEEPRLGTSCDIFTSSKGKKASKGGKTCGFVDERGLYKSLKGACKLKLCGVLGLRLMDGTWVSIQTSDDTKWCPPDQLVNLHDFHSDEIEHLVVEELVKKREECLDALESIMTTKSVSFRRLSYLRKLVPGFGKAYTIFNKTLMEADAHYKSVRTWNEIIPSKGCLKVRERCHPPVDGVFFNGIILGPDGNVLIPEMQSSLLQQHMELLESSVIPLMHPLADPSTVFKEGDEAEDFVEVHLPDVHKQISGVDLGLPSWGKYLLMIAGGLAALVLIICSMACCRRTKRTESRRRGSGESEKKVTATPQTRKVVSSWELYKSEGDARL

SEQ ID NO: 30536 - protein, 524 aa, Artificial Sequence
  derived and/or modified protein sequence (wt) from glycoprotein__RABV__AB496678.1
MILQALLFVPLLISSLCLGKFPIYTIPDKLGPWSPIDIHHLSCPNNLVVEDEGCTNLSGFSYMELKVGYISAIKVNGFTCTGVVTEAETYTNFVGYVTTTFKRKHFRPMPDACRAAYNWKMTGDPRYEESLQNPYPDYHWLRTVKTTKESLIIISPSVADLDPYDKSLHSRVFPGGKCLGITVSSTYCSTNHDYTIWMPEEPRLGTSCDIFTSSKGKKASKGGKTCGFVDERGLYKSLKGACKLKLCGVLGLRLMDGTWVSIQTSDDTKWCPPDQLVNLHDFHSDEIEHLVVEELVKKREECLDALESIMTTKSVSFRRLSYLRKLVPGFGKAYTIFNKTLMEADAHYKSVRTWNEIIPSKGCLKVRERCHPPVDGVFFNGIILGPDGNVLIPEMQSSLLQQHMELLESSVIPLMHPLADPSTVFKEGDEAEDFVEVHLPDVHKQISGVDLGLPSWGKYLLMIAGGLAALVLIICSMACCRRTKRTESRRRGSGESEKKVTATPQTRKVVSSWELYKSEGDARL

SEQ ID NO: 30537 - protein, 524 aa, Artificial Sequence
  derived and/or modified protein sequence (wt) from glycoprotein__RABV__AB496679.1
MILQALLFVPLLISSLCLGKFPIYTIPDKLGPWSPIDIHHLSCPNNLVVEDEGCTNLSGFSYMELKVGYISAIKVNGFTCTGVVTEAETYTNFVGYVTTTFKRKHFRPIPDACRAAYNWKMAGDPRYEESLQNPYPDYHWLRTVKTTKESLIIISPSVADLDPYDKSLHSRVFPGGKCLGITVSSTYCSTNHDYTIWMPEEPRLGTSCDIFTSSKGKKASKGGKTCGFVDERGLYKSLKGACKLKLCGVLGLRLMDGTWVSIQTSDDTKWCPPDQLVNLHDFHSDEIEHLVVEELVKKREECLDALESIMTTKSVSFRRLSYLRKLVPGFGKAYTIFNKTLMEADAHYKSVRTWNEIIPSKGCLKVRERCHPPVDGVFFNGIILGPDGNVLIPEMQSSLLQQHMELLESSVIPLMHPLADPSTVFKEGDEAEDFVEVHLPDVHKQISGVDLGLPSWGKYLLMIAGGLAALVLIICSMACCRRTKQTESRRRGSGESEKKVTATPQTKKVVSSWELYKSEGDARL

SEQ ID NO: 30538 - protein, 524 aa, Artificial Sequence
  derived and/or modified protein sequence (wt) from glycoprotein__RABV__AB496680.1
MILPALLFVPLLISSLCLGKFPIYTIPDKLGPWSPIDIHHLSCPNNLVVEDEGCTNLSGFSYMELKVGYISAIKVNGFTCTGVVTEAETYTNFVGYVTTTFKRKHFRPIPDACRAAYNWKMAGDPRYEESLQNPYPDYHWLRTVKTTKESLIIISPSVADLDPYDKSLHSRVFPGGKCLGITVSSTYCSTNHDYTIWMPEEPRLGTSCDIFTSSKGKKASKGGKTCGFVDERGLYKSLKGACKLKLCGVLGLRLMDGTWVSIQTSDDTKWCPPDQLVNLHDFHSDEIEHLVVEELVKKREECLDALESIMTTKSVSFRRLSYLRKLVPGFGKAYTIFNKTLMEADAHYKSVRTWNEIIPSKGCLKVRERCHPPVDGVFFNGIILGPDGNVLIPEMQSSLLQQHMELLESSVIPLMHPLADPSTVFKEGDEAEDFVEVHLPDVHKQISGVDLGLPSWGKYLLMIAGGLATLVLIICSMACCRRTKRTESRRRGSGESEKKVTATPQTRKVVSSWELYKSEGDARL

SEQ ID NO: 30539 - protein, 524 aa, Artificial Sequence
  derived and/or modified protein sequence (wt) from glycoprotein__RABV__AB496681.1
MILQALLFVPLLISSLCLGKFPIYTIPDKLGPWSPIDIHHLSCPNNLVVEDEGCTNLSGFSYMELKVGYISAIKVNGFTCTGVVTEAETYTNFVGYVTTTFKRKHFRPIPDACRAAYNWKMAGDPRYEESLQNPYPEYHWLRTVKTTKESLIIISPSVADLDPYDKSLHSRVFPGGKCLGITVSSTYCSTNHDYTIWMPEEPRLGTSCDIFTSSKGKKASKGGKTCGFVDERGLYKSLKGACKLKLCGVLGLRLMDGTWVSIQTSDDTKWCPPDQLVNLHDFHSDEIEHLVVEELVKKREECLDALESIMTTKSVSFRRLSYLRKLVPGFGKAYTIFNKTLMEADAHYKSVRTWNEIIPSKGCLKVRERCHPPVDGVFFNGIILGPDGNVLIPEMQSSLLQQHMELLESSVIPLMHPLADPSTVFKEGDEAEDFVEVHLPDVHKQISGVDLGLPSWGKYLLMIAGGLATLVLIICSMACCRRTKRTESRRRGSGESEKNVTATPQTRKVVSSWELYKSEGDARL

SEQ ID NO: 30540 - protein, 524 aa, Artificial Sequence
  derived and/or modified protein sequence (wt) from glycoprotein__RABV__AB496682.1
MILQALLFVPLLISSSCLGKFPIYTIPDKLGPWSPIDIHHLSCPNNLVVEDEGCTNLSGFSYMELKVGYISAIKVNGFTCTGVVTEAETYTNFVGYVTTTFKRKHFRPIPDACRAAYNWKMAGDPRYEESLQNPYPDYHWLRTVKTTKESLIIISPSVADLDPYDKSLHSRVFPGGKCLGITVSSTYCSTNHDYTIWMPEEPRLGTSCDIFTSSKGKKASKGGKTCGFVDERGLYKSLKGACKLKLCGVLGLRLMDGTWVSIQTSDDTKWCPPDQLVNLHDFHSDEIEHLVVEELVKKREECLDALESIMTTKSVSFRRLSYLRKLVPGFGKAYTIFNKTLMEADAHYKSVRTWNEIIPSKGCLKVRERCHPPVDGVFFNGIILGPDGNVLIPEMQSSLLQQHMELLESSVIPLMHPLADPSTVFKEGDEAEDFVEVHLPDVHKQISGVDLGLPSWGKYLLMIAGGLATLVLIICSVACCRRTKRTESRRRGSGESGKKVTTTPQTRKVVSSWELYKSEGDARL

SEQ ID NO: 30541 - protein, 524 aa, Artificial Sequence
  derived and/or modified protein sequence (wt) from glycoprotein__RABV__AB496683.1
MILQALLFVPLLISSLCLGKFPIYTIPDKLGPWSPIDIHHLSCPNNLVVEDEGCTNLSGFSYMELKVGYISAIKVNGFTCTGVVTEAETYTNFVGYVTTTFKRKHFRPVPDACRAAYNWKMAGDPRYEESLQNPYPDYHWLRTVKTTKESLIIISPSVADLDPYDKSLHSRVFPGGKCLGITVSSTYCSTNHDYTIWMPEEPRLGTSCDIFTSSKGKKASKGGKTCGFVDERGLYKSLKGACKLKLCGVLGLRLMDGTWVSIQTSDDTKWCPPDQLVNLHDFHSDEIEHLVVEELVKKREECLDALESIMTTKSVSFRRLSYLRKLVPGFGKAYTIFNKTLMEADAHYKSVRTWNEIIPSKGCLKVRERCHPPVDGVFFNGIILGPDGNVLIPEMQSSLLQQHMELLESSVIPLMHPLADPSTVFKEGDEAEDFVEVHLPDVHKQISGVDLGLPSWGKYLLMIAGGLAALVLIICSMACCRRTKRTESRRRGSGESEKKVTATPQTRKVVSSWELYKSEGDARL

SEQ ID NO: 30542 - protein, 524 aa, Artificial Sequence
  derived and/or modified protein sequence (wt) from glycoprotein__RABV__AB496684.1
MILQALLFVPLLISSLCLGKFPIYTIPDKLGPWSPIDIHHLSCPNNLVVEDEGCTNLSGFSYMELKVGYISAIKVNGFTCTGVVTEAETYTNFVGYVTTTFKRKHFRPIPDACRAAYNWKMAGDPRYEESLQNPYPDYHWLRTVKTTKESLIIISPSVADLDPYDKSLHSRVFPGGKCLGITVSSTYCSTNHDYTIWMPEEPRLGTSCDIFTSSKGKKASKGGKTCGFVDERGLYKSLKGACKLKLCGVLGLRLMDGTWVSIQTSDDTKWCPPDQLVNLHDFHSDEIEHLVVEELVKKREECLDALESIMTTKSVSFRRLSYLRKLVPGFGKAYTIFNKTLMEADAHYKSVRTWNEIIPSKGCLKVRERCHPPVDGVFFNGIILGPDGNVLIPEMQSSLLQQHMELLESSVIPLMHPLADPSTVFKEGDEAEDFVEVHLPDVHKQISGVDLGLPSWGKYLLMIAGGLAALVLIICSMACCRRTKRTESRRRGSGESEKKVTAAPQTRKVVSSWELYKSEGDARL

SEQ ID NO: 30543 - protein, 524 aa, Artificial Sequence
  derived and/or modified protein sequence (wt) from glycoprotein__RABV__AB496685.1
MILQALLFVPLLISSLCLGKFPIYTIPDKLGPWSPIDIHHLSCPNNLVVEDEGCTNLSGFSYMELKVGYISAIKVNGFTCTGVVTEAETYTNFVGYVTTTFKRKHFRPIPDACRAAYNWKMAGDPRYEESLQNPYPDYHWLRTVKTTKESLIIISPSVADLDPYDKSLHSRVFPGGKCLGITVSSTYCSTNHDYTIWMPEEPRLETSCDIFTSSKGKKASKGGKTCGFVDERGLYKSLKGACKLKLCGVLGLRLMDGTWVSIQTSDDTKWCPPDQLVNLHDFHSDEIEHLVVEELVKKREECLDALESIMTTKSVSFRRLSYLRKLVPGFGKAYTIFNKTLMEADAHYKSVRTWNEIIPSKGCLKVRERCHPPVDGVFFNGIILGPDGNVLIPEMQSSLLQQHMELLESSVIPLMHPLADPSTVFKEGDEAEDFVEVHLPDVHKQISGVDLGLPSWGKYLLMIAGGLATLVLIICSMACCRRAKRTESRRRGSRESEKKVTAAPQTRKVVSSWELYKSEGDARL

SEQ ID NO: 30544 - protein, 524 aa, Artificial Sequence; identical to SEQ ID NO: 30516
  derived and/or modified protein sequence (wt) from glycoprotein__RABV__AB496686.1

SEQ ID NO: 30545 - protein, 524 aa, Artificial Sequence
  derived and/or modified protein sequence (wt) from glycoprotein__RABV__AB496687.1
MILQALLFVPLLISSLCLGKFPIYTIPDKLGPWSPIDIHHLSCPNNLVVEDEGCTNLSGFSYMELKVGYISAIKVNGFTCTGVVTEAETYTNFVGYVTTTFKRKHFRPVPDACRAAYNWKMAGDPRYEESLQNPYPDYHWLRTVKTTKESLIIISPSVADLDPYDKSLHSRVFPGGKCLGITVSSTYCSTNHDYTIWMPEEPRLGTSCDIFTSSKGKKASKGGKTCGFVDERGLYKSLKGACKLKLCGVLGLRLMDGTWVSIQTSDDTKWCPPDQLVNLHDFHSDEIEHLVVEELVKKREECLDALESIMTTKSVSFRRLSYLRKLVPGFGKAYTIFNKTLMEADAHYKSVRTWNEIIPSKGCLKVRERCHPPVDGVFFNGIILGPDGNVLIPEMQSSLLQQHMELLESSVIPLMHPLADPSTVFKEGDEAEDFVEVHLPDVHKQISGVDLGLPSWGKYLLMIAGGLAALVLIICSMACCRRTKRTESRRRGSGESEKKVTATPQTRKVISSWELYKSEGDARL

SEQ ID NO: 30546 - protein, 524 aa, Artificial Sequence
  derived and/or modified protein sequence (wt) from glycoprotein__RABV__AB496689.1
MILQALRFVPLLISSLCLGKFPIYTIPDKLGPWSPIDIHHLSCPNNLVVEDEGCTNLSGFSYMELKVGYISAIKVNGFTCTGVVTEAETYTNFVGYVTTTFKRKHFRPIPDACRAAYNWKMAGDPRYEESLQNPYPDYHWLRTVKTTKESLIIISPSVADLDPYDKSLHSRVFPGGKCLGITVSSTYCSTNHDYTIWMPEEPRLGTSCDIFTSSKGKKASKGGKTCGFVDERGLYKSLKGACKLKLCGVLGLRLMDGTWVSIQTSDDTKWCPPDQLVNLHDFHSDEIEHLVVEELVKKREECLDALESIMTTKSVSFRRLSYLRKLVPGFGKAYTIFNKTLMEADAHYKSVRTWNEIIPSKGCLKVRERCHPPVDGVFFNGIILGPDGNVLIPEMQSSLLQQHMELLESSVIPLMHPLADPSTVFKEGDEAEDFVEVHLPDVHKQISGVDLGLPSWGKYLLMIAGGLAALVLIICSMACCRRTKRTESRRRGSGESEKKVTATPQTRKVVSSWELYKSEGDARL

SEQ ID NO: 30547 - protein, 524 aa, Artificial Sequence
  derived and/or modified protein sequence (wt) from glycoprotein__RABV__AB496690.1
MILQALLFVPLLISSLCLGKFPIYTIPDKLGPWSPIDIHHLSCPNNLVVEDEGCTNLSGFSYMELKVGYISAIKVNGFTCTGVVTEAETYTNFVGYVTTTFKRKHFRPIPDACRAAYNWKMAGDPRYEESLQNPYPDYHWLRTVKTTKESLIIISPSVADLDPYDKSLHSRVFPGGKCLGITVSSTYCSTNHDYTIWMPEEPRLGTSCDIFTSSKGKKASKGGKTCGFVDERGLYKSLKGACKLKLCGVLGLRLMDGTWVSIQTSDDTKWCPPDQLVNLHDFHSDEIEHLVVEELVKKREECLDALESIMTTKSVSFRRLSYLRKLVPGFGKAYTIFNKTLMEADAHYKSVRTWNEIIPSKGCLKVRERCHPPVDGVFFNGIILGPDGNVLIPEMQSSLLQQHMELLESSVIPLMHPLADPSTVFKEGDEAEDFVEVHLPDVHKQISGVDLGLPSWGKYLLMIAGGLAALVLIICSMACCRRTKRTESRRRGSGESEKKVTATPQTRKVISSWELYKSEGDARL

SEQ ID NO: 30548 - protein, 524 aa, Artificial Sequence
  derived and/or modified protein sequence (wt) from glycoprotein__RABV__AB496691.1
MILQALLFVPLLISSLCLGKFPIYTIPDKLGPWSPIDIHHLSCPNNLVVEDEGCTNLSGFSYMELKVGYISAIKVNGFTCTGVVTEAETYTNFVGYVTTTFKRKHFRPIPDACRAAYNWKMAGDPRYEESLQNPYPDYHWLRTVKTTKESLIIISPSVADLDPYDKSLHSRVFPGGKCLGITVSSTYCSTNHDYTIWMPEEPRLGTSCDIFISSKGKKASKGGKTCGFVDERGLYKSLKGACKLKLCGVLGLRLMDGTWVSIQTSDDTKWCPPDQLVNLHDFHSDEIEHLVVEELVKKREECLDALESIMTTKSVSFRRLSYLRKLVPGFGKAYTIFNKTLMEADAHYKSVRTWNEIIPSKGCLKVRERCHPPVDGVFFNGIILGPDGNVLIPEMQSSLLQQHMELLESSVIPLMHPLADPSTVFKEGDEAEDFVEVHLPDVHKQISGVDLGLPSWGKYLLMIAGGLATLVLIICSMACCRRTKRTESRRRGSRESEKKVTAAPQTRKVVSSWELYKSEGDARL

SEQ ID NO: 30549 - protein, 524 aa, Artificial Sequence; identical to SEQ ID NO: 30542
  derived and/or modified protein sequence (wt) from glycoprotein__RABV__AB496692.1

SEQ ID NO: 30550 - protein, 524 aa, Artificial Sequence; identical to SEQ ID NO: 30516
  derived and/or modified protein sequence (wt) from glycoprotein__RABV__AB496694.1

SEQ ID NO: 30551 - protein, 524 aa, Artificial Sequence; identical to SEQ ID NO: 30516
  derived and/or modified protein sequence (wt) from glycoprotein__RABV__AB496695.1

SEQ ID NO: 30552 - protein, 524 aa, Artificial Sequence; identical to SEQ ID NO: 30546
  derived and/or modified protein sequence (wt) from glycoprotein__RABV__AB496696.1

SEQ ID NO: 30553 - protein, 524 aa, Artificial Sequence
  derived and/or modified protein sequence (wt) from glycoprotein__RABV__AB496697.1
MILQALRFVPLLISSLCLGKFPIYTIPDKLGPWSPIDIHHLSCPNNLVVEDEGCTNLSGFSYMELKVGYISAIKVNGFTCTGVVTEAETYTNFVGYVTTTFKRKHFRPIPDACRAAYNWKMAGDPRYEESLQNPYPDYHWLRTVKTTKESLIIISPSVADLDPYDKSLHSRVFPGGKCLGITVSSTYCSTNHDYTIWMPEEPRLGTSCDIFTSSKGKKASKGGKTCGFVDERGLYKSLKGACKLKLCGVLGLRLMDGTWVSIQTSDDTKWCPPDQLVNLHDFHSDEIEHLVVEELVKKREECLDALESIMTTKSVSFRRLSYLRKLVPGFGKAYTIFNKTLMEADAHYKSVRTWNEIIPSKGCLKVRERCHPPVDGVFFNGIILGPDGNVLIPEMQSSLLQQHMELLESSVIPLMHPLADPSTVFKEGDEAEDFVEVHLPDVHKQISGVDLGLPSWGKYLLMIAGGLAALVLIICSMACCRRTKRTESRRRGSGESEKKVTVTPQTRKVVSSWELYKSEGDARL

SEQ ID NO: 30554 - protein, 524 aa, Artificial Sequence
  derived and/or modified protein sequence (wt) from glycoprotein__RABV__AB496698.1
MILQAILFVPLLISSLCLGKFPIYTIPDKLGPWSPIDIHHLSCPNNLVVEDEGCTNLSGFSYMELKVGYISAIKVNGFTCTGVVTEAVTYTNFVGYVTTTFKRKHFRPVPDACRTAYNWKMAGDPRYEESLQNPYPDYHWLRTVKTTKESLIIISPSVADLDPYDKSLHSRVFPGGKCLGITVSSTYCSTNHDYTIWMPEEPRLGTSCDIFTSSKGKKASKGGKTCGFVDERGLYKSLKGACKLKLCGVLGLRLMDGTWVSIQTSDDTKWCPPDQLVNLHDFHSDEIEHLVVEELVKKREECLDALESIMTTKSVSFRRLSYLRKLVPGFGKAYTIFNKTLMEADAHYKSVRTWNEIIPSKGCLKVRERCHPPVDGVFFNGIILGPDGNVLIPEMQSSLLQQHMELLESSVIPLMHPLADPSTVFKEGDEAEDFVEVHLPDVHKQISGVDLGLPSWGKYLLMIAGGLATLVLIICSMACCRRTKRTESRRRGSGESGKKVTATPQTRKVVSSWELYKSEGDARL

SEQ ID NO: 30555 - protein, 524 aa, Artificial Sequence
  derived and/or modified protein sequence (wt) from glycoprotein__RABV__AB496699.1
MILQAILFVPLLISSLCLGKFPIYTIPDKLGPWSPIDIHHLSCPNNLVVEDEGCTNLSGFSYMELKVGYISAIKVNGFTCTGVVTEAETYTNFVGYVTTTFKRKHFRPVPDACRTAYNWKMAGDPRYEESLQNPYPDYHWLRTVKTTKESLIIISPSVADLDPYDKSLHSRVFPGGKCLGITVSSTYCSTNHDYTIWMPEEPRLGTSCDIFTSSKGKKASKGGKTCGFVDERGLYKSLKGACKLKLCGVLGLRLMDGTWVSIQTSDDTKWCPPDQLVNLHDFHSDEIEHLVVEELVKKREECLDALESIMTTKSVSFRRLSYLRKLVPGFGKAYTIFNKTLMEADAHYKSVRTWNEIIPSKGCLKVRERCHPPVDGVFFNGIILGPDGNVLIPEMQSSLLQQHMELLESSVIPLMHPLADPSTVFKEGDEAEDFVEVHLPDVHKQISGVDLGLPSWGRYLLMIAGGLATLVLIICSMACCRRTKRTESRRRGSGESGKKVTATPQTRKVVSSWELYKSEGDARL

SEQ ID NO: 30556 - protein, 524 aa, Artificial Sequence
  derived and/or modified protein sequence (wt) from glycoprotein__RABV__AB496701.1
MILQAILFVPLLISSLCLGKFPIYTIPDKLGPWSPIDIHHLSCPNNLVVEDEGCTNLSGFSYMELKVGYISAIKVNGFTCTGVVTEAETYTNFVGYVTTTFKRKHFRPVPDACRTAYNWKMAGDPRYEESLQNPYPDYHWLRTVRTTKESLIIISPSVADLDPYDKSLHSRVFPGGKCLGITVSSTYCSTNHDYTIWMPEEPRLGTSCDIFTSSKGKKASKGGKTCGFVDERGLYKSLKGACKLKLCGVLGLRLMDGTWVSIQTSDDTKWCPPDQLVNLHDFHSDEIEHLVVEELVKKREECLDALESIMTTKSVSFRRLSYLRKLVPGFGKAYTIFNKTLMEADAHYKSVRTWNEIIPSKGCLKVRERCHPPVDGVFFNGIILGPDGNVLIPEMQSSLLQQHMELLESSVIPLMHPLADPSTVFKEGDEAEDFVEVHLPDVHKQISGVDLGLPSWGKYLLMIAGGLATLVLIICSMACCRRTKRTESRRRGSGESGKKVTATPQTRKVVSSWELYKSEGDARL

SEQ ID NO: 30557 - protein, 524 aa, Artificial Sequence
  derived and/or modified protein sequence (wt) from glycoprotein__RABV__AB496703.1
MILQAILFVPLLISSLCLGKFPIYTIPDKLGPWSPIDIHHLSCPNNLVVEDEGCTNLSGFSYMELKVGYISAIKVNGFTCTGVVTEAETYTNFVGYVTTTFKRKHFRPVPDACRTAYNWKMAGDPRYEESLQNPYPDYHWLRTVKTTKESLIIISPSVADLDPYDKSLHSRVFPGGKCLGITVSSTYCSTNHDYTIWMPEEPRLGTSCDIFTSSKGKKASKGGRTCGFVDERGLYKSLKGACKLKLCGVLGLRLMDGTWVSIQTSDDTKWCPPDQLVNLHDFHSDEIEHLVVEELVKKREECLDALESIMTTKSVSFRRLSYLRKLVPGFGKAYTIFNKTLMEADAHYKSVRTWNEIIPSKGCLKVRERCHPPVDGVFFNGIILGPDGNVLIPEMQSSLLQQHMELLESSVIPLMHPLADPSTVFKEGDEAEDFVEVHLPDVHKQISGVDLGLPSWGRYLLMIAGGLATLVLIICSMACCRRTKRTESRRRGSGESGKKVTATPQTRKVVSSWELYKSEGDARL

SEQ ID NO: 30558 - protein, 524 aa, Artificial Sequence; identical to SEQ ID NO: 30554
  derived and/or modified protein sequence (wt) from glycoprotein__RABV__AB496705.1

SEQ ID NO: 30559 - protein, 524 aa, Artificial Sequence
  derived and/or modified protein sequence (wt) from glycoprotein__RABV__AB517659.1
MVPQALLLVPLLAVSFCFGKFPIYTIPDKLGPWSPIDIHHLSCPNNLVVEDEGCTNLSGFSYMELKVGYISAIKVNGFTCTGVVTEAETYTNFVGYVTTTFKRKHFRPTPDACRSAYNWKMAGDPRYEESLHNPYPDYHWLRTVKTTKESLVIISPSVADLDPYDKSLHSRVFPSGKCSGITVSSTYCSTNHDYTIWLPENPRLGTSCDIFTNSRGKRASKGSKTCGFVDERGLYKSLKGACKLKLCGVLGLRLMDGTWVAMQTSDETKWCPPDQLVNLHDFRSDEIEHLVVEELVKKREECLDALESIMTTKSVSFRRLSHLRKLVPGFGKAYTIFNKTLMEADAHYKSVRTWNEIIPSKGCLRVGGRCHPHVNGVFFNGIILGPDGHVLIPEMQSSLLQQHMELLESSVIPLMHPLADPSTVFKDGDEAEDFVEVHLPDVHKQVSGVDLGLPNWGKYVLMSAGVLIALMLIIFLMTCCRRVNRPDSTQRSFGRTGRKVSVTSQSGKVISSWESYKSGGETRL

SEQ ID NO: 30560 - protein, 524 aa, Artificial Sequence
  derived and/or modified protein sequence (wt) from glycoprotein__RABV__AB517660.1
MVPQTLLFVPLLVFSLCFGKFPIYTIPDKLGPWSPIDIHHLSCPNNLVVEDEGCTNLSGFSYMELKVGYISAIKVNGFTCTGVVTEAETYTNFVGYVTTTFKRKHFRPTPDACRAAYNWKMAGDPRYEESLHNPYPDYHWLRTVKTTKESLVIISPSVADLDPYDKSLHSRVFPSGKCLGITVSSTYCSTNHDYTVWRPENPRLGTSCDIFTNSRGKRASKGSKTCGFVDERGWYKSWKGACKLKLCGVLGLRLIDGTWIAMQTSEETKWCPPDQLVNLHDFRSDEIEHLVVEELVKKREECLDALESIMTTKSVSFRRLSHLRKLVPGFGKAYTIFNKTLMEADAHYKSIRTWNEIIPSKGCLRVGGKCHPHVNGVFFNGIILGPDGHVLIPEMQSSLLQQHMELLESSVIPLMHPLADPYTVFKDGDEAEDFVEVHLPDVHKLVSGVDLGLPNWGKYLLMSVGVLIALMLIIFLMTCCRGVHRPDSAQQKLGGTGRRVSITSQGGRVISSWESYKSGGDTRL

SEQ ID NO: 30561 - protein, 524 aa, Artificial Sequence; identical to SEQ ID NO: 30510
  derived and/or modified protein sequence (wt) from glycoprotein__RABV__AB518487.1

SEQ ID NO: 30562 - protein, 524 aa, Artificial Sequence; identical to SEQ ID NO: 30510
  derived and/or modified protein sequence (wt) from glycoprotein__RABV__AB518488.1

SEQ ID NO: 30563 - protein, 524 aa, Artificial Sequence
  derived and/or modified protein sequence (wt) from glycoprotein__RABV__AB518489.1
MVPQALLFVPLLAFSFCFGKFPIYTIPDKLGPWSPIDIHHLSCPNNLVVEDEGCTNLSGFSYMELKVGYISAIKVNGFTCTGVVTEAETYTNFVGYVTTTFKRKHFRPTPDACRSAYNWKMAGDPRYEESLHNPYPDYHWLRTVKTTKESLVIISPSVADLDPYDKSLHSRVFPNGKCSGITVSSTYCSTNHDYTIWLPENPRLGTSCDIFTNSRGKRASKGSKTCGFVDERGLYKSLKGACKLKLCGVLGLRLMDGTWVAMQTSDETKWCPPDQLVNLHDFRSDEIEHLVVEELVKKREECLDALESIMTTKSVSFRRLSHLRKLVPGFGKAYTIFNKTLMEADAHYKSIRTWNEIIPSKGCLRVGGRCHPHVNGVFFNGIILGPDGHVLIPEMQSSLLQQHMELLESSVIPLMHPLADPSTVFKDGDEAEDFVEVHLPDVHKQVSGVDLGLPNWGKYVLMSAGVLIALMLTIFLMTCCRRVNRPDSTQRSLGMTGRKVSVTSQSGKVISSWESYKSGGETRL

SEQ ID NO: 30564 - protein, 524 aa, Artificial Sequence
  derived and/or modified protein sequence (wt) from glycoprotein__RABV__AB518490.1
MVPQALLFVPLLAFSFCFGKFPIYTIPDKLGPWSPIDIHHLSCPNNLVVEDEGCTNLSGFSYMELKVGYISAIKVNGFTCTGVVTEAETYTNFVGYVTTTFKRKHFRPTPDACRSAYNWKMAGDPRYEESLHNPYPDYHWLRTVKTTKESLVIISPSVADLDPYDKSLHSRVFPNGKCSGITVSSTYCSTNHDYTIWLPENPRLGTSCDIFTNSRGKRASKGGKTCGFVDERGLYKSLKGACKLKLCGVLGLRLMDGTWVAMQTSDEAKWCPPDQLVNLHDFRSDEIEHLVVEELVKKREECLDALESIMTTKSVSFRRLSHLRKLVPGFGKAYTIFNKTLMEADAHYKSIRTWNEIIPSKGCLRVGGRCHPHVNGVFFNGIILGPDGHVLIPEMQSSLLQQHMELLESSVIPLMHPLADPSTVFKDGDEAEDFVEVHLPDVHKQVSGVDLGLPNWGKYVLMSAGVLIALMLTIFLMTCCRRVNRPDSTQRSLGMTGRKVSVTSQSGKVISSWESYKSGGETRL

SEQ ID NO: 30565 - protein, 524 aa, Artificial Sequence
  derived and/or modified protein sequence (wt) from glycoprotein__RABV__AB518492.1
MVPQALLFVPLLAVSFCFGKFPIYTIPDKLGPWSPIDIHHLSCPNNLVVEDEGCTNLSGFSYMELKVGYISAIKVNGFTCTGVVTEAETYTNFVGYVTTTFKRKHFRPTPDACRSAYNWKMAGDPRYEESLHNPYPDYHWLRTVKTTKESLVIISPSVADLDPYDKSLHSRVFPSGKCSGITVSSTYCSTNHDYTIWLPENPRLGTSCDIFTNSRGKRASKGSKTCGFVDERGLYKSLKGACKLKLCGVLGLRLMDGTWVAMQTSDETKWCPPDQLVNLHDFRSDEIEHLVVEELVKKREECLDALESIMTTKSVSFRRLSHLRKLVPGFGKAYTIFNKTLMEADAHYKSVRTWNEIIPSKGCLRVGGRCHPHVNGVFFNGIILGPDGHVLIPEMQSSLLQQHMELLESSVIPLMHPLADPSTVFKDGDEAEDFVEVHLPDVHKQVSGVDLGLPNWGKYVLMSAGVLTALMLIIFLMTCCRRVNRPDSTQRSLGRTGRKVSVTSQSGKVISSWESYKSGGETRL

SEQ ID NO: 30566 - protein, 524 aa, Artificial Sequence
  derived and/or modified protein sequence (wt) from glycoprotein__RABV__AB518493.1
MVPQALLFVPLLVFSLCSGKFPLYTIPDKLGPWSPIDIHHLSCPNNLVVEDEGCTNLSGFSYMELKVGYISAIKVNGFTCTGVVTEAETYTNFVGYVTTTFKRKHFRPTPDACRAAYNWKMAGDPRYEESLHNPYPDYHWLRTVKTTKESLVVISPSVADLDPYDKSLHSRVFPSGKCSGITVSSTYCSTNHDYTIWMPENPRLGTSCDIFTNSRGKRASKGSKTCGFVDERGLYKSLKGACKLKLCGVLGLRLMDGTWVAMQISDETKWCPPDQLVNLHDFRSDEIEHLVVEELVKKREECLDALESIMTTKSVSFRRLSHLRKLVPGFGKAYTIFNKTLMEADAHYKSIRTWNEIIPSKGCLRVGGRCHPHVSGVFFNGIILGPDGHVLIPEMQSSLLQQHMELLESSVIPLMHPLADPSTVFKDGDEAEDFVEVHLPDVHKQVSGVDLGLPNWGKYVLMSAGALIALMLIIFLMTCCRRVNRLDSTQHRLGGTGRKVSVTPQGGKVISSWESYKSGGETRL

SEQ ID NO: 30567 - protein, 524 aa, Artificial Sequence
  derived and/or modified protein sequence (wt) from glycoprotein__RABV__AB518494.1
MVPQALLFVPLLVFSLCFGKFPLYTIPDKLGPWSPIDIHHLSCPNNLVVEDEGCTNLSGFSYMELKVGYISAIKVNGFTCTGVVTEAETYTNFVGYVTTTFKRKHFRPTPDACRAAYNWKMAGDPRYEESLHNPYPDYHWLRTVKTTKESLVVISPSVADLDPYDKSLHSRVFPSGKCSGITVSSTYCSTNHDYTIWMPENPRLGTSCDIFTNSRGKRASKGSKTCGFVDERGLYKSLKGACKLKLCGVLGLRLMDGTWVAMQISDETKWCPPDQLVNLHDFRSDEIEHLVVEELVKKREECLDALESIMTTKSVSFRRLSHLRKLVPGFGKAYTIFNKTLMEADAHYKSIRTWNEIIPSKGCLRVGGRCHPHVSGVFFNGIILGPDGHVLIPEMQSSLLQQHMELLESSVIPLMHPLADPSTVFKDGDEAEDFVEVHLPDVHKQVSGVDLGLPNWGKYVLMSAGALIALMVIIFLMTCCRRVNRLDSTQHRLGGTGRKVSVTPQGGKVISSWESYKSGGETRL

SEQ ID NO: 30568 - protein, 524 aa, Artificial Sequence; identical to SEQ ID NO: 30566
  derived and/or modified protein sequence (wt) from glycoprotein__RABV__AB518495.1

SEQ ID NO: 30569 - protein, 524 aa, Artificial Sequence
  derived and/or modified protein sequence (wt) from glycoprotein__RABV__AB519641.1
MILQALLFVPLLISSLCLGKFPIYTIPDKLGPWSPIDIHHLSCPNNLVVEDEGCTNLSGFSYMELKVGYISAIKVNGFTCTGVVTEAETYTNFVGYVTTTFKRKHFRPVPDACRAAYNWKMAGDPRYEESLQNPYPDYHWLRTVKTTKESLIIISPSVADLDPYDKSLHSRVFPGGKCLGITVSSTYCSTNHDYTIWMPEEPRLGTSCDIFTSSKGKKASKGGKTCGFVDERGLYKSLKGACKLKLCGVLGLRLMDGTWVSIQTSDDTKWCPPDQLVNLHDFHSDEIEHLVVEELVKKREECLDALESIMTTKSISFRRLSYLRKLVPGFGKAYTIFNKTLMEADAHYKSVRTWNEIIPSKGCLKVRERCHPPVDGVFFNGIILGPDGNVLIPEMQSSLLQQHMELLESSVIPLMHPLADPSTVFKEGDEAEDFVEVHLPDVHKQISGVDLGLPSWGKYLLMIAGGLAALVLIICSMACCRRTKRTESRRRGSGESEKKVTATPQTRKVISSWELYKSEGDARL

SEQ ID NO: 30570 - protein, 524 aa, Artificial Sequence
  derived and/or modified protein sequence (wt) from glycoprotein__RABV__AB519642.1
MILQALLFVPLLISSLCLGKFPIYTIPDKLGPWSPIDIHHLSCPNNLVVEDEGCTNLSGFSYMELKVGYISAIKVNGFTCTGVVTEAETYTNFVGYVTTTFKRKHFRPIPDACRAAYNWKMAGDPRYEESLQNPYPDYHWLRTVKTTKESLIIISPSVADLDPYDKSLHSRVFPGGKCLGITVSSTYCSTNHDYTIWMPEEPRLGTSCDIFTSSKGKKASKGGKTCGFVDERGLYKSLKGACKLKLCGVLGLRLMDGTWVSIQTSDDTKWCPPDQLVNLHDFHSDEIEHLVVEELVKKREECLDALESIMTTKSVSFRRLSYLRKLVPGFGKAYTIFNKTLMEADAHYKSVRTWNEIIPSKGCLKVRERCHPPVDGVFFNGIILGPDGNVLIPEMQSSLLQQHMELLESSVIPLMHPLADPSTVFKEGDEAEDFVEVHLPDVHKQISGVDLGLPSWGKYLLMIAGGLATLVLIICSMACCRRTKRTESRRRDSQESEKKVTVTPQTRKVVSSWELYKSEGDASL

SEQ ID NO: 30571 - protein, 524 aa, Artificial Sequence
  derived and/or modified protein sequence (wt) from glycoprotein__RABV__AB563791.1
MIPQALLFVPLLVFSLCFGKFPIYTIPDKLGPWSPIDIHHLSCPNNLVVEDEGCTNLSGFSYMELKVGYISAIKVNGFTCTGVVTEAETYTNFVGYVTTTFKRKHFRPTPDACRAAYNWKMAGDPRYEESLHNPYPDYHWLRTVKTTKESLVIISPSVADLDPYDKSLHSRVFPSGKCSGITVSSTYCSTNHDYTIWMPENPRLGTSCDIFTNSRGKRASKGSKTCGFVDERGLYKSLKGACKLKLCGVLGLRLMDGTWAAIQTSDETKWCPPDQLVNLHDFRSDEIEHLVVEELVKKREECLDALESIMTTKSVSFRRLSHLRKLVPGFGKAYTIFNKTLMEADAHYKSVRTWNEIIPSKGCLRVGGRCHPHVNGVFFNGIILGPDGHVLIPEMQSSLLQQHMELLESSVIPLMHPLADPSTVFKDDDEAEDFVEVHLPDVHKQVSGVDLGLPSWGKYVLMSAGVLTALMLMIFLMTCCRRANRVESAQHSLGERGRKVSVTSQSGRVISSWESYKSGGETKL

SEQ ID NO: 30572 - protein, 524 aa, Artificial Sequence
  derived and/or modified protein sequence (wt) from glycoprotein__RABV__AB563794.1
MIPQALLFVPLLVFSLCFGKFPIYTIPDKLGPWSPIDIHHLSCPNNLVVEDEGCTNLSGFSYMELKVGYISAIKVNGFTCTGVVTEAETYTNFVGYVTTTFKRKHFRPTPDACRAAYNWKMAGDPRYEESLHNPYPDYHWLRTVKTTKESLVIISPSVADLDPYDKSLHSRVFPSGKCSGITVSSTYCSTNHDYTIWMPENPRLGTSCDIFTNSRGKRASKGSKTCGFVDERGLYKSLKGACKLKLCGVLGLRLMDGTWAAIQTSDETKWCPPDQLVNLHDFRSDEIEHLVVEELVKKREECLDALESIMTTKSVSFRRLSHLRKLVPGFGKAYTIFNKTLMEADAHYKSVRTWNEIIPSKGCLRVGGRCHPHVNGVFFNGIILGPDGHVLIPEMQSSLLQQHMELLESSVIPLMHPLADPSTVFKDDDEAEDFVEVHLPDVHKQVSGVDLGLPSWGKYVLMSAGVLTALMLMIFLMTCCRRANRAESAQHSLGERGRKVSVTSQSGRVISSWESYKSGGETKL

SEQ ID NO: 30573 - protein, 524 aa, Artificial Sequence
  derived and/or modified protein sequence (wt) from glycoprotein__RABV__AB563797.1
MIPQALLFVPLLVFSLCFGKFPIYTIPDKLGPWSPIDIHHLSCPNNLVVEDEGCTNLSGFSYMELKVGYISAIKVNGFTCTGVVTEAETYTNFVGYVTTTFKRKHFRPTPDACRAAYNWKMAGDPRYEESLHNPYPDYHWLRTVKTTKESLVIISPSVADLDPYDKSLHSRVFPSGKCSGITVSSTYCSTNHDYTIWMPENPRLGTSCDIFTNSRGKRASKGSKTCGFVDERGLYKSLKGACKLKLCGVLGLRLMDGTWAAIQTSDETKWCPPDQLVNLHDFRSDEIEHLVVEELVKKREECLDALESIMTTKSVSFRRLSHLRKLVPGFGKAYTIFNKTLMEADAHYKSIRTWNEIIPSKGCLRVGGRCHPHVNGVFFNGIILGPDGHVLIPEMQSSLLQQHMELLESSVIPLMHPLADPSTVFKDDDETEDFVEVHLPDVHKQVSGVDLGLPSWGKYVLMSAGVLTALMLMIFLMTCCRRANRVESAQHSLGERGRKVSVTSQSGRVISSWESYKSGGETKL

SEQ ID NO: 30574 - protein, 524 aa, Artificial Sequence
  derived and/or modified protein sequence (wt) from glycoprotein__RABV__AB563798.1
MIPQALLFVPLLVFSLCFGKFPIYTIPDKLGPWSPIDIHHLSCPNNLVVEDEGCTNLSGFSYMELKVGYISAIKVNGFTCTGVVTEAETYTNFVGYVTTTFKRKHFRPTPDACRAAYNWKMAGDPRYEESLHNPYPDYHWLRTVKTTKESLVIISPSVADLDPYDKSLHSRVFPSGKCSGITVSSTYCSTNHDYTIWMPENPRLGTSCDIFTNSRGKRASKGSKTCGFVDERGLYKSLKGACKLKLCGVLGLRLMDGTWAAIQTSDETKWCPPDQLVNLHDFRSDEIEHLVVEELVKKREECLDALESIMTTKSVSFRRLSHLRKLVPGFGKAYTIFNKTLMEADAHYKSVRTWNEIIPSKGCLRVGGRCHPHVNGVFFNGIILGPDGHVLIPEMQSSLLQQHMELLESSVIPLMHPLADPSTVFKDDDEAEDFVEVHLPDVHKQVSGVDLGLPSWGKYVLMSAGVLTALMLMIFLMTCCRRANRAESAQHSLGEGGRKVSVTSQSGRVISSWESYKSGGETKL

SEQ ID NO: 30575 - protein, 524 aa, Artificial Sequence
  derived and/or modified protein sequence (wt) from glycoprotein__RABV__AB563800.1
MIPQALLFVPLLVFSLCFGKFPIYTIPDKLGPWSPIDIHHLSCPNNLVVEDEGCTNLSGFSYMELKVGYISAIKVNGFTCTGVVTEAETYTNFVGYVTTTFKRKHFRPTPDACRAAYNWKMAGDPRYEESLHNPYPDYHWLRTVKTTKESLVIISPSVADLDPYDKSLHSRVFPSGKCSGITVSSTYCSTNHDYTIWMPENPRLGTSCDIFTNSRGKRASKGSKTCGFVDERGLYKSLKGACKLKLCGVLGLRLMDGTWAAIQTSDETKWCPPDQLVNLHDFRSDEIEHLVVEELVKKREECLDALESIMTTKSVSFRRLSHLRKLVPGFGKAYTIFNKTLMEADAHYKSVRTWNEIIPSKGCLRVGGRCHPHVNGVFFNGIILGPDGHVLIPEMQSSLLQQHMELLESSVIPLMHPLADPSTVFKDDDEAEDFVEVHLPDVHKQVSGVDLGLPSWGKYVLMSAGVLTALMLMIFLMTCCRRANRAESAQHSLGERGRKVSVTSQSGRVISSWESYKNGGETKL

SEQ ID NO: 30576 - protein, 524 aa, Artificial Sequence
  derived and/or modified protein sequence (wt) from glycoprotein__RABV__AB563803.1
MIPQALLFVPLLVFSLCFGKFPIYTIPDKLGPWSPIDIHHLSCPNNLVVEDEGCTNLSGFSYMELKVGYISAIKVNGFTCTGVVTEAETYTNFVGYVTTTFKRKHFRPTPDACRAAYNWKMAGDPRYEESLHNPYPDYHWLRTVKTTKESLVIISPSVADLDPYDKSLHSRVFPSGKCSGITVSSTYCSTNHDYTIWMPENPRLGTSCDIFTNSRGKRASKGSKTCGFVDERGLYKSLKGACKLKLCGVLGLRLMDGTWAAIQTSDETKWCPPDQLVNLHDFRSDEIEHLVVEELVKKREECLDALESIMTTKSVSFRRLSHLRKLVPGFGKAYTIFNKTLMEADAHYKSVRTWNEIIPSKGCLRVGGRCHPHVNGVFFNGIILGPDGHVLIPEMQSSLLQQHMELLESSVIPLMHPLADPSTVFKDDDEAEDFVEVHLPDVHKQVSGVDLGLPSWGKYVLMSAGVLTALMLMIFLMTCCRRANRAESGQHSLGERGRKVSVTSQSGRVISSWESYKSGGETKL

SEQ ID NO: 30577 - protein, 524 aa, Artificial Sequence; identical to SEQ ID NO: 30572
  derived and/or modified protein sequence (wt) from glycoprotein__RABV__AB563806.1

SEQ ID NO: 30578 - protein, 524 aa, Artificial Sequence
  derived and/or modified protein sequence (wt) from glycoprotein__RABV__AB563807.1
MIPQALMFAPLLVFSLCFGKFPIYTIPDKLGPWSPIDIHHLSCPNNLVVEDEGCTNLSGFSYMELKVGYISAIKVNGFTCTGVVTEAETYTNFVGYVTTTFKRKHFRPTPDACRAAYNWKMAGDPRYEESLHNPYPDYHWLRTVKTTKESLVIISPSVADLDPYDKSLHSRVFPSGKCSGITVSSTYCSTNHDYTIWMPENPRLGTSCDIFTNSRGKRASKGSKTCGFVDERGLYKSLKGACKLKLCGVLGLRLMDGTWAAIQTSDETKWCPPDQLVNLHDFRSDEIEHLVVEELVKKREECLDALESIMTTKSVSFRRLSHLRKLVPGFGKAYTIFNKTLMEADAHYKSVRTWNEIIPSKGCLRVGGRCHPHVNGVFFNGIILGPDGHVLIPEMQSSLLQQHMELLESSVIPLMHPLADPSTVFKDDGEAEDFVEVHLPDVHKQVSGVDLGLPSWGKYVLMSAGVLTALMLMIFLMTCCRRANRAESAQHSLGERGRKVSVTSQSGRVISSWESYKSGGETRL

SEQ ID NO: 30579 - protein, 524 aa, Artificial Sequence
  derived and/or modified protein sequence (wt) from glycoprotein__RABV__AB563809.1
MIPQALLFVPLLVFSLCFGKFPIYTIPDKLGPWSPIDIHHLSCPNNLVVEDEGCTNLSGFSYLELKVGYISAIKVNGFTCTGVVTEAETYTNFVGYVTTTFKRKHFRPTPDACRAAYNWKMAGDPRYEESLHNPYPDYHWLRTVKTTKESLVIISPSVADLDPYDKSLHSRVFPSGKCSGITVSSTYCSTNHDYTIWMPENPRLGTSCDIFTNSRGKRASKGSKTCGFVDERGLYKSLKGACKLKLCGVLGLRLMDGTWAAIQTSDETKWCPPDQLVNLHDFRSDEIEHLVVEELVKKREECLDALESIMTTKSVSFRRLSHLRKLVPGFGKAYTIFNKTLMEADAHYKSVRTWNEIIPSKGCLRVGGRCHPHVNGVFFNGIILGPDGHVLIPEMQSSLLQQHMELLESSVIPLMHPLADPSTVFKDDDEAEDFVEVHLPDVHKQVSGVDLGLPSWGKYVLMSAGVLTALMLMIFLMTCCRRANRAESAQHSLGEGGRKVSVTSQSGRVISSWESYKSGGETKL

SEQ ID NO: 30580 - protein, 524 aa, Artificial Sequence
  derived and/or modified protein sequence (wt) from glycoprotein__RABV__AB563812.1
MIPQALLFVPLLVFSLCFGKFPIYTIPDKLGPWSPIDIHHLSCPNNLVVEDEGCTNLSGFSYMELKVGYISAIKVNGFTCTGVVTEAETYTNFVGYVTTTFKRKHVRPTPDACRAAYNWKMAGDPRYEESLHNPYPDYHWVRTVKTTKESLVIISPSVADLDPYDKSLHSRVFPSGKCSGITVSSTYCSTNHDYTIWMPENPRLGTSCDIFTNSRGKRASKGSKTCGFVDERGLYKSLKGACKLKLCGVLGLRLMDGTWAAIQTSDETKWCPPDQLVNLHDFRSDEIEHLVVEELVKKREECLDALESIMTTKSVSFRRLSHLRKLVPGFGKAYTIFNKTLMEADAHYKSVRTWNEIIPSKGCLRVGGRCHPHVNGVFFNGIILGPDGHVLIPEMQSSLLQQHMELLESSVIPLMHPLADPSTVFKDDDEAEDFVEVHLPDVHKQVSGVDLGLPSWGKYVLMSAGVLTALMLMIFLMTCCRRTNRAESAQHSLRERGRKVSVTSQSGRVISSWESYKSGGETKL

SEQ ID NO: 30581 - protein, 524 aa, Artificial Sequence
  derived and/or modified protein sequence (wt) from glycoprotein__RABV__AB563813.1
MIPQALLFVPLLVFSLCFGKFPIYTIPDKLGPWSPIDIHHLSCPNNLVVEDEGCTNLSGFSYMELKVGYISAIKVNGFTCTGVVTEAETYTNFVGYVTTTFKRKHFRPTPDACRAAYNWKMAGDPRYEESLHNPYPDYHWLRTVKTTKESLVIISPSVADLDPYDKSLHSRVFPSGKCSGITVSSTYCSTNHDYTIWMPENPRLGASCDIFTNSRGKRASKGSKTCGFVDERGLYKSLKGACKLKLCGVLGLRLMDGTWAAIQTSDETKWCPPDQLVNLHDFRSDEIEHLVVEELVKKREECLDALESIMTTKSVSFRRLSHLRKLVPGFGKAYTIFNKTLMEADAHYKSVRTWNEIIPSKGCLRVGGRCHPHVNGVFFNGIILGPDGHVLIPEMQSSLLQQHMELLESSVIPLMHPLADPSTVFKDDDEAEDFVEVHLPDVHKQVSGVDLGLPSWGKYVLMSAGVLTALMLMIFLMTCCRRANRVESEQHSLGQRGRKVSVTSQSGRVISSWESYKSGGETKL

SEQ ID NO: 30582 - protein, 524 aa, Artificial Sequence; identical to SEQ ID NO: 30571
  derived and/or modified protein sequence (wt) from glycoprotein__RABV__AB563816.1

SEQ ID NO: 30583 - protein, 524 aa, Artificial Sequence
  derived and/or modified protein sequence (wt) from glycoprotein__RABV__AB563817.1
MIPQALLFVPLLVFSLCFGKFPIYTIPDKLGPWSPIDIHHLSCPNNLVVEDEGCTNLSGFSYMELKVGYISAIKVNGFTCTGVVTEAETYTNFVGYVTTTFKRKHFRPTPDACRAAYNWKMAGDPRYEESLHNPYPDYHWLRTVKTTKESLVIISPSVADLDPYDKSLHSRVFPSGKCSGITVSSTYCSTNHDYTIWMPENPRLGTSCDIFTNSRGKRASKGSKTCGFVDERGLYKSLKGACKLKLCGVLGLRLMDGTWAAIQTSDETKWCPPDQLVNLHDFRSDEIEHLVVEELVKKREECLDALESIMTTKSVSFRRLSHLRKLVPGFGKAYTIFNKTLMEADAHYKSVRTWNEIIPSKGCLRVGGRCHPHVNGVFFNGIILGPDGHVLIPEMQSSLLQQHMELLESSVIPLMHPLADPSTVFKDDDEAEDFVEVHLPDVHKQVSGVDLGLPSWGKYVLMSAGALTALMLMIFLMTCCRRANRAESAQHSLGERGRKVSVTSQSGRVISSWESYKSGGETKL

SEQ ID NO: 30584 - protein, 524 aa, Artificial Sequence; identical to SEQ ID NO: 30571
  derived and/or modified protein sequence (wt) from glycoprotein__RABV__AB563819.1

SEQ ID NO: 30585 - protein, 524 aa, Artificial Sequence
  derived and/or modified protein sequence (wt) from glycoprotein__RABV__AB563820.1
MIPQALLFVPLLVFSLCFGKFPIYTIPDKLGPWSPIDIHHLSCPNNLVVEDEGCTNLSGFSYMELKVGYISAIKVNGFTCTGVVTEAETYTNFVGYVTTTFKRKHFRPMPDACRAAYNWKMAGDPRYEESLHNPYPDYHWLRTVKTTKESLVIISPSVADLDPYDKSLHSRVFPSGKCSGITVSSTYCSTNHDYTIWMPENPRLGTSCDIFINSRGKRASKGSKTCGFVDERGLYKSLKGACKLKLCGVLGLRLMDGTWAAIQTSDETKWCPPDQLVNLHDFRSDEIEHLVVEELVKKREECLDALESIMTTKSVSFRRLSHLRKLVPGFGKAYTIFNKTLMEADAHYKSVRTWNEIIPSKGCLRVGGRCHPHVNGVFFNGIILGPDGHVLIPEMQSSLLQQHMELLESSVIPLMHPLADPSTVFKDDDEAEDFVEVHLPDVHKQVSGVDLGLPSWGKYVLMSAGVLTALMLMIFLMTCCRRSNRAKSEQHSLGERGRKVSVTSQSGRVISSWESYKRGGETKL

SEQ ID NO: 30586 - protein, 524 aa, Artificial Sequence
  derived and/or modified protein sequence (wt) from glycoprotein__RABV__AB563821.1
MIPQALLFVPLLVFSLCFGKFPIYTIPDKLGPWSPIDIHHLSCPNNLVVEDEGCTNLSGLSYMELKVGYISAIKVNGFTCTGVVTEAETYTNFVGYVTTTFKRKHFRPTPDACRAAYNWKMAGDPRYEESLHNPYPDYHWLRTVKTTKESLVIISPSVADLDPYDKSLHSRVFPSGKCSGITVSSTYCFTNHDYTIWMPENPRLGTSCDIFTNSRGKRASKGSKTCGFVDERGLYKSLKGACKLKLCGVLGLRLMDGTWAAIQTSDETKWCPPDQLVNLHDFRSDEIEHLVVEELVKKREECLDALESIMTTKSVSFRRLSHLRKLVPGFGKAYTIFNKTLMEADAHYKSVRTWDEIIPSKGCLRVGGRCHPHVNGVFFNGIILGPDGHVLIPEMQSSLLQQHMELLESSVIPLMHPLADPSTVFKDDDEAEDFVEVHLPDVHKQVSGVDLGLPSWGKYVLMSAGVLTALMLMIFLMTCCRRANRAESAQHSLGERGRKVSVTSQSGRVISSWESYKSGGETKL

SEQ ID NO: 30587 - protein, 524 aa, Artificial Sequence; identical to SEQ ID NO: 30571
  derived and/or modified protein sequence (wt) from glycoprotein__RABV__AB563822.1

SEQ ID NO: 30588 - protein, 524 aa, Artificial Sequence
  derived and/or modified protein sequence (wt) from glycoprotein__RABV__AB563823.1
MIPQALLLVPLLVFSLCFGKFPIYTIPDKLGPWSPIDIHHLSCPNNLVVEDEGCTNLSGFSYMELKVGYISAIKVNGFTCTGVVTEAETYTNFVGYVTTTFKRKHFRPTPDACRAAYNWKMAGDPRYEESLHNPYPDYHWLRTVKTTKESLVIISPSVADLDPYDKSLHSRVFPSGKCSGITVSSTYCSTNHDYTIWMPENPRLGTSCDIFTNSRGKRASKGSKTCGFVDERGLYKSLKGACKLKLCGVLGLRLMDGTWAAIQTSDETKWCPPDQLVNLHDFRSDEIEHLVVEELVKKREECLDALESIMTTKSVSFRRLSHLRKLVPGFGKAYTIFNKTLMEADAHYKSVRTWNEIIPSKGCLRVGGRCHPHVNGVFFNGIILGPDGHVLIPEMQSSLLQQHMELLESSVIPLMHPLADPSTVFKDDDEAEDFVEVHLPDVHKQVSGVDLGLPSWGKYVLMSAGVLTALMLMIFLMTCCRRANRVESAQHSLGERGRKVSVTSQSGRVISSWESYKSGGETKL

SEQ ID NO: 30589 - protein, 524 aa, Artificial Sequence; identical to SEQ ID NO: 30571
  derived and/or modified protein sequence (wt) from glycoprotein__RABV__AB563824.1

SEQ ID NO: 30590 - protein, 524 aa, Artificial Sequence
  derived and/or modified protein sequence (wt) from glycoprotein__RABV__AB563826.1
MIPQALLFVPLLVFSLCFGKFPIYTIPDKLGPWSPIDIHHLSCPNNLVVEDEGCTNLSGFSYMELKVGYISAIKVNGFTCTGVVTEAETYTNFVGYVTTTFKRKHFRPTPDACRAAYNWKMAGDPRYEESLHNPYPDYHWLRTVKTTKESLVIISPSVADLDPYDKSLHSRVFPSGKCSGITVSSTYCSTNHDYTIWMPENPRLGTSCDIFTNSRGKRASKGSKTCGFVDERGLYKSLKGACKLKLCGVLGLRLMDGTWAAIQTSDETKWCPPDQLVNLHDFRSDEIEHLVVEELVKKREECLDALESIMTTKSVSFRRLSHLRKLVPGFGKAYTIFNKTLMEADAHYKSVRTWNEIIPSKGCLRVGGRCHPHVNGVFFNGIILGPDGHVLIPEMQSSLLQQHMELLESSVIPLMHPLADPSSVFKDDDEAEDFVEVHLPDVHKQVSGVDLGLPSWGKYVLMSAGVLTALMLMIFLMTCCRRANRVESAQHSLGERGRKVSVTSQSGRVISSWESYKSGGETKL

SEQ ID NO: 30591 - protein, 524 aa, Artificial Sequence
  derived and/or modified protein sequence (wt) from glycoprotein__RABV__AB563827.1
MIPQALLFVPLLVFSLCFGKFPIYTIPDKLGPWSPIDIHHLSCPNNLVVEDEGCTNLSGFSYMELKVGYISAIKVNGFTCTGVVTEAETYTNFVGYVTTTFKRKHFRPTPDACRAAYNWKMAGDPRYEESLHNPYPDYHWLRTVKTTKESLVIISPSVADLDPYDKSLHSRVFPSGKCSGITVSSTYCSTNHDYTIWMPENPRLGTSCDIFTNSRGKRASKGSKTCGFVDERGLYKSLKGACKLKLCGVLGLRLMDGTWVAIQTSDETKWCPPDQLVNLHDFRSDEIEHLVVEELVKKREECLDALESIMTTKSVSFRRLSHLRKLVPGFGKAYTIFNKTLMEADAHYKSVRTWNEIIPSKGCLRVGGRCHPHVNGVFFNGIILGPDGHVLIPEMQSSLLQQHMELLESSVIPLMHPLADPSTVFKDDDEAEDFVEVHLPDVHKQVSGVDLGLPSWGKYVLMSAGVLTALMLMIFLMTCCRRANRVESAQHSLGERGRKVSVTSQSGRVISSWESYKSGGETKL

SEQ ID NO: 30592 - protein, 524 aa, Artificial Sequence
  derived and/or modified protein sequence (wt) from glycoprotein__RABV__AB563830.1
MIPQALLLVPLLVFSLCFGKFPIYTIPDKLGPWSPIDIHHLSCPNNLVVEDEGCTNLSGFSYMELKVGYISAIKVNGFTCTGVVTEAETYTNFVGYVTTTFKRKHFRPTPDACRAAYNWKMAGDPRYEESLHNPYPDYHWLRTVKTTKESLVIISPSVADLDPYDKSLHSRVFPSGKCSGITVSSTYCSTNHDYTIWMPENPRLGTSCDIFTNSRGKRASKGSKTCGFVDERGLYKSLKGACKLKLCGVLGLRLMDGTWAAIQTSDETKWCPPDQLVNLHDFRSDEIEHLVVEELVKKREECLDALESIMTTKSVSFRRLSHLRKLVPGFGKAYTIFNKTLMEADAHYKSVRTWNEIIPSKGCLRVGGRCHPHVNGVFFNGIILGPDGHVLIPEMQSSLLQQHMELLESSVIPLMHPLADPSTVFKDDDEAEDFVEVHLPDVHKQVSGVDLGLPSWGKYVLMSAGILTALMLMIFLMTCCRRANRVESAQHSLGERGRKVSVTSQSGRVISSWESYKSGGETKL

SEQ ID NO: 30593 - protein, 524 aa, Artificial Sequence; identical to SEQ ID NO: 30588
  derived and/or modified protein sequence (wt) from glycoprotein__RABV__AB563836.1

SEQ ID NO: 30594 - protein, 524 aa, Artificial Sequence
  derived and/or modified protein sequence (wt) from glycoprotein__RABV__AB563837.1
MIPQALLFVPLLVFSLCFGKFPIYTIPDKLGPWSPIDIHHLSCPNNLVVEDEGCTNLSGFSYMELKVGYISAIKVNGFTCTGVVTEAETYTNFVGYVTTTFKRKHFRPTPDACRAAYNWKMAGDPRYEESLHNPYPDYHWLRTVKTTKESLVIISPSVADLDPYDKSLHSRVFPSGKCSGITVFSTYCSTNHDYTIWMPENPRLGTSCDIFTNSRGKRASKGSKTCGFVDERGLYKSLKGACKLKLCGVLGLRLMDGTWAAIQTSDETKWCPPDQLVNLHDFRSDEIEHLVVEELVKKREECLDALESIMTTKSVSFRRLSHLRKLVPGFGKAYTIFNKTLMEADAHYKSVRTWNEIIPSKGCLRVGGRCHPHVNGVFFNGIILGPDGHVLIPEMQSSLLQQHMELLESSVIPLMHPLADPSTVFKDDDEAEDFVEVHLPDVHKQVSGVDLGLPSWGKYVLMSAGVLTALMLMIFLMTCCRRANRVESAQHSLGERGRKVSVTSQSGRVISSWESYKSGGETKL

SEQ ID NO: 30595 - protein, 524 aa, Artificial Sequence
  derived and/or modified protein sequence (wt) from glycoprotein__RABV__AB563838.1
MIPQALLFVPLLVFSLCFGKFPIYTIPDKLGPWSPIDIHHLSCPNNLVVEDEGCTNLSGFSYMELKVGYISAIKVNGFTCTGVVTEAETYTNFVGYVTTTFKRKHFRPTPDACRAAYNWKMAGDPRYEESLHNPYPDYHWLRTVKTTKESLVIISPSVADLDPYDKSLHSRVFPSGKCSGITVSSTYCSTNHDYTIWMPENPRLGTSCDIFTNSRGKRASKGSKTCGFVDERGLYKSLKGACKLKLCGVLGLRLMDGTWAAIQTSDETKWCPPDQLVNLHDFRSDEIEHLVVEELVKKREECLDALESIMTTKSVSFRRLSHLRKLVPGFGKAYTIFNKTLMEADAHYKSVRTWNEIIPSKGCLRVGGRCHPHVNGVFFNGIILGPDGHVLIPEMQSSLLQQHMELLESSVIPLMHPLADPSTVFKDDDEAEDFVEVHLPDVHKQVSGVDLGLPSWGKYVLMSAGVLTALMLMIFLMTCCRRTNRAESAQHSLGERGRKVSVTSQSGRVISSWESYKSGGETKL

SEQ ID NO: 30596 - protein, 524 aa, Artificial Sequence
  derived and/or modified protein sequence (wt) from glycoprotein__RABV__AB563839.1
MIPQALLFVPLLVFSLCFGKFPIYTIPDKLGPWSPIDIHHLSCPNNLVVEDEGCTNLSGFSYMELKVGYISAIKVNGFTCTGVVTEAETYTNFVGYVTTTFKRKHFRPTPDACRAAYNWKMAGDPRYEESLHNPYPDYHWLRTVKTTKESLVIISPSVADLDPYDKSLHSRVFPSGKCSGITVSSTYCSTNHDYTIWMPENPRLGTSCDIFTNSRGKRASKGSKTCGFVDERGLYKSLKGACKLKLCGVLGLRLMDGTWAAIQTSDETKWCPPDQLVNLHDFRSDEIEHLVVEELVKKREECLDALESIMTTKSVSFRRLSHLRKLVPGFGKAYTIFNKTLMEADAHYKSVRTWNEIIPSKGCLRVGGRCHPHVNGVFFNGIILGPDGHVLIPEMQSSLLQQHMELLESSVIPLMHPLADPSTVFKDDDEAEDFVEVHLPDVHKQVSGVDLGLPSWGKYVLMCAGVLTALMLMIFLMTCCRRANRAESAQHSLGERGRKVSVTSQSGRVISSWESYKSGGETKL

SEQ ID NO: 30597 - protein, 524 aa, Artificial Sequence
  derived and/or modified protein sequence (wt) from glycoprotein__RABV__AB563841.1
MIPQALLFVPLLVFSLCFGKFPIYTIPDKLGPWSPIDIHHLSCPNNLVVEDEGCTNLSGFSYMELKVGYISAIKVNGFTCTGVVTEAETYTNFVGYVTTTFKRKHFRPTPDACRAAYNWKMAGDPRYEESLHNPYPDYHWLRTVKTTKESLVIISPSVADLDPYDKSLHSRVFPSGRCSGITVSSTYCSTNHDYTIWMPENPRLGTSCDIFTNSRGKRASKGSKTCGFVDERGLYKSLKGACKLKLCGVLGLRLMDGTWAAIQTSDETKWCPPDQLVNLHDFRSDEIEHLVVEELVKKREECLDALESIMTTKSVSFRRLSHLRKLVPGFGKAYTIFNKTLMEADAHYKSVRTWNEIIPSKGCLRVGGRCHPHVNGVFFNGIILGPDGHVLIPEMQSSLLQQHMELLESSVIPLMHPLADPSTVFKDDDEAEDFVEVHLPDVHKQVSGVDLGLPSWGKYVLMSAGVLTALMLMIFLTTCCRRADRAESAQHSLGERGRKVSVTSQSGRVISSWESYKSGGETKL

SEQ ID NO: 30598 - protein, 524 aa, Artificial Sequence
  derived and/or modified protein sequence (wt) from glycoprotein__RABV__AB563842.1
MIPQALLFVPLLVFSLCFGKFPIYTIPDKLGPWSPIDIHHLSCPNNLVVEDEGCTNLSGFSYMELKVGYISAIKVNGFTCTGVVTEAETYTNFVGYVTTTFKRKHFRPTPDACRAAYNWKMAGDPRYEESLHNPYPDYHWLRTVKTTKESLVIISPSVADLDPYDKSLHSRVFPSGKCSGITVSSTYCSTNHDYTIWMPENPRLGTSCDIFTNSRGKRASKGSKTCGFVDERGLYKSLKGACKLKLCGVLGLRLMDGTWAAIQTSDETKWCPPDQLVNLHDFRSDEIEHLVVEELVKKREECLDALESIMTTKSVSFRRLSHLRKLVPGFGKAYTIFNKTLMEADAHYKSVRTWNEIIPSKGCLRVGGRCHPHVNGVFFNGIILGPDGHVLIPEMQSSLLQQHMELLESSVIPLMHPLADPSTVFKDDDEAEDFVEVHLPDVHKQVSGVDLGLPSWGKYVLMSAGVLTALMLMIFLMTCCRRANRAESAQHSLRERGRKVSVTSQSGRVISSWESYKSGGETKL

SEQ ID NO: 30599 - protein, 524 aa, Artificial Sequence
  derived and/or modified protein sequence (wt) from glycoprotein__RABV__AB563843.1
MIPQALLFVPLLVFSLCFGKFPIYTIPDKLGPWSPIDIHHLSCPNNLVVEDEGCTNLSGFSYMELKVGYISAIKVNGFTCTGVVTEAETYTNFVGYVTTTFKRKHFRPTPDACRAAYNWKMAGDPRYEESLHNPYPDYHWLRTVKTTKESLVIISPSVADLDPYDKSLHSRVFPSGKCSGITVSSTYCSTNHDYTIWMPENPRLGTSCDIFTNSRGKRASKGSKTCGFVDERGLYKSLKGACKLKLCGVLGLRLMDGTWAAIQTSDETKWCPPDQLVNLHDFRSDEIEHLVVEELVKKREECLDALESIMTTKSVSFRRLSHLRKLVPGFGKAYTIFNKTLMEADAHYKSVRTWNEIIPSKGCLRVGGRCHPHVNGVFFNGIILGPDGHVLIPEMQSSLLQQHMELLESSVIPLMHPLADPSTVFKDDDEAEDFVEVHLPDVHKQVSGVDLGLPSWGKYVLMSAGVLTALMLMIFLTTCCRRADRAESAQHSLGERGRKVSVTSQSGRVISSWESYKSGGETKL

SEQ ID NO: 30600 - protein, 524 aa, Artificial Sequence; identical to SEQ ID NO: 30572
  derived and/or modified protein sequence (wt) from glycoprotein__RABV__AB563844.1

SEQ ID NO: 30601 - protein, 524 aa, Artificial Sequence
  derived and/or modified protein sequence (wt) from glycoprotein__RABV__AB563845.1
MNPQALMFVPLLVFSLCFGKFPIYTIPDKLGPWSPIDIHHLSCPNNLVVEDEGCTNLSGFSYMELKVGYISAIKVNGFTCTGVVTEAETYTNFVGYVTTTFKRKHFRPTPDACRAAYNWKMAGDPRYEESLHNPYPDYHWLRTVKTTKESLVIISPSVADLDPYDKSLHSRVFPSGKCSGITVSSTYCSTNHDYTIWMPENPRLGTSCDIFTNSRGKRASKGSKTCGFVDERGLYKSLKGACKLKLCGVLGLRLMDGTWAAIQTSDETKWCPPDQLVNLHDFRSDEIEHLVVEELVKKREECLDALESIMTTKSVSFRRLSHLRKLVPGFGKAYTIFNKTLMEADAHYKSVRTWNEIIPSKGCLRVGGRCHPHVNGVFFNGIILGPDGHVLIPEMQSSLLQQHMELLESSVIPLMHPLADPSTVFKDDDEAEDFVEVHLPDVHKQVSGVDLGLPSWGKYVLMSAGVLTALMLMIFLMTCCRRANRAESAQHSLGERGRKVSVTSQSGRVISSWESYKSGGETKL

SEQ ID NO: 30602 - protein, 524 aa, Artificial Sequence
  derived and/or modified protein sequence (wt) from glycoprotein__RABV__AB563846.1
MIPQALLFVPLLVFSLCFGKFPIYTIPDKLGPWSPIDIHHLSCPNNLVVEDEGCTNLSGFSYMELKVGYISAIKVNGFTCTGVVTEAETYTNFVGYVTTTFKRKHFRPTPDACRAAYNWKMAGDPRYEESLHNPYPDYHWLRTVKTTKESLVIISPSVADLDPYDKSLHSRVFPSGKCSGITVSSTYCSTNHDYTIWMPENPRLGTSCDIFTNSRGKRASKGSKTCGFVDERGLYKSLKGACKLKLCGVLGLRLMDGTWAAIQTSDETKWCPPDQLVNLHDFRSDEIEHLVVEELVKKREECLDALESIMTTKSVSFRRLSHLRKLVPGFGKAYTIFNKTLMEADAHYKSVRTWNEIIPSKGCLRVGGRCHPHVNGVFFNGIILGPDGHVLIPEMQSSLLQQHMELLESSVIPLMHPLADPSTVFKDDDEAEDFVEVHLPDVHKQVSGVDLGLPSWGKYVLMSAGVLTALMLMIFLTTCCRRANRAESAQHSLGERGRKVSVTSQSGRVISSWESYKSGGETKL

SEQ ID NO: 30603 - protein, 524 aa, Artificial Sequence; identical to SEQ ID NO: 30602
  derived and/or modified protein sequence (wt) from glycoprotein__RABV__AB563847.1

SEQ ID NO: 30604 - protein, 524 aa, Artificial Sequence
  derived and/or modified protein sequence (wt) from glycoprotein__RABV__AB563848.1
MIPQALLFVPLLVFSLCFGKFPIYTIPDKLGPWSPIDIHHLSCPNNLVVEDEGCTNLSGFSYMELKVGYISAIKVNGFTCTGVVTEAETYTNFVGYVTTTFKRKHFRPTPDACRAAYNWKMAGDPRYEESLHNPYPDYHWLRTVKTTKESLVIISPSVADLDPYDKSLHSRVFPSGKCSGITVSSTYCSTNHDYTIWMPENPRLGTSCDIFTNSRGKRASKGSKTCGFVDERGLYKSLKGACKLKLCGVLGLRLMDGTWAAIQTSDETKWCPPDQLVNLHDFRSDEIEHLVVEELVKKREECLDALESIMTTKSVSFRRLSHLRKLVPGFGKAYTIFNKTLMEADAHYKSVRTWNEIIPSKGCLRVGGRCHPHVNGVFFNGIILGPDGHVLIPEMQSSLLQQHMELLESSVIPLMHPLADPSTVFKDDDEAEDFVEVHLPDVHKQVSGVDLGLPSWGKYVLMSAGVLTALMLTIFLMTCCRRANRAESAQHSLGERGRKVSVTSQSGRVISSWESYKSGGETKL

SEQ ID NO: 30605 - protein, 524 aa, Artificial Sequence
  derived and/or modified protein sequence (wt) from glycoprotein__RABV__AB563849.1
MIPQALLFVPLLVFSLCFGKFPIYTIPDKLGPWSPIDIHHLSCPNNLVVEDEGCTNLSGFSYMELKVGYISAIKVNGFTCTGVVTEAETYTNFVGYVTTTFKRKHFRPTPDACRAAYNWKMAGDPRYEESLHNPYPDYHWLRTVKTTKESLVIISPSVADLDPYDKSLHSRVFPSGKCSGITVSSTYCSTNHDYTIWMPENPRLGTSCDIFTNSRGKRASKGSKTCGFVDERGLYKSLKGACKLKLCGVLGLRLMDGTWAAIQTSDETKWCPPDQLVNLHDFRSDEIEHLVVEELVKKREECLDALESIMTTKSVSFRRLSHLRKLVPGFGKAYTIFNKTLMEADAHYKSVRTWNEIIPSKGCLRVGGRCHPHVNGVFFNGIILGPDGHVLIPEMQSSLLQQHMELLESSVIPLMHPLADPSTVFKDDDEAEDFVEVHLPDVHKQVSGVDLGLPSWGKYVLMSAGVLTALMLMIFLTTCYRRANRAESAQHSLGEKGRKVSVTSQSGRVISSWESYKSGGETKL

SEQ ID NO: 30606 - protein, 524 aa, Artificial Sequence; identical to SEQ ID NO: 30599
  derived and/or modified protein sequence (wt) from glycoprotein__RABV__AB563850.1

SEQ ID NO: 30607 - protein, 524 aa, Artificial Sequence; identical to SEQ ID NO: 30604
  derived and/or modified protein sequence (wt) from glycoprotein__RABV__AB563851.1

SEQ ID NO: 30608 - protein, 524 aa, Artificial Sequence
  derived and/or modified protein sequence (wt) from glycoprotein__RABV__AB563852.1
MNPQALMFVPLLVFSLCFGKFPIYTIPDKLGPWSPIDIHHLSCPNNLVVEDEGCTNLSGFSYMELKVGYISAIKVNGFTCTGVVTEAETYTNFVGYVTTTFKRKHFRPTPDACRAAYNWKMAGDPRYEESLHNPYPDYHWLRTVKTTKESLVIISPSVADLDPYDKSLHSRVFPSGKCSGITVSSTYCSTNHDYTIWMPENPRLGTSCDTFTNSRGKRASKGSKTCGFVDERGLYKSLKGACKLKLCGVLGLRLMDGTWAAIQTSDETKWCPPDQLVNLHDFRSDEIEHLVVEELVKKREECLDALESIMTTKSVSFRRLSHLRKLVPGFGKAYTIFNKTLMEADAHYKSVRTWNEIIPSKGCLRVGGRCHPHVNGVFFNGIILGPDGHVLIPEMQSSLLQQHMELLESSVIPLMHPLADPSTVFKDDDEAEDFVEVHLPDVHKQVSGVDLGLPSWGKYVLMSAGVLTALMLMIFLMTCCRRANRAESAQHSLGERGRKVSVTSQSGRVISSWESYKSGGETKL

SEQ ID NO: 30609 - protein, 524 aa, Artificial Sequence
  derived and/or modified protein sequence (wt) from glycoprotein__RABV__AB563854.1
MIPQALMFVPLLVFSLCFGKFPIYTIPDKLGPWSPIDIHHLSCPNNLVVEDEGCTNLSGFSYMELKVGYISAIKVNGFTCTGVVTEAETYTNFVGYVTTTFKRKHFRPTPDACRAAYNWKMAGDPRYEESLHNPYPDYHWLRTVKTTKESLVIISPSVADLDPYDKSLHSRVFPSGKCSGITVSSTYCSTNHDYTIWMPENPRLGTSCDIFTNSRGKRASKGSKTCGFVDERGLYKSLKGACKLKLCGVLGLRLMDGTWAAIQTSDETKWCPPDQLVNLHDFRSDEIEHLVVEELVKKREECLDALESIMTTKSVSFRRLSHLRKLVPGFGKAYTIFNKTLMEADAHYKSVRTWNEIIPSKGCLRVGGRCHPHVNGVFFNGIILGPDGHVLIPEMQSSLLQQHMELLESSVIPLMHPLADPSTVFKDDDEAEDFVEVHLPDVHKQVSGVDLGLPSWGKYVLMSAGVLTALMLMIFLMTCCRRANRAESAQHSLGERGRKVSVTSQSGRVISSWESYKSGGETKL

SEQ ID NO: 30610 - protein, 524 aa, Artificial Sequence; identical to SEQ ID NO: 30601
  derived and/or modified protein sequence (wt) from glycoprotein__RABV__AB563855.1

SEQ ID NO: 30611 - protein, 524 aa, Artificial Sequence; identical to SEQ ID NO: 30601
  derived and/or modified protein sequence (wt) from glycoprotein__RABV__AB563856.1

SEQ ID NO: 30612 - protein, 524 aa, Artificial Sequence
  derived and/or modified protein sequence (wt) from glycoprotein__RABV__AB563857.1
MNPQALMFVPLLVFSLCFGKFPIYTIPDKLGPWSPIDIHHLSCPNNLVVEDEGCTNLSGFSYMELKVGYISAIKVNGFTCTGVVTEAETYTNFVGYVTTTFKRKHFRPTPDACRAAYNWKMAGDPRYEESLHNPYPDYHWLRTVKTTKESLVIISPSVADLDPYDKSLHSRVFPSGKCSGITVSSTYCSTNHDYTIWMPENPRLGTSCDILTNSRGKRASKGSKTCGFVDERGLYKSLKGACKLKLCGVLGLRLMDGTWAAIQTSDETKWCPPDQLVNLHDFRSDEIEHLVVEELVKKREECLDALESIMTTKSVSFRRLSHLRKLVPGFGKAYTIFNKTLMEADAHYKSVRTWNEIIPSKGCLRVGGRCHPHVNGVFFNGIILGPDGHVLIPEMQSSLLQQHMELLESSVIPLMHPLADPSTVFKDDDEAEDFVEVHLPDVHKQVSGVDLGLPSWGKYVLMSAGVLTALMLMIFLMTCCRRANRAESAQHSLGERGRKVSVTSQSGRVISSWESYKSGGETKL

SEQ ID NO: 30613 - protein, 524 aa, Artificial Sequence; identical to SEQ ID NO: 30572
  derived and/or modified protein sequence (wt) from glycoprotein__RABV__AB563860.2

SEQ ID NO: 30614 - protein, 524 aa, Artificial Sequence; identical to SEQ ID NO: 30572
  derived and/or modified protein sequence (wt) from glycoprotein__RABV__AB563861.1

SEQ ID NO: 30615 - protein, 524 aa, Artificial Sequence
  derived and/or modified protein sequence (wt) from glycoprotein__RABV__AB563862.1
MIPQALLFVPLLVFSLCFGKFPIYTIPDKLGPWSPIDIHHLSCPNNLVVEDEGCTNLSGFSYMELKVGYISAIKVNGFTCTGVVTEAETYTNFVGYVTTTFKRKHFRPTPDACRAAYNWKMSGDPRYEESLHNPYPDYHWLRTVKTTKESLVIISPSVADLDPYDKSLHSRVFPSGKCSGITVSSTYCSTNHDYTIWMPENPRLGTSCDIFTNSRGKRASKGSKTCGFVDERGLYKSLKGACKLKLCGVLGLRLMDGTWAAIQTSDETKWCPPDQLVNLHDFRSDEIEHLVVEELVKKREECLDALESIMTTKSVSFRRLSHLRKLVPGFGKAYTIFNKTLMEADAHYKSVRTWNEIIPSKGCLRVGGRCHPHVNGVFFNGIILGPDGHVLIPEMQSSLLQQHMELLESSVIPLMHPLADPSTVFKDDDEAEDFVEVHLPDVHKQVSGVDLGLPSWGKYVLMSAGVLTALMLMIFLMTCCRRANRTESAQHSLGERGRKVSVTSQSGRVISSWESYKSGGETKL

SEQ ID NO: 30616 - protein, 524 aa, Artificial Sequence
  derived and/or modified protein sequence (wt) from glycoprotein__RABV__AB563863.1
MIPQALLFVPLLVFSLCFGKFPIYTIPDKLGPWSPIDIHHLSCPNNLVVEDEGCTNLSGFSYMELKVGYISAIKVNGFTCTGVVTEAETYTNFVGYVTTTFKRKHFRPTPDACRAAYNWKMAGDPRYEESLHNPYPDYHWLRTVKTTKESLVIISPSVADLDPYDKSLHSRVFPSGKCSGITVSSTYCSTNHDYTIWMPENPRLGTSCDIFTNSRGKRASKGSKTCGFVDERGLYKSLKGACKLKLCGVLGLRLMDGTWAAIQTSDETKWCPPDQLVNLHDFRSDEIEHLVVEELVKKREECLDALESIMTTKSVSFRRLSHLRKLVPGFGKAYTIFNKTLMEADAHYKSVRTWNEIIPSKGCLRVGGRCHPHVNGVFFNGIILGPDGHVLIPEMQSSLLQQHMELLESSVIPLMHPLADPSTVFKDDDEAEDFVEVHLPDVHKQVSGVDLGLPSWGKYVLMSAGVLTALMLMIFLMTCCRRANRAESAQHSLGEKGRKVSVTSQSGRVISSWESYKSGGETKL

SEQ ID NO: 30617 - protein, 524 aa, Artificial Sequence
  derived and/or modified protein sequence (wt) from glycoprotein__RABV__AB563864.1
MIPQALLFVPLLVFSLCFGKFPIYTIPDKLGPWSPIDIHHLSCPNNLVVEDEGCTNLSGFSYMELKVGYISAIKVNGFTCTGVVTEAETYTNFVGYVTTTFKRKHFRPTPDACRAAYNWKMAGDPRYEESLHNPYPDYHWLRTVKTTKESLVIISPSVADLDPYDKSLHSRVFPSGKCSGITVSSTYCSTNHDYTIWMPENPRLGTSCDIFTNSRGKRASKGSKTCGFVDERGLYKSLKGACKLKLCGVLGLRLIDGTWAAIQTSDETKWCPPDQLVNLHDFRSDEIEHLVVEELVKKREECLDALESIMTTKSVSFRRLSHLRKLVPGFGKAYTIFNKTLMEADAHYKSVRTWNEIIPSKGCLRVGGRCHPHVNGVFFNGIILGPDGHVLIPEMQSSLLQQHMELLESSVIPLMHPLADPSTVFKDDDEAEDFVEVHLPDVHKQVSGVDLGLPSWGKYVLMSAGVLTALMLMIFLTTCCRRANRAESAQHSLGERGRKVSATSQSGRVISSWESYKSGGETKL

SEQ ID NO: 30618 - protein, 524 aa, Artificial Sequence
  derived and/or modified protein sequence (wt) from glycoprotein__RABV__AB563865.1
MIPQALLFVPLLVFSLCFGKFPIYTIPDKLGPWSPIDIHHLSCPNNLVVEDEGCTNLSGFSYMELKVGYISAIKVSGFTCTGVVTEAETYTNFVGYVTTTFKRKHFRPTPDACRAAYNWKMAGDPRYEESLHNPYPDYHWLRTVKTTKESLVIISPSVADLDPYDKSLHSRVFPSGKCSGITVSSTYCSTNHDYTIWMPENPRLGTSCDIFTNSRGKRASKGSKTCGFVDERGLYKSLKGACKLKLCGVLGLRLMDGTWAAIQTSDETKWCPPDQLVNLHDFRSDEIEHLVVEELVKKREECLDALESIMTTKSVSFRRLSHLRKLVPGFGKAYTIFNKTLMEADAHYKSVRTWNEIIPSKGCLRVGGRCHPHVNGVFFNGIILGPDGHVLIPEMQSSLLQQHMELLESSVIPLMHPLADPSTVFKDDDEAEDFVEVHLPDVHKQVSGVDLGLPSWGKYVLMSAGALTALMLMIFLMTCCRRANRAESAQHSLGEGGRKVSVTSQSGRVISSWESYKSGGETKL

SEQ ID NO: 30619 - protein, 524 aa, Artificial Sequence
  derived and/or modified protein sequence (wt) from glycoprotein__RABV__AB563867.1
MIPQALLFVPLLVFSLCFGKFPIYTIPDKLGPWSPIDIHHLSCPNNLVVEDEGCTNLSGFSYMELKVGYISAIKVSGFTCTGVVTEAETYTNFVGYVTTTFKRKHFRPTPDACRAAYNWKMAGDPRYEESLHNPYPDYHWLRTVKTTKESLVIISPSVADLDPYDKSLHSRVFPSGKCSGITVSSTYCSTNHDYTIWMPENPRLGTSCDIFTNSRGKRASKGSKTCGFVDERGLYKSLKGACKLKLCGVLGLRLMDGTWAAIQTSDETKWCPPDQLVNLHDFRSDEIEHLVVEELVKKREECLDALESIMTTKSVSFRRLSHLRKLVPGFGKAYTIFNKTLMEADAHYKSVRTWNEIIPSKGCLRVGGRCHPHVNGVFFNGIILGPDGHVLIPEMQSSLLQQHMELLESSVIPLMHPLADPSTVFKDDDEAEDFVEVHLPDVHKQVSGVDLGLPSWGKYVLMSAGALTALMLMIFLMTCCRKANRAESAQHSLGEGGRKVSVTSQSGRVISSWESYKSGGETKL

SEQ ID NO: 30620 - protein, 524 aa, Artificial Sequence
  derived and/or modified protein sequence (wt) from glycoprotein__RABV__AB563870.1
MIPQALLFVPLLVFSLCFGKFPIYTIPDKLGPWSPIDIHHLSCPNNLVVEDEGCTNLSGFSYMELKVGYISAIKVNGFTCTGVVTEAETYTNFVGYVTTTFKRKHFRPTPDACRAAYNWKMAGDPRYEESLHNPYPDYHWLRTVKTTKESLVIISPSVADLDPYDKSLHSRVFPSGKCSGITVSSTYCSTNHDYTIWMPENPRLGTSCDIFTNSRGKRASKGSKTCGFVDERGLYKSLKGACKLKLCGVLGLRLMDGTWAAIQTSDETKWCPPDQLVNLHDFRSDEIEHLVVEELVKKREECLDALESIMTTKSVSFRRLSHLRKLVPGFGKAYTIFNKTLMEADAHYKSVRTWNEIIPSKGCLRVGGRCHPHVNGVFFNGIILGPDGHVLIPEMQSSLLQQHMELLESSVIPLMHPLADPSTVFKDDDEAEDFVEVHLPDVHKQVSGVDLGLPSWGKYVLMSAGVLTALMLTIFLITCCRRANRAESAQHSLGERGRKVSVTSQSGRVISSWESYKSGGETKL

SEQ ID NO: 30621 - protein, 524 aa, Artificial Sequence; identical to SEQ ID NO: 30601
  derived and/or modified protein sequence (wt) from glycoprotein__RABV__AB563871.1

SEQ ID NO: 30622 - protein, 524 aa, Artificial Sequence; identical to SEQ ID NO: 30601
  derived and/or modified protein sequence (wt) from glycoprotein__RABV__AB563873.1

SEQ ID NO: 30623 - protein, 524 aa, Artificial Sequence
  derived and/or modified protein sequence (wt) from glycoprotein__RABV__AB563874.1
MNPQALMFVPLLVFSLCFGKFPIYTIPDKLGPWSPIDIHHLSCPNNLVVEDEGCTNLSGFSYMELKVGYISAIKVNGFTCTGVVTEAETYTNFVGYVTTTFKRKHFRPTPDACRAAYNWKMAGDPRYEESLHNPYPDYHWLRTVKTTKESLVIISPSVADLDPYDKSLHSRVFPSGKCSGITVSSTYCSTNHDYTIWMPENPRLGTSCDIFTNSRGKRASKGSKTCGFVDERGLYKSLKGACKLKLCGVLGLRLMDGTWAAIQTSDETKWCPPDQLVNLHDFRSDEIEHLVVEELVKKREECLDALESIMTTKSVSFRRLSHLRKLVPGFGKAYTIFNKTLMEADAHYKSVRTWNEIIPSKGCLRVGGRCHPHVNGVFFNGIILGPDGHVLIPEMQSSLLQQHMELLESSVIPLMHPLADPSTVFKDDDEAEDFVEVHLPDVHKQVSGVDLGLSSWGKYVLMSAGVLTALMLMIFLMTCCRRANRAESAQHSLGERGRKVSVTSQSGRVISSWESYKSGGETKL

SEQ ID NO: 30624 - protein, 524 aa, Artificial Sequence
  derived and/or modified protein sequence (wt) from glycoprotein__RABV__AB563875.1
MNPQALMFVPLLVFSLCFGKFPIYTIPDKLGPWSPIDIHHLSCPNNLVVEDEGCTNLSGFSYMELKVGYISAIKVNGFTCTGVVTEAETYTNFVGYVTTTFKRKHFRPTPDACRAAYNWKMAGDPRYEESLHNPYPDYHWLRTVKTTKESLVIISPSVADLDPYDKSLHSRVFPSGKCSGITVSSTYCSTNHDYTIWMPENPRLGTSCDIFTNSRGKRASKGSKTCGFVDERGLYKSLKGACKLKLCGVLGLRLMDGTWAAIQTSDETKWCPPDQLVNLHDFRSDEIEHLVVEELVKKREECLDALESIMTTKSVSFRRLSHLRKLVPGFGKAYTIFNKTLMEADAHYKSVRTWNEIIPSKGCLRVGGRCHPHVNGVFFNGIILGPDGHVLIPEMQSSLLQQHMELLESSVIPLMHPLADPSTVFKDDDEAEDFVEVHLPDVHKQVSGVDLGLPSWGKYVLMSAGVLTALMLMIFLMTCCRRANRAESAQHSLGERRRKVSVTSQSGRVISSWESYKSGGETKL

SEQ ID NO: 30625 - protein, 524 aa, Artificial Sequence
  derived and/or modified protein sequence (wt) from glycoprotein__RABV__AB563878.1
MIPQALLFVPLLVFSLCFGKFPIYTIPDKLGPWSPIDIHHLSCPNNLVVEDEGCTNLSGFSYMELKVGYISAIKVNGFTCTGVVTEAETYTNFVGYVTTTFKRKHFRPTPDACRAAYNWKMAGDPRYEESLHNPYPDYHWLRTVKTTKESLVIISPSVADLDPYDKSLHSRVFPSGKCSGITVSSTYCSTNHDYTIWMPENPRLGTSCDIFTNSRGKRASKGSKTCGFVDERGLYKSLKGACKLKLCGVLGLRLMDGTWAAIQTSDETKWCPPDQLVNLHDFRSDEIEHLVVEELVKKREECLDALESIMTTKSVSFRRLSHLRKLVPGFGKAYTIFNKTLMEADAHYKSVRTWNEIIPSKGCLRVGGRCHPHVNGVFFNGIILGPDGHVLIPEMQSSLLQQHMELLESSVIPLMHPLADPSTVFKDDDEAEDFVEVHLPDVHKQVSGVDLGLPSWGKYVLMSAGVLTALMLMIFLTTCCRRANRAESAQHSLGEKGRKVSVTSQSGRVISSWESYKSGGETKL

SEQ ID NO: 30626 - protein, 524 aa, Artificial Sequence; identical to SEQ ID NO: 30572
  derived and/or modified protein sequence (wt) from glycoprotein__RABV__AB563879.1

SEQ ID NO: 30627 - protein, 524 aa, Artificial Sequence
  derived and/or modified protein sequence (wt) from glycoprotein__RABV__AB563881.1
MIPQALLFVPLLVFSLCFGKFPIYTIPDKLGPWSPIDIHHLSCPNNLVVEDEGCTNLSGFSYLELKVGYISAIKVNGFTCTGVVTEAETYTNFVGYVTTTFKRKHFRPTPDACRAAYNWKMAGDPRYEESLHNPYPDYHWLRTVKTTKESLVIISPSVADLDPYDKSLHSRVFPSGKCSGITVSSTYCSTNHDYTIWMPENPRLGTSCDIFTNSRGKRASKGSKTCGFVDERGLYKSLKGACKLKLCGVLGLRLMDGTWAAIQTSDETKWCPPDQLVNLHDFRSDEIEHLVVEELVKKREECLDALESIMTTKSVSFRRLSHLRKLVPGFGKAYTIFNKTLMEADAHYKSVRTWNEIIPSKGCLRVGGRCHPHVNGVFFNGIILGPDGHVLIPEMQSSLLQQHMELLESSVIPLMHPLADPSTVFKDDDEAEDFVEVHLPDVHKQVSGVDLGLPSWGKYVLMSAGVLTALMLMIFLMTCCRRANRADSAQHSLGEGERKVSVTSQSGRVISSWESYKSGGETKL

SEQ ID NO: 30628 - protein, 524 aa, Artificial Sequence
  derived and/or modified protein sequence (wt) from glycoprotein__RABV__AB563883.1
MIPQALLFVPFLVFSLCFGKFPIYTIPDKLGPWSPIDIHHLSCPNNLVVEDEGCTNLSGFSYMELKVGYISAIKVNGFTCTGVVTEAETYTNFVGYVTTTFKRKHFRPTPDACRAAYNWKMAGDPRYEESLHNPYPDYHWLRTVKTTKESLVIISPSVADLDPYDKSLHSRVFPSGKCSGITVSSTYCSTNHDYTIWMPENPRLGTSCDIFTNSRGKRASKGSKTCGFVDERGLYKSLKGACKLKLCGVLGLRLMDGTWAAIQTSDETKWCPPDQLVNLHDFRSDEIEHLVVEELVKKREECLDALESIMTTKSVSFRRLSHLRKLVPGFGKAYTIFNKTLMEADAHYKSVRTWNEIIPSKGCLRVGGRCHPHVNGVFFNGIILGPDGHVLIPEMQSSLLQQHMELLESSVIPLMHPLADPSTVFKDDDEAEDFVEVHLPDVHKQVSGVDLGLPSWGKYVLMSAGVLTALMLTIFLMTCCRRANRAESAQHSLGERGRKVSVTSQSGRVISSWESYKSGGETKL

SEQ ID NO: 30629 - protein, 524 aa, Artificial Sequence
  derived and/or modified protein sequence (wt) from glycoprotein__RABV__AB563884.1
MIPQALLFVPLLVFSLCFGKFPIYTIPDKLGPWSPIDIHHLSCPNNLVVEDEGCTNLSGFSYMELKVGYISAIKVNGFTCTGVVTEAETYTNFVGYVTTTFKRKHFRPTPDACRAAYNWKMAGDPRYEESLHNPYPDYHWLRTVKTTKESLVIISPSVADLDPYDKSLHSRVFPSGKCSGITVSSTYCSTNHDYTIWMPENPRLGTSCDIFTNSRGKRASKGSKTCGFVDERGLYKSLKGACKLRLCGVLGLRLMDGTWAAIQTSDETKWCPPDQLVNLHDFRSDEIEHLVVEELVKKREECLDALESIMTTKSVSFRRLSHLRKLVPGFGKAYTIFNKTLMEADAHYKSVRTWNEIIPSKGCLRVGGRCHPHVNGVFFNGIILGPDGHVLIPEMQSSLLQQHMELLESSVIPLMHPLADPSTVFKDDDEAEDFVEVHLPDVHKQVSGVDLGLPSWGKYVLMSAGVLTALMLMIFLMTCCRRANRAESAQHSLGERGRKVSVTSQSGRVISSWESYKSGGETKL

SEQ ID NO: 30630 - protein, 524 aa, Artificial Sequence
  derived and/or modified protein sequence (wt) from glycoprotein__RABV__AB563886.1
MIPQALLFVPLLVFSLCFGKFPIYTIPDKLGPWSPIDIHHLSCPNNLVVEDEGCTNLSGFSYMELKVGYISAIKVNGFTCTGVVTEAETYTNFVGYVTTTFKRKHFRPTPDACRAAYNWKMAGDPRYEESLHNPYPDYHWLRTVKTTKESLVIISPSVADLDPYDKSLHSRVFPSGKCSGITVSSTYCSTNHDYTIWMPENPRLGTSCDIFTNSRGKRASKGSKTCGFVDERGLYKSLKGACKLKLCGVLGLRLMDGTWAAIQTSDETKWCPPDQLVNLHDFRSDEIEHLVVEELVKKREECLDALESIITTKSVSFRRLSHLRKLVPGFGKAYTIFNKTLMEADAHYKSVRTWNEIIPSKGCLRVGGRCHPHVNGVFFNGIILGPDGHVLIPEMQSSLLQQHMELLESSVIPLMHPLADPSTVFKDDDEAEDFVEVHLPDVHKQVSGVDLGLPSWGKYVLMSAGVLTALMLMIFLMTCCRRANRVESAQHSLGERGRKVSVTSQSGRVISSWESYKSGGETKL

SEQ ID NO: 30631 - protein, 524 aa, Artificial Sequence; identical to SEQ ID NO: 30572
  derived and/or modified protein sequence (wt) from glycoprotein__RABV__AB563887.1

SEQ ID NO: 30632 - protein, 524 aa, Artificial Sequence; identical to SEQ ID NO: 30572
  derived and/or modified protein sequence (wt) from glycoprotein__RABV__AB563888.1

SEQ ID NO: 30633 - protein, 524 aa, Artificial Sequence
  derived and/or modified protein sequence (wt) from glycoprotein__RABV__AB563889.1
MIPQALLFVPILVFSLCFGKFPIYTIPDKLGPWSPIDIHHLSCPNNLVVEDEGCTNLSGFSYMELKVGYISAIKVNGFTCTGVVTEAETYTNFVGYVTTTFKRKHFRPTPDACRAAYNWKMAGDPRYEESLHNPYPDYHWLRTVKTTKESLVIISPSVADLDPYDKSLHSRVFPSGKCSGITVSSTYCSTNHDYTIWMPENPRLGTSCDIFTNSRGKRASKGSKTCGFVDERGLYKSLKGACKLKLCGVLGLRLMDGTWAAIQTSDETKWCPPDQLVNLHDFRSDEIEHLVVEELVKKREECLDALESIMTTKSVSFRRLSHLRKLVPGFGKAYTIFNKTLMEADAHYKSVRTWNEIIPSKGCLRVGGRCHPHVNGVFFNGIILGPDGHVLIPEMQSSLLQQHMELLESSVIPLMHPLADPSTVFKDDDEAEDFVEVHLPDVHKQVSGVDLGLPSWGKYVLMSAGVLTALMLMIFLMTCCRRANRVESAQHSLGERGRKVSVTSQSGRVISSWESYKSGGETKL

SEQ ID NO: 30634 - protein, 524 aa, Artificial Sequence
  derived and/or modified protein sequence (wt) from glycoprotein__RABV__AB563890.1
MIPQALLFVPLLVFSLCFGKFPIYTIPDKLGPWSPIDIHHLSCPNNLVVEDEGCTNLSGFSYMELKVGYISAIKVNGFTCTGVVTEAETYTNFVGYVTTTFKRKHFRPMPDACRAAYNWKMAGDPRYEESLHNPYPDYHWLRTVKTTKESLVIISPSVADLDPYDKSLHSRVFPSGKCSGITVSSTYCSTNHDYTIWMPENPRLGTSCDIFTNSRGKRASKGSKTCGFVDERGLYKSLKGACKLKLCGVLGLRLMDGTWAAIQTSDETKWCPPDQLVNLHDFRSDEIEHLVVEELVKKREECLDALESIMTTKSVSFRRLSHLRKLVPGFGKAYTIFNKTLMEADAHYKSVRTWNEIIPSKGCLRVGGRCHPHVNGVFFNGIILGPDGHVLIPEMQSSLLQQHMELLESSVIPLMHPLADPSTVFKDDDEAEDFVEVHLPDVHKQVSGVDLGLPSWGKYVLMSAGVLTVLMLMIFFMTCCRRANRVESAQHSLGERGRKVSVTSQSGRVISSWESYKSGGETKL

SEQ ID NO: 30635 - protein, 524 aa, Artificial Sequence
  derived and/or modified protein sequence (wt) from glycoprotein__RABV__AB563891.1
MIPQALLFVPLLVFSLCFGKFPIYTIPDKLGPWSPIDIHHLSCPNNLVVEDEGCTNLSGFSYMELKVGYISAIKVNGFTCTGVVTEAETYTNFVGYVTTTFKRKHFRPMPDACRAAYNWKMAGDPRYEESLHNPYPDYHWLRTVKTTKESLVIISPSVADLDPYDKSLHSRVFPSGKCSGITVSSTYCSTNHDYTIWMPENPRLGTSCDIFTNSRGKRASKGSKTCGFVDERGLYKSLKGACKLKLCGVLGLRLMDGTWAAIQTSDETKWCPPDQLVNLHDFRSDEIEHLVVEELVKKREECLDALESIMTTKSVSFRRLSHLRKLVPGFGKAYTIFNKTLMEADAHYKSVRTWNEIIPSKGCLRVGGRCHPHVNGVFFNGIILGPDGRVLIPEMQSSLLQQHMELLESSVIPLMHPLADPSTVFKDDDEAEDFVEVHLPDVHKQVSGVDLGLPSWGKYVLMSAGVLTVLMLMIFFMTCCRRANRVESAQHSLGERGRKVSVTSQSGRVISSWESYKSGGETKL

SEQ ID NO: 30636 - protein, 524 aa, Artificial Sequence
  derived and/or modified protein sequence (wt) from glycoprotein__RABV__AB563892.1
MIPQALLFVPLLVFSLCFGKFPIYTIPDKLGPWSPIDIHHLSCPNNLVVEDEGCTNLSGFSYMELKVGYISAIKVNGFTCTGVVTEAETYTNFVGYVTTTFKRKHFRPTPDACRAAYNWKMAGDPRYEESLHNPYPDYHWLRTVKTTKESLVIISPSVADLDPYDKSLHSRVFPSGKCSGITVSSTYCSTNHDYTIWMPENPRLGTSCDIFTNSRGKRASKGSKTCGFVDERGLYKSLKGACKLKLCGVLGLRLMDGTWAAIQTSDETKWCPPDQLVNLHDFRSDEIEHLVVEELVKKREECLDALESIMTTKSVSFRRLSHLRKLVPGFGKAYTIFNKTLMEADAHYKSVRTWNEIIPSKGCLRVGGRCHPHVNGVFFNGIILGPDGHVLIPEMQSSLLQQHMELLESSVIPLMHPLADPSTVFKDDDEAEDFVEVHLPDVHKQVSGVDLGLPSWGKYVLMSAGVLTVLMLMIFFMTCCRRANRVESAQHSLGERGRKVSVTSQSGRVISSWESYKSGGETKL

SEQ ID NO: 30637 - protein, 524 aa, Artificial Sequence; identical to SEQ ID NO: 30634
  derived and/or modified protein sequence (wt) from glycoprotein__RABV__AB563893.1

SEQ ID NO: 30638 - protein, 524 aa, Artificial Sequence; identical to SEQ ID NO: 30634
  derived and/or modified protein sequence (wt) from glycoprotein__RABV__AB563894.1

SEQ ID NO: 30639 - protein, 524 aa, Artificial Sequence
  derived and/or modified protein sequence (wt) from glycoprotein__RABV__AB563900.1
MIPQALMFVPLLVFSLCFGKFPIYTIPDKLGPWSPIDIHHLSCPNNLVVEDEGCTNLSGFSYMELKVGYISAIKVNGFTCTGVVTEAETYTNFVGYVTTTFKRKHFRPMPDACRAAYNWKMAGDPRYEESLHNPYPDYHWLRTVKTTKESLVIISPSVADLDPYDKSLHSRVFPSGKCSGMTVSSTYCSTNHDYTIWMPENPRLGTSCDIFTNSRGKRASKGSKTCGFVDERGLYKSLKGACKLKLCGVLGLRLMDGTWAAIQTSDETKWCPPDQLVNLHDFRSDEIEHLVVEELVKKREECLDALESIMTTKSVSFRRLSHLRKLVPGFGKAYTIFNKTLMEADAHYKSVRTWNEIIPSKGCLRVGGRCHPHVNGVFFNGIILGPDGHVLIPEMQSSLLQQHMELLESSVIPLMHPLADPSTVFKGDDEAEDFVEVHLPDVHKQVSGVDLGLPSWGKYVLMSAGVLTALMLMIFLMTCCKRANRAESAHHSLGERGRKVSVTSQSGRVISSWESYKSGGETKL

SEQ ID NO: 30640 - protein, 524 aa, Artificial Sequence
  derived and/or modified protein sequence (wt) from glycoprotein__RABV__AB563901.1
MIPQALLFVPLLVFSLCFGKFPIYTIPDKLGPWSPIDIHHLSCPNNLVVEDEGCTNLSGFSYMELKVGYISAIKVNGFTCTGVVTEAETYTNFVGYVTTTFKRKHFRPTPDACRAAYNWKMAGDPRYEESLHNPYPDYHWLRTVKTTKESLVIISPSVADLDPYDKSLHSRVFPSGKCSGITVSSTYCSTNHDYTIWMPENPRLGTSCDIFTNSRGKRASKGSKTCGFVDERGLYKSLKGACKLKLCGVLGLRLMDGTWAAIQTSDETKWCPPDQLVNLHDFRSDEIEHLVVEELVKKREECLDALESIMTTKSVSFRRLSHLRKLVPGFGKAYTIFNKTLMEADAHYKSVRTWNEIIPSKGCLRVGGRCHPHVNGVFFNGIILGPDGHVLIPEMQSSLLQQHMELLESSVIPLMHPLADPSTVFKDDDEAEDFVEVHLPDVHKQVSGVDLGLPSWGKYVLMSAGVLTALMLTIFLMTCCRRANRAESAQHSLGERGRKVSVTPQSGRVISSWESYKSGGETKL

SEQ ID NO: 30641 - protein, 524 aa, Artificial Sequence; identical to SEQ ID NO: 30572
  derived and/or modified protein sequence (wt) from glycoprotein__RABV__AB563904.1

SEQ ID NO: 30642 - protein, 524 aa, Artificial Sequence; identical to SEQ ID NO: 30616
  derived and/or modified protein sequence (wt) from glycoprotein__RABV__AB563907.1

SEQ ID NO: 30643 - protein, 524 aa, Artificial Sequence; identical to SEQ ID NO: 30634
  derived and/or modified protein sequence (wt) from glycoprotein__RABV__AB563911.1

SEQ ID NO: 30644 - protein, 524 aa, Artificial Sequence
  derived and/or modified protein sequence (wt) from glycoprotein__RABV__AB563912.1
MIPQALLFVPLLVFSLCFGKFPIYTIPDKLGPWSPIDIHHLSCPNNLVVEDEGCTNLSGFSYMELKVGYISAIKVNGFTCTGVVTEAETYTNFVGYVTTTFKRKHFRPMPDACRAAYNWKMAGDPRYEESLHNPYPDYHWLRTVKTTKESLVIISPSVADLDPYDKSLHSRVFPSGKCSGITVSSTYCSTNHDYTIWMPENPRLGTSCDIFTNSRGKRASKGSKTCGFVDERGLYKSLKGACKLKLCGVLGLRLMDGTWAAIQTSDETKWCPPDQLVNLHDFRSDEIEHLVVEELVKKREECLDALESIMTTKSVSFRRLSHLRKLVPGFGKAYTIFNKTLMEADAHYKSVRTWNEIIPSKGCLRVGGRCHPHVNGVFFNGIILGPDGHVLIPEMQSSLLQQHMELLESSVIPLMHPLADPSTVFKDDDEAEDFVEVHLPDVHKQVSGVDLGLPSWGKYVLMSTGVLTVLMLMIFFMMCCRRANRVESAQHSLGERGRKVSVTSQSGRVISSWESYKSGGETKL

SEQ ID NO: 30645 - protein, 524 aa, Artificial Sequence; identical to SEQ ID NO: 30634
  derived and/or modified protein sequence (wt) from glycoprotein__RABV__AB563913.1

SEQ ID NO: 30646 - protein, 524 aa, Artificial Sequence
  derived and/or modified protein sequence (wt) from glycoprotein__RABV__AB563914.1
MIPQALLFVPLLVFSLCFGKFPIYTIPDKLGPWSPIDIHHLSCPNNLVVEDEGCTNLSGFSYMELKVGYISAIKVNGFTCTGVVTEAETYTNFVGYVTTTFKRKHFRPMPDACRAAYNWKMAGDPRYEESLHNPYPDYHWLRTVKTTKESLVIISPSVADLDPYDKSLHSRVFPSGKCSGITVSSTYCSTNHDYTIWMPENPRLGTSCDIFTNSRGKRASKGSKTCGFVDERGLYKSLKGACKLKLCGVLGLRLMDGTWAAIQTSDETKWCPPDQLVNLHDFRSDEIEHLVVEELVKKREECLDALESIMTTKSVSFRRLSHLRKLVPGFGKAYTIFNKTLMEADAHYKSVRTWNEIIPSKGCLRVGGRCHPHVNGVFFNGIILGPDGHVLIPEMQSYLLQQHMELLESSVIPLMHPLADPSTVFKDDDEAEDFVEVHLPDVHKQVSGVDLGLPSWGKYVLMSAGVLTVLMLMIFFMTCCRRANRVESAQHSLGERGRKVSVTSQSGRVISSWESYKSGGETRL

SEQ ID NO: 30647 - protein, 524 aa, Artificial Sequence; identical to SEQ ID NO: 30634
  derived and/or modified protein sequence (wt) from glycoprotein__RABV__AB563915.1

SEQ ID NO: 30648 - protein, 524 aa, Artificial Sequence; identical to SEQ ID NO: 30601
  derived and/or modified protein sequence (wt) from glycoprotein__RABV__AB563921.1

SEQ ID NO: 30649 - protein, 524 aa, Artificial Sequence
  derived and/or modified protein sequence (wt) from glycoprotein__RABV__AB563922.1
MNPQALMFVPLLVFSLCFGKFPIYTIPDKLGPWSPIDIHHLSCPNNLVVEDEGCTNLSGFSYMELKVGYISAIKVNGFTCTGVVTEAETYTNFVGYVTTTFKRKHFRPTPDACRASYNWKMAGDPRYEESLHNPYPDYHWLRTVKTTKESLVIISPSVADLDPYDKSLHSRVFPSGKCSGITVSSTYCSTNHDYTIWMPENPRLGTSCDIFTNSRGKRASKGSKTCGFVDERGLYKSLKGACKLKLCGVLGLRLMDGTWAAIQTSDETKWCPPDQLVNLHDFRSDEIEHLVVEELVKKREECLDALESIMTTKSVSFRRLSHLRKLVPGFGKAYTIFNKTLMEADAHYKSVRTWNEIIPSKGCLRVGGRCHPHVNGVFFNGIILGPDGHVLIPEMQSSLLQQHMELLESSVIPLMHPLADPSTVFKDDDEAEDFVEVHLPDVHKQVSGVDLGLPSWGKYVLMSAGVLTALMLMIFLMTCCRRANRAESAQHSLGERGRKVSVTSQSGRVISSWESYKSGGETKL

SEQ ID NO: 30650 - protein, 524 aa, Artificial Sequence
  derived and/or modified protein sequence (wt) from glycoprotein__RABV__AB563923.1
MIPQALMFVPLLVFSLCFGKFPIYTIPDKLGPWSPIDIHHLSCPNNLVVEDEGCTNLSGFSYMELKVGYISAIKVNGFTCTGVVTEAETYTNFVGYVTTTFKRKHFRPTPDACRAAYNWKMAGDPRYEESLHNPYPDYHWLRTVKTTKESLVIISPSVADLDPYDKSLHSRVFPSGKCSGITVSSTYCSTNHDYTIWMPENPRLGTSCDIFTNSRGKRASKGSKTCGFVDERGLYKSLKGACKLKLCGVLGLRLMDGTWAAIQTSDETKWCPPDQLVNLHDFRSDEIEHLVVEELVRKREECLDALESIMTTKSVSFRRLSHLRKLVPGFGKAYTIFNKTLMEADAHYKSVRTWNEIIPSKGCLRVGGRCHPHVNGVFFNGIILGPDGHVLIPEMQSSLLQQHMELLESSVIPLMHPLADPSTVFKDDDEAEDFVEVHLPDVHKQVSGVDLGLPSWGKYVLMSAGVLTALMLMIFLMTCCRRANRAESAQHSLGERGRKVSVTSQSGRVISSWESYKSGGETKL

SEQ ID NO: 30651 - protein, 524 aa, Artificial Sequence
  derived and/or modified protein sequence (wt) from glycoprotein__RABV__AB563926.1
MIPQALLFVPLLVFSLCFGKFPIYTIPDKLGPWSPIDIHHLSCPNNLVVEDEGCTNLSGFSYMELKVGYISAIKVNGFTCTGVVTEAETYTNFVGYVTTTFKRKHFRPTPDACRAAYNWKMAGDPRYEESLHNPYPDYHWLRTVKTTKESLVIISPSVADLDPYDKSLHSRVFPSGKCSGITVSSTYCSTNHDYTIWMPENPRLGTSCDIFTNSRGKRASKGSKTCGFVDERGLYKSLKGACKLKLCGVLGLRLMDGTWAAIQTSDETKWCPPDQLVNLHDFRSDEIEHLVVEELVKKREECLDALESIMTTKSVSFRRLSHLRKLVPGFGKAYTIFNKTLMEADAHYKSVRTWNEIIPSKGCLRVGGRCHPHVNGVFFNGIILGPDGHVLIPEMQSSLLQQHMELLESSVIPLMHPLADPSTVFKDDDEAEDFVEVHLPDVHKQVSGVDLGLPSWGKYVLMSAGVLTALMLMIFLMTCCRRANRAESAQHSLGEGERKVSVTSQSGRVISSWESYKSGGETKL

SEQ ID NO: 30652 - protein, 524 aa, Artificial Sequence; identical to SEQ ID NO: 30602
  derived and/or modified protein sequence (wt) from glycoprotein__RABV__AB563927.1

SEQ ID NO: 30653 - protein, 524 aa, Artificial Sequence; identical to SEQ ID NO: 30598
  derived and/or modified protein sequence (wt) from glycoprotein__RABV__AB563928.1

SEQ ID NO: 30654 - protein, 524 aa, Artificial Sequence
  derived and/or modified protein sequence (wt) from glycoprotein__RABV__AB563929.1
MIPQALLFVPLLVFSLCFGKFPIYTIPDKLGPWSPIDIHHLSCPNNLVVEDEGCTNLSGFSYMELKVGYISAIKVNGFTCTGVVTEAETYTNFVGYVTTTFKRKHFRPTPDACRAAYNWKMAGDPRYEESLHNPYPDYHWLRTVKTTKESLVIISPSVADLDPYDKSLHSRVFPSGKCSGITVSSTYCSTNHDYTIWMPENPRLGTSCDIFTNSRGKRASKGSKTCGFVDERGLYKSLKGACKLKLCGVLGLRLIDGTWAAIQTSDETKWCPPDQLVNLHDFRSDEIEHLVVEELVKKREECLDALESIMTTKSVSFRRLSHLRKLVPGFGKAYTIFNKTLMEADAHYKSVRTWNEIIPSKGCLRVGGRCHPHVNGVFFNGIILGPDGHVLIPEMQSSLLQQHMELLESSVIPLMHPLADPSTVFKDDDEAEDFVEVHLPDVHKQVSGVDLGLPSWGKYVLMSAGVLTALMLMIFLTTCCRRANRAESAQHSLGERGRKVSVTSQSGRVISSWESYKSGGETKL

SEQ ID NO: 30655 - protein, 524 aa, Artificial Sequence; identical to SEQ ID NO: 30604
  derived and/or modified protein sequence (wt) from glycoprotein__RABV__AB563930.1

SEQ ID NO: 30656 - protein, 524 aa, Artificial Sequence; identical to SEQ ID NO: 30598
  derived and/or modified protein sequence (wt) from glycoprotein__RABV__AB563931.1

SEQ ID NO: 30657 - protein, 524 aa, Artificial Sequence; identical to SEQ ID NO: 30633
  derived and/or modified protein sequence (wt) from glycoprotein__RABV__AB563933.2

SEQ ID NO: 30658 - protein, 524 aa, Artificial Sequence; identical to SEQ ID NO: 30572
  derived and/or modified protein sequence (wt) from glycoprotein__RABV__AB563934.1

SEQ ID NO: 30659 - protein, 524 aa, Artificial Sequence; identical to SEQ ID NO: 30604
  derived and/or modified protein sequence (wt) from glycoprotein__RABV__AB563937.1

SEQ ID NO: 30660 - protein, 524 aa, Artificial Sequence
  derived and/or modified protein sequence (wt) from glycoprotein__RABV__AB563938.1
MIPQALLFVPLLVFSLCFGKFPIYTIPDKLGPWSPIDIHHLSCPNNLVVEDEGCTNLSGFSYMELKVGYISAIKVNGFTCTGVVTEAETYTNFVGYVTTTFKRKHFRPTPDACRAAYNWKMAGDPRYEESLHNPYPDYHWLRTVKTTKESLVIISPSVADLDPYDKSLHSRVFPSGKCSGITVSSTYCSTNHDYTIWMPENPRLGTSCDIFTNSRGKRASKGSKTCGFVDERGLYKSLKGACKLKLCGVLGLRLMDGTWAAIQTSDETKWCPPDQLVNLHDFRSDEIEHLVVEELVKKREECLDALESIMTTKSVSFRRLSHLRKLVPGFGKAYTIFNKTLMEADAHYKSVRTWNEIIPSKGCLRVGGRCHPHVNGVFFNGIILGPDGHVLIPEMQSSLLQQHMELLESSVIPLMHPLADPSTVFKDDDEAEDFVEVHLPDVHKQVSGVDLGLPSWGKYVLMSAGVLTALMLMIFLMTCCIRANRAESAQHSLGERGRKVSVTSQSGRVISSWESYKSGGETKL

SEQ ID NO: 30661 - protein, 524 aa, Artificial Sequence; identical to SEQ ID NO: 30604
  derived and/or modified protein sequence (wt) from glycoprotein__RABV__AB563939.1

SEQ ID NO: 30662 - protein, 524 aa, Artificial Sequence
  derived and/or modified protein sequence (wt) from glycoprotein__RABV__AB563942.1
MIPQALLFVPLLVFSLCFGKFPIYTIPDKLGPWSPIDIHHLSCPNNLVVEDEGCTNLSGFSYMELKVGYISAIKVNGFTCTGVVTEAETYTNFVGYVTTTFKRKHFRPTPDACRAAYNWKMAGDPRYEESLHNPYPDYHWLRTVKTTKESLVIISPSVADLDPYDKSLHSRVFPSGKCSGITVSSTYCSTNHDYTIWMPENPRLGTSCDIFTNSRGKRASKGSKTCGFVDERGLYKSLKGACKLKLCGVLGLRLMDGTWAAIQTSDETKWCPPDQLVNLHDFRSDEIEHLVVEELVKKREECLDALESIMTTKSVSFRRLSHLRKLVPGFGKAYTIFNKTLMEADAHYKSVRTWNEIIPSKGCLRVGGRCHPHVNGVFFNGIILGPDGHVLIPEMQSSLLQQHMELLESSIIPLMHPLADPSTVFKDDDEAEDFVEVHLPDVHKQVSGVDLGLPSWGKYVLMSAGVLTALMLMIFLMTCCRRTNRAESAQHSLGERGRKVSVTSQSGRVISSWESYKSGGETKL

SEQ ID NO: 30663 - protein, 524 aa, Artificial Sequence
  derived and/or modified protein sequence (wt) from glycoprotein__RABV__AB563945.1
MIPQALLFVPLLVFSLCFGKFPIYTIPDKLGPWSPIDIHHLSCPNNLVVEDEGCTNLSGFSYMELKVGYISAIKVNGFTCTGVVTEAETYTNFVGYVTTTFKRKHFRPTPDACRAAYNWKMAGDPRYEESLHNPYPDYHWLRTVKTTKESLVIISPSVADLDPYDKSLHSRVFPSGKCSGITVSSTYCSTNHDYTIWMPENPRLGTSCDIFTNSRGKRASKGSKTCGFVDERGLYKSLKGACKLKLCGVLGLRLMDGTWAAIQTSDETKWCPPDQLVNLHDFRSDEIEHLVVEELVKKREECLDALESIMTTKSVSFRRLSHLRKLVPGFGKAYTIFNKTLMEADAHYKSVRTWNEIIPSKGCLRVGGRCHPHVNGVFFNGIILGPDGHVLIPEMQSSLLQQHMELLESSVIPLMHPLADPSTVFKDDDEAEDFVEVHLPDVHKQVSGVDLGLPSWGKYVLMSAGVLTALMLMIFLMTCCRGTNRAESAQHSLGERGRKVSVTSQNGRVISSWESYKSGGETKL

SEQ ID NO: 30664 - protein, 524 aa, Artificial Sequence
  derived and/or modified protein sequence (wt) from glycoprotein__RABV__AB563946.2
MIPQALLFVPLLISSLCFGKFPIYTIPDKLGPWSPIDIHHLSCPNNLVVEDEGCTNLSGFSYMELKVGYISAIKVNGFTCTGVVTEAETYTNFVGYVTTTFKRKHFRPTPDACRAAYNWKMAGDPRYEESLHNPYPDYHWLRTVKTTKESLVIISPSVADLDPYDKSLHSRVFPSGKCSGITVSSTYCSTNHDYTIWMPENPRLGTSCDIFTNSRGKRASKGSKTCGFVDERGLYKSLKGACKLKLCGVLGLRLMDGTWAAIQTSDETKWCPPDQLVNLHDFRSDEIEHLVVEELVKKREECLDALESIMTTKSVSFRRLSHLRKLVPGFGKAYTIFNKTLMEADAHYKSVRTWNEIIPSKGCLRVGGRCHPHVNGVFFNGIILGPDGHVLIPEMQSSLLQQHMELLESSVIPLMHPLADPSTVFKDDDEAEDFVEVHLPDVHKQVSGVDLGLPSWGKYVLMSAGVLTALMLMIFLMTCCRRANRAESAQHSLGERGRKVSVTSQSGRVISSWESYKSGGETKL

SEQ ID NO: 30665 - protein, 524 aa, Artificial Sequence; identical to SEQ ID NO: 30639
  derived and/or modified protein sequence (wt) from glycoprotein__RABV__AB563947.1

SEQ ID NO: 30666 - protein, 524 aa, Artificial Sequence
  derived and/or modified protein sequence (wt) from glycoprotein__RABV__AB563948.1
MIPQALMFVPLLVFSLCFGKFPIYTIPDKLGPWSPIDIHHLSCPNNLVVEDEGCTNLSGFSYMELKVGYISAIKVNGFTCTGVVTEAETYTNFVGYVTTTFKRKHFRPMPDACRAAYNWKMAGDPRYEESLHNPYPDYHWLRTVKTTKESLVIISPSVADLDPYDKSLHSRVFPGGKCSGMTVSSTYCSTNHDYTIWMPENPRLGTSCDIFTNSRGKRASKGSKTCGFVDERGLYKSLKGACKLKLCGVLGLRLMDGTWAAIQTSDETKWCPPDQLVNLHDFRSDEIEHLVVEELVKKREECLDALESIMTTKSVSFRRLSHLRKLVPGFGKAYTIFNKTLMEADAHYKSVRTWNEIIPSKGCLRVGGRCHPHVNGVFFNGIILGPDGHVLIPEMQSSLLQQHMELLESSVIPLMHPLADPSTVFKGDDEAEDFVEVHLPDVHKQVSGVDLGLPSWGKYVLMSAGVLTALMLMIFLMTCCKRANRAESAHHSLGERGRKVSVTSQSGRVISSWESYKSGGETKL

SEQ ID NO: 30667 - protein, 524 aa, Artificial Sequence
  derived and/or modified protein sequence (wt) from glycoprotein__RABV__AB563949.1
MIPQALMFVPLLVFSLCFGKFPIYTIPDKLGPWSPIDIHHLSCPNNLVVEDEGCTNLSGFSYMELKVGYISAIKVNGFTCTGVVTEAETYTNFVGYVTTTFKRKHFRPMPDACRAAYNWKMAGDPRYEESLHNPYPDYHWLRTVKTTKESLVIISPSVADLDPYDKSLHSRVFPSGKCSGMTVSSTYCSTNHDYTIWMPENPRLGTSCDIFTNSRGKRASKGSKTCGFVDERGLYKSLKGACKLKLCGVLGLRLMDGTWAAIQTSDETKWCPPDQLVNLHDFRSDEIEHLVVEELVKKREECLDALESIMTTKSVSFRRLSHLRKLVPGFGKAYTIFNKTLMEADAHYKSVRTWNEIIPSKGCLRVGGRCHPHVNGVFFNGIILGPDGHVLIPEMQSSLLQQHMELLESSVIPLMHPLADPSTVFKGDDEAEDFVEVHLPDVHKQVSGVDLGLPSWGKYVLMSAGVLTALMLMIFLMTCCKRANRAESAHHNLGERGRKVSVTSQSGRVISSWESYKSGGETKL

SEQ ID NO: 30668 - protein, 524 aa, Artificial Sequence
  derived and/or modified protein sequence (wt) from glycoprotein__RABV__AB563950.1
MIPQALMFVPLLVFSLCFGKFPIYTIPDKLGPWSPIDIHHLSCPNNLVVEDEGCTNLSGFSYMELKVGYISAIKVNGFTCTGVVTEAETYTNFVGYVTTTFKRKHFRPMPDACRAAYNWKMAGDPRYEESLHNPYPDYHWLRTVKTTKESLVIISPSVADLDPYDKSLHSRVFPSGKCSGITVSSTYCSTNHDYTIWMPENPRLGTSCDIFTNSRGKRASKGSKTCGFVDERGLYKSLKGACKLKLCGVLGLRLMDGTWAAIQTSDETKWCPPDQLVNLHDFRSDEIEHLVVEELVKKREECLDALESIMTTKSVSFRRLSHLRKLVPGFGKAYTIFNKTLMEADAHYKSVRTWNEIIPSKGCLRVGGRCHPHVNGVFFNGIILGPDGHVLIPEMQSSLLQQHMELLESSVIPLMHPLADPSTVFKGDDEAEDFVEVHLPDVHKQVSGVDLGLPSWGKYVLMSAGVLTALMLMIFLMTCCKRANRAESAHHSLGERGRKVSVTSQSGRVISSWESYKSGGETKL

SEQ ID NO: 30669 - protein, 524 aa, Artificial Sequence
  derived and/or modified protein sequence (wt) from glycoprotein__RABV__AB563951.1
MIPQALLFVPLLVFSLCFGKFPIYTIPDKLGPWSPIDIHHLSCPNNLVVEDEGCTNLSGFSYMELKVGYISAIKVNGFTCTGVVTEAETYTNFVGYVTTTFKRKHFRPTPDACRAAYNWKMAGDPRYEESLHNPYPDYHWLRTVKTTKESLVIISPSVADLDPYDKSLHSRVFPSGKCSGITVSSTYCSTNHDYTIWMPENPRLGTSCDIFTNSRGKRASKGSKTCGFVDERGLYKSLKGACKLKLCGVLGLRLMDGTWAAIQTSDETKWCPPDQLVNLHDFRSDEIEHLVVEELVKKREECLDALESIMTTKSVSFRRLSHLRKLVPGFGKAYTIFNKTLMEADAHYKSVRTWNEIIPTKGCLRVGGRCHPHVNGVFFNGIILGPDGHVLIPEMQSSLLQQHMELLESSVIPLMHPLADPSTVFKDDDEAEDFVEVHLPDVHKQVSGVDLGLPSWGKYVLMSAGVLTALMLMIFLTTCCRRADRAESAQHSLGERGRKVSVTSQSGRVISSWESYKSGGETKL

SEQ ID NO: 30670 - protein, 524 aa, Artificial Sequence; identical to SEQ ID NO: 30595
  derived and/or modified protein sequence (wt) from glycoprotein__RABV__AB563952.2

SEQ ID NO: 30671 - protein, 524 aa, Artificial Sequence; identical to SEQ ID NO: 30595
  derived and/or modified protein sequence (wt) from glycoprotein__RABV__AB563953.2

SEQ ID NO: 30672 - protein, 524 aa, Artificial Sequence; identical to SEQ ID NO: 30572
  derived and/or modified protein sequence (wt) from glycoprotein__RABV__AB563954.1

SEQ ID NO: 30673 - protein, 524 aa, Artificial Sequence
  derived and/or modified protein sequence (wt) from glycoprotein__RABV__AB563955.1
MIPQALLFVPLLVFSLCFGKFPIYTIPDKLGPWSPIDIHHLSCPNNLVVEDEGCTNLSGFSYMELKVGYISAIKVNGFTCTGVVTEAETYTNFVGYVTTTFKRKHFRPTPDACRAAYNWKMAGDPRYEESLHNPYPDYHWLRTVKTTKESLVIISPSVADLDPYDKSPHSRVPPSGKCSGITVSSTYCSTNHDYTIWMPENPRLGTSCDIFTNSRGKRASKGSKTCGFVDERGLYKSLKGACKLKLCGVLGLRLMDGTWAAIQTSDETKWCPPDQLVNLHDFRSDEIEHLVVEELVKKREECLDALESIMTTKSVSFRRLSHLRKLVPGFGKAYTIFNKTLMEADAHYKSVRTWNEIIPSKGCLRVGGRCHPHVNGVFFNGIILGPDGHVLIPEMQSSLLQQHMELLESSVIPLMHPLADPSTVFKDDDEAEDFVEVHLPDVHKQVSGVDLGLPSWGKYVLMSAGVLTALMLMIFLTTCCRRANRAESAQHSLGERGRKVSVTSQSGRVISSWESYKSGGETKL

SEQ ID NO: 30674 - protein, 524 aa, Artificial Sequence
  derived and/or modified protein sequence (wt) from glycoprotein__RABV__AB563956.1
MIPQALLFVPLLVFSLCFGKFPIYTIPDKLGPWSPIDIHHLSCPNNLVVEDEGCTNLSGFSYMELKVGYISAIKVNGFTCTGVVTEAETYTNFVGYVTTTFKRKHFRPTPDACRAAYDWKMAGDPRYEESLHNPYPDYHWLRTVKTTKESPVIISPSVADLDPYDKSLHSRVPPSGKCSGITVSSTYCSTNHDYTIWMPENPRLGTSCDIFTNSRGKRASKGSKTCGFVDERGLYKSLKGACKLKLCGVLGLRLMDGTWAAIQTSDETKWCPPDQLVNLHDFRSDEIEHLVVEELVKKREECLDALESIMTTKSVSFRRLSHLRKLVPGFGKAYTIFNKTLMEADAHYKSVRTWNEIIPSKGCLRVGGRCHPHVNGVFFNGIILGPDGHVLIPEMQSSLLQQHMELLESSVIPLMHPLADPSTVFKDDDEAEDFVEVHLPDVHKQVSGVDLGLPSWGKYVLMSAGILTALMLMIFLTTCCRRADRAESAQHSLGERGRKVSVTSQSGRVISSWESYKSGGETKL

SEQ ID NO: 30675 - protein, 524 aa, Artificial Sequence
  derived and/or modified protein sequence (wt) from glycoprotein__RABV__AB563957.1
MIPQALLFVPLMVFSLCFGKFPIYTIPDKLGPWSPIDIHHLSCPNNLVVEDEGCTNLSGFSYMELKVGYISAIKVNGFTCTGVVTEAETYTNFVGYVTTTFKRKHFRPTPDACRAAYNWKMAGDPRYEESLHNPYPDYHWLRTVKTTKESLVIISPSVADLDPYDKSLHSRAFPSGKCSGITVSSTYCSTNHDYTIWMPENPRLGTSCDIFTNSRGKRASKGSKTCGFVDERGLYKSLKGACKLKLCGVLGLRLMDGTWAAIQTSDETKWCPPDQLVNLHDFRSDEIEHLVVEELVKKREECLDALESIMTTKSVSFRRLSHLRKLVPGFGKAYTIFNKTLMEADAHYKSVRTWNEIIPSKGCLRVGGRCHPHVNGVFFNGIILGPDGHVLIPEMQSSLLQQHMELLESSVIPLMHPLADPSTVFKDDDEAEDFVEVHLPDVHKQVSGVDLGLPSWGKYVLMSAGVLTALMLMIFLMTCCRRTNRAESAQHSLGERGRKVSVTSQSGRVISSWESYKSGGETKL

SEQ ID NO: 30676 - protein, 524 aa, Artificial Sequence; identical to SEQ ID NO: 30639
  derived and/or modified protein sequence (wt) from glycoprotein__RABV__AB563958.1

SEQ ID NO: 30677 - protein, 524 aa, Artificial Sequence
  derived and/or modified protein sequence (wt) from glycoprotein__RABV__AB563959.1
MIPQALMFVPLLVFSLCFGKFPIYTIPDKLGPWSPIDIHHLSCPNNLVVEDEGCTNLSGFSYMELKVGYISAIKVNGFTCTGVVTEAETYTNFVGYVTTTFKRKHFRPMPDACRAAYNWKMAGDPRYEESLHNPYPDYHWLRTVKTTKESLVIISPSVADLDPYDKSLHSRVFPSGKCSGTTVSSTYCSTNHDYTIWMPENPRLGTSCDIFTNSRGKRASKGSKTCGFVDERGLYKSLKGACKLKLCGVLGLRLMDGTWAAIQTSDETKWCPPDQLVNLHDFRSDEIEHLVVEELVKKREECLDALESIMTTKSVSFRRLSHLRKLVPGFGKAYTIFNKTLMEADAHYKSVRTWNEIIPSKGCLRVGGRCHPHVNGVFFNGIILGPDGHVLIPEMQSSLLQQHMELLESSVIPLMHPLADPSTVFKGDDEAEDFVEVHLPDVHKQVSGVDLGLPSWGKYVLMSAGVLTALMLMIFLMTCCKRANRAESAHHSLGERGRKVSVTSQSGRVISSWESYKSGGETKL

SEQ ID NO: 30678 - protein, 524 aa, Artificial Sequence
  derived and/or modified protein sequence (wt) from glycoprotein__RABV__AB563960.1
MIPQALLFVPFLVFSLCFGKFPIYTIPDKLGPWSPIDIHHLSCPNNLVVEDEGCTNLSGFSYMELKVGYISAIKVNGFTCTGVVTEAETYTNFVGYVTTTFKRKHFRPMPDACRAAYNWKMAGDPRYEESLHNPYPDYHWLRTVKTTKESLVIISPSVADLDPYDKSLHSRVFPSGKCSGITVSSTYCSTNHDYTIWMPENPRLGTSCDIFTNSRGKRASKGSKTCGFVDERGLYKSLKGACKLKLCGVLGLRLMDGTWAAIQTSDETKWCPPDQLVNLHDFRSDEIEHLVVEELVKKREECLDALESIMTTKSVSFRRLSHLRKLVPGFGKAYTIFNKTLMEADAHYKSVRTWNEIIPSKGCLRVGGRCHPHVNGVFFNGIILGPDGHVLIPEMQSSLLQQHMELLESSVIPLMHPLADPSTVFKDDDEAEDFVEVHLPDVHKQVSGVDLGLPSWGKYVLMSAGVLTVLMLMIFFMTCCRRANRVESAQHSLGERGRKVSVTSQSGRVISSWESYKSGGETKL

SEQ ID NO: 30679 - protein, 524 aa, Artificial Sequence; identical to SEQ ID NO: 30634
  derived and/or modified protein sequence (wt) from glycoprotein__RABV__AB563961.1

SEQ ID NO: 30680 - protein, 524 aa, Artificial Sequence; identical to SEQ ID NO: 30634
  derived and/or modified protein sequence (wt) from glycoprotein__RABV__AB563962.1

SEQ ID NO: 30681 - protein, 524 aa, Artificial Sequence
  derived and/or modified protein sequence (wt) from glycoprotein__RABV__AB563963.1
MIPQALLFVPLLVFSLCFGKFPIYTIPDKLGPWSPIDIHHLSCPNNLVVEDEGCTNLSGFSYMELKVGYISAIKVNGFTCTGVVTEAETYTNFVGYVTTTFKRKHFRPTPDACRAAYNWKMAGDPRYEESLHNPYPDYHWLRTVKTTKESLVIISPSVADLDPYDKSLHSRVFPSGKCSGITVSSTYCSTNHDYTIWMPENPRLGTSCDIFTNSRGKRASKGSKTCGFVDERGLYKSLKGACKLKLCGVLGLRLMDGTWAAIQTSDETKWCPPDQLVNLHDFRSDEIEHLVVEELVKKREECLDALESIMTTKSVSFRRLSHLRKLVPGFGKAYTIFNKTLMEADAHYKSVRTWNEIIPSKGCLRVGGRCHPHVNGVFFNGIILGPDGHVLIPEMQSSLLQQHMELLESSVIPLMHPLADPSTIFKDDDEAEDFVEVHLPDVHKQVSGVDLGLPSWGKYVLMSAGVLTVLMLMIFFMTCCRRANRVESAQHSLGERGRKVSVTSQSGRVISSWESYKSGGETKL

SEQ ID NO: 30682 - protein, 524 aa, Artificial Sequence; identical to SEQ ID NO: 30634
  derived and/or modified protein sequence (wt) from glycoprotein__RABV__AB563964.1

SEQ ID NO: 30683 - protein, 524 aa, Artificial Sequence; identical to SEQ ID NO: 30634
  derived and/or modified protein sequence (wt) from glycoprotein__RABV__AB563966.1

SEQ ID NO: 30684 - protein, 524 aa, Artificial Sequence; identical to SEQ ID NO: 30571
  derived and/or modified protein sequence (wt) from glycoprotein__RABV__AB563969.1

SEQ ID NO: 30685 - protein, 524 aa, Artificial Sequence
  derived and/or modified protein sequence (wt) from glycoprotein__RABV__AB563970.2
MNPQALMFVPLLVFSLCFGKFPIYTIPDKLGPWSPIDIHHLSCPNNLVVEDEGCTNLSGFSYMELKVGYISAIKVNGFTCTGVVTEAETYTNFVGYVTTTFKRKHFRPTPDACRAAYNWKMAGDPRYEESLHNPYPDYHWLRTVKTTKESLVIISPSVADLDPYDKSLHSRVFPSGKCSGITVSSTYCSTNHDYTIWMPENPRLGTSCDIFTNSRGKRASKGSMTCGFVDERGLYKSLKGACKLKLCGVLGLRLMDGTWAAIQTSDETKWCPPDQLVNLHDFHSDEIEHLVVEELVKKREECLDALESIMTTKSVSFRRLSHLRKLVPGFGKAYTIFNKTLMEADAHYKSVRTWNEIIPSKGCLRVGGRCHPHVNGVFFNGIILGPDGHVLIPEMQSSLLQQHMELLESSVIPLMHPLADPSTVFKDDDEAEDFVEVHLPDVHKQVSGVDLGLPSWGKYVLMSAGVLTALMLMIFLMTCCRRANRAESAQHSLGERGRKVSVTSQSGRVISSWESYKSGGETKL

SEQ ID NO: 30686 - protein, 524 aa, Artificial Sequence
  derived and/or modified protein sequence (wt) from glycoprotein__RABV__AB563971.1
MNPQALMFVPLLVFSLCFGKFPIYTIPDKLGPWSPIDIHHLSCPNNLVVEDEGCTNLSGFSYMELKVGYISAIKVNGFTCTGVVTEAETYTNFVGYVTTTFKRKHFRPTPDACRAAYNWKMAGDPRYEESLHNPYPDYHWLRTVKTTKESLVIISPSVADLDPYDKSLHSRVFPSGKCSGITVFSTYCSTNHDYTIWMPENPRLGTSCDIFTNSRGKRASKGSKTCGFVDERGLYKSLKGACKLKLCGVLGLRLMDGTWAAIQTSDETKWCPPDQLVNLHDFRSDEIEHLVVEELVKKREECLDALESIMTTKSVSFRRLSHLRKLVPGFGKAYTIFNKTLMEADAHYKSVRTWNEIIPSKGCLRVGGRCHPHVNGVFFNGIILGPDGHVLIPEMQSSLLQQHMELLESSVIPLMHPLADPSTVFKDDDEAEDFVEVHLPDVHKQVSGVDLGLPSWGKYVLMSAGVLTALMLMIFLMTCCRRANRAESAQHSLGERGRKVSVTSQSGRVISSWESYKSGGETKL

SEQ ID NO: 30687 - protein, 524 aa, Artificial Sequence
  derived and/or modified protein sequence (wt) from glycoprotein__RABV__AB563973.2
MIPQALLFVPLLVSSLCFGKFPIYTIPDKLGPWSPIDIHHLSCPNNLVVEDEGCTNLSGFSYMELKVGYISAIKVNGFTCTGVVTEAETYTNFVGYVTTTFKRKHFRPTPDACRAAYNWKMAGDPRYEESLHNPYPDYHWLRTVKTTKESLVIISPSVADLDPYDKSLHSRVFPSGKCSGITVSSTYCSTNHDYTIWMPENPRLGTSCDIFTNSRGKRASKGSKTCGFVDERGLYKSLKGACKLKLCGVLGLRLMDGTWAAIQTSDETKWCPPDQLVNLHDFRSDEIEHLVVEELVKKREECLDALESIMTTKSVSFRRLSHLRKLVPGFGKAYTIFNKTLMEADAHYKSVRTWNEIIPSKGCLRVGGRCHPHVNGVFFNGIILGPDGHVLIPEMQSSLLQQHMELLESSVIPLMHPLADPSTVFKDDDEAEDFVEVHLPDVHKQVSGVDLGLPSWGKYVLTSASVLTALMLMIFLMTCCRRANRAESAQHSLGERGRKVSVTSQSGRVISSWESYKSGGETKL

SEQ ID NO: 30688 - protein, 524 aa, Artificial Sequence
  derived and/or modified protein sequence (wt) from glycoprotein__RABV__AB563974.1
MIPQALLFVPLLVSSLCFGKFPIYTIPDKLGPWSPIDIHHLSCPNNLVVEDEGCTNLSGFSYMELKVGYISAIKVNGFTCTGVVTEAETYTNFVGYVTTTFKRKHFRPTPDACRAAYNWKMAGDPRYEESLHNPYPDYHWLRTVKTTKESLVIISPSVADLDPYDKSLHSRVFPSGKCSGITVSSTYCSTNHDYTIWMPENPRLGTSCDIFTNSRGKRASKGSKTCGFVDERGLYKSLKGACKLKLCGVLGLRLMDGTWAAIQTSDETKWCPPDQLVNLHDFRSDEIEHLVVEELVKKREECLDALESIMTTKSVSFRRLSHLRKLVPGFGKAYTIFNKTLMEADAHYKSVRTWNEIIPSKGCLRVGGRCHPHVNGVFFNGIILGPDGHVLIPEMQSSLLQQHMELLESSVIPLMHPLADPSTVFKDDDEAEDFVEVHLPDVHKQVSGVDLGLPSWGKYVLTSAGVLTALMLMIFLMTCCRRANRAESAQHSLGERGRKVSVTSQSGRVISSWESYKSGGETKL

SEQ ID NO: 30689 - protein, 524 aa, Artificial Sequence; identical to SEQ ID NO: 30688
  derived and/or modified protein sequence (wt) from glycoprotein__RABV__AB563975.2

SEQ ID NO: 30690 - protein, 524 aa, Artificial Sequence
  derived and/or modified protein sequence (wt) from glycoprotein__RABV__AB563976.1
MIPQALLFVPLLVFSLCFGKFPIYTIPDKLGPWSPIDIHHLSCPNNLVVEDEGCTNLSGFSYMELKVGYISAIKVNGFTCTGVVTEAETYTNFVGYVTTTFKRKHFRPTPDACRAAYNWKMAGDPRYEESLHNPYPDYHWLRTVKTTKESLVIISPSVADLDPYDKSLHSRVFPSGKCSGITVSSTYCSTNHDYTIWMPENPRLGTSCDIFTNSRGKRASKGSKTCGFVDERGLYKSLKGACKLKLCGVLGLRLMDGTWAAIQTSDETKWCPPDQLVNLHDFRSDEIEHLVVEELVKKREECLDALESIMTTKSVSFRRLSHLRKLVPGFGKAYTIFNKTLMEADAHYKSVRTWNEIIPSKGCLRVGGRCHPHVNGVFFNGIILGPDGHVLIPEMQSSLLQQHMELLESSVIPLMHPLADPSTVFKDDDEAEDFVEVHLPDVHKQVSGVDLGLPSWGKYVLMSAGVLTALMLMIFLMTCCRGTNRAESAQHSLGERGRKVSVTSQSGRVISSWESYKSGGETKL

SEQ ID NO: 30691 - protein, 524 aa, Artificial Sequence
  derived and/or modified protein sequence (wt) from glycoprotein__RABV__AB563977.1
MIPQALLFVPLLVFSLCFGKFPIYTIPDKLGPWSPIDIHHLSCPNNLVVEDEGCTNLSGFSYMELKVGYISAIKVNGFTCTGVVTEAETYTNFVGYVTTTFKRKHFRPTPDACRAAYNWKMAGDPRYEESLHNPYPDYHWLRTVKTTKESLVIISPSVADLDPYDKSLHSRVFPSGKCSGITVSSTYCSTNHDYTIWMPENPRLGTSCDIFTNSRGKRASKGSKTCGFVDERGLYKSLKGACKLKLCGVLGLRLMDGTWAAIQTSDETKWCPPDQLVNLHDFRSDEIEHLVVEELVKKREECLDALESIMTTKSVSFRRLSHLRKLVPGFGKAYTIFNKTLMEADAHYKSVRTWNEIIPSKGCLRVGGRCHPHVNGVFFNGIILGPDGHVLIPEMQSSLLQQHMELLESSVIPLMHPLADPSTVFKDDDEAEDFVEVHLPDVHKQVSGVDLGLPSWGRYVLMSAGVLTALMLMIFLTTCCRRANRAESAQHSLGERGRKVSVTSQSGRVISSWESYKSGGETKL

SEQ ID NO: 30692 - protein, 524 aa, Artificial Sequence; identical to SEQ ID NO: 30651
  derived and/or modified protein sequence (wt) from glycoprotein__RABV__AB563979.1

SEQ ID NO: 30693 - protein, 524 aa, Artificial Sequence
  derived and/or modified protein sequence (wt) from glycoprotein__RABV__AB563981.1
MIPQALLFVPLMVFSLCFGKFPIYTIPDKLGPWSPIDIHHLSCPNNLVVEDEGCTNLSGFSYMELKVGYISAIKVNGFTCTGVVTEAETYTNFVGYVTTTFKRKHFRPTPDACRAAYNWKMAGDPRYEESLHNPYPDYHWLRTVKTTKESLVIISPSVADLDPYDKSLHSRVFPSGKCSGITVSSTYCSTNHDYTIWMPENPRLGTSCDIFTNSRGKRASKGSKTCGFVDERGLYKSLKGACKLKLCGVLGLRLMDGTWAAIQTSDETKWCPPDQLVNLHDFRSDEIEHLVVEELVKKREECLDALESIMTTKSVSFRRLSHLRKLVPGFGKAYTIFNKTLMEADAHYKSVRTWNEIIPSKGCLRVGGRCHPHVNGVFFNGIILGPDGHVLIPEMQSSLLQQHMELLESSVIPLMHPLADPSTVFKDDDEAEDFVEVHLPDVHKQVSGVDLGLPSWGKYVLMSAGVLTALMLMIFLMTCCRRTNRAESAQHSLGERGRKVSVTSQSGRIISSWESYKSGGETKL

SEQ ID NO: 30694 - protein, 524 aa, Artificial Sequence
  derived and/or modified protein sequence (wt) from glycoprotein__RABV__AB563983.1
MIPQALLFVPLLVFSLCFGKFPIYTIPDKLGPWSPIDIHHLSCPNNLVVEDEGCTNLSGFSYMELKVGYISAIKVNGFTCTGVVTEAETYTNFVGYVTTTFKRKHFRPTPDACRAAYNWKMAGDPRYEESLHNPYPDYHWLRTVKTTKESLVIISPSVADLDPYDKSLHSRVFPSGKCSGITVSSTYCSTNHDYTIWMPENPRLGTSCDIFTNSRGKRASKGSKTCGFVDERGLYKSLKGACKLKLCGVLGLRLMDGTWAAIQTSDETKWCPPDQLVNLHDFRSDEMEHLVVEELVKKREECLDALESIMTTKSVSFRRLSHLRKLVPGFGKAYTIFNKTLMEADAHYKSVRTWNEIIPTKGCLRVGGRCHPHVNGVFFNGIILGPDGHVLIPEMQSSLLQQHMELLESSVIPLMHPLADPSTVFKDDDEAEDFVEVHLPDVHKQVSGVDLGLPSWGKYVLMSAGVLTALMLMIFLTTCCRRADRAESAQHSLGERGRKVSVTSQSGRVISSWESYKSGGETKL

SEQ ID NO: 30695 - protein, 524 aa, Artificial Sequence; identical to SEQ ID NO: 30602
  derived and/or modified protein sequence (wt) from glycoprotein__RABV__AB563985.1

SEQ ID NO: 30696 - protein, 524 aa, Artificial Sequence
  derived and/or modified protein sequence (wt) from glycoprotein__RABV__AB563986.1
MIPQALLFVPLLVFSLCFGKFPIYTIPDKLGPWSPIDIHHLSCPNNLVVEDEGCTNLSGFSYMELKVGYISAIKVNGFTCTGVVTEAETYTNFVGYVTTTFKRKHFRPTPDACRAAYNWKMAGDPRYEESLHNPYPDYHWLRTVKTTKESLVIISPSVPDLDPYDKSLHSRVFPSGKCSGITVSSTYCSTNHDYTIWMPENPRLGTSCDIFTNSRGKRASKGSKTCGFVDERGLYKSLKGACKLKLCGVLGLRLMDGTWAAIQTSDETKWCPPDQLVNLHDFRSDEIEHLVVEELVKKREECLDALESIMTTKSVSFRRLSHLRKLVPGFGKAYTIFNKTLMEADAHYKSVRTWNEIIPSKGCLRVGGRCHPHVNGVFFNGIILGPDGHVLIPEMQSSLLQQHMELLESSVIPLMHPLADPSTVFKDDDEAEDFVEVHLPDVHKQVSGVDLGLPSWGKYVLMSAGVLTALMLMIFLMTCCRRTNRAESAQHSLGERGRKVSVTSQSGRVISSWESYKSGGETKL

SEQ ID NO: 30697 - protein, 524 aa, Artificial Sequence
  derived and/or modified protein sequence (wt) from glycoprotein__RABV__AB563987.1
MIPQALLFVPLLVFSLCFGKFPIYTIPDKLGPWSPIDIHHLSCPNNLVVEDEGCTNLSGFSYMELKVGYISAIKVNGFTCTGVVTEAETYTNFVGYVTTTFKRKHFRPTPDACRAAYNWKMAGDPRYEESLHNPYPDYHWLRTVKTTKESLVIISPSVADLDPYDKSLHSRVFPSGKCSGITVSSTYCSTNHDYTIWMPENPRLGTSCDIFTNSRGKRASKGSKTCGFVDERGLYKSLKGACKLKLCGVLGLRLMDGTWAAIQTSDETKWCPPDQLVNLHDFRSDEIEHLVVEELVKKREECLDALESIMTTKSVSFRRLSHLRKLVPGFGKAYTIFNKTLMEADAHYKSVRTWNEIIPSKGCLRVGGRCHPHVNGVFFNGIILGPDGHVLIPEMQSSLLQQHMELLESSVIPLMHPLADPSTVFKDDDEAEDFVEVHLPDVHKQVSGVDLGLPSWGKYVLMSAGVLTALMLMIFLTTCCRRANKAESAQHSLGERGRKVSVTSQSGRVISSWESYKSGGETKL

SEQ ID NO: 30698 - protein, 524 aa, Artificial Sequence; identical to SEQ ID NO: 30688
  derived and/or modified protein sequence (wt) from glycoprotein__RABV__AB563988.1

SEQ ID NO: 30699 - protein, 524 aa, Artificial Sequence
  derived and/or modified protein sequence (wt) from glycoprotein__RABV__AB563989.1
MIPQALLFVPLLVFSLCFGKFPIYTIPDKLGPWSPIDIHHLSCPNNLVVEDEGCTNLSGFSYMELKVGYISAIKVNGFTCTGVVTEAETYTNFVGYVTTTFKRKHFRPTPDACRAAYNWKMAGDPRYEESLHNPYPDYHWLRTVKTTKESLVIISPSVADLDPYDKSLHSRVFPSGKCSGITVSSTYCSTNHDYTIWMPENPRLGTSCDIFTNSRGKRASKGSKTCGFVDERGLYKSLKGACKLKLCGVLGLRLMDGTWAAIQTSDETKWCPPDQLVNLHDFRSDEIEHLVVEELVKKREECIDALESIMTTKSVSFRRLSHLRKLVPGFGKAYTIFNKTLMEADAHYKSVRTWNEIIPSKGCLRVGGRCHPHVNGVFFNGIILGPDGHVLIPEMQSSLLQQHMELLESSVIPLMHPLADPSTVFKDDDEAEDFVEVHLPDVHKQVSGVDLGLPSWGKYVLMSAGVLTALMLMIFLMTCCRRTNRAESAQHSLGERGRKVSVTSQSGRVISSWESYKSGGETKL

SEQ ID NO: 30700 - protein, 524 aa, Artificial Sequence
  derived and/or modified protein sequence (wt) from glycoprotein__RABV__AB563990.1
MIPQALLFVPLLVFSLCFGKFPIYTIPDKLGPWSPIDIHHLSCPNNLVVEDEGCTNLSGFSYMELKVGYISAIKVNGFTCTGVVTEAETYTNFVGYVTTTFKRKHFRPTPDACRAAYNWKMAGDPRYEESLHNPYPDYHWLRTVKTTKESLVIISPSVADLDPYDKSLHSRVFPSGKCSGITVSSTYCSTNHDYTIWMPENPRLGTSCDIFTNSRGKRASKGSKTCGFVDERGLYKSLKGACKLKLCGILGLRLMDGTWAAIQTSDETKWCPPDQLVNLHDFRSDEIEHLVVEELVKKREECLDALESIMTTKSVSFRRLSHLRKLVPGFGKAYTIFNKTLMEADAHYKSVRTWNEIIPSKGCLRVGGRCHPHVNGVFFNGIILGPDGHVLIPEMQSSLLQQHMELLESSVIPLMHPLADPSTVFKDDDEAEDFVEVHLPDVHKQVSGVDLGLPSWGKYVLMSAGVLTALMLMIFLMTCCRRANRAESAQHSLGERGRKVSVTSQSGRVISSWESYKSGGETKL

SEQ ID NO: 30701 - protein, 524 aa, Artificial Sequence
  derived and/or modified protein sequence (wt) from glycoprotein__RABV__AB563991.1
MIPQALLFVPLLVFSLCFGKFPIYTIPDKLGPWSPIDIHHLSCPNNLVVEDEGCTNLSGFSYMELKVGYISAIKVNGFTCTGVVTEAETYTNFVGYVTTTFKRKHFRPTPDACRAAYNWKMAGDPRYEESLHNPYPDYHWLRTVKTTKESLVIISPSVADLDPYDKSLHSRVFPSGKCSGITVSSTYCSTNHDYTIWMPENPRLGTSCDIFTNSRGKRASKGSKTCGFVDERGLYKSLKGACKLKLCGVLGLRLMDGTWAAIQTSDETKWCPPDQLVNLHDFRSDEIEHLVVEELVRKREECLDALESIMTTKSVSFRRLSHLRKLVPGFGKAYTIFNKTLMEADAHYKSVRTWNEIIPSKGCLRVGGRCHPHVNGVFFNGIILGPDGHVLIPEMQSSLLQQHMELLESSVIPLMHPLADPSTVFKDDDEAEDFVEVHLPDVHKQVSGVDLGLPSWGKYVLMSAGVLTALMLMIFLMTCCRRTNRAESAQHSLGERGRKVSVTSQSGRVISSWESYKSGGETKL

SEQ ID NO: 30702 - protein, 524 aa, Artificial Sequence; identical to SEQ ID NO: 30688
  derived and/or modified protein sequence (wt) from glycoprotein__RABV__AB563992.1

SEQ ID NO: 30703 - protein, 524 aa, Artificial Sequence; identical to SEQ ID NO: 30688
  derived and/or modified protein sequence (wt) from glycoprotein__RABV__AB563993.1

SEQ ID NO: 30704 - protein, 524 aa, Artificial Sequence; identical to SEQ ID NO: 30571
  derived and/or modified protein sequence (wt) from glycoprotein__RABV__AB563994.1

SEQ ID NO: 30705 - protein, 524 aa, Artificial Sequence; identical to SEQ ID NO: 30572
  derived and/or modified protein sequence (wt) from glycoprotein__RABV__AB563996.1

SEQ ID NO: 30706 - protein, 524 aa, Artificial Sequence
  derived and/or modified protein sequence (wt) from glycoprotein__RABV__AB563997.1
MIPQALLFVPILVFSLCFGKFPIYTIPDKLGPWSPIDIHHLSCPNNLVVEDEGCTNLSGFSYMELKVGYISAIKVNGFTCTGVVTEAETYTNFVGYVTTTFKRKHFRPTPDACRAAYNWKMAGDPRYEESLHNPYPDYHWLRTVKTTKESLVIISPSVADLDPYDKSLHSRVFPSGKCSGITVSSTYCSTNHDYTIWMPENPRLGTSCDIFTNSRGKRASKGSKTCGFVDERGLYKSLKGACKLKLCGVLGLRLMDGTWAAIQTSDETKWCPPDQLVNLHDFRSDEIEHLVVEELVKKREECLDALESIMTTKSVSFRRLSHLRKLVPGFGKAYTIFNKTLMEADAHYKSVRTWNEIIPSKGCLRVGGRCHPHVNGVFFNGIILGPDGHVLIPEMQSSLLQQHMELLESSVIPLMHPLADPSTVFKDDDEAEDFVEVHLPDVHKQVSGVDLGLPSWGKYVLMSAGVLTALMLMIFLMTCCRRASRVESAQHSLGERGRKVSVTSQSGRVISSWESYKSGGETKL

SEQ ID NO: 30707 - protein, 524 aa, Artificial Sequence
  derived and/or modified protein sequence (wt) from glycoprotein__RABV__AB563998.1
MIPQALLFVPLLVFSLCFGKFPIYTIPDKLGPWSPIDIHHLSCPNNLVVEDEGCTNLSGFSYMELKVGYISAIKVNGFTCTGVVTEAETYTNFVGYVTTTFKRKHFRPTPDACRAAYNWKMAGDPRYEESLHKPYPDYHWLRTVKTTKESLVIISPSVADLDPYDKSLHSRVFPNGKCSGITVSSTYCSTNHDYTIWMPENPRLGTSCDIFTNSRGKRASKGSKTCGFVDERGLYKSLKGACKLKLCGVLGLRLMDGTWAAIQTSDETKWCPPDQLVNLHDFRSDEIEHLVVEELVKKREECLDALESIMTTKSVSFRRLSHLRKLVPGFGKAYTIFNKTLMEADAHYKSVRTWNEIIPSKGCLRVGGRCHPHVNGVFFNGIILGPDGHVLIPEMQSSLLQQHMELLESSVIPLMHPLADPSTVFKDDDEAEDFVEVHLPDVHKQVSGVDLGLPSWGKYVLMSAGVLTALMLMIFLMTCCRRANRAESAQHSLGERGRKVSVTSQSGRVISSWESYKSGGETKL

SEQ ID NO: 30708 - protein, 524 aa, Artificial Sequence
  derived and/or modified protein sequence (wt) from glycoprotein__RABV__AB563999.1
MIPQALLFVPLLVSSLCFGKFPIYTIPDKLGPWSPIDIHHLSCPNNLVVEDEGCTNLSGFSYMELKVGYISAIKVNGFTCTGVVTEAETYTNFVGYVTTTFKRKHFRPTPDACRAAYNWKMAGDPRYEESLHNPYPDYHWLRTVKTTKESLVIISPSVADLDPYDKSLHSRVFPSGKCSGITVSSTYCSTNHDYTIWMPENPRLGTSCDIFTNSRGKRASKGSKTCGFVDERGLYKSLKGACKLKLCGVLGLRLMDGTWAAIQTSDETKWCPPDQLVNLHDFRSDEIEHLVVEELVKKREECLDALESIMTTKSVSFRRLSHLRKLVPGFGKAYTIFNKTLMEADAHYKSVRTWNEIIPSKGCLRVGGRCHPHVNGVFFNGIILGPDGHVLIPEMQSSLLQQHMELLESSVIPLMHPLADPSTVFKDDDEAEDFVEVHLPDVHKQVSGVDLGLPSWGKYVLTSAGVLTALMLMIFLMTCCRRANRAESAQHSLGERGRKVSVTSQSRRVISSWESYKSGGETKL

SEQ ID NO: 30709 - protein, 524 aa, Artificial Sequence
  derived and/or modified protein sequence (wt) from glycoprotein__RABV__AB564001.1
MIPQALMFVPLLVFSLCFGKFPIYTIPDKLGPWSPIDIHHLSCPNNLVVEDEGCTNLSGFSYMELKVGYISAIKVNGFTCTGVVTEAETYTNFVGYVTTTFKRKHFRPMPDACRAAYNWKMAGDPRYEESLHNPYPDYHWLRTVKTTKESLVIISPSVADLDPYDKSLHSRVFPSGKCSGMTVSSTYCSTNHDYTIWMPENPRLGTSCDIFTNSRGKRASKGSKTCGFVDERGLYKSLKGACKLKLCGVLGLRLMDGTWAAIQTSDETKWCPPDQLVNLHDFRLDEIEHLVVEELVKKREECLDALESIMTTKSVSFRRLSHLRKLVPGFGKAYTIFNKTLMEADAHYKSVRTWNEIIPSKGCLRVGGRCHPHVNGVFFNGIILGPDGHVLIPEMQSSLLQQHMELLESSVIPLMHPLADPSTVFKGDDEAEDFVEVHLPDVHKQVSGVDLGLPSWGKYVLMSAGVLTALMLMIFLMTCCKRANRAESAHHSLGERGRKVSVTSQSGRVISSWESYKSGGETKL

SEQ ID NO: 30710 - protein, 524 aa, Artificial Sequence
  derived and/or modified protein sequence (wt) from glycoprotein__RABV__AB564002.1
MIPRALMFVPLLVFSLCFGKFPIYTIPDKLGPWSPIDIHHLSCPNNLVVEDEGCTNLSGFSYMELKVGYISAIKVNGFTCTGVVTEAETYTNFVGYVTTTFKRKHFRPMPDACRAAYNWKMAGDPRYEESLHNPYPDYHWLRTVKTTKESLVIISPSVADLDPYDKSLHSRVFPSGKCSGMTVSSTYCSTNHDYTIWMPENPRLGTSCDIFTNSRGKRASKGSKTCGFVDERGLYKSLKGACKLKLCGVLGLRLMDGTWAAIQTSDETKWCPPDQLVNLHDFRSDEIEHLVVEELVKKREECLDALESIMTTKSVSFRRLSHLRKLVPGFGKAYTIFNKTLMEADAHYKSVRTWNEIIPSKGCLRVGGRCHPHVNGVFFNGIILGPDGHVLIPEMQSSLLQQHMELLESSVIPLMHPLADPSTVFKGDDEAEDFVEVHLPDVHKQVSGVDLGLPSWGKYVLMSAGVLTALMLMIFLMTCCKRANRAESAHHNLGERGRKVSVTSQSGRVISSWESYKSGGETKL

SEQ ID NO: 30711 - protein, 524 aa, Artificial Sequence
  derived and/or modified protein sequence (wt) from glycoprotein__RABV__AB564004.1
MIPQALMFVPLLVFSLCLGKFPIYTIPDKLGPWSPIDIHHLSCPNNLVVEDEGCTNLSGFSYMELKVGYISAIKVNGFTCTGVVTEAETYTNFVGYVTTTFKRKHFRPMPDACRAAYNWKMAGDPRYEESLHNPYPDYHWLRTVKTTKESLVIISPSVADLDPYDKSLHSRVFPGGKCSGMTVSSTYCSTNHDYTIWMPENPRLGTSCDIFTNSRGKRASKGSKTCGFVDERGLYKSLKGACKLKLCGVLGLRLMDGTWAAIQTSDETKWCPPDQLVNLHDFRSDEIEHLVVEELVKKREECLDALESIMTTKSVSFRRLSHLRKLVPGFGKAYTIFNKTLMEADAHYKSVRTWNEIIPSKGCLRVGGRCHPHVNGVFFNGIILGPDGHVLIPEMQSSLLQQHMELLESSVIPLMHPLADPSTVFKGDDEAEDFVEVHLPDVHKQVSGVDLGLPSWGKYVLMSAGVLTALMLMIFLMTCCKRANRAESAHHSLGERGRKVSVTSQSGRVISSWESYKSGGETKL

SEQ ID NO: 30712 - protein, 524 aa, Artificial Sequence; identical to SEQ ID NO: 30639
  derived and/or modified protein sequence (wt) from glycoprotein__RABV__AB564005.1

SEQ ID NO: 30713 - protein, 524 aa, Artificial Sequence; identical to SEQ ID NO: 30639
  derived and/or modified protein sequence (wt) from glycoprotein__RABV__AB564006.1

SEQ ID NO: 30714 - protein, 524 aa, Artificial Sequence
  derived and/or modified protein sequence (wt) from glycoprotein__RABV__AB564007.1
MIPQALMFVPLLVFSLCFGKFPIYTIPDKLGPWSPIDIHHLSCPNNLVVEDEGCTNLSGFSYMELKVGYISAIKVNGFTCTGVVTEAETYTNFVGYVTTTFKRKHFRPMPDACRAAYNWKMAGDPRYEESLHNPYPDYHWLRTVKTTKESLVIISPSVADLDPYDKSLHSRVFPGGKCSGMTVSSTYCSTNHDYTIWMPENPRLGTSCDIFTNSRGKRASKGSKTCGFVDERGLYKSLKGACKLKLCGVLGLRLMDGTWAAIQTSDETKWCPPDQLVNLHDFRSDEIEHLVVEELVKKREECLDALESIMTTKSVSFRRLSHLRKLVPGFGKAYTIFNKTLMEADAHYKSVRTWNEIIPSKGCLRVGGRCHPHVNGVFFNGIILGPDGHVLIPEMQSSLLQQHMELLESSVIPLMHPLADPSTVFKGDDEAEDFVEVHLPDVHKQVSGVDLGLPSWGKYVLMSAGVLTALMLMIFLMTCCKRANRAKSAHHSLGERGRKVSVTSQSGRVISSWESYKSGGETKL

SEQ ID NO: 30715 - protein, 524 aa, Artificial Sequence; identical to SEQ ID NO: 30601
  derived and/or modified protein sequence (wt) from glycoprotein__RABV__AB564008.1

SEQ ID NO: 30716 - protein, 524 aa, Artificial Sequence
  derived and/or modified protein sequence (wt) from glycoprotein__RABV__AB564009.1
MNPQALMFVPLLVFSLCFGKFPIYTIPDKLGPWSPIDIHHLSCPNNLVVEDEGCTNLSGFSYMELKVGYISAIKVNGFTCTGVVTEAETYTNFVGYVTTTFKRKHFRPTPDACRAAYNWKMAGDPRYEESLHNPYPDYHWLRTVKTTKESLVIISPSVADLDPYDKSLHSRVFPSGKCSGITVSSTYCSTNHDYTIWMPENPRLGTSCDIFTNSRGKRASKGSKTCGFVDERGLYKSLKGACKLKLCGVLGLRLMDGTWAAIQTSDETKWCPPDQLVNLHDFRSDEIEHLVVEELVKKREECLDALESIMTTKSVSFRRLSHLRKLVPGFGKAYTIFNKTLMEADAHYKSVRTWNEIIPSKGCLRVGGRCHPHVNGVFFNGIILGPDGHVLIPEMQSSLLQQHVELLESSVIPLMHPLADPSTVFKDDDEAEDFVEVHLPDVHKQVSGVDLGLPSWGKYVLMSAGVLTALMLMIFLMTCCRRANRAESAQHSLGERGRKVSITSQSGRVISSWESYKSGGETKL

SEQ ID NO: 30717 - protein, 524 aa, Artificial Sequence; identical to SEQ ID NO: 30601
  derived and/or modified protein sequence (wt) from glycoprotein__RABV__AB564010.1

SEQ ID NO: 30718 - protein, 524 aa, Artificial Sequence; identical to SEQ ID NO: 30601
  derived and/or modified protein sequence (wt) from glycoprotein__RABV__AB564011.1

SEQ ID NO: 30719 - protein, 524 aa, Artificial Sequence
  derived and/or modified protein sequence (wt) from glycoprotein__RABV__AB564012.1
MNPQALMFVPLLVFSLCFGKFPIYTIPDKLGPWSPIDIHHLSCPNNLVVEDEGCTNLSGFSYMELKVGYISAIKVNGFTCTGVVTEAETYTNFVGYVTTTFKRKHFRPTPDACRAAYNWKMAGDPRYEESLHNPYPDYHWLRTVKTTKESLVIISPSVADLDPYDKSLHSRVFPSGKCSGITVSSTYCSTNHDYTIWMPENPRLGTSCDIFTNSRGKRASKGSKTCGFVDERGLYKSLKGACKLKLCGVLGLRLMDGTWAAIQTSDETKWCPPDQLVNLHDFHSDEIEHLVVEELVKKREECLDALESIMTTKSVSFRRLSHLRKLVPGFGKAYTIFNKTLMEADAHYKSVRTWNEIIPSKGCLRVGGRCHPHVNGVFFNGIILGPDGHVLIPEMQSSLLQQHMELLESSVIPLMHPLADPSTVFKDDDEAEDFVEVHLPDVHKQVSGVDLGLPSWGKYVLMSAGVLTALMLMIFLMTCCRRANRAESAQHSLGERGRKVSVTSQSGRVISSWESYKSGGETKL

SEQ ID NO: 30720 - protein, 524 aa, Artificial Sequence
  derived and/or modified protein sequence (wt) from glycoprotein__RABV__AB564015.1
MNPQALMFVPLLVFSLCFGKFPIYTIPDKLGPWSPIDIHHLSCPNNLVVEDEGCTNLSGFSYMELKVGYISAIKVNGFTCTGVVTEAETYTNFVGYVTTTFKRKHFRPTPDACRAAYNWKMAGDPRYEESLHNPYPDYHWLRTVKTTKESLVIISPSVADLDPYDKSLHSRVFPSGKCSGITVSSTYCSTNHDYTIWMPENPRLGTSCDIFTNSRGKRASKGSKTCGFVDERGLYKSLKGACKLKLCGVLGLRLMDGTWAAIQTSDETKWCPPDQLVNLHDFRSDEIEHLVVEELVKKREECLDALESIMTTKSVSFRRLSHLRKLVPGFGKAYTIFNKTLMEADAHYKSVRTWNEIIPSKGCLRVGGRCHPHVNGVFFNGIILGPDGHVLIPERQSSLLQQHMELLESSVIPLMHPLADPSTVFKDDDEAEDFVEVHLPDVHKQVSGVDLGLPSWGKYVLMSAGVLTALMLMIFLMTCCRRANRAESAQHSLGERGRKVSVTSQSGRVISSWESYKSGGETKL

SEQ ID NO: 30721 - protein, 524 aa, Artificial Sequence
  derived and/or modified protein sequence (wt) from glycoprotein__RABV__AB564016.1
MNPQALMFVPLLGFSLCFGKFPIYTIPDKLGPWSPIDIHHLSCPNNLVVEDEGCTNLSGFSYMELKVGYISAIKVNGFTCTGVVTEAETYTNFVGYVTTTFKRKHFRPTPDACRAAYNWKMAGDPRYEESLHNPYPDYHWLRTVKTTKESLVIISPSVADLDPYDKSLHSRVFPSGKCSGITVSSTYCSTNHDYTIWMPENPRLGTSCDIFTNSRGKRASKGSKTCGFVDERGLYKSLKGACKLKLCGVLGLRLMDGTWAAIQTSDETKWCPPDQLVNLHDFRSDEIEHLVVEELVKKREECLDALESIMTTKSVSFRRLSHLRKLVPGFGKAYTIFNKTLMEADAHYKSVRTWNEIIPSKGCLRVGGRCHPHVNGVFFNGIILGPDGHVLIPEMQSSLLQQHMELLESSVIPLMHPLADPSTVFKDDDEAEDFVEVHLPDVHKQVSGVDLGLPSWGKYVLMSAGVLTALMLMIFLMTCCRRANRAESAQHSLGERGRKVSVTSQSGRVISSWESYKSGGETKL

SEQ ID NO: 30722 - protein, 524 aa, Artificial Sequence
  derived and/or modified protein sequence (wt) from glycoprotein__RABV__AB564017.1
MNPQALMFVPLLVFSLCFGKFPIYTIPDKLGPWSPIDIHHLSCPNNLVVEDEGCTNLSGFSYMELKVGYISAIKVNGFTCTGVVTEAETYTNFVGYVTTTFKRKHFRPTPDACRAAYNWKMAGDPRYEESLHNPYPDYHWLRTVKTTKESLVIISPSVADLDPYDKSLHSRVFPSGKCSGITVSSTYCSTNHDYTIWMPENPRLGTSCDIFTNSRGKRASEGSKTCGFVDERGLYKSLKGACKLKLCGVLGLRLMDGTWAAIQTSDETKWCPPDQLVNLHDFRSDEIEHLVVEELVKKREECLDALESIMTTKSVSFRRLSHLRKLVPGFGKAYTIFNKTLMEADAHYKSVRTWNEIIPSKGCLRVGGRCHPHVNGVFFNGIILGPDGHVLIPEMQSSLLQQHMELLESSVIPLMHPLADPSTVFKDDDEAEDFVEVHLPDVHKQVSGVDLGLPSWGKYVLMSAGVLTALMLMIFLMTCCRRANRAESAQHSLGERGRKVSVTSQSGRVISSWESYKSGGETKL

SEQ ID NO: 30723 - protein, 524 aa, Artificial Sequence
  derived and/or modified protein sequence (wt) from glycoprotein__RABV__AB569299.1
MVPQALLFVPLLVFSLCFGKFPIYTIPDKLGPWSPIDIHHLSCPNNLVVEDEGCTNLSGFSYMELKVGYISAIKVNGFTCTGVVTEAETYTNFVGYVTTTFRRKHFRPTPDACRAAYNWKMAGDPRYEESLHNPYPDYHWLRTVKTTKESLVIISPSVADLDPYDKSLHSRVFPGGKCSGITVSSTYCSTNHDYTIWMPENPRLGTSCDIFVNSRGKRASKGGKTCGFVDERGLYKSLKGACKLKLCGVPGLRLMDGTWVAIQTSDETKWCPPDQLVNLHDFRSDEIEHLVVEELVKKREECLDALESIMTTKSVSFRRLSHLRKLVPGFGKAYTIFNKTLMEADAHYKSVRTWNEIIPSKGCLRVGGRCHPHVNGVFFNGIILGPDGHVLIPEMQSSLLQQHMELLESSVIPLMHPLADPSTVFKDGDEAEDFVEVHLPDVHKLISGVDLGLPSWGKYVLMSAGILITLMLMIFLMTCCRRVNQAGSKQHGLEGAGRKVSVTSQNGRVISSWESYKNGGETRL

SEQ ID NO: 30724 - protein, 524 aa, Artificial Sequence
  derived and/or modified protein sequence (wt) from glycoprotein__RABV__AB608731.1
MIPQALLFVPLLIPSLCIGEFPIYTIPDKLGPWTPIDIHHLSCPNNLVAENDGCTSLSGFSYMELKVGYISAIKVNGFTCTGVVTEAETYTNFVGYVTTTFKRKHFRPMPDACRAAHDWKMAGDPRYEDSLQNPYPDYHWLRTVKTTKESLVIISPSVADLDPYDKSLHSRVFPSGKCLGITVSSTYCSTNHDYTIWMPVEPRLGTSCDIFTNSRGKKASKGGRVCGFVDERGLYKSLKGACKLKLCGVPGIRLMDGTWVSIQTSEDIKWCPPDRLVNLHDFHSDELEHLVVEELIKRRENCLDALESIVTTKSVSFRRLSHLRKLVPGFGKAYTIFNKTLMEADAHYKSVKTWNEVIPSKGCLEVGGKCHPPVNGVFFNGIILGPDGNVLIPEMQSSLLQQHMELLESSVIPLMHPLADPSTVFKEGDEAEDFVEVHLPDVHKQVSDVDLGLPSWGKYLLMSAGALAILILAIVLIICCRRVNKTGSTQRGHRESRGKMSVAPQNGKIISSWELYKSESETGL

SEQ ID NO: 30725 - protein, 524 aa, Artificial Sequence
  derived and/or modified protein sequence (wt) from glycoprotein__RABV__AB635373.1
MVPQALLFVPLLVFSLCFGKFPIYTIPDKLGPWSPIDIHHLSCPNNLVVEDEGCTNLSGFSYMELKVGYISAIKVNGFTCTGVVTEAETYTNFVGYVTTTFRRKHFRPTPDACRAAYNWKMAGDPRYEESLHNPYPDYHWLRTVKTTKESLVIISPSVADLDPYDKSLHSRVFPGGKCSGITVSSTYCSTNHDYTIWMPENPRLGTSCDIFINSRGKRASKGGKTCGFVDERGLYKSLKGACKLKLCGVPGLRLMDGTWVAIQTSDETKWCPPDQLVNLHDFHSDEIEHLVVEELVKKREECLDALESIMTTKSVSFRRLSHLRKLVPGFGKAYTIFNKTLMEADAHYKSVRTWNEIIPSKGCLRVGGRCHPHVNGVFFNGIILGPDGHVLIPEMQSSLLQQHMELLESSVIPLMHPLADPSTVFKDGDEAEDFVEVHLPDVHKLISGVDLGLPSWGKYVLMSAGILTTLMLMIFLMICCRRVNQTGSKQHGLGGAGRKVSVTSQNGRVISSWESYKSGGETRL

SEQ ID NO: 30726 - protein, 524 aa, Artificial Sequence
  derived and/or modified protein sequence (wt) from glycoprotein__RABV__AB645847.1
MVPQALLVVPLLGFSLCFGKFPIYTIPDKLGPWSPIDIHHLSCPNNLVVEDEGCTNLSGFSYMELKVGYISAIKVNGFTCTGVVTEAETYTNFVGYVTTTFKRKHFRPTPDECRAAYNWKMAGDPRYEESLHNPYPDYHWLRTVKTTKESLVIISPSVADLDPYDKSLHSRVFPSGKCSGITVSSTYCSTNHDYTIWMPENPRLGTSCDIFTNSRGKRASKGSKTCGFVDERGLYKSLKGACKLKLCGVLGLKLMDGTWVAMQTSDETKWCPPDQLVNLHDFRSDEIEHLVVEDLVKKREECLDALESIMTTKSVSFRRLSHLRKLVPGFGKAYTIFNKTLMEADAHYKSVRTWNEVIPSKGCLKVGGRCHPHVNGVFFNGVILGPDGHVLIPEMQSSLLRQHMELLESSVIPLMHPLADPSTVFKDGDEAEDFVEVHLPDVHKQVSGVDLGLPNWGKYVSLSAGALIALMLMIFLMTCCRKVNRPEPTQRSLEGKGRKVSVTSQSGKVISSWESYKSGGETSL

SEQ ID NO: 30727 - protein, 524 aa, Artificial Sequence
  derived and/or modified protein sequence (wt) from glycoprotein__RABV__AB683584.1
MIPQALLFVPLLVFSLCFGKFPIYTIPDKLGPWSPIDIHHLSCPNNLVVEDEGCTNLSGFSYMELKVGYISAIKVNGFTCTGVVTEAETYTNFVGYVTTTFKRKHFRPTPDACRAAYNWKMAGDPRYEESLHNPYPDYHWLRTVKTTKESLVIISPSVADLDPYDKSLHSRVFPSGKCSGITVSSTYCSTNHDYTIWMPENPRLGTSCDIFTNSRGKRASKGSKTCGFVDERGLYKSLKGACKLKLCGVLGLRLMDGTWAAIQTSDETKWCPPDQLVNLHDFRSDEIEHLVVEELVKKREECLDALESIMTTKSVSFRRLSHLRKLVPGFGKAYTIFNKTLMEADAHYKSVRTWNEIIPSKGCLRVGGRCHPHVNGVFFNGIILGPDGHVLIPEMQSSLLQQHMELLESSVIPLMHPLADPSTVFKDDDEAEEFVEVHLPDVHKQVSGVDLGLPSWGKYVLMSAGVLTALMLMIFLMTCCRRANRVESAQHSLGERGRKVSVTSQSGRVISSWESYKSGGETKL

SEQ ID NO: 30728 - protein, 524 aa, Artificial Sequence; identical to SEQ ID NO: 30625
  derived and/or modified protein sequence (wt) from glycoprotein__RABV__AB683585.1

SEQ ID NO: 30729 - protein, 524 aa, Artificial Sequence
  derived and/or modified protein sequence (wt) from glycoprotein__RABV__AB683586.1
MIPQALLFVPLLVFSLCFGKFPIYTIPDKLGPWSPIDIHHLSCPNNLVVEDEGCTNLSGFSYMELKVGYISAIKVNGFTCTGVVTEAETYTNFVGYVTTTFKRKHFRPTPDACRAAYNWKMAGDPRYEESLHNPYPDYHWLRTVKTTKESLVIISPSVADLDPYDKSLHSRVFPSGKCSGITVSSTYCSTNHDYTIWMPENPRLGTSCDIFTNSRGKRASKGSKTCGFVDERGLYKSLKGACKLKLCGVLGLRLMDGTWAAIQTSDETKWCPPDQLVNLHDFRSDEIEHLVVEELVKKREECLDALESIMTTKSVSFRRLSHLRKLVPGFGKAYTILNKTLMEADAHYKSVRTWNEIIPSKGCLRVGGRCHPHVNGVFFNGIILGPDGHVLIPEMQSSLLQQHMELLESSVIPLMHPLADPSTVFKDDDEAEDFVEVHLPDVHKQVSGVDLGLPSWGKYVLMSAGVLTALMLMIFLMTCCRRANRAESAQHSLGEGERKVSVTSQSGRVISSWESYKSGGETKL

SEQ ID NO: 30730 - protein, 524 aa, Artificial Sequence
  derived and/or modified protein sequence (wt) from glycoprotein__RABV__AB683587.1
MIPQALLFVPLLVFSLCFGKFPIYTIPDKLGPWSPIDIHHLSCPNNLVVEDEGCTNLSGFSYMELKVGYISAIKVNGFTCTGVVTEAETYTNFVGYVTTTFKRKHFRPTPDACRAAYNWKMAGDPRYEESLHNPYPDYHWLRTVKTTKESLVIISPSVADLDPYDKSLHSRVFPSGKCSGITVSSTYCSTNHDYTIWMPENPRLGTSCDIFTNSRGKRASKGSKTCGFVDERGLYKSLKGACKLKLCGVLGLRLMDGTWAAIQTSDETKWCPSDQLVNLHDFRSDEIEHLVVEELVKKREECLDALESIMTTKSVSFRRLSHLRKLVPGFGKAYTIFNKTLMEADAHYKSVRTWNEIIPSKGCLRVGGRCHPHVNGVFFNGIILGPDGHVLIPEMQSSLLQQHMELLESSVIPLMHPLADPSTVFKDDDEAEDFVEVHLPDVHKQVSGVDLGLPSWGKYVLMSAGVLTALMLMIFLMTCCRRANRAESAQHSLGERGRKVSVTSQSGRVISSWESYKSGGETKL

SEQ ID NO: 30731 - protein, 524 aa, Artificial Sequence
  derived and/or modified protein sequence (wt) from glycoprotein__RABV__AB683589.1
MNPQALMFVPLLVFSLCFGKFPIYTIPDKLGPWSPIDIHHLSCPNNLVVEDEGCTNLSGFSYMELKVGYISAIKVNGFTCTGVVTEAETYTNFVGYVTTTFKRKHFRPMPDACRAAYNWKMAGDPRYEESLHNPYPDYHWLRTVKTTKESLVIISPSVADLDPYDKSLHSRVFPSGKCSGITVSSTYCSTNHDYTIWMPENPRLGTSCDIFTNSRGKRASKGSKTCGFVDERGLYKSLKGACKLKLCGVLGLRLMDGTWAAIQTSDETKWCPPDQLVNLHDFRSDEIEHLVVEELVKKREECLDALESIMTTKSVSFRRLSHLRKLVPGFGKAYTIFNKTLMEADAHYKSVRTWNEIIPSKGCLRVGGRCHPHVNGVFFNGIILGPDGHVLIPEMQSSLLQQHMELLESSVIPLMHPLADPSTVFKDDDEAEDFVEVHLPDVHKQVSGVDLGLPSWGKYVLMSAGVLTALMLMIFLMTCCRRANRAESAQHSLGERGRKVSVTSQSGRVISSWESYKSGGETKL

SEQ ID NO: 30732 - protein, 524 aa, Artificial Sequence; identical to SEQ ID NO: 30601
  derived and/or modified protein sequence (wt) from glycoprotein__RABV__AB683591.1

SEQ ID NO: 30733 - protein, 524 aa, Artificial Sequence
  derived and/or modified protein sequence (wt) from glycoprotein__RABV__AB699208.1
MVPQVLLFVPLLVFSMCFGKFPIYTIPDKLGPWSPIDIHHLSCPNNLVVEDEGCTNLSGFSYMELKVGYISAIKVNGFTCTGVVTEAETYTNFVGYVTTTFKRKHFRPTPDACRAAYNWKMAGDPRYEESLHNPYPDYHWLRTVKTTKESLVIISPSVADLDPYNKSLHSRVFPSGKCSGITISSTYCATNHDYTIWMPENPRLGTSCDIFTNSRGKRASKGGKTCGFVDERGLYKSLKGACKLKLCGVLGLRLMDGTWVAMQTSDETKWCPPDQLVNLHDFRSDEIEHLVVEELVKKREECLDALESIMTTKSVSFRRLSHLRKLVPGFGKAYTIFNKTLMEADAHYKSIRTWNEIIPSKGCLRVGGRCHPHVNGVFFNGIILGPDGHVLIPEMQSSLLQQHMELLESSVIPLMHPLADPSTVFKDGDEAEDFVEVHLPDVHKQISGVDLGLPSWGKYVLVSAGVLVVLMLTIFIMTCCGRVRRPKSTQHSLGGAGRKVSVTSQSGKVISSWESYKNGGETRL

SEQ ID NO: 30734 - protein, 524 aa, Artificial Sequence
  derived and/or modified protein sequence (wt) from glycoprotein__RABV__AB699209.1
MVPQVLSFVPLLVFSTCFGKFPIYTIPDKLGPWSPIDIHHLSCPNNLVVEDEGCTNLSGFSYMELKVGYISAIKVNGFTCTGVVTEAETYTNFVGYVTTTFKRKHFRPTPDACRAAYNWKMAGDPRYEESLHNPYPDYHWLRTVKTTKESLVIISPNVADLDPYNKSLHSRVFPSGKCSGITISSTYCSTNHDYTIWMPENPRLGTSCDIFTNSRGKRASKGGKTCGFVDERGLYKSLKGACKLKLCGVLGLRLMDGTWVAMQTSDETKWCPPDQLVNLHDFRSDEIEHLVVEELVKKREECLDALESIMTTKSVSFRRLSHLRKLVPGFGKAYTIFNKTLMEADAHYKSVRTWNEIIPSKGCLRVGGRCHPHVNGVFFNGIILGPDGHVLIPEMQSSLLQQHMELLESSVIPLMHPLADPSTVFKDGDEAEDFVEVHLPDVHKQISGVDLGLPSWGKYVLVSAGVLVVLMLTIFIMTCCGKVRRPKSTQHSLGGTGRKVSVTSQSGKVISSWESYKSGGETRL

SEQ ID NO: 30735 - protein, 524 aa, Artificial Sequence
  derived and/or modified protein sequence (wt) from glycoprotein__RABV__AB699210.1
MVPQVLSFVPLLVFSTCFGKFPIYTIPDKLGPWSPIDIHHLSCPNNLVVEDEGCTNLSGFSYMELKVGYISAIKVNGFTCTGVVTEAETYTNFVGYVTTTFKRKHFRPTPDACRAAYNWKMAGDPRYEESLHNPYPDYHWLRTVKTTKESLVIISPSVADLDPYNKSLHSRVFPSGKCSGITISSTYCSTNHDYTIWMPENPRLGTSCDIFTNSRGKRASKGGKTCGFVDERGLYKSLKGACKLKLCGVLGLRLMDGTWVAMQTSDETKWCPPDQLVNLHDFRSDEIEHLVVEELVKKREECLDALESIMTTKSVSFRRLSHLRKLVPGFGKAYTIFNKTLMEADAHYKSVRTWNEIIPSKGCLRVGGRCHPHVNGVFFNGIILGPDGHVLIPEMQSSLLQQHMELLESSVIPLMHPLADPSTVFKDGDEAEDFVEVHLPDVHKQISGVDLGLPSWGKYVLVSAGVLVVLMLTIFIMTCCGRVRRPKSTQHSLGGTGRKVSVTSQSGKVISSWESYKSGGETRL

SEQ ID NO: 30736 - protein, 524 aa, Artificial Sequence
  derived and/or modified protein sequence (wt) from glycoprotein__RABV__AB699212.1
MVPQVLSFVPLLVFSTCFGKFPIYTIPDKLGPWSPIDIHHLSCPNNLVVEDEGCTNLSGFSYMELKVGYISAIKVNGFTCTGVVTEAETYTNFVGYVTTTFKRKHFRPTPDACRAAYNWKMAGDPRYEESLHNPYPDYHWLRTVKTTKESLVIISPSVADLDPYDKSLHSRVFPSGKCSGITISSTCCSTNHDYTIWMPENPRLGTSCDIFTNSRGKRASKGGKTCGFVDERGLYKSLKGACKLKLCGVLGLRLMDGTWVAMQTSDETKWCPPDQLVNLHDFRSDEIEHLVVEELVKKREECLDALESIMTTKSVSFRRLSHLRKLVPGFGKAYTIFNKTLMEADAHYKSVRTWNEIIPSKGCLRVGGRCHPHVNGVFFNGIILGPDGHVLIPEMQSSLLQQHMELLESSVIPLMHPLADPSTVFKDGDEAEDFVEVHLPDVHKQISGVDLGLPSWGKYVLVSAGVLVVLMLTIFIMTCCGRVRRPKSTQHSLGGTGRKVSVTSQSGKVISSWESYKSGGETRL

SEQ ID NO: 30737 - protein, 524 aa, Artificial Sequence; identical to SEQ ID NO: 30735
  derived and/or modified protein sequence (wt) from glycoprotein__RABV__AB699213.1

SEQ ID NO: 30738 - protein, 524 aa, Artificial Sequence
  derived and/or modified protein sequence (wt) from glycoprotein__RABV__AB733961.1
MIPQALLFVPLLVSSLCFGKFPIYTIPDKLGPWSPIDIHHLSCPNNLVVEDEGCTNLSGFSYMELKVGYISAIKVNGFTCTGVVTEAETYTNFVGYVTTTFKRKHFRPTLDACRAAYNWKMAGDPRYEESLHNPYPDYHWLRTVKTTKESLVIISPSVADLDPYDKSLHSRVFPSGKCSGITVSSTYCSTNHDYTIWMPENPRLGTSCDIFTNSRGKRASKGSKTCGFVDERGLYKSLKGACKLKLCGVLGLRLMDGTWAAIQTSDETKWCPPDQLVNLHDFRSDEIEHLVVEELVKKREECLDALESIMTTKSVSFRRLSHLRKLVPGFGKAYTIFNKTLMEADAHYKSVRTWNEIIPSKGCLRVGGRCHPHVNGVFFNGIILGPDGHVLIPEMQSSLLQQHMELLESSVIPLMHPLADPSTVFKDDDEAEDFVEVHLPDVHKQVSGVDLGLPSWGKYVLTSAGVLTALMLMIFLMTCCRRANRAESAQHSLGERGRKVSVTSQSGRVISSWESYKSGGETKL

SEQ ID NO: 30739 - protein, 524 aa, Artificial Sequence
  derived and/or modified protein sequence (wt) from glycoprotein__RABV__AB733962.1
MIPQALLFVPLLVFSLCLGKFPIYTIPDKLGPWSPIDIHHLSCPNNLVVEDEGCTNLSGFSYMELKVGYISAIKVNGFTCTGVVTEAETYTNFVGYVTTTFKRKHFRPTPDACRAAYNWKMAGDPRYEESLHNPYPDYHWLRTVKTTKESLVIISPSVADLDPYDKSLHSRVFPSGKCSGITVSSTYCSTNHDYTIWMPENPRLGTSCDIFTNSRGKRASKGSKTCGFVDERGLYKSLKGACKLKLCGVLGLRLMDGTWAAIQTSDEIKWCPPDQLVNLHDFRSDEIEHLVVEELVKKREECLDALESIMTTKSVSFRRLSHLRKLVPGFGKAYTIFNKTLMEADAHYKSVRTWNEIIPSKGCLRVGGRCHPHVNGVFFNGIILGPDGHVLIPEMQSSLLQQHMELLESSVIPLMHPLADPSTVFKDDDEAEDFVEVHLPDVHKQVSGVDLGLPSWGKYVLMSAGVLTALMLMIFLTTCCRRANRAESAQHSLGERGRKVSVTSQSGRVISSWESYKSGGETKL

SEQ ID NO: 30740 - protein, 524 aa, Artificial Sequence; identical to SEQ ID NO: 30571
  derived and/or modified protein sequence (wt) from glycoprotein__RABV__AB733963.1

SEQ ID NO: 30741 - protein, 524 aa, Artificial Sequence
  derived and/or modified protein sequence (wt) from glycoprotein__RABV__AB733964.1
MIPQALLFVPLLVFSLCLGKFPIYTIPDKLGPWSPIDIHHLSCPNNLVVEDEGCTNLSGFSYMELKVGYISAIKVNGFTCTGVVTEAETYTNFVGYVTTTFKRKHFRPTPDACRAAYNWKMAGDPRYEESLHNPYPDYHWLRTVKTTKESLVIISPSVADLDPYDKSLHSRVFPSGKCSGITVSSTYCSTNHDYTIWMPENPRLGTSCDIFTNSRGKRASKGSKTCGFVDERGLYKSLKGACKLKLCGVLGLRLMDGTWAAIQTSDETKWCPPDQLVNLHDFHSDEIEHLVVEELVKKREECLDALESIMTTKSVSFRRLSHLRKLVPGFGKAYTIFNKTLMEADAHYKSVRTWNEIIPTKGCLRVGGRCHPHVNGVFFNGIILGPDGHVLIPEMQSSLLQQHMELLESSVIPLMHPLADPSTVFKDDDEAEDFVEVHLPDVHKQVSGVDLGLPSWGKYVLMSAGVLTALMLMIFLTTCCRRADRAESAQHSLGERGRKVSVTSQSGRVISSWESYKSGGETKL

SEQ ID NO: 30742 - protein, 524 aa, Artificial Sequence; identical to SEQ ID NO: 30602
  derived and/or modified protein sequence (wt) from glycoprotein__RABV__AB733965.1

SEQ ID NO: 30743 - protein, 524 aa, Artificial Sequence
  derived and/or modified protein sequence (wt) from glycoprotein__RABV__AB733966.1
MIPQALLFVPLLVFSLCFGKFPIYTIPDKLGPWSPIDIHHLSCPNNLVVEDEGCTNLSGFSYMELKVGYISAIKVNGFTCTGVVTEAETYTNFVGYVTTTFKRKHFRPTPDACRAAYNWKMAGDPRYEESLHNPYPDYHWLRTVKTTKESLVIISPSVADLDPYDKSLHSRVFPSGKCSGITVSSTYCSTNHDYTIWMPENPRLGTSCDIFTNSRGKRASKGSKTCGFVDERGLYKSLKGACKLKLCGVLGLRLMDGTWAAIQTSDETKWCPPDQLVNLHDFHSDEIEHLVVEELVKKREECLDALESIMTTKSVSFRRLSHLRKLVPGFGKAYTIFNKTLMEADAHYKSVRTWNEIIPSKGCLRVGGRCHPHVNGVFFNGIILGPDGHVLIPEMQSSLLQQHMELLESSVIPLMHPLADPSTVFKDDDEAEDFVEVHLPDVHKQVSGVDLGLPSWGKYVLMSAGVLTALMLMIFLTTCCRRANRAESAQHSLGERGRKVSVTSQSGRVISSWESYKSGGETKL

SEQ ID NO: 30744 - protein, 524 aa, Artificial Sequence; identical to SEQ ID NO: 30700
  derived and/or modified protein sequence (wt) from glycoprotein__RABV__AB733967.1

SEQ ID NO: 30745 - protein, 524 aa, Artificial Sequence
  derived and/or modified protein sequence (wt) from glycoprotein__RABV__AB733968.1
MIPQALLFVPLLVFSLCFGKFPIYTIPDKLGPWSPIDIHHLSCPNNLVVEDEGCTNLSGFSYMELKVGYISAIKVNGFTCTGVVTEAETYTNFVGYVTTTFKRKHFRPTPDACRAAYNWKMAGDPRYEESLHNPYPDYHWLRTVKTTKESLVIISPSVADLDPYDKSLHSRVFPSGKCSGITVSSTYCPTNHDYTIWMPENPRLGTSCDIFTNSRGKRASKGSKTCGFVDERGLYKSLKGACKLKLCGVLGLRLMDGTWAAIQTSDETKWCPPDQLVNLHDFRSDEIEHLVVEELVKKREECLDALESIMTTKSVSFRRLSHLRKLVPGFGKAYTIFNKTLMEADAHYKSVRTWNEIIPSKGCLRVGGRCHPHVNGVFFNGIILGPDGHVLIPEMQSSLLQQHMELLESSVIPLMHPLADPSTVFKDDDEAEDFVEVHLPDVHKQVSGVDLGLPSWGKYVLMSAGVLTALMLMIFLTTCCRRADRAESAQHSLGERGRKVSVTSQSGRVISSWESYKSGGETKL

SEQ ID NO: 30746 - protein, 524 aa, Artificial Sequence; identical to SEQ ID NO: 30599
  derived and/or modified protein sequence (wt) from glycoprotein__RABV__AB733969.1

SEQ ID NO: 30747 - protein, 524 aa, Artificial Sequence; identical to SEQ ID NO: 30688
  derived and/or modified protein sequence (wt) from glycoprotein__RABV__AB733970.1

SEQ ID NO: 30748 - protein, 524 aa, Artificial Sequence
  derived and/or modified protein sequence (wt) from glycoprotein__RABV__AB733971.1
MIPQALLFVPLLVSSLCFGKFPIYTIPDKLGPWSPIDIHHLSCPNNLVVEDEGCTNLSGFSYMELKVGYISAIKVNGFTCTGVVTEAETYTNFVGYVTTTFKRKHFRPTPDACRAAYNWKMAGDPRYEESLHNPYPDYHWLRTVKTTKESLVIISPSVADLDPYDKSLHSRVFPSGKCSGITVSSTYCSTNHDYTIWMPENPRLGTSCDIFTNSRGKRASKGSKTCGFVNERGLYKSLKGACKLKLCGVLGLKLMDGTWAAIQTSNETKWCPPDQLVNLHDFRSDEIEHLVVEELVKKREECLDALESIMTTKSVSFRRLSHLRKLVPGFGKAYTIFNKTLMEADAHYKSVRTWNEIIPSKGCLRVGGRCHPHVNGVFFNGIILGPDGHVLIPEMQSSLLQQHMELLESSVIPLMHPLADPSTVFKDDDEAEDFVEVHLPDVHKQVSGVDLGLPSWGKYVLTSAGVLTALMLMIFLMTCCRRANRAESAQHSLGERGRKVSVTSQSGRVISSWESYKSGGETKL

SEQ ID NO: 30749 - protein, 524 aa, Artificial Sequence
  derived and/or modified protein sequence (wt) from glycoprotein__RABV__AB733972.1
MIPQALLFVPLLVFSLCFGKFPIYTIPDKLGPWSPIDIHHLSCPNNLVVEDEGCTNLSGFSYMELKVGYISAIKVNGFTCTGVVTEAETYTNFVGYVTTTFKRKHFRPTPDACRAAYNWKMAGDPRYEESLHNPYPDYHWLRTVKTTKESLVIISPSVADLDPYDKSLHSRVFPSGKCSGITVSSTYCSTNHDYTIWMPENPRLGTSCDIFTNSRGKRASKGSKTCGFVDERGLYKSLKGACKLKLCGVLGLRLMDGTWAAIQTSDETKWCPPDQLVNLHDFRSDEIEHLVVEELVKKREECLDALESIMTTKSVSFRRLSHLRKLVPGFGKAYTIFNKTLMEADAHYKSVRTWNEIIPSKGCLRVGGRCHPHVNGVFFNGIILGPDGHVLIPEMQSSLLQQHMELLESSVIPLMHPLADPSTVFKNDDEAEDFVEVHLPDVHKQVSGVDLGLPSWGKYVLMSAGVLTALMLMIFLMTCCRRTNRAESAQHSLGERGRKVSVTSQSGRVISSWESYKSGGETKL

SEQ ID NO: 30750 - protein, 524 aa, Artificial Sequence; identical to SEQ ID NO: 30745
  derived and/or modified protein sequence (wt) from glycoprotein__RABV__AB733973.1

SEQ ID NO: 30751 - protein, 524 aa, Artificial Sequence
  derived and/or modified protein sequence (wt) from glycoprotein__RABV__AB733974.1
MIPQALLFVPLLVFSLCFGKFPIYTIPDKLGPWSPIDIHHLSCPNNLVVEDEGCTNLSGFSYMELKVGYISAIKVNGFTCTGVVTEAETYTNFVGYVTTTFKRKHFRPTPDACRAAYNWKMAGDPRYEESLHNPYPDYHWLRTVKTTKESLVIISPSVADLDPYDKSLHSRVFPSGKCSGITVSSTYCSTNHDYTIWMPENPRLGTSCDIFTNSRGKRASKGSKTCGFVDERGLYKSLKGACKLKLCGVLGLKLMDGTWAAIQTSNETKWCPPDQLVNLHDFRSDEIEHLVVEELVKKREECLDALESIMTTKSVSFRRLSHLRKLVPGFGKAYTIFNKTLMEADAHYKSVRTWNEIIPSKGCLRVGGRCHPHVNGVFFNGIILGPDGHVLIPEMQSSLLQQHMELLESSVIPLMHPLADPSTVFKDDDEAEDFVEVHLPDVHKQVSGVDLGLPSWGKYVLMSAGVLTALMLMIFLMTCCRRANRAESAQHSLGERGRKVSVTSQSGRVISSWESYKSGGETKL

SEQ ID NO: 30752 - protein, 524 aa, Artificial Sequence; identical to SEQ ID NO: 30751
  derived and/or modified protein sequence (wt) from glycoprotein__RABV__AB733975.1

SEQ ID NO: 30753 - protein, 524 aa, Artificial Sequence; identical to SEQ ID NO: 30572
  derived and/or modified protein sequence (wt) from glycoprotein__RABV__AB733976.1

SEQ ID NO: 30754 - protein, 524 aa, Artificial Sequence; identical to SEQ ID NO: 30633
  derived and/or modified protein sequence (wt) from glycoprotein__RABV__AB733977.1

SEQ ID NO: 30755 - protein, 524 aa, Artificial Sequence
  derived and/or modified protein sequence (wt) from glycoprotein__RABV__AB733979.1
MIPQALLFVPLLVFSLCFGKFPIYTIPDKLGPWSPIDIHHLSCPNNLVVEDEGCTNLSGFSYMELKVGYISAIKVNGFTCTGVVTEAETYTNFVGYVTTTFKRKHFRPTPDACRAAYNWKMAGDPRYEESLHNPYPDYHWLRTVKTTKESLVIISPSVADLDPYDKSLHSRVFPSGKCSGITVSSTYCSTNHDYTIWMPENPRLGTSCDIFTNSRGKRASKGSKTCGFVDERGLYKSLKGACKLKLCGVLGLRLMDGTWAAIQTSDETKWCPPDQLVNLHDFRSDEIEHLVVEELVKKREECLDALESIMTTKSVSFRRLSHLRKLVPGFGKAYTIFNKTLMEADAHYKSVRTWNEIIPSKGCLRVGGRCHPHVNGVFFNGIILGPDGHVLIPEMQSSLLQQHMELLESSVIPLMHPLADPSTVFKDDDEAEDFVEVHLPDVHKQVSGVDLGLPSWGKYVLMSAGVLTALMLMILLMTCCRRANRVESAQHSLGERGRKVSVTSQSGRVISSWESYKSGGETKL

SEQ ID NO: 30756 - protein, 524 aa, Artificial Sequence
  derived and/or modified protein sequence (wt) from glycoprotein__RABV__AB781935.1
MVPQALLFVPLLVFPLCFGKFPIYTIPDKLGPWSPIDIHHLSCPNNLVVEDEGCTNLSGFSYMELKVGYILAIKMNGFTCTGVVTEAETYTNFVGYVTTTFKRKHFRPTPDACRAAYNWKMAGDPRYEESLQNPYPDYRWLRTVKTTKESLVIISPSVADLDPYDRSLHSRVFPSGKCSGVAVSSTYCSTNHDYTIWMPENPRLGMSCDIFTNSRGKRASKGSETCGFVDERGLYKSLKGACKLKLCGVLGLRLMDGTWVAMQTSNETKWCPPDQLVNLHDFHSDEIEHLVVEELVRKREECLDALESIMTTKSVSFRRLSHLRKLVPGFGKAYTIFNKTLMEADAHYKSVRTWNEIIPSKGCLRVGGRCHPHVNGVFFNGIILGPDGNVLIPEMQSSLLQQHMELLESSVIPLVHPLADPSTIFKDGDEAEDFVEVHLPDVHNQVSGVDLGLPNWGKYVLLSAGALTALMLIIFLMTCCRRVNRSEPTQHNLRGTGREVSVTPQSGKIISSWESHKSGGETRL

SEQ ID NO: 30757 - protein, 524 aa, Artificial Sequence
  derived and/or modified protein sequence (wt) from glycoprotein__RABV__AB817099.1
MVPQALLFVPLLVFSLCFGKFPIYTIPDKLGPWSPIDIHHLSCPNNLVVEDEGCTNLSGFSYMELKVGYISAIKVNGFTCTGVVTEAETYTNFVGYVTTTFRRKHFRPTPDACRAAYNWKMAGDPRYEESLHNPYPDYHWLRTVKTTKESLVIISPSVADLDPYDKSLHSRVFPGGKCSGITVSSTYCSTNHDYTIWMPENPRLGTSCDIFVNSRGKRASKGGKTCGFVDERGLYKSLKGACKLKLCGVPGLRLMDGTWVAIQTSDETKWCPPDQLVNLHDFRSDEIEHLVVEELVKKREECLDALESIMTTKSVSFRRLSHLRKLVPGFGKAYTIFNKTLMEADAHYKSVRTWNEIIPSKGCLRVGGRCHPHVNGVFFNGIILGPDGHVLIPEMQSSLLQQHMELLESSVIPLMHPLADPSTVFKDGDEAEDFVEVHLPDVHKLISGVDLGLPSWGKYVLMSAGILTTLMLMIFLMTCCRRVNQAGSKQHGLEGAGRKVSVTSQNGRVISSWESYKSGGETRL

SEQ ID NO: 30758 - protein, 524 aa, Artificial Sequence
  derived and/or modified protein sequence (wt) from glycoprotein__RABV__AB817100.1
MVPQALLFVPLLVFSLCFGKFPIYTIPDKLGPWSPIDIHHLSCPNNLVVEDEGCTNLSGFSYMELKVGYISAIKVNGFTCTGVVTEAETYTNFVGYVTTTFRRKHFRPTPDACRAAYNWKMAGDPRYEESLHNPYPDYHWLRTVKTTKESLVIISPSVADLDPYDKSLHSRVFPGGKCSGITVSSTYCSTNHDYTIWMPENPRLGTSCDIFVNSRGKRASKGGKTCGFVDERGLYKSLKGACKLKLCGVPGLRLMDGTWVAIQTSDETKWCPPDQLVNLHDFRSDEIEHLVVEELVKKREECLDALESIMTTKSVSFRRLSHLRKLVPGFGKAYTIFNKTLMEADAHYKSVRTWNEIIPSKGCLRVGGRCHPHVNGVFFNGIILGPDGHVLIPEMQSSLLQQHMELLESSVIPLMHPLADPSTVFKDGDEAEDFVEVHLPDVHKLISGVDLGLPSWGKYVLMSAGILITLMLMIFLMTCCRRVNQAGSKQHGLEGAGRKVSVTSQNGRVISSWESYKSGGETRL

SEQ ID NO: 30759 - protein, 524 aa, Artificial Sequence
  derived and/or modified protein sequence (wt) from glycoprotein__RABV__AB817101.1
MVPQALLFVPLLVFSLCFGKFPIYTIPDKLGPWSPIDIHHLSCPNNLVVEDEGCTNLSGFSYMELKVGYISAIKVNGFTCTGVVTEAETYTNFVGYVTTTFRRKHFRPTPDACRAAYNWKMAGDPRYEESLHNPYPDYHWLRTVKTTKESLVIISPSVADLDPYDKSLHSRVFPGGKCSGITVSSTYCSTNHDYTIWMPENPRLGTSCDIFVNSRGKRASKGGKTCGFVDERGLYKSLKGACKLKLCGVPGLRLMDGTWVAIQTSDETKWCPPDQLVNLHDFRSDEIEHLVVEELVKKREECLDALESIMTTKSVSFRRLSHLRKLVPGFGKAYTIFNKTLMEADAHYKSVRTWNEIIPSKGCLRVGGRCHPHVNGVFFNGIILGPDGHVLIPEMQSSLLQQHMELLESSVIPLMHPLADPSTVFKDGDEAEDFVEVHLPDVHKLISGVDLGLPSWGKYVLMSAGILTTLMLMIFLMTCCRRVNQAGSKQHGLEGPGRKVSVTSQNGRVISSWESYKSGGETRL

SEQ ID NO: 30760 - protein, 524 aa, Artificial Sequence
  derived and/or modified protein sequence (wt) from glycoprotein__RABV__AB817102.1
MVPQTLLFVPLLVFSLCFGKFPIYTIPDKLGPWSPIDIHHLSCPNNLVVEDEGCTNLSGFSYMELKVGYISAIKVNGFTCTGVVTEAETYTNFVGYVTTTFRRKHFRPTPDACRAAYNWKMAGDPRYEESLHNPYPDYHWLRTVKTTKESLVIISPSVADLDPYDKSLHSRVFPGGKCSGITVSSTYCSTNHDYTIWMPENPRLGTSCDIFVNSRGKRASRGGKTCGFVDERGLYKSLKGACKLKLCGVPGLRLMDGTWVAIQTSDETKWCPPDQLVNLHDFRSDEIEHLVVEELVKKREECLDALESIMTTKSVSFRRLSHLRKLVPGFGKAYTIFNKTLMEADAHYKSVRTWNEIIPSKGCLRVGGRCHPHVNGVFFNGIILGPDGHVLIPEMQSSLLQQHMELLESSVIPLMHPLADPSTVFKDGDEAEDFVEVHLPDVHKLISGVDLGLPSWGKYVLMSVGILTTLMLMIFLMTCCRRVNQVGPKQHGLEGAGRKVSVTSQNGRVISSWESYKSGGETRL

SEQ ID NO: 30761 - protein, 524 aa, Artificial Sequence
  derived and/or modified protein sequence (wt) from glycoprotein__RABV__AB817103.1
MVPQALLFVPLLVFSLCFGKFPIYTIPDKLGPWSPIDIHHLSCPNNLVVEDEGCTNLSGFSYMELKVGYISAIKVNGFTCTGVVTEAETYTNFVGYVTTTFRRKHFRPTPDACRAAYNWKMAGDPRYEESLHNPYPDYHWLRTVKTTKESLVIISPSVADLDPYDKSLHSRVFPGGKCSGITVSSTYCSTNHDYTIWMPENPRLGTSCDIFVNSRGKRASKGGKTCGFVDERGLYKSLKGACKLKLCGVPGLRLMDGTWVAIQTSDETKWCPPDQLVNLHDFRSDEIEHLVVEELVKKREECLDALESIMTTKSVSFRRLSHLRKLVPGFGKAYTIFNKTLMEADAHYKSVRTWNEIIPSKGCLRVGGRCHPHVNGVFFNGIILGPDGHVLIPEMQSSLLQQHMELLESSVIPLMHPLADPSTVFKDGDEAEDFVEVHLPDVHKLISGVDLGLPSWGKYVLMSAGILTTLMLMIFLMTCCRRVNQAGSKQHGLEGAGRKVSVTSQNGRIISSWESYKSGGETRL

SEQ ID NO: 30762 - protein, 524 aa, Artificial Sequence; identical to SEQ ID NO: 30758
  derived and/or modified protein sequence (wt) from glycoprotein__RABV__AB817104.1

SEQ ID NO: 30763 - protein, 524 aa, Artificial Sequence
  derived and/or modified protein sequence (wt) from glycoprotein__RABV__AB817105.1
MVPQALLFVPLLVFSLCFGKFPIYTIPDKLGPWSPIDIHHLSCPNNLVVEDEGCTNLSGFSYMELKVGYISAIKVNGFTCTGVVTEAETYTNFVGYVTTTFRRKHFRPTPDACRAAYNWKMAGDPRYEESLHNPYPDYHWLRTVKTTKESLVIISPSVADLDPYDKSLHSRVFPGGKCSGITVSSTYCSTNHDYTIWMPENPRLGTSCDIFVNSRGKRASKGGKTCGFVDERGLYKSLKGACKLKLCGVPGLRLMDGTWVAIQTSDETKWCPPDQLVNLHDFRSDEIEHLVVEELVKKREECLDALESIMTTKSVSFRRLSHLRKLVPGFGKAYTIFNKTLMEADAHYKSVRTWNEIIPSKGCLRVGGRCHPHVNGVFFNGIILGPDGHVLIPEMQSSLLQQHMELLESSVIPLMHPLADPSTVFKDGDEAEDFVEVHLPDVHKLISGVDLGLPSWGKYVLMSAGILTTLMLMIFLMTCCRRVNQAGSKQHGLEGAGRKVSVTSQTGRIISSWESYKSGGETRL

SEQ ID NO: 30764 - protein, 524 aa, Artificial Sequence; identical to SEQ ID NO: 30757
  derived and/or modified protein sequence (wt) from glycoprotein__RABV__AB817106.1

SEQ ID NO: 30765 - protein, 524 aa, Artificial Sequence; identical to SEQ ID NO: 30758
  derived and/or modified protein sequence (wt) from glycoprotein__RABV__AB817107.1

SEQ ID NO: 30766 - protein, 524 aa, Artificial Sequence; identical to SEQ ID NO: 30758
  derived and/or modified protein sequence (wt) from glycoprotein__RABV__AB817108.1

SEQ ID NO: 30767 - protein, 524 aa, Artificial Sequence; identical to SEQ ID NO: 30758
  derived and/or modified protein sequence (wt) from glycoprotein__RABV__AB817109.1

SEQ ID NO: 30768 - protein, 524 aa, Artificial Sequence
  derived and/or modified protein sequence (wt) from glycoprotein__RABV__AB817110.1
MVPQALLFVPLLVFSLCFGKFPIYTIPDKLGPWSPIDIHHLSCPNNLVVEDEGCTNLSGFSYMELKVGYISAIKVNGFTCTGVVTEAETYTNFVGYVTTTFRRKHFRPTPDACRAAYNWKMAGDPRYEESLHNPYPDYHWLRTVKTTKESLVIISPSVADLDPYDKSLHSRVFPGGKCSGITVSSTYCSTNHDYTIWMPENPRLGTSCDIFVNSRGKRASKGGKTCGFVDERGLYKSLKGACKLKLCGVPGLRLMDGTWVAIQTSDETKWCPPDQLVNLHDFRSDEIEHLVVEELVKKREECLDALESIMTTKSVSFRRLSHLRKLVPGFGKAYTIFNKTLMEADAHYKSVRTWNEIIPSKGCLRVGGRCHPHVNGVFFNGIILGPDGHVLIPEMQSSLLQQHMELLESSVIPLMHPLADPSTVFKDGDEAEDFVEVHLPDVHKLISGVDLGLPSWGKYVLISAGILITLMLMIFLMTCCRRVNQAGSKQHGLEGAGRKVSVTSQNGRVISSWESYKNGGETRL

SEQ ID NO: 30769 - protein, 524 aa, Artificial Sequence
  derived and/or modified protein sequence (wt) from glycoprotein__RABV__AB817111.1
MVPQALLFVPLLVFSLCFGKFPIYTIPDKLGPWSPIDIHHLSCPNNLVVEDEGCTNLSGFSYMELKVGYISAIKVNGFTCTGVVTEAETYTNFVGYVTTTFRRKHFRPTPDACRAAYNWKMAGDPRYEESLHNPYPDYHWLRTVKTTKESLVIISPSVADLDPYDKSLHSRVFPGGKCSGITVSSTYCSTNHDYTIWMPENPRLGTSCDIFVNSRGKRASKGGKTCGFVDERGLYKSLKGACKLKLCGVPGLRLMDGTWVAIQTSDETKWCPPDQLVNLHDFRSDEIEHLVVEELVKKREECLDALESIMTTKSVSFRRLSHLRKLVPGFGKAYTIFNKTLMEADAHYKSVRTWNEIIPSKGCLRVGGRCHPHVNGVFFNGIILGPDGHVLIPEMQSSLLQQHMELLESSVIPLMHPLADPSTVFKDGDEAEDFVEVHLPDVHKLISGVDLGLPSWGKYVLMSAGILITLMLMIFLMTCCRRVNQAGSRQHELEGAGRKVSVTSQNGRVISSWESYKSGGETRL

SEQ ID NO: 30770 - protein, 524 aa, Artificial Sequence; identical to SEQ ID NO: 30768
  derived and/or modified protein sequence (wt) from glycoprotein__RABV__AB817112.1

SEQ ID NO: 30771 - protein, 524 aa, Artificial Sequence
  derived and/or modified protein sequence (wt) from glycoprotein__RABV__AB817113.1
MVPQALLFVPLLVFSLCFGKFPIYTIPDKLGPWSPIDVHHLSCPNNLVVEDEGCTNLSGFSYMELKVGYISAIKVNGFTCTGVVTEAETYTNLVGYVTTTFRRKHFRPTPDACRASYNWKMAGDPRYEESLHNPYPDYHWLRTVKTTKESLVIISPSVADLDPYDKSLHSRVFPGGKCSGITVSSTYCSTNHDYTIWMPENPRLGTSCDIFVNSRGKRASKGGKTCGFVDERGLYKSLKGACKLKLCGVPGLRLMDGTWVAIQTSDETKWCPPDQLVNLHDFRSDEIEHLVVEELVKKREECLDALESIMTTKSVSFRRLSHLRKLVPGFGKAYTIFNKTLMEADAHYKSVRTWNEIIPSKGCLRVGGRCHPHVNGVFFNGIILGPDGHVLIPEMQSSLLQQHMELLESSVIPLMHPLADPSTVFKDGDEAEDFVEVHLPDVHKLISGVDLGLPSWGKYVLMSAGILTTLMLMIFLMTCCRRVNQAGSKQHGLEGAGRKVSVTSQNGRVISSWESYKSGGETRL

SEQ ID NO: 30772 - protein, 524 aa, Artificial Sequence
  derived and/or modified protein sequence (wt) from glycoprotein__RABV__AB817114.1
MVPQALLFVPLLVFSLCFGKFPIYTIPDKLGPWSPIDIHHLSCPNNLVVEDEGCTNLSGFSYMELKVGYISAIKVNGFTCTGVVTEAETYTNFVGYVTTTFRRKHFRPTPDACRAAYNWKMAGDPRYEESLHNPYPDYHWLRTVKTTKESLVIISPSVADLDPYDKSLHSRVFPGGKCSGITVSSTYCSTNHDYTIWMPENPRLGTSCDIFVNSRGKRASKGGKTCGFVDERGLYKSLKGACKLKLCGVPGLRLMDGTWVAIQTSDETKWCPPDQLVNLHDFRSDEIEHLVVEELVKKREECLDALESIMTTKSVSFRRLSHLRKLVPGFGKAYTIFNKTLMEADAHYKSVRTWNEIIPSKGCLRVGGRCHPHVNGVFFNGIILGPDGHVLIPEMQSSLLQQHMELLESSVIPLMHPLADPSTVFKDGDEAEDFVEVHLPDVHKLISGVDLGLPSWGKYVLMSAGILTTLMLMIFLMTCCRRVNQAGSKQHGLERAGRKVSVTSQNGRVISSWESYKSGGETRL

SEQ ID NO: 30773 - protein, 524 aa, Artificial Sequence
  derived and/or modified protein sequence (wt) from glycoprotein__RABV__AB817115.1
MVPQALLFVPLLVFSLCFGKFPIYTIPDKLGPWSPIDIHHLSCPNNLVVEDEGCTNLSGFSYMELKVGYISAIKVNGFTCTGVVTEAETYTNFVGYVTTTFRRKHFRPTPDACRAAYNWKMAGDPRYEESLHNPYPDYHWLRTVKTTKESLVIISPSVADLDPYDKSLHSRVFPGGKCSGITVSSTYCSTNHDYTIWMPENPRLGTSCDIFVNSRGKRASKGGKTCGFVDERGLYKSLKGACKLKLCGVPGLRLMDGTWVAIQTSDETKWCPPDQLVNLHDFRSDEIEHLVVEELVKKREECLDALESIMTTKSVSFRRLSHLRKLVPGFGKAYTIFNKTLMEADAHYKSVRTWNEIIPSKGCLRVGGRCHPHVNGVFFNGIILGPDGHVLIPEMQSSLLQQHMELLESSVIPLMHPLADPSTVFKDGDEAEDFVEVHLPDVHKLISGVDLGLPGWGKYVLMSAGILTTLMLMIFLMTCCRRVNQAGSKQHGLEGAGRKVSVTSQNGRVISSWESYKSGGETRL

SEQ ID NO: 30774 - protein, 524 aa, Artificial Sequence; identical to SEQ ID NO: 30758
  derived and/or modified protein sequence (wt) from glycoprotein__RABV__AB817116.1

SEQ ID NO: 30775 - protein, 524 aa, Artificial Sequence; identical to SEQ ID NO: 30763
  derived and/or modified protein sequence (wt) from glycoprotein__RABV__AB817117.1

SEQ ID NO: 30776 - protein, 524 aa, Artificial Sequence; identical to SEQ ID NO: 30758
  derived and/or modified protein sequence (wt) from glycoprotein__RABV__AB817118.1

SEQ ID NO: 30777 - protein, 524 aa, Artificial Sequence; identical to SEQ ID NO: 30757
  derived and/or modified protein sequence (wt) from glycoprotein__RABV__AB817119.1

SEQ ID NO: 30778 - protein, 524 aa, Artificial Sequence; identical to SEQ ID NO: 30758
  derived and/or modified protein sequence (wt) from glycoprotein__RABV__AB817120.1

SEQ ID NO: 30779 - protein, 524 aa, Artificial Sequence; identical to SEQ ID NO: 30758
  derived and/or modified protein sequence (wt) from glycoprotein__RABV__AB817121.1

SEQ ID NO: 30780 - protein, 524 aa, Artificial Sequence; identical to SEQ ID NO: 30761
  derived and/or modified protein sequence (wt) from glycoprotein__RABV__AB817122.1

SEQ ID NO: 30781 - protein, 524 aa, Artificial Sequence
  derived and/or modified protein sequence (wt) from glycoprotein__RABV__AB817123.1
MVPQALLFVPLLVFSLCFGKFPIYTIPDKLGPWSPIDIHHLSCPNNLVVEDEGCTNLSGFSYMELKVGYISAIKVNGFTCTGVVTEAETYTNFVGYVTTTFRRKHFRPTPDACRAAYNWKMAGDPRYEESLHNPYPDYHWLRTVKTTKESLVIISPSVADLDPYDKSLHSRVFPGGKCSGITVSSTYCSTNHDYTIWMPENPRLGTSCDIFVNSRGKRASKGGKTCGFVDERGLYKSLKGACKLKLCGVPGLRLMDGTWVAIQTSDETKWCPPDQLVNLHDFRSDEIEHLVVEELVKKREECLDALESIMTTKSVSFRRLSHLRKLVPGFGKAYTIFNKTLMEADAHYKSVRTWNEIIPSKGCLRVGGRCHPHVNGVFFNGIILGPDGHVLIPEMQSSLLQQHMELLESSVIPLMHPLADPSTVFKDGDEAEEFVEVHLPDVHKLISGVDLGLPSWGKYVLMSAGILITLMLMIFLMTCCRRVNQAGSKQHGLEGAGRKVSVTSQNGRVISSWESYKSGGETRL

SEQ ID NO: 30782 - protein, 524 aa, Artificial Sequence; identical to SEQ ID NO: 30758
  derived and/or modified protein sequence (wt) from glycoprotein__RABV__AB817124.1

SEQ ID NO: 30783 - protein, 524 aa, Artificial Sequence; identical to SEQ ID NO: 30761
  derived and/or modified protein sequence (wt) from glycoprotein__RABV__AB817125.1

SEQ ID NO: 30784 - protein, 524 aa, Artificial Sequence
  derived and/or modified protein sequence (wt) from glycoprotein__RABV__AB817128.1
MVPQALLFVPLLAFSLCFGKFPIYTIPDKLGPWSPIDIHHLSCPNNLVVEDEGCTNLSGFSYMELKVGYISAIKVNGFTCTGVVTEAETYTNFVGYVTTTFRRKHFRPTPDACRAAYNWKMAGDPRYEESLHNPYPDYHWLRTVKTTKESLVIISPSVADLDPYDKSLHSRVFPGGKCSGITVSSTYCSTNHDYTIWMPENPRLGTSCDIFVNSRGKRASKGGKTCGFVDERGLYKSLKGACKLKLCGVPGLRLMDGTWVAIQTSDETKWCPPDQLVNLHDFRSDEIEHLVVEELVKKREECLDALESIMTTKSVSFRRLSHLRKLVPGFGKAYTIFNKTLMEADAHYKSVRTWNEIIPSKGCLRVGGRCHPHVNGVFFNGIILGPDGHVLIPEMQSSLLQQHMELLESSVIPLMHPLADPSTVFKDGDEAEDFVEVHLPDVHKLISGVDLGLPSWGKYVLMSAGILITLMLMIFLMTCCRRVNQAGSKQHGLEGAGRKVSVSSQNGRVISSWESYKSGGETRL

SEQ ID NO: 30785 - protein, 524 aa, Artificial Sequence
  derived and/or modified protein sequence (wt) from glycoprotein__RABV__AB817129.1
MVPQALLFVPLLVFSLCFGKFPIYTIPDKLGPWSPIDIHHLSCPNNLVVEDEGCTNLSGFSYMELKVGYISAIKVNGFTCTGVVTEAETYTNFVGYVTTTFRRKHFRPTPDACRAAYNWKMAGDPRYEESLHNPYPDYHWLRTVKTTKESLVIISPSVADLDPYDKSLHSRVFPGGKCSGITVSSTYCSTNHDYTIWMPENPRLGTSCDIFVNSRGKRASKGGKTCGFVDERGLYKSLKGACKLKLCGVPGLRLMDGTWVAIQTSDETKWCPPDQLVNLHDFRSDEIEHLVVEELVKKREECLDALESIMTTKSVSFRRLSHLRKLVPGFGKAYTIFNKTLMEADAHYKSVRTWNEIIPSKGCLRVGGRCHPHVNGVFFNGIILGPDGHVLIPEMQSSLLQQHMELLESSVIPLMHPLADPSTVFKDGDEAEDFVEVHLPDVHKLISGVDLGLPSWGKYVLMSAGILITLMLMIFLMTCCRRVNQAGSKQHGLEGAGRKVSVSSQNGRVISSWESYKSGGETRL

SEQ ID NO: 30786 - protein, 524 aa, Artificial Sequence; identical to SEQ ID NO: 30758
  derived and/or modified protein sequence (wt) from glycoprotein__RABV__AB817130.1

SEQ ID NO: 30787 - protein, 524 aa, Artificial Sequence; identical to SEQ ID NO: 30758
  derived and/or modified protein sequence (wt) from glycoprotein__RABV__AB817131.1

SEQ ID NO: 30788 - protein, 524 aa, Artificial Sequence; identical to SEQ ID NO: 30758
  derived and/or modified protein sequence (wt) from glycoprotein__RABV__AB817132.1

SEQ ID NO: 30789 - protein, 524 aa, Artificial Sequence
  derived and/or modified protein sequence (wt) from glycoprotein__RABV__AB817133.1
MVPQALLFVPLLVFSLCFGKFPIYTIPDKLGPWSPIDIHHLSCPNNLVVEDEGCTNLSGFSYMELKVGYISAIKVNGFTCTGVVTEAETYTNFVGYVTTTFRRKHFRPTPDACRAAYNWKMAGDPRYEESLHNPYPDYHWLRTVKTTKESLVIISPSVADLDPYDKSLHSRVFPGGKCSGITVSSTYCSTNHDYTIWMPENPRLGTSCDIFVNSRGKRASKGGKTCGFVDERGLYKSLKGACKLKLCGVPGLRLMDGTWVAIQTSDETKWCPPDQLVNLHDFRSDEIEHLVVEELVKKREECLDALESIMTTKSVSFRRLSHLRKLVPGFGKAYTIFNKTLMEADAHYKSVRTWNEIIPSKGCLRVGGRCHPHVNGVFFNGIILGPDGHVLIPEMQSSLLQQHMELLESSVIPLMHPLADPSTVFKDGDEAEDFVEVHLPDVHKLISGVDLGLPSWGKYALMSAGVLTTLMLMIFLMTCCRRVNQAGSKQHGLEGAGRKVSVTSQNGRVISSWESYKSGGETRL

SEQ ID NO: 30790 - protein, 524 aa, Artificial Sequence
  derived and/or modified protein sequence (wt) from glycoprotein__RABV__AB817134.1
MVPQALLFVPLLVFSLCFGKFPIYTIPDKLGPWSPIDIHHLSCPNNLVVEDEGCTNLSGFSYMELKVGYISAIKVNGFTCTGVVTEAETYTNFVGYVTTTFRRKHFRPTPDACRAAYNWKMAGDPRYEESLHNPYPDYHWLRTVKTTKESLVIISPSVADLDPYDKSLHSRVFPGGKCSGITVSSTYCSTNHDYTIWMPENPRLGTSCDIFVNSRGKRASKGGKTCGFVDERGLYKSLKGACKLKLCGVPGLRLMDGTWVAIQTSDETKWCTPDQLVNLHDFRSDEIEHLVVEELVKKREECLDALESIMTTKSVSFRRLSHLRKLVPGFGKAYTIFNKTLMEADAHYKSVRTWNEIIPSKGCLRVGGRCHPHVNGVFFNGIILGPDGHVLIPEMQSSLLQQHMELLESSVIPLMHPLADPSTVFKDGDEAEDFVEVHLPDVHKLISGVDLGLPSWGKYVLMSAGILITLMLMIFLMTCCRRVNQAGSKQHGLEGAGRKVSVTSQNGRVISSWESYKSGGETRL

SEQ ID NO: 30791 - protein, 524 aa, Artificial Sequence
  derived and/or modified protein sequence (wt) from glycoprotein__RABV__AB817135.1
MVPQALLFVPLLVFSLCFGKFPIYTIPDKLGPWSPIDIHHLSCPNNLVVEDEGCTNLSGFSYMELKVGYISAIKVNGFTCTGVVTEAETYTNFVGYVTTTFRRKHFRPTPDACRAAYNWKMAGDPRYEESLHNPYPDYHWLRTVKTTKESLVIISPSVADLDPYDKSLHSRVFPGGKCSGITVSSTYCSTNHDYTIWMPENPRLGTSCDIFVNSRGKRASKGGKTCGFVDERGLYKSLKGACKLKLCGVPGLRLMDGTWVAIQTSDETKWCPPDQLVNLHDFRSDEIEHLVVEELVKKREECLDALESIMTTRSVSFRRLSHLRKLVPGFGKAYTIFNKTLMEADAHYKSVRTWNEIIPSKGCLRVGGRCHPHVNGVFFNGIILGPDGHVLIPEMQSSLLQQHMELLESSVIPLMHPLADPSTVFKDGDEAEDFVEVHLPDVHKLISGVDLGLPSWGKYVLMSAGILITLMLMIFLMTCCRRVNQAGSKQHGLEGAGRKVSVTSQNGRVISSWESYKSGGETRL

SEQ ID NO: 30792 - protein, 524 aa, Artificial Sequence; identical to SEQ ID NO: 30757
  derived and/or modified protein sequence (wt) from glycoprotein__RABV__AB817136.1

SEQ ID NO: 30793 - protein, 524 aa, Artificial Sequence; identical to SEQ ID NO: 30757
  derived and/or modified protein sequence (wt) from glycoprotein__RABV__AB817137.1

SEQ ID NO: 30794 - protein, 524 aa, Artificial Sequence
  derived and/or modified protein sequence (wt) from glycoprotein__RABV__AB817138.1
MVPQALLFVPLLVFSLCFGKFPIYTIPDKLGPWSPIDIHHLSCPNNLVVEDEGCTNLSGFSYMELKVGYISAIKVNGFTCTGVVTEAETYTNFVGYVTTTFRRKHFRPTPDACRAAYNWKMAGDPRYEESLHNPYPDYHWLRTVKTTKESLVIISPSVADLDPYDKSLHSRVFPGGKCSGITVSSTYCSTNHDYTIWMPENQRLGTSCDIFVNSRGKRASKGGKTCGFVDERGLYKSLKGACKLKLCGVPGLRLMDGTWVAIQTSDETKWCPPDQLVNLHDFRSDEIEHLVVEELVKKREECLDALESIMTTKSVSFRRLSHLRKLVPGFGKAYTIFNKTLMEADAHYKSVRTWNEIIPSKGCLRVGGRCHPHVNGVFFNGIILGPDGHILIPEMQSSLLQQHMELLESSVIPLMHPLADPSTVFKDGDEAEDFVEVHLPDVHKLISGVDLGLPSWGKYVLMSAGILTTLMLMIFLMTCCRRVNRVGSKQHGLEGAGRKVSVTSQNGRVISSWESYKSGGETRL

SEQ ID NO: 30795 - protein, 524 aa, Artificial Sequence; identical to SEQ ID NO: 30723
  derived and/or modified protein sequence (wt) from glycoprotein__RABV__AB817140.1

SEQ ID NO: 30796 - protein, 524 aa, Artificial Sequence; identical to SEQ ID NO: 30768
  derived and/or modified protein sequence (wt) from glycoprotein__RABV__AB817141.1

SEQ ID NO: 30797 - protein, 524 aa, Artificial Sequence
  derived and/or modified protein sequence (wt) from glycoprotein__RABV__AB817142.1
MVPQVLLFVPLLVFSLCFGKFPIYTIPDKLGPWSPIDIHHLSCPNNLVVEDEGCTNLSGFSYMELKVGYISAIKVNGFTCTGVVTEAETYTNFVGYVTTTFRRKHFRPTPDACRAAYNWKMAGDPRYEESLHNPYPDYHWLRTVKTTKESLVIISPSVADLDPYDKSLHSRVFPGGKCSGITVSSTYCSTNHDYTIWMPENPRLGTSCDIFVNSRGKRASKGGKTCGFVDERGLYKSLKGACKLKLCGVPGLRLMDGTWVAIQTSDETKWCPPDQLVNLHDFRSDEIEHLVVEELVKKREECLDALESIMTTKSVSFRRLSHLRKLVPGFGKAYTIFNKTLMEADAHYKSVRTWNEIIPSKGCLRVGGRCHPHVNGVFFNGIILGPDGHVLIPEMQSSLLQQHMELLESSVIPLMHPLADPSTVFKDGDEAEDFVEVHLPDVHKLISGVDLGLPSWGKYVLMSAGILTTLMLMIFLMTCCRRVNQAGSKQHGLEGAGRKVSVTSQNGRVISSWESYKSGGETRL

SEQ ID NO: 30798 - protein, 524 aa, Artificial Sequence
  derived and/or modified protein sequence (wt) from glycoprotein__RABV__AB817143.1
MVPQALLFVPLLVFSLCFGKFPIYTIPDKLGPWSPIDIHHLSCPNNLVVEDEGCTNLSGFSYMELKVGYISAIKVNGFTCTGVVTEAETYTNFVGYVTTTFRRKHFRPTPDACRAAYNWKMAGDPRYEESLHNPYPDYHWLRTVKTTKESLVIISPSVADLDPYDKSLHSRVFPGGKCSGITVSSTYCSTNHDYTIWMPENPRLGTSCDIFVNSRGKRASKGGKTCGFVDERGLYKSLKGACKLKLCGVPGLRLMDGTWVAIQTSDETKWCPPDQLVNLHDFRSDEIEHLVVEELVKKREECLDALESIMTTKSVSFRRLSHLRKLVPGFGKAYTIFNKTLMEADAHYKSVRTWNEIIPSKGCLRVGGRCHPHVNGVFFNGIILGPDGHVLIPEMQSSLLQQHMELLESSVIPLMHPLADPSTVFKDGDEAEDFVEVHLPDVHKLISGVDLGLPSWGKYVLMSAGILITLMLMIFLMTCCRRVNQAGSKQHGLEGTGRKVSVTSQNGRVISSWESYKSGGETRL

SEQ ID NO: 30799 - protein, 524 aa, Artificial Sequence; identical to SEQ ID NO: 30758
  derived and/or modified protein sequence (wt) from glycoprotein__RABV__AB817144.1

SEQ ID NO: 30800 - protein, 524 aa, Artificial Sequence; identical to SEQ ID NO: 30761
  derived and/or modified protein sequence (wt) from glycoprotein__RABV__AB817146.1

SEQ ID NO: 30801 - protein, 524 aa, Artificial Sequence
  derived and/or modified protein sequence (wt) from glycoprotein__RABV__AB838709.1
MIPQALLFVPLLVFSLCFGKFPIYTIPDKLGPWSPIDIHHLSCPNNLVVEDEGCTNLSGFSYMELKVGYISAIKVNGFTCTGVVTEAETYTNFVGYVTTTFKRKHFRPTPDACRAAYNWKMAGDPRYEESLHNPYPDYHWLRTVKTTKESLVIICPSVADLDPYDKSLHSRVFPSGKCSGITVSSTYCSTNHDYTIWMPENPRLGTSCDIFTNSRGKRASKGSKTCGFVDERGLYKSLKGACKLKLCGVLGLRLMDGTWAAIQTSDETKWCPPDQLVNLHDFRSDEIEHLVVEELVKKREECLDALESIMTTKSVSFRRLSHLRKLVPGFGKAYTIFNKTLMEADAHYKSVRTWNEIIPSKGCLRVGGRCHPHVNGVFFNGIILGPDGHVLIPEMQSSLLQQHMELLESSVIPLMHPLADPSTVFKDDDEAEDFVEVHLPDVHKQVSGVDLGLPSWGKYVLMSAGVLTALMLMIFLTTCCRRANRAESAQHSLGERGRKVSVTSQSGRVISSWESYKSGGETKL

SEQ ID NO: 30802 - protein, 524 aa, Artificial Sequence; identical to SEQ ID NO: 30634
  derived and/or modified protein sequence (wt) from glycoprotein__RABV__AB838710.1

SEQ ID NO: 30803 - protein, 524 aa, Artificial Sequence
  derived and/or modified protein sequence (wt) from glycoprotein__RABV__AB905545.1
MIPQALLFVPLLISSSCLGKFPIYTIPDKLGPWSPIDIHHLSCPNNLVVEDEGCTNLSGFSYMELKVGYISAIKVNGFTCTGVVTEAETYTNFVGYVTTTFKRKHFRPIPDACRAAYNWKMAGDPRYEESLQNPYPDYHWLRTVKTTKESLIIISPSVADLDPYDKSLHSRVFPGGKCLGITVSSTYCSTNHDYTIWMPEEPRLGTSCDIFTSSKGKKASKGGKTCGFVDERGLYKSLKGACKLKLCGVLGLRLMDGTWVSIQTSDDTKWCPPDQLVNLHDFHSDEIEHLVVEELVKKREECLDALESIMTTKSVSFRRLSYLRKLVPGFGKAYTIFNKTLMEADAHYKSVRTWNEIIPSKGCLKVRERCHPPVDGVFFNGIILGPDGNVLIPEMQSSLLQQHMELLESSVIPLMHPLADPSTVFKEGDEAEDFVEVHLPDVHKQISGVDLGLPSWGKYLLMIAGGLATLVLIICSMACCRRTKRTESRRRGSGESGKKVTATPQTKKVVSSWELYKSEGDARL

SEQ ID NO: 30804 - protein, 524 aa, Artificial Sequence
  derived and/or modified protein sequence (wt) from glycoprotein__RABV__AB981663.1
MIPQALLFVPLLVFSLCFGKFPIYTIPDKLGPWSPIDIHHLSCPNNLVVEDEGCTNLSGFSYMELKVGYISAIKVNGFTCTGVVTEAETYTNFVGYVTTTFKRKHFRPTPDACRAAYNWKMAGDPRYEESLHNPYPDYHWLRTVKTTKESLVIISPSVSDLDPYDKSLHSRVFPSGKCSGITVSSTYCPTNHDYTIWMPENPRLGTSCDIFTNSRGKRASKGSKTCGFVDERGLYKSLKGACKLKLCGVLGLRLMDGTWAAIQTSDEAKWCPPDQLVNIHDFRSDEIEHLVVEELVKKREECLDALESIMTTKSVSFRRLSHLRKLVPGFGKAYTIFNKTLMEADAHYKSVRTWNEIIPSKGCLRVGGRCHPHVNGVFFNGIILGPDGHVLIPEMQSSLLQQHMELLESSVIPLMHPLADPSTVFKDGDEAEDFVEVHLPDVHKQVSGVDLGLPSWGKYVLMSVGAMIALMLTIFLTTCCRKTNGAGSIQHRPGETGRKVSVTSQSGRVISSWESYKSGGETKL

SEQ ID NO: 30805 - protein, 524 aa, Artificial Sequence
  derived and/or modified protein sequence (wt) from glycoprotein__RABV__AB981664.1
MIPQALLFVPLLVFSLCFGKFPIYTIPDKLGPWSPIDIHHLSCPNNLVVEDEGCTNLSGFSYMELKVGYISAIKVNGFTCTGVVTEAETYTNFVGYVTTTFKRKHFRPTPDACRAAYNWKMAGDPRYEESLHNPYPDYHWLRTVKTTKESLVIISPSVSDLDPYDKSLHSRVFPSGKCSGITVSSTYCPTNHDYTIWMPENPRLGTSCDIFTNSRGKRASKGSKTCGFVDERGLYKSLKGACKLKLCGVLGLRLMDGTWAAIQTSDEVKWCPPDQLVNIHDFRSDEIEHLVVEELVKKREECLDALESIMTSKSVSFRRLSHLRKLVPGFGKAYTIFNKTLMEADAHYKSVRTWNEIIPSKGCLRVGGRCHPHVNGVFFNGIILGPDGHVLIPEMQSSLLQQHMELLESSVIPLMHPLADPSTVFKDGDEAEDFVEVHLPDVHKQVSGVDLGLPSWGKYVLMSVGAMIALMLMIFLMTCCRKANGAESIQHRLGETGRKVSVTSQSGRVISSWESYKSGGETKL

SEQ ID NO: 30806 - protein, 524 aa, Artificial Sequence
  derived and/or modified protein sequence (wt) from glycoprotein__RABV__AF344305.1
MVPQALLVVPLLGFSLCFGKFPIYTIPDKLGPWSPIDIHHLSCPNNLVVEDEGCTNLSGFSYMELKVGYISAIKVNGFTCTGVVTEAETYTNFVGYVTTTFKRKHFRPTPDECRAAHNWKMAGDPRYEESLHNPYPDYHWLRTVKTTKESLVIISPSVADLDPYDKSLHSRVFPSGKCSGITVSSTYCSTNHDYTIWMPENPRLGTSCDIFTNSRGKRASKGSKTCGFVDERGLYKSLKGACKLKLCGVLGLKLMDGTWVAMQTSDETKWCPPDQLVNLHDLRSDEIEHLVVEELVKKREECLDALESIMTTKSVSFRRLSHLRKLVPGFGKAYTIFNKTLMEADAHYKSVRTWNEIIPSKGCLKVGGRCHPHVNGVFFNGVILGPDGHVLIPEMQSSLLQQHMELLESSVIPLMHPLADPSTVFKDGDEAEDFVEVHLPDVHKQVSGVDLGLPNWGKYISLSAGALIALMLIILLMTCCRKVNRPEPTQRSLEGKKRKVSVTSQSGKVISSWESYKSGGETRL

SEQ ID NO: 30807 - protein, 524 aa, Artificial Sequence
  derived and/or modified protein sequence (wt) from glycoprotein__RABV__AF344307.1
MVPQALLVVPLLGFSLCFGKFPIYTIPDKLGPWSPIDIHHLSCPNNLVVEDEGCTNLSGFSYMELKVGYISAIKVNGFTCTGVVTEAETYTNFVGYVTTTFKRKHFRPTPDECRAAYNWKMAGDPRYEESLHNPYPDYHWLRTVKTTKESLVIISPSVADLDPYDKSLHSRVFPSGKCSGITVSSTYCSTNHDYTIWMPENPRLGTSCDIFTNSRGKRASKGSKTCGFVDERGLYKSLKGACKLKLCGVLGLKLMDGTWVAMQTSDETKWCPPDQLVNLHDLRSDEIEHLVVEELVKKREECLDALESIMTTKSVSFRRLSHLRKLVPGFGKAYTIFNKTLMEADAHYKSVRTWNEIIPSKGCLKVEGRCHPHVNGVFFNGVILGPDGHVLIPEMQSSLLQQHMELLESSVIPLMHPLADPSTVFKDGDEAEDFVEVHLPDVHKQVSGVDLGLPNWGKYISLSAGALIALMLIILLMTCCRKVNRPEPTQRSLEGKKRKVSVTSQSGKVISSWESYKSGGETRL

SEQ ID NO: 30808 - protein, 524 aa, Artificial Sequence
  derived and/or modified protein sequence (wt) from glycoprotein__RABV__AF499686.2
MVPQALLFVPLLVFPLCFGKFPIYTIPDKLGPWSPIDIHHLSCPNNLVVEDEECTNLSGFSYMELKVGYILAIKVNGFTCTGVVTEAETYTNFVGYVTTTFKRKHFRPTPDACRAAYNWKMAGDPRYEESLHNPYPDYRWLRTVKTTKESLVIISPSVADLDPYDRSLHSRVFPSGKCSGVAVSSTYCSTNHDYTIWMPENPRLGMSCDIFTNSRGKRASKGSETCGFVDERGLYKSLKGACKLKLCGVLGLRLMDGTWVSMQTSNETKWCPPDKLVNLHDFRSDEIEHLVVEELVRKREECLDALESIMATKSVSFRRLSHLRKLVPGFGKAYTIFNKTLMEADAHYKSVSTWNEVLPSKGCLRVGGRCHPHVNGVFFNGIILGPDGNVLIPEMQSSLLQQHMELLESSVIPLVHPLADPSTVFKDGDEAEDFVEVHLPDVHNQVSGVDLGLPNWGKYVLLSAGALTALMLIIFLMTCCRRVNRSEPTQHNLRGTGREVSVTPQSGKIISSWESHKSGGETRL

SEQ ID NO: 30809 - protein, 524 aa, Artificial Sequence
  derived and/or modified protein sequence (wt) from glycoprotein__RABV__AJ871962.1
MVPQALLFVPLLGFSLCFGKFPIYTIPDELGPWSPIDIHHLSCPNNLVVEDEGCTNLSEFSYMELKVGYISAIKVNGFTCTGVVTEAETYTNFVGYVTTTFKRKHFRPTPDACRAAYNWKMAGDPRYEESLHNPYPDYHWLRTVRTTKESLIIISPSVTDLDPYDKSLHSRVFPGGKCSGITVSSTYCSTNHDYTIWMPENPRPRTPCDIFTNSRGKRASKGNKTCGFVDERGLYKSLKGACRLKLCGVLGLRLMDGTWVAMQTSDETKWCPPDQLVNLHDFRSDEIEHLVVEELVKKREECLDALESIMTTKSVSFRRLSHLRKLVPGFGKAYTIFNKTLMEADAHYKSVRTWNEIIPSKGCLKVGGRCHPHVNGVFFNGIILGPDGHVLIPEMQSSLLQQHMELLKSSVIPLMHPLADPSTVFKEGDEAEDFVEVHLPDVYKQISGVDLGLPNWGKYVLMTAGAMIGLVLIFSLMTWCRRANRPESKQRSFGGTGRNVSVTSQSGKVIPSWESYKSGGQTRL

SEQ ID NO: 30810 - protein, 524 aa, Artificial Sequence
  derived and/or modified protein sequence (wt) from glycoprotein__RABV__AY683208.1
MVPQALLFVPFLGFSLCFGKFPIYTIPDKLGPWSPIDIHHLSCPNNLVVEDEGCTNLSGFSYLELKVGHISAIKVNGFTCTGVVTEAETYTNFVGYVTTTFKRKHFRPTPDACRAAYNWKTAGDPRYEESLQNPYPDYQWLRTVRTTKESLVIISPSAADLDPYDKSLHSRVFPSGKCSGITVSSVYCSTNHDYTIWMPENPRQGMSCDIFTNSRGKRASKERKTCGFVDERGLYKSLRGSCKLKLCGVLGLRLMDGTWVAMQTSNETKWCSPDQLVNLHDFHSDEIEHLVVEELVKKREECLDALESIMTTKSVSFRRLSHLRKLVPGFGKAYTIINKTLMEAEAHYKSVRTWNEIVPSKGCLRVEGRCHPHVNGVFFNGIILGPDGHVLIPEMQSSLLQQHMELLESSVIPLMHPLADPSTVFKEGDEAEDFVEVHFPDVHKKVSEVDLGLPNWGEYVLLSAGTLIALMLIIFLMICRRRVNRPESTQRSLRGTEMKVSVTPQSGKFKSSWESYKSGDEARL

SEQ ID NO: 30811 - protein, 524 aa, Artificial Sequence
  derived and/or modified protein sequence (wt) from glycoprotein__RABV__AY705373.1
MIPQALLFVPLLIPSLCLGKFPIYTIPDKLGPWSPIDIHHLSCPNNLVVEDEGCTSLSGFSYMELKVGYISAMKVNGFTCTGVVTEAETYTNFVGYVTTTFKRKHFRPMPDACRAAHDWKIAGDPRYEDSLQNPYPDYHWLRTVKTTKESLVIISPSVADLDPYDKSLHSRVFPSGKCLGITVSSTYCPTNHDYTIWMPVEARLGTSCDIFTNSRGKKASKGGRTCGFVDERGLYKSLKGACKLKLCGVPGLRLMNGTWVSIQTSDDIKWCPPDQLVNLHDFHSDEIEHLVVEELIKKREGCLDALESIMTTKSVSFRRLSHLRKLVPGFGKAYTIFNNTLMEADAHYKSVRTWNEVIPSKGCLKVGGRCHPPVNGVFFNGIILGPDGNVLIPEMQSSLLQQHMELLESSVIPLMHPLADPSTVFKDGDEAEDFVEVHLPDVHKQVSDVDLGLPSWGKYLLMSAGALATLILAIFLITCCRRANRTKSTQRGHRESGGKVSVAPQNGKIISSWELYKSESETGM

SEQ ID NO: 30812 - protein, 524 aa, Artificial Sequence
  derived and/or modified protein sequence (wt) from glycoprotein__RABV__AY956319.1
MVPQALLFVPLLVVSMCFGKFPIYTVPDKLGPWSPIDIHHLSCPNNLVVEDEGCTNLSGFSYMELKVGYISAIKVNGFTCTGVVTEAETYTNFVGYVTTTFKRKHFRPTPDACRAAYNWKMAGDPRYEESLHNPYPDYHWLRTVKTTKESLVIISPSVADLDPYDKSLHSRVFPSGKCSGITISSTYCSTNHDYTIWMPENPRLGTSCDIFTNSRGKRASKGGKTCGFVDERGLYKSLKGACKLKLCGVLGLRLMDGTWVAMQTSDETKWCPPDQLVNLHDFRSDEIEHLVVEELVKKREECLDALESIMTTKSVSFRRLSHLRKLVPGFGKAYTIFNKTLMEADAHYKSVRTWNEIIPSKGCLRVGGRCHPHVNGVFFNGIILGPDGHVLIPEMQSSLLQQHMELLESSVIPLMHPLADPSTVFKDGDEAEDFVEVHLPDVHKQVSGVDLGLPSWGKYVLVSAGVLVVLMLTIFIMTCCRRVHRPKSTQHGLGGTGRKVSVTSQSGKVISSWESYKSGGETRL

SEQ ID NO: 30813 - protein, 524 aa, Artificial Sequence
  derived and/or modified protein sequence (wt) from glycoprotein__RABV__DQ074978.1
MVPQALLFVPLLVFPLCFGKFPIYTIPDKLGPWSPIDIHHLSCPNNLVVEDEGCTNLSGFSYMELKVGYISAIKMNGFTCTGVVTEAETYTNFVGYVTTTFKRKHFRPTPDACRAAYNWKMAGDPRYEESLHNPYPDYHWLRTVKTTKESLVIISPSVADLDPYDISLHSRVFPGGNCSGVAVSSTYCSTNHDYTIWMPENPRLGMSCDIFTNSRGKRESKGSETCGFVDERGLYKSLKGACKLKLCGVLGLRLMDGTWVAMQTSNETKWCPPGQLVNLHDFRSDEIEHLVVEELVRKREECLDALESIMTTKSVSFRRLSHLRKLVPGFGKAYTIFNKTLMEADAHYKSVRTWNEIIPSKGCLRVGGRCHPHVNGVFFNGIILGPDGNVLIPEMQSSLLQQHMELLVSSVIPLMHPLADPSTVFKNGDEAEDFVEVHLPDVHERISGVDLGLPNWGKYVLLSAGALTALMLIIFLMTCWRRVNRSEPTQHNLRGTGREVSVTPQSGKIISSWESHKSGGETRL

SEQ ID NO: 30814 - protein, 524 aa, Artificial Sequence
  derived and/or modified protein sequence (wt) from glycoprotein__RABV__DQ076093.1
MVPQALLFVPLLVFSMCFGKFPIYTIPDKLGPWSPIDIHHLSCPNNLVVEDEGCTNLSGFSYMELKVGYISAIKVNGFTCTGVVTEAETYTNFVGYVTTTFKRKHFRPTPDACRAAYNWKMAGDPRYEESLHNPYPDYHWLRTVKTTKESLVIISPSVADLDPYDKSLHSRVFPNGKCSGITISSTYCPTNHDYTIWLPENPRLGTSCDIFTNSRGKRASKGSKTCGFVDERGLYKSLKGACKLKLCGVLGLRLMDGTWVAMQASDETKWCPPDQLVNLHDFRSDEIEHLVVEELVKKREECLDALESIMTTKSVSFRRLSHLRKLVPGFGKAYTIFNKTLMEADAHYKSVRTWNEIIPSKGCLRVGGRCHPHVNGVFFNGIILGPDGHVLIPEMQSSLLQQHMELLESSVIPLMHPLADPSTVFKDGDEAENFVEVHLPDVHKQISGVDLGLPNWGKYVLVSAGVLIALMLIIFLMTCCGRVNRPKSTQHNLGGTGRKVSVTPQSGKVISSWESYKSGGGTRL

SEQ ID NO: 30815 - protein, 524 aa, Artificial Sequence
  derived and/or modified protein sequence (wt) from glycoprotein__RABV__DQ076096.1
MVPQALLFVPLLVFSMCFGKFPIYTIPDKLGPWSPIDIHHLSCPNNLVVEDEGCTNLSGFSYMELKVGYISAIKVNGFTCTGVVTEAETYTNFVGYVTTTFKRKHFRPTPDACRAAYNWKMAGDPRYEESLHNPYPDYHWLRTVKTTKESLVIISPSVADLDPYDKSLHSRVFPNGKCSGITISSTYCPTNHDYTIWLPENPRLGTSCDIFTNSRGKRASKGSKTCGFVDERGLYKSLKGACKLKLCGVLGLRLMDGTWVAMQASDETKWCPPDQLVNLHDFRSDEIEHLVVEELVKKREECLDALESIMTTKSVSFRRLSHLRKLVPGFGKAYTIFNKTLMEADAHYKSVRTWNEIIPSKGCLRVGGRCHPHVNGVFFNGIILGPDGHVLIPEMQSSLLQQHMELLESSVIPLMHPLADPSTVFKDGDEAENFVEVHLPDVHKQISGVDLGLPNWGKYVLVSAGVLIALMLTIFLMTCCGRVNRPKSTQHNLGGTGRKVSVTPQSGKVISSWESYKSGGGTRL

SEQ ID NO: 30816 - protein, 524 aa, Artificial Sequence
  derived and/or modified protein sequence (wt) from glycoprotein__RABV__DQ076097.1
MVPQALLFVPLLVFSMCFGKFPIYTIPDKLGPWSPIDIHHLSCPNNLVVEDDGCTNLSGFSYMELKVGYISAIKVNGFTCTGVVTEAETYTNFVGYVTTTFKRKHFRPTPDACRAAYNWKMAGDPRYEESLHTPYPDYHWLRTVKTTKESLVIISPSVADLDPYDKSLHSRVFPNGKCSGITISSTYCPTNHDYTIWLPENPRLGTSCDIFTNSRGKRASKGSKTCGFVDERGLYKSLKGACKLKLCGVLGLRLMDGTWVAMQASDETKWCPPDQLVNLHDFRSDEIEHLVVEELVKKREECLDALESIMTTKSVSFRRLSHLRKLVPGFGKAYTIFNKTLMEADAHYKSVRTWNEIIPSKGCLRVGGRCHPHVNGVFFNGIILGPDGHVLIPEMQSSLLQQHMELLESSVIPLMHPLADPSTVFKDGDEAENFVEVHLPDVHKQISGVDLGLPNWGKYVLVSAGVLIALMLIIFLMTCCGRVNRPKSTQHNLGGTGRKVSVTPQSGKVISSWESYKSGGGTRL

SEQ ID NO: 30817 - protein, 524 aa, Artificial Sequence; identical to SEQ ID NO: 30814
  derived and/or modified protein sequence (wt) from glycoprotein__RABV__DQ076098.1

SEQ ID NO: 30818 - protein, 524 aa, Artificial Sequence
  derived and/or modified protein sequence (wt) from glycoprotein__RABV__DQ076099.1
MVPQALLFIPLLVFPMCFGKFPIYTIPDKLGPWSPIDIHHLSCPNNLVVEDEECTNLSGFSYMELKVGYISAIKVNGFTCTGVVTEAETYTNFVGYVTTTFKRKHFRPTPDACRAAYNWKMAGDPRYEESLHNPYPDYHWLRTVKTTKESLVIISPSVADLDPYDKSLHSRVFPNGKCSGITISSTYCPTNHDYTIWLPENPRLGTSCDIFANSRGKRASKGSKTCGFVDERGLYKSLKGACKLKLCGVLGLRLMDGTWVAMQTSDETKWCPPDQLVNLHDFRSDEIEHLVVEELVKKREECLDALESIMTTKSVSFRRLSHLRKLVPGFGKAYTIFNKTLMEADAHYKSVRTWNEIIPSKGCLRVGGRCHPHVNGVFFNGIILGHDGHVLIPEMQSSLLQQHMELLESSVIPLMHPLADPSTVFKDGDEAEDFVEVHLPDVHKQISGVDLGLPNWGKYVLVSAGVLIALMLIIFLMTCCGRVNRPKSTQHNLGETGRKVSVTSQSGKVISSWESYKSGGGTRL

SEQ ID NO: 30819 - protein, 524 aa, Artificial Sequence
  derived and/or modified protein sequence (wt) from glycoprotein__RABV__DQ076100.1
MVPQALLFVPLLVFSMCFGKFPIYTIPDKLGPWSPIDIHHLSCPNNLVVEDEGCTNLSGFSYMELKVGYISAIKVNGFTCTGVVTEAETYTNFVGYVTTTFKRKHFRPTPDACRAAYNWKMAGDPRYEESLHNPYPDYHWLRTVKTTKESLVIISPSVADLDPYDKSLHSRVFPNGKCSGITISSTYCPTNHDYTIWLPENPRLGTSCDIFTNSRGKRASKGSKTCGFVDERGLYKSLKGACKLKLCGVLGLRLMDGTWVAMQTSDETKWCPPDQLVNLHDFRSDEIEHLVVEELVKKREECLDALESIMTTKSVSFRRLSHLRKLVPGFGKAYTIFNKTLMEADAHYKSVRTWNEIIPSKGCLRVGGRCHPHVNGVFFNGIILGPDGHVLIPEMQSSLLQQHMELLESSVIPLMHPLADPSTVFKDGDEAEDFVEVHLPDVHKQISGVDLGLPNWGKYVLVSAGVLIALMLIIFLMTCCGRVNRPKSTQHNLGGTGRKVSVTSQSGKVISSWESYKSGGETRL

SEQ ID NO: 30820 - protein, 524 aa, Artificial Sequence
  derived and/or modified protein sequence (wt) from glycoprotein__RABV__DQ076102.1
MVPQALLFVPLLVFSMCFGKFPIYTIPDKLGPWSPIGIHHLSCSNNLVVEDEGCTNLSGFSYMELKVGYISAIKVNGFTCTGVVTEAETYTNFVGYVTTTFKRKHFRPTPDACRAAYNWKMAGDPRYEESLHNPYPDYHWLRTVKTTKESLVIISPSVADLDPYDKSLHSRVFPNGKCSGITISSTYCPTNHDYTIWLPENPRLGTSCDIFTNSRGKRASKGSKTCGFVDERGLYKSLKGACKLKLCGVLGLRLMDGTWVAMQTSDETKWCPPDQLVNLHDFRSDEIEHLVVEELVKKREECLDALESIMTTKSVSFRRLSHLRKLVPGFGKAYTIFNKTLMEADAHYKSVRTWNEIIPSKGCLRVGGRCHPHVNGVFFNGIILGPDGHVLIPEMQSSLLQQHMELLESSVIPLMHPLADPSTVFKDGDEAEDFVEVHLPDVHKQISGVDLGLPNWGKYVLVSAGVLIALMLIIFLMTCCGRVNRPKSTQHNLGGTGRKVSVTSQSGKVISSWESYKSGGETRL

SEQ ID NO: 30821 - protein, 524 aa, Artificial Sequence
  derived and/or modified protein sequence (wt) from glycoprotein__RABV__DQ076103.1
MVPQALLFVPLLVFSMCFGKFPIYTIPDKLGPWSPIDIHHLSCPNNLVVEDEGCTNLSGFSYMELKVGYISAIKVNGFTCTGVVTEAETYTNSVGYVTTTFKRKHFRPTPDACRAAYNWKMAGDPRYEESLHNPYPDYHWLRTVKTTKESLVIISPSVADLDPYDKSLHSRVFPNGKCSGITISSTYCPTNHDYTIWLPENPRLGTSCDIFTNSRGKRASKGSKTCGFVDERGLYKSLKGACKLKLCGVLGLRLMDGTWVAMQTSDETKWCPPDQLVNLHDFRSDEIEHLVVEELVKKREECLDALESIMTTKSVSFRRLSHLRKLVPGFGKAYTIFNKTLMEADAHYKSVRTWNEIIPSKGCLRVGGRCHPHVNGVFFNGIILGPDGHVLIPEMQSSLLQQHMELLESSVIPLMHPLADPSTVFKDGDEAEDFVEVHLPDVHKQISGVDLGLPNWGKYVLVSAGVLIALMLIIFLMTCCGRVNRPKSTQHNLGGTGRKVSVTSQSGKVISSWESYKSGGETRL

SEQ ID NO: 30822 - protein, 524 aa, Artificial Sequence
  derived and/or modified protein sequence (wt) from glycoprotein__RABV__DQ076104.1
MVPQALLFVPLLVFSMCFGKFPIYTIPDKLGPWSPIDIHHLSCPNNLVVEDEGCTNLSGFSYMELKVGYISAIKVNGFTCTGVVTEAETYTNFVGYVTTTFKRKHFRPTPDACRTAYNWKMAGDPRYEESLHNPYPDYHWLRTVKTTKESLVIISPSVADLDPYDKSLHSRVFPNGKCSGITISSTYCPTNHDYTIWLPENPRLGTSCDIFTNSRGKRASKGSKTCGFVDERGLYKSLKGACKLKLCGVLGLRLMDGTWVAMQTSDETKWCPPDQLVNLHDFRSDEIEHLVVEELVKKREECLDALESIMTTKSVSFRRLSHLRKLVPGFGKAYTIFNKTLMEADAHYKSVRTWNEIIPSKGCLRVGGRCHPHVNGVFFNGIILGPDGHVLIPEMQSSLLQQHMELLESSVIPLMHPLADPSTVFKDGDEAEDFVEVHLPDVHKQISGVDLGLPNWGKYVLVSAGVLIALMLIIFLMTCCGRVNRPKSTQHNLGGTGRKVSVTSQSGKVISSWESYKSGGETRL

SEQ ID NO: 30823 - protein, 524 aa, Artificial Sequence
  derived and/or modified protein sequence (wt) from glycoprotein__RABV__DQ076105.1
MVPQALLFVPLLVFSMCFGRFPIYTIPDKLGPWSPIDIHHLSCPNNLVVEDEGCTNLSGFSYMELKVGYISAIKVNGFTCTGVVTEAETYTNFVGYVTTTFKRKHFRPTPDACRAAYNWKMAGDPRYEESLHNPYPDYHWLRTVKTTKESLVIISPSVADLDPYDKSLHSRVFPNGKCSGITISSTYCPTNHDYTIWLPENPRLGTSCDIFTNSRGKRASKGSKTCGFVDERGLYKSLKGACKLKLCGVLGLRLMDGTWVAMQTSDETKWCPPDQLVNLHDFRSDEIEHLVVEELVKKREECLDALESIMTTKSVSFRRLSHLRKLVPGFGKAYTIFNKTLMEADAHYKSVRTWNEIIPSKGCLRVGGRCHPHVNGVFFNGIILGPDGHVLIPEMQSSLLQQHMELLESSVIPLMHPLADPSTVFKDGDEAEDFVEVHLPDVHKQISGVDLGLPNWGKYVLVSAGVLIALMLMIFLMTCCGRVNRPKSTQHNLGGTGRKVSVTSQSGKVISSWESYKSGGETRL

SEQ ID NO: 30824 - protein, 524 aa, Artificial Sequence
  derived and/or modified protein sequence (wt) from glycoprotein__RABV__DQ849044.1
MIPQVLLFVPLLVFSSCFGKFPIYTIPDKLGPWSPIDIHHLSCPNNLVVEDEGCTNLSGFSYMELKVGYISAIKVNGFTCTGVVTEAETYTNFVGYVTTTFKRKHFRPTPDACRAAYNWKMAGDPRYEESLHNPYPDYHWLRTVKTSKESLVIISPSVADLDPYDKSLHSRVFPGGKCSGITVSSTCCSTNHDYTIWMPENPRLGTSCDIFTNSRGKRASKGGKTCGFVDERGLYKSIKGACKLKLCGVLGLRLMDGTWVAIQTSDEIKWCSPDQLVNLHDFHSDEIEHLVVEELVKKREECLDALETIMTTKSVSFRRLSHLRKLVPGFGKAYTIFNKTLMEADAHYKSIRTWNEIIPSKGCLRVGGRCHPHVNGVFFNGIILGPDGHVLIPEMQSSLLHQHMELLESSVIPLMHPLADPSTVFKDGDEAEDFVEVHLPDVHKQISGVDLGLPNWGKYVLVSAGALTALMLMIFLMTCCRKTNRAESIQHSPGETGRKVSVTSHNGRVISSWESYKSGGETKL

SEQ ID NO: 30825 - protein, 524 aa, Artificial Sequence
  derived and/or modified protein sequence (wt) from glycoprotein__RABV__DQ849045.1
MIPQVLLFVPLLVFSSCFGKFPIYTIPDKLGPWSPIDIHHLSCPNNLVVEDEGCTNLSGFSYMELKVGYISAIKVNGFTCTGVVTEAETYTNFVGYVTTTFKRKHFRPTPDACRAAYNWKMAGDPRYEESLHNPYPDYHWLRTVKTSKESLVIISPSVADLDPYDKSLHSRVFPGGKCSGITVSSTCCFTNHDYTIWMPENPRLGTSCDIFTNSRGKRASKGGKTCGFVDERGLYKSLKGACKLKLCGVLGLRLMDGTWVAIQTSDEIKWCSPDQLVNLHDFHSDEIEHLVVEELVKKREECLDALETIMTTKSVSFRRLSHLRKLVPGFGKAYTIFNKTLMEADAHYKSIRTWNEIIPSKGCLRVGGRCHPHVNGVFFNGIILGPDGHVLIPEMQSSLLHQHMELLESSVIPLMHPLADPSTVFKDGDEAEDFVEVHLPDVHKQISGVDLGLPNWGKYVLVSAGALTALMLMIFLMTCCRKTNRAESIQHSPGETGRKVSVTSHNGRVISSWESYKSGGETKL

SEQ ID NO: 30826 - protein, 524 aa, Artificial Sequence
  derived and/or modified protein sequence (wt) from glycoprotein__RABV__DQ849046.1
MIPQVLLFVPLLVFSSCFGKFPIYTIPDKLGPWSPIDIHHLSCPNNLVVEDEGCTNLSGFSYMELKVGYISAIKVNGFTCTGVVTEAETYTNFVGYVTTTFKRKHFRPTPDACRAAYNWKMAGDPRYEESLHNPYPDYHWLRTVKTSKESLVIISPSVADLDPYDKSLHSRVFPGGKCSGITVSSTCCFTNHEYTIWMPENPRLGTSCDIFTNSRGKRASKGGKTCGFVDERGLYKSLKGACKLKLCGVLGLRLMDGTWVAIQTSDEIKWCSPDQLVNLHDFHSDEIEHLVVEELVKKREECLDALETIMTTKSVSFRRLSHLRKLVPGFGKAYTIFNKTLMEADAHYKSIRTWNEIIPSKGCLRVGGRCHPHVNGVFFNGIILGPDGHVLIPEMQSSLLHQHMELLESSVIPLMHPLADPSTVFKDGDEAEDFVEVHLPDVHKQISGVDLGLPNWGKYVLVSAGALTALMLMIFLMTCCRKTNRAESIQHSPGETGRKVSVTSHNGRVISSWESYKSGGETKL

SEQ ID NO: 30827 - protein, 524 aa, Artificial Sequence
  derived and/or modified protein sequence (wt) from glycoprotein__RABV__DQ849047.1
MIPQVLLFVPLLVFSSCFGKFPIYTIPDKLGPWSPIDIHHLSCPNNLVVEDEGCTNLSGFSYMELKVGYISAIKVNGFTCTGVVTEAETYTNFVGYVTTTFKRKHFRPTPDACRAAYNWKMAGDPRYEESLHNPYPDYHWLRTVKTSKESLVIISPSVADLDPYDKSLHSRVFPGGKCSGITVSSTCCSTNHDYTIWMPENPRLGTSCDIFTNSRGKRASKGGKTCGFVDERGLYKSLKGACKLKLCGVLGLRLMDGTWVAIQTSDEIKWCSPDQLVNLHDFHSDEIEHLVVEELVKKREECLDALETIMTTKSVSFRRLSHLRKLVPGFGKAYTIFNKTLMEADAHYKSIRTWNEIIPSKGCLRVGGRCHPHVNGVFFNGIILGPDGHVLIPEMQSSLLHQHMELLESSVIPLMHPLADPSTVFKDGDEAEDFVEVHLPDVHKQISGVDLGLPNWGKYVLVSAGALTALMLMIFLMTCCRKTNRAESIQHSPGETGRKVSVTSHNGRVISSWESYKSGGETKL

SEQ ID NO: 30828 - protein, 524 aa, Artificial Sequence; identical to SEQ ID NO: 30827
  derived and/or modified protein sequence (wt) from glycoprotein__RABV__DQ849048.1

SEQ ID NO: 30829 - protein, 524 aa, Artificial Sequence
  derived and/or modified protein sequence (wt) from glycoprotein__RABV__DQ849049.1
MIPQVLLFVPLLVFLSCFGKFPIYTIPDKLGPWSPIDIHHLSCPNNLVVEDEGCTNLSGFSYMELKVGYISAIKVNGFTCTGVVTEAETYTNFVGYVTTTFKRKHFRPTPDACRAAYNWKMAGDPRYEESLHNPYPDYHWLRTVKTSKESLVIISPSVADLDPYDKSLHSRVFPGGKCSGITVSSTCCSTNHDYTIWMPENPRLGTSCDIFTNSRGKRASKGGKTCGFVDERGLYKSLKGACKLKLCGVLGLRLMDGTWVAIQTSDEIKWCSPDQLVNLHDFHSDEIEHLVVEELVKKREECLDALETIMTTKSVSFRRLSHLRKLVPGFGKAYTIFNKTLMEADAHYKSIRTWNEIIPSKGCLRVGGRCHPHVNGVFFNGIILGPDGHVLIPEMQSSLLHQHMELLESSVIPLMHPLADPSTVFKDGDEAEDFVEVHLPDVHKQISGVDLGLPNWGKYVLVSAGALTALMLMIFLMTCCRKTNRAESIQHSPGEIGRKVSVTSHNGRVISSWESYKSGGETKL

SEQ ID NO: 30830 - protein, 524 aa, Artificial Sequence; identical to SEQ ID NO: 30827
  derived and/or modified protein sequence (wt) from glycoprotein__RABV__DQ849050.1

SEQ ID NO: 30831 - protein, 524 aa, Artificial Sequence; identical to SEQ ID NO: 30827
  derived and/or modified protein sequence (wt) from glycoprotein__RABV__DQ849051.1

SEQ ID NO: 30832 - protein, 524 aa, Artificial Sequence
  derived and/or modified protein sequence (wt) from glycoprotein__RABV__DQ849052.1
MIPQVLLFVPLLVFSSCFGKFPIYTIPDKLGPWSPIDIHHLSCPNNLVVEDEGCTNLSGFSYMELKVGYISAIKVNGFTCTGVVTEAETYPNFVGYVTTTFKRKHFRPTPDACRAAYNWKMAGDPRYEESLHNPYPDYHWLRTVKTSKESLVIISPSVADLDPYDKSLHSRVFPGGKCSGITVSSTCCFTNHDYTIWMPENPRLGTSCDIFTNSRGKRASKGGKTCGFVDERGLYKSLKGACKLKLCGVLGLRLMDGTWVAIQTSDEIKWCSPDQLVNLHDFHSDEIEHLVVEELVKKREECLDALETIMTTKSVSFRRLSHLRKLVPGFGKAYTIFNKTLMEADAHYKSIRTWNEIIPSKGCLRVGGRCHPHVNGVFFNGIILGPDGHVLIPEMQSSLLHQHMELLESSVIPLMHPLADPSTVFKDGDEAEDFVEVHLPDVHKQISGVDLGLPNWGKYVLVSAGALTALMLMIFLMTCCRKTNRAESIQHSPGETGRKVSVTSHNGRVISSWESYKSGGETKL

SEQ ID NO: 30833 - protein, 524 aa, Artificial Sequence
  derived and/or modified protein sequence (wt) from glycoprotein__RABV__DQ849053.1
MIPQVLLFVPLLVFSSCFGKFPIYTIPDKLGPWSPIDIHHLSCPNNLVVEDEGCTNLSGFSYMELKVGYISAIKVNGFTCTGVVTEAETYTNFVGYVTTTFKRKHFRPTPDACRAAYNWKMAGDPRYEESLHNPYPDYHWLRTVKTSKESLVIISPSVADLDPYDKSLHSRVFPGGKCSGITVSSTCCSTNHDYTIWMPENPRLGTSCDIFTNSRGKRASKGGKTCGFVDERGLYKSLKGACKLKLCGVLGLRLMDGTWVAIQTSDEIRWCSPDQLVNLHDFHSDEIEHLVVEELVKKREECLDALETIMTTKSVSFRRLSHLRKLVPGFGKAYTIFNKTLMEADAHYKSIRTWNEIIPSKGCLRVGGRCHPHVNGVFFNGIILGPDGHVLIPEMQSSLLHQHMELLESSVIPLMHPLADPSTVFKDGDEAEDFVEVHLPDVHKQISGVDLGLPNWGKYVLVSAGALTALMLMIFLMTCCRKTNRAESIQHSPGETGRKVSVTSHNGRVISSWESYKSGGETKL

SEQ ID NO: 30834 - protein, 524 aa, Artificial Sequence
  derived and/or modified protein sequence (wt) from glycoprotein__RABV__DQ849054.1
MIPQVLLFVPLLVFSSCFGKFPIYPIPDKLGPWSPIDIHHLSCPNNLVVEDEGCTNLSGFSYMELKVGYISAIKVNGFTCTGVVTEAETYPNFVGYVTTTFKRKHFRPTPDACRAAYNWKMAGDPRYEESLHNPYPDYHWLRTVKTSKESLVIISPSVADLDPYDKSLHSRVFPGGKCSGITVSSTCCFTNHDYTIWMPENPRLGTSCDIFTNSRGKRASKGGKTCGFVDERGLYKSLKGACKLKLCGVLGLRLMDGTWVAIQTSDEIKWCSPDQLVNLHDFHSDEIEHLVVEELVKKREECLDALETIMTTKSVSFRRLSHLRKLVPGFGKAYTIFNKTLMEADAHYKSIRTWNEIIPSKGCLRVGGRCHPHVNGVFFNGIILGPDGHVLIPEMQSSLLHQHMELLESSVIPLMHPLADPSTVFKDGDEAEDFVEVHLPDVHKQISGVDLGLPNWGKYVLVSAGALTALMLMIFLMTCCRKTNRAESIQHSPGETGRKVSVTSHNGRVISSWESYKSGGETKL

SEQ ID NO: 30835 - protein, 524 aa, Artificial Sequence
  derived and/or modified protein sequence (wt) from glycoprotein__RABV__DQ849055.1
MIPQVLLFVPLLVFSSCFGKFPIYTIPDKLGPWSPIDIHHLSCPNNLVVEDEGCTNLSGFSYMELKVGYISAIKVNGFTCTGVVTEAETYTNFVGYVTTTFKRKHFRPTPDACRAAYNWKMAGDPRYEESLHNPYPDYHWLRTVKTSKESLVIISPSVADLDPYDKSLHSRVFPGGKCSGITVSSTCCFTNHDYTIWMPENPRLGTSCDIFTNSRGKRASKGGKTCGFVDERGLYKSLKGACKLKLCGVLGLRLMDGTWVAIQTSDEIKWCSPDQLVNLHDFHSDEIEHLVVEELVKKREECLDALETIMTTKSVSFRRLSHLRKLVPGFGKAYTIFNKTLMEADAHYKSIRTWNEIIPSKGCLRVGGRCHPHVNGVFFNGIILGPDGHVLIPEMQSSLLHQHMELLESAVIPLMHPLADPSTVFKDGDEAEDFVEVHLPDVHKQISGVDLGLPNWGKYVLVSAGALTALMLMIFLMTCCRKTNRAESIQHSPGETGRKVSVTSHNGRVISSWESYKSGGETKL

SEQ ID NO: 30836 - protein, 524 aa, Artificial Sequence
  derived and/or modified protein sequence (wt) from glycoprotein__RABV__DQ849056.1
MIPQVLLFVPLLVFSSCFGKFPIYTIPDKLGPWSPIDIHHLSCPNNLVVEDEGCTNLSGFSYMELKVGYISAIKVNGFTCTGVVTEAETYTNFVGYVTTTFKRKHFRPTPDACRAAYNWKMAGDPRYEESLHNPYPDYHWLRTVKTSKESLVIISPSVADLDPYDKSLHSRVFPGGKCSGITVSSTWCSTNHDYTIWMPENPRLGTSCDIFTNSRGKRASKGGKTCGFVDERGLYKSLKGACKLKLCGVLGLRLMDGTWVAIQTSDEIKWCSPDQLVNLHDFHSDEIEHLVVEELVKKREECLDALETIMTTKSVSFRRLSHLRKLVPGFGKAYTIFNKTLMEADAHYKSIRTWNEIIPSKGCLRVGGRCHPHVNGVFFNGIILGPDGHVLIPEMQSSLLHQHMELLESSVIPLMHPLADPSTVFKDGDEAEDFVEVHLPDVHKQISGVDLGLPNWGKYVLVSAGALTALMLMIFLMTCCRKTNRAESIQHSPGETGRKVSVTSHNGRVISSWESYKSGGETKL

SEQ ID NO: 30837 - protein, 524 aa, Artificial Sequence
  derived and/or modified protein sequence (wt) from glycoprotein__RABV__DQ849057.1
MIPQVLLFVPLLVFSSCFGKFPIYTIPDKLGPWSPIDIHHLSCPNNLVVEDEGCTNLSGFSYMELKVGYISAIKVNGFTCTGVVTEAETYTNFVGYVTTTFKRKHFRPTPDACRAAYNWKMAGDPRYEESLHNPYPDYHWLRTVKTSKESLVIISPSVADLDPYDKSLHSRVFPGGKCSGITVSSTCCSTNHDYTIWMPENPRLGTSCDIFTNSRGKRASKGGKTCGFVDERGLYKSLKGACKLKLCGVLGLRLMDGTWVAIQTSDEIKWCSPDQLVNLHDFHSDEIEHLVVEELVKKREECLDALETIMTTKSVSFRRLSHLRKLVPGFGKAYTIFNKTLMEADAHYKSIRTWNEIIPSKGCLRVGGRCHPHVNGVFFNGIILGPDGHVLIPEMQSSLLHQHMELLESSVIPLMHPLADPSTIFKDGDEAEDFVEVHLPDVHKQISGVDLGLPNWGKYVLVSAGALTALMLMIFLMTCCRKTNRAESIQHSPGETGRKVSVTSHNGRVISSWESYKSGGETKL

SEQ ID NO: 30838 - protein, 524 aa, Artificial Sequence
  derived and/or modified protein sequence (wt) from glycoprotein__RABV__DQ849058.1
MIPQVLLFVPLLVFSSCFGKFPIYTIPDKLGPWSPIDIHHLSCPNNLVVEDEGCTNLSGFSYMELKVGYISAIKVNGFTCTGVVTEAETYTNFVGYVTTTFKRKHFRPTPDACRAAYNWKMAGDPRYEESLHNPYPDYHWVRTVKTSKESLVIISPSVADLDPYDKSLHSRVFPGGKCSGITVSSTCCSTNHDYTIWMPENPRLGTSCDIFTNSRGKRASKGGKTCGFVDERGLYKSLKGACKLKLCGVLGLRLMDGTWVAIQTSDEIKWCSPDQLVNLHDFHSDEIEHLVVEELVKKREECLDALETIMTTKSVSFRRLSHLRKLVPGFGKAYTIFNKTLMEADAHYKSIRTWNEIIPSKGCLRVGGRCHPHVNGVFFNGIILGPDGHVLIPEMQSSLLHQHMELLESSVIPLMHPLADPSTVFKDGDEAEDFVEVHLPDVHKQISGVDLGLPNWGKYVLVSAGALTALMLMIFLMTCCRKTNRAESIQHSPGETGRKVSVTSHNGRVISSWESYKSGGETKL

SEQ ID NO: 30839 - protein, 524 aa, Artificial Sequence
  derived and/or modified protein sequence (wt) from glycoprotein__RABV__DQ849059.1
MIPQVLLFVPLLVFSSCFGKFPIYTIPDKLGPWSPIDIHHLSCPNNLVVEDEGCTNLSGFSYMELKVGYISAIKVNGFTCTGVVTEAETYTNFVGYVTTTFKRKHFRPMPDACRAAYNWKMAGDPRYEESLHNPYPDYHWLRTVKTTKESLVIISPSVADLDPYDKSLHSRVFPGGKCSGITVSSTCCSTNHDYTIWMPENPRLGTSCDIFTNSRGKRASKGGKTCGFVDERGLYKSLKGACKLKLCGVLGLRLMDGTWVAIQTSDEIKWCSPDQLVNLHDFHSDEIEHLVVEELVKKREECLDALETIMTTKSVSFRRLSHLRKLVPGFGKAYTIFNKTLMEADAHYKSIRTWNEIIPSKGCLRVGGRCHPHVNGVFFNGIILGPDGHVLIPEMQSSLLHQHMELLESSVIPLMHPLADPSTVFKDGDEAEDFVEVHLPDVHKQISGVDLGLPNWGKYVLISAGALTALMSMIFLMTCCRKTNRAESIQHSPGETGRKVSVTSHNGRVISSWESYKSGGETKL

SEQ ID NO: 30840 - protein, 524 aa, Artificial Sequence; identical to SEQ ID NO: 30839
  derived and/or modified protein sequence (wt) from glycoprotein__RABV__DQ849060.1

SEQ ID NO: 30841 - protein, 524 aa, Artificial Sequence
  derived and/or modified protein sequence (wt) from glycoprotein__RABV__DQ849061.1
MIPQVLLFVPLLVFSSCFGKFPIYTIPDKLGPWSPIDIHHLSCPNNLVVEDEGCTNLSGFSYMELKVGYISAIKVNGFTCTGVVTEAETYTNFVGYVTTTFKRKHFRPMPDACRAAYNWKMAGDPRYEESLHNPYPDYHWLRTVKTTKESLVIISPSVADLDPYDKSLHSRVFPGGKCSGITVSSTCCSTNHDYTIWMPENPRLGTSCDIFTNSRGKRASKGGKTCGFVDERGLYKSLKGACKLKLCGVLGLRLMDGTWVAIQTSDEIKWCSPDQLVNLHDFHSDEIEHLVVEELVKKREECLDALETIMTTKSVSFRRLSHLRKLVPGFGKAYTIFNKTLMEADAHYKSIRTWNEIIPSKGCLRVGGRCHPHVNGVFFNGIILGPDGHVLIPEMQSSLLHQHMELLESSVIPLMHPLADPSTVFKDGDEAEDFVEVHLPDVHKQISGVDLGLPNWGKYVLISVGALTALMLMIFLMTCCRKTNRAESTQHSPGETGRKVSVTSHNGRVISSWESYKSGGETKL

SEQ ID NO: 30842 - protein, 524 aa, Artificial Sequence
  derived and/or modified protein sequence (wt) from glycoprotein__RABV__DQ849062.1
MIPQVLLFVPLLVFSSCFGKFPIYTIPDKLGPWSPIDIHHLSCPNNLVVEDEGCTNLSGFSYMELKVGYISAIKVNGFTCTGVVTEAETYTNFVGYVTTTFKRKHFRPMPDACRAAYNWKMAGDPRYEESLHNPYPGYHWLRTVKTTKESLVIISPSVADLDPYDKSLHSRVFPGGKCSGITVSSTCCSTNHDYTIWMPENPRLGTSCDIFTNSRGKRASKGGKTCGFVDERGLYKSLKGACKLKLCGVLGLRLMDGTWVAIQTSDEIKWCSPDQLVNLHDFHSDEIEHLVVEELVKKREECLDALETIMTTKSVSFRRLSHLRKLVPGFGKAYTIFNKTLMEADAHYKSIRTWNEIIPSKGCLRVGGRCHPHVNGVFFNGIILGPDGHVLIPEMQSSLLHQHMELLESSVIPLMHPLADPSTVFKDGDEAEDFVEVHLPDVHKQISGVDLGLPNWGKYVLISAGALTALMLMIFLMTCCRKTNRAESIQHSPGETGRKVSVTSHNGRVISSWESYKSGGETKL

SEQ ID NO: 30843 - protein, 524 aa, Artificial Sequence
  derived and/or modified protein sequence (wt) from glycoprotein__RABV__DQ849063.1
MIPQVLLFVPLLVFSSCFGKFPIYTIPDKLGPWSPIDIHHLSCPNNLVVEDEGCTNLSGFSYMELKVGYISAIKVNGFTCTGVVTEAETYTNFVGYVTTTFKRKHFRPMPDACRAAYNWKMAGDPRYEESLHNPYPDYHWLRTVKTTKESLVIISPSVADLDPYDKSLHSRVFPGGKCSGITVSSTCCSTNHDYTIWMPENPRLGTSCDIFTNSRGKRASKGGKTCGFVDERGLYKSLKGACKLKLCGVLGLRLMDGTWVAIQTSDEIKWCSPDQLVNLHDFHSDEIEHLVVEELVKKREECLDALETIMTTKSVSFRRLSHLRKLVPGFGKAYTIFNKTLMEADAHYKSIRTWNEIIPSKGCLRVGGRCHPHVNGVFFNGIILGPDGHVLIPEMQSSLLHQHMELLESSVIPLMHPLADPSTVFKDGDEAEDFVEVHLPDVHKQISGVDLGLPNWGKYVLISAGALTALMLMIFLMTCCRKTNRAESIQHSPGETGRKVSVTSHNGRVISSWESYKSGGETKL

SEQ ID NO: 30844 - protein, 524 aa, Artificial Sequence
  derived and/or modified protein sequence (wt) from glycoprotein__RABV__DQ849064.1
MILQVLLFAPLLVFSSCFGKFPIYTIPDKLGPWSPIDIHHLSCPNNLVVEDEGCTNLSGFSYMELKVGYISAIKVNGFTCTGVVTEAETYTNFVGYVTTTFKRKHFRPMPDACRAAYNWKMAGDPRYEESLHNPYPDYHWLRTVKTTKESLVIISPSVADLDPYDKSLHSRVFPGGKCSGITVSSTCCSTNHDYTIWMPENPRLGTSCDIFTNSRGKRASKGGKTCGFVDERGLYKSLKGACKLKLCGVLGLRLMDGTWVAIQTSDEIKWCPPDQLVNLHDFHSDEIEHLVVEELVKKREECLDALETIMTTKSVSFRRLSHLRKLVPGFGKAYTIFNKTLMEADAHYKSIRTWNEIIPSKGCLRVGGRCHPHVNGVFFNGIILGPDGHVLIPEMQSSLLHQHMELLESSVIPLMHPLADPSTVFKDGDEAEDFVEVHLPDVHKQISGVDLGLPNWGKYVLISAGALTALMLMIFLMTCCRKNNRAESIQHSPGETGRKVSVTSHNGRVISSWESYKSGGETKL

SEQ ID NO: 30845 - protein, 524 aa, Artificial Sequence
  derived and/or modified protein sequence (wt) from glycoprotein__RABV__DQ849065.1
MIPQVLLFVPLLVFSSCFGKFPIYTIPDKLGPWSPIDIHHLSCPNNLVVEDEGCTNLSGFSYMELKVGYISAIKVNGFTCTGVVTEAETYTNFVGYVTTTFKRKHFRPMPDACRAAYNWKMAGDPRYEESLHNPYPDYHWLRTVKTTKESLVIISPSVADLDPYDKSLHSRVFPGGKCSGITVSSTCCSTNHDYTIWMPENPRLGTSCDIFTNSRGKRASKGGKTCGFVDERGLYKSLKGACKLKLCGVLGLRLMDGTWVAIQTSDEIKWCSPDQLVNLHDFHSDEIEHLVVEELVKKREECLDALETIMTTKSVSFRRLSHLRKLVPGFGKAYTIFNKTLMEADAHYKSIRTWNEIIPSKGCLRVGGRCHPHVNGVFFNGIILGPDGHVLIPEMQSSLLHQHMELLESSVIPLMHPLADPSTVFKDGDEAEDFVEVHLPDVHKQISGVDLGLPNWGKYVLISAGALTALMLTIFLMTCCRKTNRAESIQHSPGETGRKVSVTSHNGRVISSWESYKSGSETKL

SEQ ID NO: 30846 - protein, 524 aa, Artificial Sequence
  derived and/or modified protein sequence (wt) from glycoprotein__RABV__DQ849066.1
MIPQVLLFVPLLVFSSCFGKFPIYTIPDKLGPWSPIDIHHLSCPNNLVVEDEGCTNLSGFSYMELKVGYISAIKVNGFTCTGVVTEAETYTNFVGYVTTTFKRKHFRPMPDACRAAYNWKMAGDPRYEESLHNPYPDYHWLRTVKTTKESLVIISPSVADLDPYDKSLHSRVFPGGKCSGITVSSTCCSTNHDYTIWMPENPRLGTSCDIFTNSRGKRASKGGKTCGFVDERGLYKSLKGACKLKLCGVLGLRLMDGTWVAIQTSDEIKWCSPDQLVNLHDFHSDEIEHLVVEELVKKREECLDALETIMTTKSVSFRRLSHLRKLVPGFGKAYTIFNKTLMEADAHYKSIRTWNEIIPSKGCLRVGGRCHPHVNGVFFNGIILGPDGHVLIPEMQSSLLHQHMELLESSVIPLMHPLADPSTVFKDGDEAEDFVEVHLPDVHKQISGVDLGLPNWGKYVLISAGALTALMLTIFLMTCCRKTNRAGSIQHSPGETGRKVSVTSHNGRVISSWESYKSGSETKL

SEQ ID NO: 30847 - protein, 524 aa, Artificial Sequence; identical to SEQ ID NO: 30846
  derived and/or modified protein sequence (wt) from glycoprotein__RABV__DQ849067.1

SEQ ID NO: 30848 - protein, 524 aa, Artificial Sequence; identical to SEQ ID NO: 30845
  derived and/or modified protein sequence (wt) from glycoprotein__RABV__DQ849068.1

SEQ ID NO: 30849 - protein, 524 aa, Artificial Sequence
  derived and/or modified protein sequence (wt) from glycoprotein__RABV__DQ849069.2
MIPQALLFVPLLVFSFCFGKFPIYTIPDKLGPWSPIDIHHLSCPNNLVVEDEGCTNLSGFSYMELKVGYISAIKVNGFTCTGVVTEAETYTNFVGYVTTTFKRKHFRPTPDACRAAYNWKMAGDPRYEESLHNPYPDYHWLRTVKTTKESLVIISPSVSDLDPYDKSLHSRVFPSGKCSRITVSSTYCPTNHDYTIWMPENPRLGTSCDIFTNSRGKRASKGSKTCGFVDERGLYKSLKGACKLKLCGVLGLTLMDGTWVAIQTSDEAKWCPPDQLVNIHDFRSDEIEHLVVEELVKKREECLDALESIMTTKSVSFRRLSHLRKLVPGFGKAYTIFNKTLMEADAHYKSVRTWNEIIPSKGCLRVGGRCHPHVNGVFFNGIILGPDGHVLIPEMQSSLLQQHMELLESSVIPLMHPLADPSTVFKEDDEAEDFVEVHLPDVHKQVSGVDLGLPSWGKYVLMSVGAMIALMLMIFLMTCCRRANGAESIQHSLGETGRKVSVTSQSGRVISSWESYKSGGETKL

SEQ ID NO: 30850 - protein, 524 aa, Artificial Sequence
  derived and/or modified protein sequence (wt) from glycoprotein__RABV__DQ849070.1
MIPQVLLFVPLLVFSSCFGKFPIYTIPDKLGPWSPIDIHHLSCPNNLVVEDEGCTNLSGFSYMELKVGYISAIKVNGFTCTGVVTEAETYTNFVGYVTTTFKRKHFRPMPDACRAAYNWKMAGDPRYEESLHNPYPDYHWLRTVKTTKESLVIISPSVADLDPYDKSLHSRVFPGGKCSGITVSSTCCSTNHDYTIWMPENPRLGTSCDIFTNSRGKRASKGGKTCGFVDERGLYKSLKGACKLKLCGVLGLRLMDGTWVAIQTSDEIKWCSPDQLVNLHDFHSDEIEHLVVEELVKKREECLDALETIMTTKSVSFRRLSHLRKLVPGFGKAYTIFNKTLMEADAHYKSIRTWNEIIPSKGCLRVGGRCHPHVNGVFFNGIILGPDGHVLIPEMQSSLLHQHMELLESSVIPLMHPLADPSTVFKDGDEAEDFVDVHLPDVHKQISGVDLGLPNWGKYVLISAGALTALMLMIFLMTCCRKANRAESIQHNPGETGRKVSVTSHNGRVISSWESYKSGGETKL

SEQ ID NO: 30851 - protein, 524 aa, Artificial Sequence; identical to SEQ ID NO: 30527
  derived and/or modified protein sequence (wt) from glycoprotein__RABV__DQ849071.1

SEQ ID NO: 30852 - protein, 524 aa, Artificial Sequence
  derived and/or modified protein sequence (wt) from glycoprotein__RABV__DQ849072.1
MIPQALLFVPLLVFSLCFGKFPIYTIPDKLGPWSPIDIHHLSCPNNLVVEDEGCTNLSGFSYMELKVGYISAIKVNGFTCTGVVTEAETYTNFVGYVTTTFKRKHFRPTPDACRAAYNWKMAGDPRYEESLHNPYPDYHWLRTVKTTKESLVIISPSVADLDPYDKSLHSRVFPSGKCSGITVSSTYCSTNHDYTIWMPENPRLGTSCDIFVNSRGKRASKGSKTCGFVDERGLYKSLKGACKLKLCGVLGLRLMDGTWVAIQTSDETKWCPPDQLVNLHDFRSDEIEHLVVEELVKKREECLDALESIMTTKSVSFRRLSHLRKLVPGFGKAYTIFNKTLMEADAHYKSVRTWNEIIPSKGCLRVGGRCHPHVNGVFFNGIILGPDGHVLIPEMQSSLLQQHMELLESSVIPLMHPLADPSTIFKDGDEAEDFVEVHLPDVHKQVSGVDLGLPNWGKYVLMSAGALTALMLMIFLMTCCRKTDRTGSTHHSPGETGRKVSVTSQNGRVIASWESYKSGGETKL

SEQ ID NO: 30853 - protein, 524 aa, Artificial Sequence
  derived and/or modified protein sequence (wt) from glycoprotein__RABV__DQ849073.1
MIPQVLLFVPLLVFSSCLGKFPIYTIPDKLGPWSPIDIHHLSCPNNLVVEDEGCTNLSGFSYMELKVGYISAIKVNGFTCTGVVTEAETYTNFVGYVTTTFKRKHFRPMPDACRAAYNWKMAGDPRYEESLHNPYPDYHWLRTVKTSKESLVIISPSVADLDPYDKSLHSRVFPGGKCSGITVSSTCCSTNHDYTIWMPENPRLGTSCDIFTNSRGKRASKGGKTCGFVDERGLYKSLKGACKLKLCGVLGLRLMDGTWVAIQTSDEIKWCSPDQLVNLHDFHSDEIEHLVVEELVKKREECLDALETIMTTKSVSFRRLSHLRKLVPGFGKAYTIFNKTLMEADAHYKSIRTWNEIIPSKGCLRVGGRCHPHVNGVFFNGIILGPDGHVLIPEMQSSLLHQHMELLESSVIPLMHPLADPSTVFKDGDEAEDFVEVHLPDVHKQISGVDLGLPNWGKYVLISAGALTASMLMIFLMTCCRKTNRAESIQHSPGETGRKVSVTSHNGRVISSWESYKSGGETKL

SEQ ID NO: 30854 - protein, 524 aa, Artificial Sequence
  derived and/or modified protein sequence (wt) from glycoprotein__RABV__DQ875050.1
MVPQVLLFVLLLGFSLCFGKFPIYTIPDELGPWSPIDIHHLSCPNNLVVEDEGCTNLSEFSYMELKVGYISAIKVNGFTCTGVVTEAETYTNFVGYVTTTFKRKHFRPTPDACRAAYNWKMAGDPRYEESLHNPYPDYHWLRTVRTTKESLIIISPSVTDLDPYDKSLHSRVFPGRKCSGITVSSTYCSTNHDYTIWMPENPRPRTPCDIFTNSRGKRASNGNKTCGFVDERGLYKSLKGACRLKLCGVLGLRLMDGTWVAMQTSGETKWCPPDQLVNLHDFRSDEIEHLVVEELVKKREECLDALESIMTTKSVSFRRLSHLRKLVPGFGKAYTIFNKTLMEADAHYKSVRTWNEIIPSKGCLKVGGRCHPHVNGVFFNGLILGPDDHVLIPEMQSSLLQQHMELLESSVIPLMHPLADPSTVFKEGDEAEDFVEVHLPDVYKQISGVDLGLPNWGKYVLMTAGAMIGLVLIFSLMTWCRRANRPESKQRSFGGTGGNVSVTSQSGKVIPSWESYKSGGEIRL

SEQ ID NO: 30855 - protein, 524 aa, Artificial Sequence
  derived and/or modified protein sequence (wt) from glycoprotein__RABV__DQ875051.1
MVPQALLLVPLLGFSLCFGKFPIYTIPTKLGPWSPIDIHHLSCPNNLVVEDEGCTNLSGFSYMELKVGRISAIKVNGFTCTGVVTEAETYTNFVGYVTTTFKRKHFRPMPGCMYSRVQLEDGRSPQIEESLHNPYPDYHWLRTVRTTKESLIIISPSVTDLDPYDKSLHSRVFPGRKCSGITVSSTYCSTNHDYTVWMPEILRLGTSCDIFTNSRGKRASKGSKTCGFVDERGLYKSLKGACKLKLCGVPGLRLMDGTWVAMQTSNETKWCPPGQLVNLHDLHSDEIEHLVVEELVKKREECLDALESITTTKSVSFRRLSHLRKLVPGFGKAYTIFNKTLMEAEAHYKSVRTWNEIIPSKGCLRVGGGCHPHVNGVFFNGIILGPDGHVLIPEMQSSLLQQHIELLESSVIPLMHPLADPFTVFKDGDEIEDFVEVHLPDVHEQVSGVDLGLPNWGEYVLLSAGTLIALMLIIFLITCCKRVDRPESTQRSLRGTGRNVSVTSQSGKFIPSRESYKSGGETGL

SEQ ID NO: 30856 - protein, 524 aa, Artificial Sequence
  derived and/or modified protein sequence (wt) from glycoprotein__RABV__E02022.1
MVPQALLLVPILGFSSCFGKFPIYTIPDTLGPWSPIDIHHLSCPNNLVVEDEGCTNLSGFSYMELKVGHISAIKVNGFTCTGVVTEAETYTNFVGYVTTTFKRKHFRPTPDACRAAYNWKMAGDPRYEESLHSPYPDYHWLRTVKTTKESLVIISPSVVDLDPYDNSLHSRVFPSGKCSGITVSSVYCSTNHDYTVWMPESLRLGTSCDIFTNSRGKRVSKGSKTCGFVDERGLYKSLKGACKLKLCGVRGLRLMDGTWVAMQTSNETKWCPPDQLVNLHDLRSDEIEHLVIEELVKKREECLDALESIITTKSVSFRRLSYLRKLVPGFGKAYTIFNKTLMEAEAHYKSVRTWNEIIPSKGCLRVGGRCHPHVNGVFFNGIILGPDGHVLIPEMQSSLLQQHIELLESSVIPLMHPLADPFTVFKDGDETEDFIEVHLPDVHEQVSGVDLGLPNWGEYVLLSAGTLIALMLIIFLMTCCRKVDRPESTQRSLRGTGRNVSVTSQSGKFIPSWESYKSGGETGL

SEQ ID NO: 30857 - protein, 524 aa, Artificial Sequence
  derived and/or modified protein sequence (wt) from glycoprotein__RABV__EF206707.1
MVPQALLFVPLLVFPLCFGKFPIYTIPDKLGPWSPIDIHHLSCPNNLVVEDEGCTNLSGFSYMELKVGYILAIKMNGFTCTGVVTEAETYTNFVGYVTTTFKRKHFRPTPDACRAAYNWKMAGDPRYEESLHNPYPDYRWLRTVKTTKESLVIISPSVADLDPYDRSLHSRVFPSGKCSGVAVSSTYCSTNHDYTIWMPENPRLGMSCDIFTNSRGKRASKGSETCGFVDERGLYKSLKGACKLKLCGVLGLRLMDGTWVAMQTSNETKWCPPDQLVNLHDFRSDEIEHLVVEELVRKREECLDALESIMTTKSVSFRRLSHLRKLVPGFGKAYTIFNKTLMEADAHYKSVRTWNEILPSKGCLRVGGRCHPHVNGVFFNGIILGPDGNVLIPEMQSSLLQQHMELLESSVIPLVHPLADPSTVFKDGDEAEDFVEVHLPDVHNQVSGVDLGLPNWGKYVLLSAGALTALMLIIFLMTCCRRVNRSEPTQHNLRGTGREVSVTPQSGKIISSWESHKSGGETRL

SEQ ID NO: 30858 - protein, 524 aa, Artificial Sequence
  derived and/or modified protein sequence (wt) from glycoprotein__RABV__EF206709.1
MVPQALLFVPLLVFPLCFGKFPIYTIPDKLGPWSPIDIHHLSCPNNLVVEDEGCTNLSGFSYMELKVGYILAIKVNGFTCTGVVTEAETYTNFVGYVTTTFKRKHFRPTPDACRAAYNWKMAGDPRYEESLHNPYPDYRWLRTVKTTKESLVIISPSVADLDPYDRSLHSRVFPSGKCSGVAVSSTYCSTNHDYTIWMPENPRLGMSCDIFTNSRGKRASKGSETCGFVDERGLYKSLKGACKLKLCGVLGLRLMDGTWVSMQTSNETKWCPPDKLVNLHDFRSDEIEHLVVEELVRKREECLDALESIMTTKSVSFRRLSHLRKLVPGFGKAYTIFNKTLMEADAHYKSVRTWNEILPSKGCLRVGGRCHPHVNGVFFNGIILGPDGNVLIPEMQSSLLQQHMELLESSVIPLVHPLADPSTVFKDGDEAEDFVEVHLPDVHNQVSGVDLGLPNWGKYVLLSAGALTALMLIIFLMTCCRRVNRSEPTQHNLRGTGREVSVTPQSGKIISSWESHKSGGETRL

SEQ ID NO: 30859 - protein, 524 aa, Artificial Sequence
  derived and/or modified protein sequence (wt) from glycoprotein__RABV__EF206715.1
MVPQALLFVPLLVFPLCFGKFPIYTIPDKLGPWSPIDIHHLSCPNNLVVEDEGCTNLSGFSYMELKVGYILAIKVNGFTCTGVVTEAETYTNFVGYVTTTFKRKHFRPTPDACRAAYNWKMAGDPRYEESLHNPYPDYRWLRTVKTTKESLVIISPSVADLDPYDRSLHSRVFPSGKCSGVAVSSTYCSTNHDYTIWMPENPRLGMSCDIFTNSRGKRASKGSETCGFVDERGLYKSLKGACKLKLCGVLGLRLMDGTWVSMQPSNETKWCPPDKLVNLHDFRSDEIEHLVVEELVRKREECLDALESIMTTKSVSFRRLSHLRKLVPGFGKAYTIFNKTLMEADAHYKSVRTWNEILPSKGCLRVGGRCHPHVNGVFFNGIILGPDGNVLIPEMQSSLLQQHMELLESSVIPLVHPLADPSTVFKDGDEAEDFVEVHLPDVHNQVSGVDLGLPNWGKYVLLSAGALTALMLIIFLMTCCRRVNRSEPTQHNLRGTGREVSVTPQSGKIISSWESHKSGGETRL

SEQ ID NO: 30860 - protein, 524 aa, Artificial Sequence
  derived and/or modified protein sequence (wt) from glycoprotein__RABV__EF206716.1
MVPQALLFVPLLVFPLCFGKFPIYTIPDKLGPWSPIDIHHLSCPNNLVVEDEGCTNLSGFSYMELKVGYILAIKVNGFTCTGVVTEAETYTNFVGYVTTTFKRKHFRPTPDACRAAYNWKMAGDPRYEESLHNPYPDYRWLRTVKTTKESLVIISPSVADLDPYDRSLHSRVFPSGKCSGVAVSSTYCSTNHDYTIWMPENPRLGMSCDIFTNSRGKRASKGSETCGFVDERGLYKSLKGACKLKLCGVLGLRLMDGTWVSMQTSNETKWCPPDKLVNLHDFRSDEIEHLVVEELVRKREECLDALESIMTTKSVSFRRLSHLRKLVPGFGKAYTIFNKTLMEADAHYKSVGTWNEILPSKGCLRVGGRCHPHVNGVFFNGIILGPDGNVLIPEMQSSLLQQHMELLESSVIPLVHPLADPSTVFKDGDEAEDFVEVHLPDVHNQVSGVDLGLPNWGKYVLLSAGALTALMLIIFLMTCCRRVNRSEPTQHNLRGTGREVSVTPQSGKIISSWESHKSGGETRL

SEQ ID NO: 30861 - protein, 524 aa, Artificial Sequence
  derived and/or modified protein sequence (wt) from glycoprotein__RABV__EF206717.1
MVPQALLFVPLLVFPLCFGKFPIYTIPDKLGPWSPIDIHHLSCPNNLVVEDEGCTNLSGFSYMELKVGYISAIKMNGFTCTGVVTEAETYTNFVGYVTTTFKRKHFRPTPDACRAAYNWKMAGDPRYEESLHNPYPDYRWLRTVKTTKESLVIISPSVADLDPYDRSLHSRVFPSGKCSGVAVSSTYCSTNHDYTIWMPENPRLGMSCDIFTNSRGKRASKGSETCGFVDERGLYKSLKGACKLKLCGVLGLRLMDGTWVAMQTSNETKWCPPDQLVNLHDFRSDEIEHLVVEELVRKREECLDALESIMTTKSVSFRRLSHLRKLVPGFGKAYTIFNKTLMEADAHYKSVRTWNEILPSKGCLRVGGRCHPHVNGVFFNGIILGPDGNVLIPEMQSSLLQQHMELLESSVIPLMHPLADPSTVFKDGDEAEDFVEVHLPDVHKQVSGVDLGLPNWGKYVLLSAGALTALMLIIFLMTCCRRVNRSEPTQHNLRGTGREVSVTPQSGKIISSWESYKSGGETRL

SEQ ID NO: 30862 - protein, 524 aa, Artificial Sequence
  derived and/or modified protein sequence (wt) from glycoprotein__RABV__EF206719.1
MVPQALLFVPLLVFPLCFGKFPIYTIPDKLGPWSPIDIHHLSCPNNLVVEDEGCTNLSGFSYMELKVGYILAIKVNGFTCTGVVTEAETYTNFVGYVTTTFKRKHFRPTPDACRAAYNWKMAGDPRYEESLHNPYPDYRWLRTVKTTKESLVIISPSVADLDPYDRSLHSRVFPSGKCSGVAVSSTYCSTNHDYTIWMPENPRLGMSCDIFTNSRGKRASKGSETCGFVDERGLYKSLKGACKLKLCGVLGLRLMDGTWVSMQTSNETKWCPPDKLVNLHDFRSDEIEHLVVEELVRKREECLDALESIMTTKSVSFRRLSHLRKLVPGFGKAYTIFNKTLMEADAHYKSVETWNEILPSKGCLRVGGRCHPHVNGVFFNGIILGPDGNVLIPEMQSSLLQQHMELLESSVIPLVHPLADPSTVFKDGDEAEDFVEVHLPDVHNQVSGVDLGLPNWGKYVLLSAGALTALMLIIFLMTCCRRVNRSEPTQHNLRGTGREVSVTPQSGKIISSWESHKSGGETIL

SEQ ID NO: 30863 - protein, 524 aa, Artificial Sequence; identical to SEQ ID NO: 30858
  derived and/or modified protein sequence (wt) from glycoprotein__RABV__EF206720.1

SEQ ID NO: 30864 - protein, 524 aa, Artificial Sequence
  derived and/or modified protein sequence (wt) from glycoprotein__RABV__EF437215.1
MVPQVLLFVPLLVFSMCFGKFPIYTIPDKLGPWSPIDIHHLSCPNNLVVEDEGCTNLSGFSYMELKVGYISAIKVNGFTCTGVVTEAETYTNFVGYVTTTFKRKHFRPTPDACRAAYNWKMAGDPRYEESLHNPYPDYHWLRTVKTTKESLVIISPSVADLDPYDKSLHSRVFPSGKCSGITISSTYCSTNHDYTIWMPENPRLGTSCDIFTNSRGKRASKGGKTCGFVDERGLYKSLKGACKLKLCGVLGLRLMDGTWVAMQTSDETKWCPPDQLVNLHDFRSDEIEHLVVEELVKKREECLDALESIMATKSVSFRRLSHLRKLVPGFGKAYTIFNKTLMEADAHYKSVRTWNEIIPSKGCLRVGGRCHPHVNGVFFNGIILGPDGHVLIPEMQSSLLQQHMELLESSVIPLMHPLADPSTVFKDGDEAEDFVEVHLPDVHKQISGVDLGLPSWGKYVLVSAGVLVVLMLTIFIMTCCGRVHRPKSTQHGLGGTGRKVSVTSQSGKVISSWESYKSGGETRL

SEQ ID NO: 30865 - protein, 524 aa, Artificial Sequence
  derived and/or modified protein sequence (wt) from glycoprotein__RABV__EF556198.1
MTPQVLLFVPLLVFSSCFGKFPIYTIPDKLGPWSPIDIHHLSCPNNLVVEDEGCTNLSGFSYMELKVGYISAIKVNGFTCTGVVTEAETYTNFVGYVTTTFKRKHFRPMPDACRAAYNWKMAGDPRYEESLHNPYPDYHWLRTVKTTKESLVIISPSVADLDPYDKSLHSRVFPGGKCSGITVSSACCSTNHDYTIWMPENPRLGTSCDIFTNSRGKRASKGGKTCGFVDERGLYKSLKGACKLKLCGVLGLRLMDGTWVAIQTSDEIKWCSPDQLVNLHDFHSDEIEHLVVEELVKKREECLDALETIMTTKSVSFRRLSHLRKLVPGSGKAYTIFNKTLMEADAHYKSIRTWNEIIPSKGCLRVGGRCHPHVNGVFFNGIILGPDGHVLIPEMQSSLLHQHMELLESSVIPLMHPLADPSTVFKDGDEAEDFVEVHLPDVHKQISGVDLGLPNWGKYVLISAGALTALMLTIFLMTCCRKTNRAESIQHSPGETGRKVSVTSHNGRVISSWESYKSGSETKL

SEQ ID NO: 30866 - protein, 524 aa, Artificial Sequence
  derived and/or modified protein sequence (wt) from glycoprotein__RABV__EF564174.1
MIPQALLFVPLLVFPLCFGKFPIYTIPDKLGPWSPIDIHNLSCPNNLVVEDEGCTNLSGFSYMELKVGYISAIKVNGFTCTGVVTEAETYTNFVGYVTTTFKRKHFRPTPDACRSAYNWKMAGDPRYEESLHNPYPDYHWLRTVKTTKESVVIISPSVADLDPYDKSLHSRVFPRGKCSGITVSSAYCSTNHDYTIWMPENPRLGTSCDIFTNSRGKRASKGSKTCGFVDERGLYKSLKGACKLKLCGVLGLRLMDGTWVAIQTSNETKWCPPDQLVNLHDFHSDEIEHLVVEELVEKREECLDALESIMTTNPVSFRRLSPLRKLVPGFGKAYTIFNKTLMEADAHYKSVQTWDEIIPSKGCLRVGARCHPHVNGVFFNGIILGPDGHVLIPEMQSSLLQQHMELLESSVIPLMHPLADPSTVFKDGDEVEDFVEVHLPDVHKQVSGVDLGLPNWGKDVLMGAGVLTALMLMIFLMTCCRRTNRAESIQHSLGETGRKVSVTSQSGRVISSWESYKSGGETKL

SEQ ID NO: 30867 - protein, 526 aa, Artificial Sequence
  derived and/or modified protein sequence (wt) from glycoprotein__RABV__EF614261.1
MPSQAVFLVLTTVFSQCVGKFPIYTIPDKLGPWSPIDIHHLSCPNNLVVEDDGCTTLSGFTYMELKVGYITTIKVDGFTCTGIVTEAETYTNFVGYVTTTFKRKHFRPGPSACRDAYNWKAAGDPRYEESLHNPYPDSHWLRTVTTTKESLLIISPSVVDMDAYDKSLLSKIFPNGKCPGVSIASPFCSTNHDYTIWMPENTKTGMSCDIFTTSKGKRATKDGKLCGFVDERGLYKSLKGSCKLKLCGVSGLRLMDGSWVSIQNHEEAKWCPPDQLVNVHDFHSDEIEHLIVEELVKKREECLDALESIMTTKSISFRRLSHLRKLVPGFGKAYTIINKTLMEADAHYKSIREWSEIIPSKGCLVAGGRCYHHHNGVFFNGIILSPDGHVLIPEMQSALLQQHIELLESSVIPLMHPLADPSTVFKGDDGAEDFVEVHLPDVQKQISGIDLGLPEWKRYFLIGVAALTLFALTIFVVVCCRRVRRRERAKPNPVELIRKVSVTSQSGKVIPSWESYKVEAEGQSQA

SEQ ID NO: 30868 - protein, 524 aa, Artificial Sequence; identical to SEQ ID NO: 30843
  derived and/or modified protein sequence (wt) from glycoprotein__RABV__EF643518.1

SEQ ID NO: 30869 - protein, 524 aa, Artificial Sequence
  derived and/or modified protein sequence (wt) from glycoprotein__RABV__EU008924.1
MIPQALLFVPLLVFSSCFGKFPIYTIPDKLGPWSPIDIHHLSCPNNLVVEDEGCTNLSGFSYMELKVGYISAIKVNGFTCTGVVTEAETYTNFVGYVTTTFKRKHFRPMPGACRAAYNWKMAGDPRYEESLHNPYPDYHWLRTVKTTKESLVIISPSVADLDPYDKSLHSRVFPSGKCSGITVSSTCCSTNHDYTIWMPENPRLGTSCDIFTNSRGKRASKGGKTCGFVDERGLYKSLKGACKLKLCGVLGLRLMDGTWVAIQTSDEIKWCSPDQLVNLHDFHSDEIEHLVVEELVKKREECLDALETIMTTKSVSFRRLSHLRKLVPGFGKAYTIFNKTLMEADAHYKSIRTWNEIIPSKGCLRVGGRCHPHVNGVFFNGIILGPDGHVLIPEMQSSLLHQHMELLESSVIPLMHPLADPSTVFKDGDEAEDFVEVHLPDVHKQISGVDLGLPNWGKYVLISVGALTALMSMIFLMTCCRKTNRAESIQHSPGETGRKVSVTSHNGRVISSWESYKSGGETKL

SEQ ID NO: 30870 - protein, 524 aa, Artificial Sequence
  derived and/or modified protein sequence (wt) from glycoprotein__RABV__EU008925.1
MIPQALLFVPLLVFSLCFGKFPIYTIPDKLGPWSPIDIHHLSCPNNLVVEDEGCTNLSGFSYMELKVGYISAIKVNGFTCTGVVTEAETYTNFVGYVTTTFKRKHFRPMPGACRAAYNWKMAGDPRYEESLHNPYPDYHWLRTVKTTKESLVIISPSVADLDPYDKSLHSRVFPGGKCSGITVSSTCCSTNHDYTIWMPENPRLGTSCDIFTNSRGKRASKGGKTCGFVDERGLYKSLKGACKLKLCGVLGLRLMDGTWVAIQTSDEIKWCSPDQLVNLHDFHSDEIEHLVVEELVKKREECLDALETIMTTKSVSFRRLSHLRKLVPGFGKAYTIFNKTLMEADAHYKSIRTWNEIIPSKGCLRVGGRCHPHVNGVFFNGIILGPDGHVLIPEMQSSLLHQHMELLESSVIPLMHPLADPSTVFKDGDEAEDFVEVHLPDVHKQISGVDLGLPNWGKYVLISAGALTALMSMIFLMTCCRKTNRAGSIQHSPGETGRKVSVTSHNGRVISSWESYKSGGETKL

SEQ ID NO: 30871 - protein, 524 aa, Artificial Sequence
  derived and/or modified protein sequence (wt) from glycoprotein__RABV__EU008926.1
MIPQALLFVPLLVFSSCFGKFPIYTIPDKLGPWSPIDIHHLSCPNNLVVEDEGCTNLSGFSYMELKVGYISAIKVNGFTCTGVVTEAETYTNFVGYVTTTFKRKHFRPMPGACRAAYNWKMAGDPRYEESLHNPYPDYHWLRTVKTTKESLVIISPSVADLDPYDKSLHSRVFPGGKCSGITVSSTCCSTNHDYTIWMPENPRLGTSCDIFTNSRGKRASKGGKTCGFVDERGLYKSLKGACKLKLCGVLGLRLMDGTWVAIQTSDEIKWCSPDQLVNLHDFHSDEIEHLVVEELVKKREECLDALETIMTTKSVSFRRLSHLRKLVPGFGKAYTIFNKTLMEADAHYKSIRTWNEIIPSKGCLRVGGRCHPHVNGVFFNGIILGPDGHVLIPEMQSSLLQQHMELLESSVIPLMHPLADPSTVFKDGDEAEDFVEVHLPDVHKQISGVDLGLPNWGKYVLMSAGALTALMSMIFLMTCCRKTNRAESIQHSPGETGRKVSVTSHNGRVISSWESYKSGGETKL

SEQ ID NO: 30872 - protein, 524 aa, Artificial Sequence
  derived and/or modified protein sequence (wt) from glycoprotein__RABV__EU008927.1
MIPQALLFVPLLVFLSCFGKFPIYTIPDKLGPWSPIDIHHLSCPNNLVVEDEGCTNLSGFSYMELKVGYISAIKVNGFTCTGVVTEAETYTNFVGYVTTTFKRKHFRPMPDACRAAYNWKMAGDPRYEESLHNPYPDYHWLRTVKTTKESLVIISPSVADLDPYDKSLHSRVFPGGKCSGITVSSTCCSTNHDYTIWMPENPRLGTSCDIFTNSRGKRASKGSKTCGFVDERGLYKSLKGACKLKLCGVLGLRLMDGTWVAIQTSDEIKWCSPDQLVNLHDFHSDEIEHLVVEELVKKREECLDALETIMTTKSVSFRRLSHLRKLVPGFGKAYTIFNKTLMEADAHYKSIRTWNEIIPSKGCLRVGGRCHPHVNGVFFNGIILGPDGHVLIPEMQSSLLHQHMELLESSVIPLMHPLADPSTVFKDGDEAEDFVEVHLPDVHKQISGVDLGLPNWGKYVLISAGALTALMSMIFLMTCCRKTNRAESIQHSPGETGRKVSVTSHNGRVISSWESYKSGGETKL

SEQ ID NO: 30873 - protein, 524 aa, Artificial Sequence
  derived and/or modified protein sequence (wt) from glycoprotein__RABV__EU008928.1
MIPQVLLFVPLLVFSSCFGKFPIYTIPDKLGPWSPIDIHHLSCPNNLVVEDEGCTNLSGFSYMELKVGYISAIKVNGFTCTGVVTEAETYTNFVGYVTTTFKRKHFRPMPDACRAAYNWKMAGDPRYEESLHNPYPDYHWLRTVKTTKESLVIISPSVADLDPYDKSLHSRVFPSGKCSGITVSSTCCSTNHDYTIWMPENPRLGTSCDIFTNSRGKRASKGGKTCGFVDERGLYKSLKGACKLKLCGVLGLRLMDGTWVAIQTSDEIKWCPPDQLVNLHDFHSDEIEHLVVEELVKKREECLDALESIMTTKSVSFRRLSHLRKLVPGFGKAYTIFNKTLMEADAHYKSIRTWNEIIPSKGCLRVGGRCHPHVNGVFFNGIILGPDGHVLIPEMQSSLLHQHMELLESSVIPLMHPLADPSTVFKDGDEAEDFVEVHLPDVHKQISGVDLGLPNWGKYVLISAGALTALMSMIFLMTCCRKTSRAESTQHSPGETGRKVSVTSHNGRVISSWESYKSGGETKL

SEQ ID NO: 30874 - protein, 524 aa, Artificial Sequence
  derived and/or modified protein sequence (wt) from glycoprotein__RABV__EU086128.1
MVPQVLLFVPLLVFSMCFGKFPIYTIPDKLGPWSPIDIHHLSCPNNLVVEDEGCTNLSGFSYMELKVGYISAIKVNGFTCTGVVTEAETYTNFVGYVTTTFKRKHFRPTPDACRAAYNWKMAGDPRYEESLHNPYPDYHWLRTVKTTKESLVIISPSVADLDPYDKSLHSRVFPSGKCLGITISSTYCSTNHDYTIWMPENPRLGTSCDIFTNSRGKRASKGSKTCGFVDERGLYKSLKGACKLKLCGVLGLRLMDGTWVAMQTSDETKWCPPDQLVNLHDFRSNEIEHLVVEELVKKREECLDALESIMTTKSVSFRRLSHLRKLVPGFGKAYTIFNKTLMEADAHYKSVRTWNEIIPSKGCLRVGGRCHPHVNGVFFNGIILGPDGHVLIPEMQSSLLQQHMDLLESSVIPLMHPLADPSTVFKDGDEAEDFVEVHLPDVHKQISGVDLGLPSWGKYVLVSAGVLVVLMLTIFIMTCCGRVHRPKSTQHSLGGTGRKVSVTSQSGKVISSWESYKRGGETRL

SEQ ID NO: 30875 - protein, 524 aa, Artificial Sequence
  derived and/or modified protein sequence (wt) from glycoprotein__RABV__EU086129.1
MIPQALLFVPFLAFSLCFGKFPIYTIPDKLGPWSPIDIHHLSCPNNLVVEDEGCTNLSGFSYMELKVGYISAIKVNGFTCTGVVTEAETYTNFIGYVTTTFRRKHFRPTPDACRAAYNWKMAGDPRYEESLHNPYPDYHWLRTVKTTKESLVIISPSVSDLDPYDKSLHSRVFPSGKCSGITVSSTYCPTNHDYTIWMPENPRLGTSCDIFTNSRGKRASKGSKTCGFVDERGLYKSLKGACKLKLCGVLGLRLMDGTWAAIQTSDEAKWCPPDQLVNIHDFRSDEIEHLVVEELVKKREECLDALESIMTTKSVSFRRLSHLRKLVPGFGKAYTIFNKTLMEADAHYKSVRTWNEIIPSKGCLRVGGRCHPHVNGVFFNGIILGPDGHVLIPEMQSSLLQQHMELLESSVIPLMHPLADPSTVFKDGDEAEDFVEVHLPDVHKQVSGVDLGLPSWGKYVLMSVGALIVLMLMIFLTTCCRKANGAESIRHRLGETGRKVSVTSQNGRVISSWESYKSGGETKL

SEQ ID NO: 30876 - protein, 524 aa, Artificial Sequence
  derived and/or modified protein sequence (wt) from glycoprotein__RABV__EU086130.1
MIPQALLFVPLLVFSLCYGKFPIYTIPDKLGPWSPIDIHHLSCPNNLVVEDEGCTNLSGFSYMELKVGYISAIKVNGFTCTGVVTEAETYTNFVGYVTTTFKRKHFRPTPDACRAAYNWKMAGDPRYEESLHNPYPDYHWLRTVKTTKESLVIISPSVSDLDPYDKSLHSRVFPSGKCSGITVSSTYCPTNHDYTIWMPENPRLGTSCDIFTNSRGKRASKGSKTCGFVDERGLYKSLKGACKLKLCGVLGLRLMDGTWAAIQTSDEAKWCPPDQLVNIHDFRSDEIEHLVVEELVKKREECLDALESIMTTKSVSFRRLSHLRKLVPGFGKAYTIFNKTLMEADAHYKSVRTWNEIIPSKGCLRVGGRCHPHVNGVFFNGIILGPDGHVLIPEMQSSLLQQHMELLESSVIPLMHPLADPSTVFKDGDEAEDFVEVHLPDVHKQVSGVDLGLPSWGKYVLMSVGAMIALMLVIFLTTCCRKVNGAETIQHRLGETGRKVSVTSQSGRVISSWESYKSGGETKL

SEQ ID NO: 30877 - protein, 524 aa, Artificial Sequence
  derived and/or modified protein sequence (wt) from glycoprotein__RABV__EU086131.1
MIPQALLFVPLLVFSLCLGKFPIYTIPDKLGPWSPIDIHHLSCPNNLVVEDEGCTNLSGFSYMELKVGYISAIKVNGFTCTGVVTEAETYTNFVGYVTTTFKRKHFRPTPDACRAAYNWKMAGDPRYEESLHNPYPDYHWLRTVKTTKESLVIISPSVSDLDPYDKSLHSRVFPGGKCSGITVSSTYCPTNHDYTIWMPENPRLGTSCDIFTNSRGKRASKGSKTCGFVDERGLYKSLKGACKLKLCGVLGLRLMDGTWAAIQTSDEAKWCPPDQLVNIHDFRSDEIEHLVVEELVKKREECLDALESIMTTKSVSFRRLSHLRKLVPGFGKAYTIFNKTLMEADAHYKSVRTWNEIIPSKGCLRVGGRCHPHVNGVFFNGIILGPDGHVLIPEMQSSLLQQHMELLESSVIPLMHPLADPSTVFKDGDEAEDFVEVHLPDVHKQVSGVDLGLPSWGKYVLMSVGAMIALMLMIFLTTCCRKANGAETIQHRLGETGRKVSVTSQSGRVISSWESYKSGGETKL

SEQ ID NO: 30878 - protein, 524 aa, Artificial Sequence
  derived and/or modified protein sequence (wt) from glycoprotein__RABV__EU086132.1
MIPQALLFVPLLVFSLCFGKFPIYTIPDKLGPWSPIDIHHLSCPNNLVVEDEGCTNLSGFSYMELKVGYISAIKVNGFTCTGVVTEAETYTNFVGYVTTTFKRKHFRPTPDACRAAYNWKMAGDPRYEESLHNPYPDYHWLRTVKTTKESLVIISPSVSDLDPYDKSLHSRVFPSGKCSGITVSSTYCPTNHDYTIWMPENPRLGTSCDIFTNSRGKRASKGSKTCGFVDERGLYKSLKGACKLKLCGVLGLRLMDGTWAAIQTSDEAKWCPPDQLVNIHDFRSDEIEHLVVEELVKKREECLDALESIMTTKSVSFRRLSHLRKLVPGFGKAYTIFNKTLMEADAHYKSVRTWNEIIPSKGCLRVGGRCHPHVNGVFFNGIILGPDGHVLIPEMQSSLLQQHMELLESSVIPLMHPLADPSTVFKDGDEAEDFVEVHLPDVHKQVSGVDLGLPSWGKYVLMSVGAMIALMLMILLTTCCRKVNGAETIQHRLGETGRKVSVTSQSGRVISSWESYKSGGETKL

SEQ ID NO: 30879 - protein, 524 aa, Artificial Sequence
  derived and/or modified protein sequence (wt) from glycoprotein__RABV__EU086133.1
MIPQALLFVPLLVFSLCFGKFPIYTIPDKLGPWSPIDIHHLSCPNNLVVEDEGCTNLSGFSYMELKVGYISAIKVNGFTCTGVVTEAETYTNFVGYVTTTFKRKHFRPTPDACRAAYNWKMAGDPRYEESLHNPYPDYHWLRTVKTTKESLVIISPSVSDLDPYDKSLHSRVFPSGKCSGITVSSTYCPTNHDYTIWMPENPRLGTSCDIFTNSRGKRASKGSKTCGFVDERGLYKSLKGACKLKLCGVLGLRLMDGTWAAIQTSDEAKWCPPDQLVNIHDFRSDEIEHLVVEELVKKREECLDALESIMTTKSVSFRRLSHLRKLVPGFGKAYTIFNKTLMEADAHYKSVRTWNEIIPSKGCLRVGGRCHPHVNGVFFNGIILGPDGHVLIPEMQSSLLQQHMELLESSVIPLMHPLADPSTVFKDGDEAEDFVEVHLPDVHKQVSGVDLGLPSWGKYVLMSVGAMIALMLMIFLTTCCRKVNGAETIQRRLGETGRKVSVTSQSGRVISSWESYKSGGETKL

SEQ ID NO: 30880 - protein, 524 aa, Artificial Sequence
  derived and/or modified protein sequence (wt) from glycoprotein__RABV__EU086134.1
MIPQALLFVPLLVFSLCFGKFPIYTIPDKLGPWSPIDIHHLSCPNNLVVEDEGCTNLSGFSYMELKVGYISAIKVNGFTCTGVVTEAETYTNFVGYVTTTFKRKHFRPTPDACRAAYNWKMAGDPRYEESLHNPYPDYHWLRTVKTTKESLVIISPSVSDLDPYDKSLHSRVFPSGKCSGITVSSTYCPTNHDYTIWMPENPRLGTSCDIFTNSRGKRASKGSKTCGFVDERGLYKSLKGACKLKLCGVLGLRLMDGTWAAIQTSDEAKWCPPDQLVNIHDFRSDEIEHLVVEELVKKREECLDALESIMTTKSVSFRRLSHLRKLVPGFGKAYTIFNKTLMEADAHYKSVRTWNEIIPSKGCLRVGGRCHPHVNGVFFNGIILGPDGHVLIPEMQSSLLQQHMELLESSVIPLMHPLADPSTVFKDGDEAEDFVEVHLPDVHKQVSGVDLGLPSWGKYVLMSVGAMIALMLMIFLTTCCRKVNRAETIQRRLGETGRKVSVTSQTGRVISSWESYKSGGETKL

SEQ ID NO: 30881 - protein, 524 aa, Artificial Sequence
  derived and/or modified protein sequence (wt) from glycoprotein__RABV__EU086135.1
MIPQVLLFVPLLVFSSCFGKFPIYTIPDKLGPWSPIDIHHLSCPNNLVVEDEGSTNLSGFPYMELKVGYISAIKVNGFTCTGVVTEAEPYTNFVGYVTTTFKRKHFRPMPDACRAAYNWKMAGDPRYEESLHNPYPDYHWLRTVKTTKESLVIISPSVADLDPYDKSLHSRVFPGGKCSGITVSSTCCSTNHDYTIWMPENPRLGTSCDIFTNSRGKRASKGGKTCGCVDERGLYKSLKRACKLKLCGVLGLRLMDGTWVAIQTSDEIKWCSPDQLVNLHDFHSDEIEHLVVEELVKKREECLDALETIMTTKSVSFRRLSHLRKLVPGFGKAYTIFNKTLMEADAHYKSIRTWNEIIPSKGCLRVGGRCHPHVNGVFFNGIILGPDGHVLIPEMQSSLLHQHMELLESSVIPLMHPLADPSTVFKDGDEAEDFVEVHLPDVHKQISGVDLGLPNWGKYVLISAGALTALMLTIFLMTCCRKTNRAESIQHSPGETGRKVSVTSHNGRVISSWESYKSGSETKL

SEQ ID NO: 30882 - protein, 524 aa, Artificial Sequence
  derived and/or modified protein sequence (wt) from glycoprotein__RABV__EU086136.1
MIPQVLLFVPLLVFSSCFGKFPIYTIPDKLGPWSPIDIHHLSCPNNLVVEDEGCTNLSGFSYMELKVGYISAIKVNGFTCTGVVTEAETYTNFVGYVTTTFKRKHFRPMPDACRAAYNWKMAGDPRYEESLHNPYPDYHWLRTVKTTKESLVIISPSVADLDPYDKSLHSRVFPGGKCSGITVSSTCCSTNHDYTIWMPENPRLGTSCDIFTNSRGKRASKGGKTCGFVDERGFVKSLKGACKLKLCGVLGLRLMDGTWVAIQTSDEIKWCSPDQLVNLHDFHSDEIEHLVVEELVKKREECLDALETFMTTKSVSFRRLSLLRKLVPGFGKAFTIFNKTLMEADAHFKSILTWNEIFPYKWCFRLGEILHPHVNRVFFNGIILGPDGHVLIPEMQSSLLHQHMELLESSVIPLMHPLADPSTVFKDGDEAEDFVDVHLPDVHKQISGVDLGLPNWGKYVLISAGALTALMLMIFLMTCCRKANRAESIQHNPGETGRKVSVTSHNGRVISSWESYKSGGETKL

SEQ ID NO: 30883 - protein, 524 aa, Artificial Sequence
  derived and/or modified protein sequence (wt) from glycoprotein__RABV__EU086137.1
MIPQVLLFVPLLVFSSCFGKFPIYTIPDKLGPWSPIDIHHLSCPNNLVVEDEGCTNLSGFSYMELKVGYISAIKVNGFTCTGVVTEAETYTNFVGYVTTTFKRKHFRPMPDACRAAYNWKMAGDPRYEESLHNPYPDYHWLRTVKTTKESLVIISPSVADLDPYDKSLHSRVFPGGKCSGITVSSTCCSTNHDYTIWMPENPRLGTSCDIFTNSRGKRASKGGKTCGFVDERGLYKSLKGACKLKLCGVLGLRLMDGTWVAIQTSDEIKWCSPDQLVNLHDFHSDEIEHLFVEELVKKREECLDALETIMTTKSVSFKRLSHLTNLVPGFGKAYTIFNKTLMEADAHYKSIPTWNEIIPSKGCLKFGGRCHPPVNGVFFNGIILGPDGHVLIPEMQSSLLHQHMELLESSVIPLMHPLADPSTVFKDGDEAEDFVDVHLPDVHKQISGVDLGLPNWGKYVLISAGALTALMLMIFLMTCCRKANRAESIQHNPGETGRKVSVTSHNGRVISSWESYKSGGETKL

SEQ ID NO: 30884 - protein, 524 aa, Artificial Sequence
  derived and/or modified protein sequence (wt) from glycoprotein__RABV__EU086138.1
MIPQVLLFVPLLVFSSCFGKFPIYTIPDKLGPWSPIDIHHLSCPNNLVVEDEGCTNLSGFSYMELKVGYISAIKVNGFTCTGVVTEAETYTNFVGYVTTTFKRKHFRPMPDACRAAYNWKMAGDPRYEESLHNPYPDYHWLRTVKTTKESLVIISPSVADLDPYDKSLHSRVFPGGKCSGITVSSTWCSTNHDYTIWMPENPRLGTSCDIFTNSRGKRASKGGKTCGFVDERGLYKSLKGACKLKLCGVLGLRLMDGTWVAIQTSDEIKWCSPDQLVNLHDFHSDEIEHLVVEELVKKREECLDALETIMTTKSVSFRRLSHLRKLVPGFGKAYTIFNKTLMEADAHYKSIRTWNEIIPSKGCLRVGGRCHPLVNGVSFNGIILGPDGHVLIPEMQSSLLHQHMELLESSVIPLMHPLADPSTVFKDGDEAEDFVEVHLPDVHKQISGVDLGLPNWGKYVLISAGALTALMLTIFLMMCCRKTNRAESIQHSPGEIGRKVSVTSHNGRVISSWESYKSGSETKL

SEQ ID NO: 30885 - protein, 524 aa, Artificial Sequence
  derived and/or modified protein sequence (wt) from glycoprotein__RABV__EU086139.1
MIPQVLLFVPLLVFSSCFGKFPIYTIPDKLGPWSPIDIHHLSCPNNLVVEDEGCTNLSGFSYMELKVGYISAIKVNGFTCTGVVTEAETYTNFVGYVTTTFKRKHFRPMPDACRAAYNWKMAGDPRYEESLHNPYPDYHWLRTVKTTKESLVIISPSVADLDPYDNSLHSRVFPGGKCSGITVSSTCCSTNHDYTIWMPENPRLGTSCDIFTNSRGKRASKGGKTCGFVDERGLYKSLKGACKLKLCGVLGLRLMDGTWVAIQTSDEIKWCSPDQLVNLHDFHSDEIEHLVVEELVKKREECLDALETIMTTKSVSFRRLSHLRKLVPGFGKAYTIFNKTLMEADAHYKSIRTWNEIIPSKGCLRVGGRCHPHVNGVFFNGIILGPDGHVLIPEMQSSLLHQHMELLESSVIPLMHPLADPSTVFKDGDEAEDFVEVHLPDVHKQISGVDLGLPNWGKYVLISAGALTALMLTIFLMTCCRKTNRAESIQHSPGEIGRKVSVTSHNGRVISSWESYKSGSETKL

SEQ ID NO: 30886 - protein, 524 aa, Artificial Sequence
  derived and/or modified protein sequence (wt) from glycoprotein__RABV__EU086140.1
MIPQVLLFVPLLVFSSCFGKFPIYTIPDKLGPWSPIDIHHLSCPNNLVVEDEGCTNLSGFSYMELKVGYISAIKVNGFTCTGVVTEAETYTNFVGYVTTTFKRKHFRPMPDACRAAYNWKMAGDPRYEESLHNPYPDYHWLRTVKTSKESLVIISPSVADLDPYDKSLHSRVFPGGKCSGITVSSTCCSTNHDYTIWMPENPRLGTSCDIFTNSRGKRASKGGKTCGFVDERGLYKSLKGACKLKLCGVLGLRLMDGTWVAIQTSDEIKWCSPDQLVNLHDFHSDEIEHLVVEELVKKREECLDALETIMTTTSVSFRRLSHLRKLVPGFGRAFSIFNKTLVEADALFQSFRTWNEIIPSKGCLRVGGRCHPHVNGVFFNGIILGPDGHVLIPEMQSSLLHQHMELLESSVIPLMHPLADPSTVFKDGDEAEDFVEVHLPDVHKQISGVDLGLPNWGKYVLISAGALTALMLMIFLMTCCRKTNRAESIQHSPGETGRKVSVTSHNGRVISSWESYKSGGETKL

SEQ ID NO: 30887 - protein, 524 aa, Artificial Sequence
  derived and/or modified protein sequence (wt) from glycoprotein__RABV__EU086141.1
MIPQVLLFVPLLVFSSCLGKFPIYTIPDKLGPWSPIDIHHLSCPNNLVVEDEGCTNLSGFSYMELKVGYISAIKVNGFTCTGVVTEAETYTNFVGYVTTTFKRKHFRPMLDACRAAYNWKMAGDPRYEESLHNPYPDYHWLRTVKTSKESLVIISPSVADLDPYDKSLHSRVFPGGKCSGITVSSTCCSTNHDYTIWMPENPRLGTSCDIFTNSRGKRASKGGKTCGFVDERGLYKSLKGACKLKLCGVLGLRLMDGTWVAIQTSDEIKWCSPDQLVNLHDFHSDEIEHLVVEELVKKREECLDALETIMTTKSVSFRRLSHLRKLVPGFGKAYTIFNKTLMEADAHYKSIRTWNEIIPSKGCLRVGGRCHPHVNEVFFNGIILGPDGHVLIPEMQSSLLHQHMELLESSVIPLMHPLTDPSTVFKDGDEAEDFVEVHLPDVHKQISGGDLGLPNWGKYVLISAGALTASMLMIFLMTCCRKTNRAESIQHSPGETGEEVSGTSQTGRVISSWESYKSGGETKL

SEQ ID NO: 30888 - protein, 524 aa, Artificial Sequence
  derived and/or modified protein sequence (wt) from glycoprotein__RABV__EU086142.1
MIPQVLLFVPLLVFSSCLGKFPIYTIPDKLGPWSPIDIHHLSCPNNLVVEDEGCTNLSGFSYMELKVGYISAIKVNGFTCTGVVTEAETYTNFVGYVTTTFKRKHFRPMLDACRAAYNWKMAGDPRYEESLHNPYPDYHWFRTVKTSKESLVIISPSVADLDPYDKSLHSRVFPGGKCSGITVSSTCCSTNHDYTIWMPENPRLGTSCDIFTNSRGKRASKGGKTCGFVDERGLYKSLKGACKLKLCGVLGLRLMDGTWVAIQTSDEIKWCSPDQLVNLHDFHSDEIEHLVVEELVKKREECLDALETIMTTKSVSFRRLSHLRKLVPGFGKAYTIFNKTLMEADAHYKSIRTWNEIIPSKGCLRVGGRCHPHVNGVFFNGIILGPDGHVLIPEMQSCLLHQHMELLESSFIPLMLPLADPSTVFKDGDEAEDFVEVHLPDVHKQISGGDLGLPNWGKYVLISAGALTASMLMIFLMTCCRKTNRAESIQHSPGETGRKVSVTSHNGRVISSWESYKSGGETKL

SEQ ID NO: 30889 - protein, 524 aa, Artificial Sequence
  derived and/or modified protein sequence (wt) from glycoprotein__RABV__EU086143.1
MIPQVLLFVPLLVFSSCFGKFPIYTIPDKLGPWSPIDIHHLSCPNNLVVEDEGCTNLSGFSYMELKVGYISAIKVNGFTCTGVVTEAETYTNFVGYVTTTFKRKHFRPMPDACRAAYNWKMAGDPRYEESLHNPYPDYHWLRTVKTSKESLVIISPSVADLDPYDKSLHSRVFPGGKCSGITVSSTCCSTNHDYTIWMPENPRLGTSCDIFTNSRGKRASKGGKTCGFVDERGLYKSLKGACKLKLCGVLGLRLMDGTWVAIQTSDEIKWCSPDQLVNLHDFHSDEIEHLVVEELVKKREECLDALETIMTTKSVSFRRLSHLRKLVPGFGKAYTIFNKTLMEADAHYKSIRTWNEIIPSKGCLRVGGRCHPHVNGVFFNGIILGPDGHVLIPEMQSSLLHQHMELLESSVIPLMHPLADPSTVFKDGDEAEDFVEVHLPDVHKQISGVDLGLPNWGKYVLISAGALTALMLMIFLMTCCRRLNRAESIQHSPGETGRKVSVTSHSGRVISSWESYKSGGETKL

SEQ ID NO: 30890 - protein, 524 aa, Artificial Sequence; identical to SEQ ID NO: 30527
  derived and/or modified protein sequence (wt) from glycoprotein__RABV__EU086144.1

SEQ ID NO: 30891 - protein, 524 aa, Artificial Sequence
  derived and/or modified protein sequence (wt) from glycoprotein__RABV__EU086145.1
MIPQALLFVPLLVFSLCFGKFPIYTIPDKLGPWSPIDIHHLSCPNNLVVEDEGCTNLSGFSYMELKVGYISAIKVNGFTCTGVVTEAETYTNFVGYVTTTFKRKHFRPTPDACRAAYNWKMAGDPRYEESLHNPYPDYHWLRTVKTTKESLVIISPSVADLDPYDKSLHSRVFPSGKCSGITVSSTYCSTNHDYTIWMPENPRLGTSCDIFVNSRGKRASKGSKTCGFVDERGLYKSLKGACKLKLCGVLGLRLMDGTWVAIQTSDETKWCPPDQLVNLHDFRSDEIEHLVVEELVKKREECLDALESIMTTKSVSFRRLSHLRKLVPGFGKAYTIFNKTLMEADAHYKSVRTWNEIIPSKGCLRVGGRCHPHVNGVFFNGIILGPDGHVLIPEMQSSLLQQHMELLESSVIPLMHPLADPSTIFKDGYEAEDFVEVHLPDVHKQVSGVDLGLPNWGKYVLMSAGALTALMLMIFLMTCCRKTDRTGSTHHSPGETGRKVSVTSQNGRVIASWESYKSGGETKL

SEQ ID NO: 30892 - protein, 524 aa, Artificial Sequence; identical to SEQ ID NO: 30843
  derived and/or modified protein sequence (wt) from glycoprotein__RABV__EU086146.1

SEQ ID NO: 30893 - protein, 524 aa, Artificial Sequence; identical to SEQ ID NO: 30845
  derived and/or modified protein sequence (wt) from glycoprotein__RABV__EU086147.1

SEQ ID NO: 30894 - protein, 524 aa, Artificial Sequence
  derived and/or modified protein sequence (wt) from glycoprotein__RABV__EU086148.1
MIPQVLLFVPLLVFSSCFGKFPIYTIPDKLGPWSPIDIHHLSCPNNLVVEDEGCTNLSGFSYMELKVGYISAIKVNGFTCTGVVTEAETYTNFVGYVTTTFKRKHFRPMPDACRAAYNWKMAGDPRYEESLHNPYPDYHWLRTVKTTKESLVIISPSVADLDPYDKSLHSRVFPGGKCSGITVSSTCCSTNHDYTIWMPENPRLGTSCDIFTNSRGKRASKGGKTCGFVDERGLYKSLKGACKLKLCGVLGLRLMDGTWVAIQTSDEIKWCSPDQLVNLHDFHSDEIEHLVVEELVKKREECLDALETIMTTKSVSFRRLSHLRKLVPGFGKAYTIFNKTLMEADAHYKSIRTWNEIIPSKGCLRVGGRCHPHVNGVFFNGIILGPDGHVLIPEMQSCLLHQHMELLESSVIPLMHPLADPSTVFKDGDEAEDFVEVHLPDVHKQISGVDLGLPNWGKYVLISAGALTALMSMIFLMTCCRKTNRAESIQHSPGETGRKVSVTSHNGRVISSWESYKSGGETKL

SEQ ID NO: 30895 - protein, 524 aa, Artificial Sequence
  derived and/or modified protein sequence (wt) from glycoprotein__RABV__EU086149.1
MIPQVLLFVPLLVSSSCFGKFPIYTIPDKLGPWSPIDIHHLSCPNNLVVEDEGCTNLSGFSYMELKVGYISAIKVNGFTCTGVVTEAETYTNFVGYVTTTFKRKHFRPMPDACRAAYNWKMAGDPRYEESLHNPYPDYHWLRTVKTTKESLVIISPSVADLDPYDKSLHSRVFPGGKCSGITVSSTCCSTNHDYTIWMPENPRLGTSCDIFTNSRGKRASKGGKTCGFVDERGLYKSLKGACKLKLCGVLGLRLMDGTWVAIQTSDEIKWCSPDQLVNLHDFHSDEIEHLVVEELVKKREECLDALETIMTTKSVSFRRLSHLRKLVPGFGKAYTIFNKTLMEADAHYKSIRTWNEIIPSKGCLRVGGRCHPHVNGVFFNGIILGPDGHVLIPEMQSSLLHQHMELLESSVIPLMHPLADPSTVFKDGDEAEDFVEVHLPDVHKQISGVDLGLPNWGKYVLISAGALTALMSMIFLMTCCRKTNRAESIQHSPGETGRKVSVTSHNGRVISSWESYKSGGETKL

SEQ ID NO: 30896 - protein, 524 aa, Artificial Sequence
  derived and/or modified protein sequence (wt) from glycoprotein__RABV__EU086150.1
MILQVLLFVPLQVFSSCFGEFPIYTIPDKLGPWSPIDIHHLSCPNNLVVKDEGCTNLSGFSYMELKVGYISAIKVNGFTCTGVVTEAETYTNFVGYVTTTFKRKHFRPMPDACRAAYNWKMAGDPRYEESLHNPYPDYHWLRTVKTTKESLVIISPSVADLDPYDKSLHSRVFPGGKCSGITVSSTCCSTNHDYTIWMPENPRLGTSCDIFTNSRGKRASKGGKTCGFVDERGLYKSLKGACKLKLCGVLGLRLMDGTWVAIQTSDEIKWCPPDQLVNLHDFHSDEIEHLVVEELVKKREECLDALETIMTTKSVSFRRLSHLRKLVPGFGKAYTIFNKTLMEADAHYKSIRTWNEIIPSKGCLRVGGRCHPHVNGVFFNGIILGPDGHVLIPEMQSSLLHQHMELLESSVIPLMHPLADPSTVFKDGDEAEDFVEVHLPDVHKQISGVDLGLPNWGKYVLVSAGALTALMLMIFLMTCCRKTNRAESIQHSPGETGRKVSVTSHNGRVISSWESYKSGGETKL

SEQ ID NO: 30897 - protein, 524 aa, Artificial Sequence
  derived and/or modified protein sequence (wt) from glycoprotein__RABV__EU086151.1
MIPQALLFVPLLVFSLCFGKFPIYTIPDKLGPWSPIDIHHLSCPNNLVVEDEGCTNLSGFSYMELKVGYISAIKVNGFTCTGVVTEAETYTNFVGYVTTTFKRKHFRPTPDACRAAYNWKMAGDPRYEESLHNPYPDYHWLRTVKTTKESLVIISPSVADLDPYDKSLHSRVFPNGKCSGITVSSTYCSTNHDYTIWMPENPRLGTSCDIFTNSRGKRASKGSKTCGFVDERGLYKSLKGACKLKLCGVLGLRLMDGTWVALQTSDETKWCSPDQLVNLHDFHSDEIEHLVVEELVKKREECLDALESIMTTKSVSFRRLSHLRKLVPGFGKAYTIFNKTLMEADAHYKSIRTWNEIIPSKGCLRVGGKCHPHVNGVFFNGIILGPDGHVLIPEMQSSLLHQHMELLESSVIPLMHPLADPSTVFKDGDEAEDFVEVHLPDVHKQISGVDLGLPNWGKYVLMSAGALTVLMLTIFLVTCCRKTNRAESIQHSSGETGRKVSVTSQNGRVISSWESYKSGGETKL

SEQ ID NO: 30898 - protein, 524 aa, Artificial Sequence
  derived and/or modified protein sequence (wt) from glycoprotein__RABV__EU086152.1
MIPQALLFVPLLVFSLCFGKFPIYTIPDKLGPWSPIDIHHLSCPNNLVVEDEGCTNLSGFSYMELKVGYISAIKVNGFTCTGVVTEAETYTNFVGYVTTTFKRKHFRPTPDACRAAYNWKMAGDPRYEESLHNPYPDYHWLRTVKTTKESLVIISPSVSDLDPYDKSLHSRVFPSGKCSGITVSSTYCPTNHDYTIWMPENPRLGTSCDIFTNSRGKRASKGSKTCGFVDERGLYKSLKGACKLKLCGVLGLRLMDGTWAAIQTSDEAKWCPPDQLVNIHDFRSDEIEHLVVEELVKKREECLDALESIMTTKSVSFRRLSHLRKLVPGFGKAYTIFNKTLMEADAHYKSVRTWNEIIPSKGCLRVGGRCHPHVNGVFFNGIILGPDGHVLIPEMQSSLLQQHMELLESSVIPLMHPLADPSTVFKDGDEAEDFVEVHLPDVHKQVSGVDLGLPSWGKYVLMSVGAMIALMLMIFLMTCCRKSNGAESIQHRLGETGRKVSVTSQSGRVISSWESYKSGGETKL

SEQ ID NO: 30899 - protein, 524 aa, Artificial Sequence
  derived and/or modified protein sequence (wt) from glycoprotein__RABV__EU086153.1
MVPQVLWFVPLLVFSMCFGKFPIYTIPDKLGPWSPIDIHHLSCPNNLVVEDEGCTNLSGFSYMELKVGYISAIKVNGFTCTGVVTEAETYTNFVGYVTTTFKRKHFRPTPDACRAAYNWKMAGDPRYEESLHNPYPDYHWLRTVKTTKESLVIISPSVADLDPYDKSLHSRVFPSGKCSGITISSTYCSTNHDYTIWMPENPRLGTSCDIFTNSRGKRASKGSKTCGFVDERGLYKSLKGACKLKLCGVLGLRLMDGTWVAMQTSDETKWCPPDQLVNLHDFRSDEIEHLVVEELVKKREECLDALESIMTTKSVSFRRLSHLRKLVPGFGKAYTIFNKTLMEADAHYKSVRTWNEIIPSKGCLRVGGRCHPHVNGVFFNGIILGPDGHVLIPEMQSSLLQQHMELLESSVIPLMHPLADPSTVFKDGDEAEDFVEVHLPDVHKQISGVDLGLPNWGKYVLVSAGVLVVLMLAIFIMTCCGRVNRPKSTQHSLEGTGRKVSVTSQSGKVISSWESYKSGGETRL

SEQ ID NO: 30900 - protein, 524 aa, Artificial Sequence
  derived and/or modified protein sequence (wt) from glycoprotein__RABV__EU086154.1
MVPQVLWFVPLLVFSMCFGKFPIYTIPDKLGPWSPIDIHHLSCPNNLVVEDEGCTNLSGFSYMELKVGYISAIKVNGFTCTGVVTEAETYTNFVGYVTTTFKRKHFRPTPDACRAAYNWKMAGDPRYEESLHNPYPDYHWLRTVKTTKESLVIISPSVADLDPYDKSLHSRVFPSGKCSGITISSTYCSTNHDYTIWMPENPRLGTSCDIFTNSRGKRASKGSKTCGFVDERGLYKSLKGACKLKLCGVLGLRLMDGTWVAMQTSDETKWCPPDQLVNLHDFRSDEIEHLVVEELVKKREECLDALESIMTTKSVSFRRLSHLRKLVPGFGKAYTIFNKTLMEADAHYKSVRTWNEIIPSKGCLRVGGRCHPHVNGVFFNGIILGPDGHVLIPEMQSSLLQQHMELLESSVIPLMHPLSDPSTVFKDGDEAEDFVEVHLPDVHKQISGVDLGLPNWGKYVLVSAGVLVVLMLAIFIMTCCGRVNRPKSTQHSLEGTGRKVSVTSQSGKVISSWESYKSGGETRL

SEQ ID NO: 30901 - protein, 524 aa, Artificial Sequence; identical to SEQ ID NO: 30633
  derived and/or modified protein sequence (wt) from glycoprotein__RABV__EU086155.1

SEQ ID NO: 30902 - protein, 524 aa, Artificial Sequence
  derived and/or modified protein sequence (wt) from glycoprotein__RABV__EU086156.1
MVPQVLLFVPLLVFSLCFGKFPIYTIPDKLGPWSPIDIHHLSCPNNLVVEDEGCTNLSGFSYMELKVGYISAIKVNGFTCTGVVTEAETYTNFVGYVTTTFKRKHFRPTPDACRAAYNWKLAGDPRYEESLHNPYPDYHWLRTVKTTKESLVIISPSVADLDPYDKSLHSRVFSGGKCSGITVSSTYCSTNHDYTIWMPENPRLGTSCDIFVNSRGKRASKGGKTCGFVDERGLYKSLKGACKLKLCGVPGLRLMDGTWAAIQTSDETKWCPPDQLVNLHDFRSDEIEHLVVEELVKKREECLDALESIMTTKSVSFRRLSHLRKLVPGFGKAYTIFNKTLMEADAHYESVRTWNEIIPSKGCLRVGGRCHPHVNGVFFNGIILGPDGHVLIPEMQSSLLQQHMELLESSVIPLMHPLADPSTVLKDGDEAEDFVEVHLPDVHKLISGVDLGLPSWGKYVLMSAGVLTALMLMIFLMTCCRRGNQAGSKQHGLEGTGRKVSVTSQNGKVISSWESYKSGGETRL

SEQ ID NO: 30903 - protein, 524 aa, Artificial Sequence
  derived and/or modified protein sequence (wt) from glycoprotein__RABV__EU086157.1
MIPQALLFVPLLVFSLCFGKFPIYTIPDKLGPWSPIDIHHLSCPNNLVVEDEGCTNLSGFSYMELKVGYISAIKVNGFTCTGVVTEAETYTNFVGYVTTTFKRKHFRPTPDACRAAYNWKMAGDPRYEESLHNPYPDYHWLRTVKTTKESLVIISPSVSDLDPYDKSLHSRVFPSGKCSGITVSSTYCPTNHDYTIWMPENPRLGTSCDIFTNSRGKRASKGSKNCGFVDERGLYRSLKGACKLKLCGVLGLRLMDGTWAAIQTSDEAKWCPPDQLVNIHDFRSDEIEHLVVEELVKKREECLDALESIMTTKSVSFRRLSHLRKLVPGFGKAYTIFNKTLMEADAHYKSVRTWNEIIPSKGCLRVGGRCHPHVNGVFFNGIILGPDGHVLIPEMQSSLLQQHMELLESSVIPLMHPLADPSTVFKDGDEAEDFVEVHLPDVHKQVSGVDLGLPSWGKYVLMSVGALIALMLMIFLMTCCRKANGVESMQHRLGETGRKVSVTSQSGRVISSWESYKSGGETKL

SEQ ID NO: 30904 - protein, 524 aa, Artificial Sequence
  derived and/or modified protein sequence (wt) from glycoprotein__RABV__EU086158.1
MIPQALLFVPLLVFSLCFGKFPIYTIPDKLGPWSPIDIHHLSCPNNLVVEDEGCTNLSGFSYMELKVGYISAIKVNGFTCTGVVTEAETYTNFVGYVTTTFKRKHFRPTPDACRAAYNWKMAGDPRYEESLHNPYPDYHWLRTVKTTKESLVIISPSVSDLDPYDKSLHSRVFPSGKCSGITVSSTYCPTNHDYTIWMPENPRLGTSCDIFTNSRGKRASKGSKTCGFVDERGLYRSLKGACKLKLCGVLGLRLMDGTWAAIQTSDEAKWCPPDQLVNIHDFRSDEIEHLVVEELVKKREECLDALESIMTTKSVSFRRLSHLRKLVPGFGKAYTIFNKTLMEADAHYKSVRTWNEIIPSKGCLRVGGRCHPHVNGVFFNGIILGPDGHVLIPEMQSSLLRQHMELLESSVIPLMHPLADPSTVFKDGDEAEDFVEVHLPDVHNQISGVDLGLPSWGKYVLMSVGAMIALMLVIFLTTCCRKANGAETIQHRLGETGRKVSVTSQSGRVMSSWESYKSGGETKL

SEQ ID NO: 30905 - protein, 524 aa, Artificial Sequence
  derived and/or modified protein sequence (wt) from glycoprotein__RABV__EU086159.1
MIPQALLFVPLLVFSLCFGKFPIYTIPDKLGPWSPIDIHHLSCPNNLVVEDEGCTNLSGFSYMELKVGYISAIKVNGFTCTGVVTEAETYTNFVGYVTTTFKRKHFRPTPDACRAAYNWKMAGDPRYEESLHNPYPDYHWLRTVKTTKESLVIISPSVSDLDPYDKSLHSRVFPSGKCSGITVSSTYCPTNHDYTIWMPENPRLGTSCDIFTNSRGKRASKGSKTCGFVDERGLYKSLKGACKLKLCGVLGLRLMDGTWAAIQTSDEAKWCPPDQLVNIHDFRSDEIEHLVVEELVKKREECLDALESIMTTKSVSFRRLSHLRKLVPGFGKAYTIFNKTLMEADAHYKSVRTWNEIIPSKGCLRVGGRCHPHVNGVFFNGIILGPDGHVLIPEMQSSLLQQHMELLESSVIPLMLPLADPSTVFKDGDEAEDFVEVHLPDVHKQVSGVDLGLPSWGKYVLMSVGAMIALMLMIFLTTCCRKANGARTMQHASGETGRKVSVTFPSGRVISSWESYKSGGETKL

SEQ ID NO: 30906 - protein, 524 aa, Artificial Sequence
  derived and/or modified protein sequence (wt) from glycoprotein__RABV__EU086160.1
MIPQALLFVPLLVFSLCFGKFPIYTIPDKLGPWSPIDIHHLSCPNNLVVEDEGCTNLSGFSYMELKVGYISAIKVNGFTCTGVVTEAETYTNFVGYVTTTFKRKHFRPTPDACRAAYNWKMAGDPRYEESLHNPYPDYHWLRTVKTTKESLVIISPSVSDLDPYDKSLHSRVFPSGKCSGITVSSTYCPTNHDYTIWMPENPRLGTSCDIFTNSRGKRASKGSKTCGFVDERGLYKSLKGACKLKLCGVLGLRLMDGTWAAIQTSDEAKWCPPDQLVNIHDFRSDEIEHLVVEELVKKREECLDALESIMTTKSVSFRRLSHLRKLVPGFGKAYTIFNKTLMEADAHYKSVRTWNEIIPSKGCLRVGGRCHPHVNGVFFNGIILGPDGHVLIPEMQSSLLQQHMELLESSVIPLMHPLADPSTVFKDGDEAEDFVEVHLPDVHKQVSGVDLGLPSWGKYVLMSVGAMIALMLMIFLTTCCRKANGAETIQHRLGETGRKVSVTSQSGRVISSWESYKSGGETKL

SEQ ID NO: 30907 - protein, 524 aa, Artificial Sequence
  derived and/or modified protein sequence (wt) from glycoprotein__RABV__EU126641.1
MVPQVLLFVLLLGFSLCFGKFPIYTIPDKLGPWSPIDIHHLRCPNNLVVEDEGCTNLSGFSYMELKVGYISAIKVNGFTCTGVVTEAETYTNFVGYVTTTFKRKHFRPTPDACRAAYNWKMAGDPRYEESLQNPYPDYHWLRTVRTTKESLIIISPSVTDLDPYDKSLHSRVFPGGKCSGITVSSTYCSTNHDYTIWMPEDPRPGTPCDIFTNSRGKRASNGNKTCGFVDERGLYKSLKGACRLKLCGVLGLRLMDGTWVAMQTSDETKWCSPDQLVNLHDFRSNEIEHLVVEDLVKKREECLDTLESIMTTKSVSFRRLSHLRKLVPGFGKAYTIFNKTLMEADVHYKSVRTWNEIIPSKGCLKVGGRCHPHVNGVFFNGIILGPDDRVLIPEMQSSLLRQHMELLESSVIPLMHPLADPSTVFKEGDEAEDFVEVHLPDVYKKISGVDLGLPNWGKYVLMTAGAMIGLVLIFSLMTWCRRANRPESKQRSFGGTGGNVSVTSQSGKVIPSWESYKSGGEIRL

SEQ ID NO: 30908 - protein, 524 aa, Artificial Sequence
  derived and/or modified protein sequence (wt) from glycoprotein__RABV__EU182346.1
MVPQALLFVPLLVFPLCFGKFPIYTIPDKLGPWSPIDIHHLSCPNNLVVEDEGCTNLSGFSYMELKVGYILAIKMNGFTCTGVVTEAETYTNFVGYVTTTFKRKHFRPTPDACRAAYNWKMAGDPRYEESLHNPYPDYRWLRTVKTTKESLVIISPSVADLDPYDRSLHSRVFPSGKCSGVAVSSTYCSTNHDYTIWMPENPRLGMSCDIFTNSRGKRASKGSETCGFVDERGLYKSLKGACKLKLCGVLGLRLMDGTWVAMQTSNETKWCPPDQLVNLHDFRSDEIEHLVVEELVRKREECLDALESIMTTKSVSFRRLSHLRKLVPGFGKAYTIFNKTLMEADAHYKSVRTWNEILPSKGCLRVGGRCHPHVNGVFFNGIILGPDGNVLIPEMQSSLLQQHMELLESSVIPLVHPLADPSTVFKDGDEAEDFVEVHLPDVHNQVSGVDLGLPNWGKYVLLSAGALTALMLIIFLMTCCRRVNRSEPTQHNLRGTGREVSVTPQSGRIISSWESHKSGGETRL

SEQ ID NO: 30909 - protein, 524 aa, Artificial Sequence
  derived and/or modified protein sequence (wt) from glycoprotein__RABV__EU182347.1
MVPQALLFVPLLVFPLCFGKFPIYTIPDKLGPWSPIDIHHLSCPNNLVVEDEGCTNLSGFSYMELKVGYNLAIKMNGFTCTGVVTEAETYTNFVGYVTTTFKRKHFRPTPDACRAAYNWKMAGDPRYEESLHNPYPDYRWLRTVKTTKESLVIISPSVADLDPYDRSLHSRVFPSGKCSGVAVSSTYCSTNHDYTIWMPENPRLGMSCDIFTNSRGKRASKGSETCGFVDERGLYKSLKGACKLKLCGVLGLRLMDGTWVAMQTSNETKWCPPDQLVNLHDFRSDEIEHLVVEELVRKREECLDALESIMTTKSVSFRRLSHLRKLVPGFGKAYTIFNKTLMEADAHYKSVRTWNEILPSKGCLRVGGRCHPHVNGVFFNGIILGPDGNVLIPEMQSSLLQQHMELLESSVIPLVHPLADPSTVFKDGDEAEDFVEVHLPDVHNQVSGVDLGLPNWGKYVLLSAGALTALMLIIFLMTCCRRVNRSEPTQHNIRGTGREVSVTPQSGKIISSWESHKSGGETRL

SEQ ID NO: 30910 - protein, 524 aa, Artificial Sequence
  derived and/or modified protein sequence (wt) from glycoprotein__RABV__EU253477.1
MTPQALLFVPLLVFSSCFGKFPIYTIPDKLGPWSPTDIHHLSCPNNLVVEDEGCTNLSGFSYMELKVGYISAIKVNGFTCTGVVTEAETYTNFVGYVTTTFKRKHFRPMPDACRAAYNWKMAGDPRYEESLHNPYPDYHWLRTVKTTKESLVIISPSVADLDPYDKSLHSRVFPGGKCSGITVSSTCCSTNHDYTIWMPENPRLGTSCDIFTNSRGKRASKGGKTCGFVDERGLYKSLKGACKLKLCGVLGLRLMDGTWVAIQTSDEIKWCSPDQLVNLHDFHSDEIEHLVVEELVKKREECLDALETIMTTKSVSFRRLSHLRKLVPGFRKAYTIFNKTLMEADAHYKSIRTWNEIIPSKGCLRVGGRCHPHVNGVFFNGIILGPDGHVLIPEMQSSLLHQHMELLESSVIPLMHPLADPSTVFKDGDEAEDFVEVHLPDVHKQISGVDLGLPNWGKYVLISAGALTALMLTIFLMTCCRKTNRAESIQHSPGETGRKVSVTSHNGRVISSWESYKSGGETKL

SEQ ID NO: 30911 - protein, 524 aa, Artificial Sequence
  derived and/or modified protein sequence (wt) from glycoprotein__RABV__EU267742.1
MIPQVLLLVPLLVFSSCFGKFPIYTIPDKLGPWSPIDIHHLSCPNNLVVEDEGCTNLSGFSYMELKVGYISAIKVNGFTCTGVVTEAETYTNFVGYVTTTFKRKHFRPTPDACRAAYNWKMAGDPRYEESLHNPYPDYHWFRTVKTSKESLVIISPSVADLDPYDKSLHSRVFPGGKCSGITVSSTCCSTNHDYTIWMPENPRLGTSCDIFTNSRGKRASKGGKTCGFVDERGLYKSLKGACKLKLCGVLGLRLMDGTWVAIQTSDEIKWCSPDQLVNLHDFHSDEIEHLVVEELVKKREECLDALETIMTTKSVSFRRLSHLRKLVPGFGKAYTIFNKTLMEADAHYKSIRTWNEIIPSKGCLRVGGRCHPHVNGVFYNGIILGPDGHVLIPEMQSSLLHQHMELLESSVIPLMHPLADPSTVFKDGDEAEDFVEVHLPDVHKQISGVDLGLPNWGKYVLVSAGALTALMLMIFLMTCCRKTNRAESIQHSPGETGRKVSVTSHNGRVISSWESYKSGGETKL

SEQ ID NO: 30912 - protein, 524 aa, Artificial Sequence
  derived and/or modified protein sequence (wt) from glycoprotein__RABV__EU267743.1
MIPQVLLFVPLLVFSSCFGKFPIYTTSDKLGPWSPIDMHHLSCPNNLVVEDEGCTNLSGFSYMELKVGYISAIKVNGFTCTGVVTEAETYTNFVGYVTTTFKRKHFRPMPDACRAAYNWKMAGDPRYEESLHNPYPDYHWLRTVKTTKESLVIISPSVADLDPYDKSLHSRVFPGGKCSGITVSSTCCSTNHDYTIWMPENPRLGTSCDIFTNSRGKRASKGGKTCGFVDERGLYKSLKGACKLKLCGVLGLRLMDGTWVAIQTSDEIKWCSPDQLVNLHDFHSDEIEHLVVEELAKEREECLDALEAIMTTKSVSFRRLSHLRKLVPGFGKAYTIFNKTLMEADAHYKSIRTWNEIIPSKGCLRVGGRCHPHVNGVFFNGIILGPDGHVLIPEMQSSLLHQHMELLESSVIPLMHPLADPSTVFKDGDEAEDFVEDHLPDVHKQISGVDLGLPNWGKYVLISAGALTALMSMIFLMTCCRKTNRAESIQHSPGETGRKVSVTSHNGRVISSWESYKSGGETKL

SEQ ID NO: 30913 - protein, 524 aa, Artificial Sequence
  derived and/or modified protein sequence (wt) from glycoprotein__RABV__EU267744.1
MVPQVLLFVPLLVFSSCFGKFPIYTIPDKLGPWSPIDIHHLSCPNNLVVEDEGCTNLSGFSYMELKVGYISAIKVNGFTCTGVVTEAETYTNFVGYVTTTFKRKHFRPMPDACRAAYNWKMAGDPRYEESLHNPYPDYHWLRTVKTTKESLVIISPSVADLDPYDKSLHSRVFPGGKCSGITVSSTCCSTNHDYTIWMPENPRLGTSCDIFTNSRGKRASKGGKTCGFVDERGLYKSLKGACKLKLCGVPGLRLMDGTWVAIQTSDEIKWCSPDQLVNLHDFHSDEIEHLVVEELVKKREECLDALETIMATKSVSFRRLSHLRKLVPGFGKAYTIFNKTLMEADAHYKSIRTWNEIIPSKGCLRVGGRCHPHVSGVFFNGIILGPDGHVLIPEMQSSLLHQHMELLESSVIPLMHPLADPSTVFKDGDEAEDFVEVHLPDVHKQISGVDLGLPNWEKYVLISAGALTALMLMIFLMTCCRKANRAESIQHNPGETGRKVSVTSHNGRVISSWESYKSGGEAKL

SEQ ID NO: 30914 - protein, 524 aa, Artificial Sequence
  derived and/or modified protein sequence (wt) from glycoprotein__RABV__EU267745.1
MVPQALLFVPLLVFPLCFGKFPIYTIPDKLGPWSPIDIHHLRCPNNLVVEDEGCTNLSGFSYMELKVGYILAIKMNGFTCTGVVTEAETYTNFVGYVTTTFKRKHFRPTPDACRAAYNWKMAGDPRYEESLHNPYPDYRWLRTVKTTKESLVIISPSVADLDPYDRSLHSRVFPSGKCSGVAVSSTYCSTNHDYTIWMPENPRLGMSCDIFTNSRGKRASKGSETCGFVDERGLYKSLKGACKLKLCGVLGLRLMDGTWVAMQTSNETKWCPPDQLVNLHDFRSDEIEHLVVEELVRKREECLDVLESIMTTKSVSFRRLSHLRKLVPGFGKAYTIFNKTLMEADAHYKSVRTWNEILPSKGCLRVGGRCHPHVSGVFFNGIILGPDGNVLIPEMQSSLLQQHMELLESSVIPLVHPLADPSTVFKDGDEAEDFVEVHLPDVHNQVSGVDLGLPNWGKYVLLSAGALTALMLIIFLMTCCRRVNRSEPTQHNLRGTGREVSVTPQSGKIISSWESHKSGGETRL

SEQ ID NO: 30915 - protein, 524 aa, Artificial Sequence
  derived and/or modified protein sequence (wt) from glycoprotein__RABV__EU267746.1
MVPQALLFVPLLAIPLCFGKFPIYTIPDKLGPWSPIDIHHLSCPNNLVVEDEGCTNLSGFSYMELKVGYISAIKVNGFTCTGVVTEAETYTNFVGYVTTTFKRKHFRPTPDACRSAYNWKMAGDPRYEESLHNPYPDYHWLRTVKTTKESFVIISPSVADLDPYDKSLHSRVFPRGKCSGITVSSTYCSTNHDYTIWMPENPRLGTSCDIFTNSRGKRASKGSKTCGFVDERGLYKSLKGACKLKLCGVLGLRLMDGTWVAIQTSVETKWCPPDQLVNLHDFHSDEIEHLVVEELVKKREECLDALESIMTTKSVSFRRLSHLRKLVPGFGKAYTIFNKTLMEADAHYKSVRTWNEIIPSKGCLRVGGRCHPHVNGVFFNGIILGPDGHVLIPEMQSSLLQQHMELLESSVIPLMHPLADPSTVFKDGDEAEDFVEVHLPDVHKQVSGVDLGLPSWGKYVLMSAGILTALMLMIFLMTCCRRTNRAESIQHSLGETGRKVSVTSQSGRVISSWESYKSGGETKL

SEQ ID NO: 30916 - protein, 524 aa, Artificial Sequence
  derived and/or modified protein sequence (wt) from glycoprotein__RABV__EU267747.1
MVPQALLFVPLLAIPLCFGKFPIYTIPDKLGPWSPIDIHHLSCPNNLVVEDEGCTNLPGFSYMELKVGYISAIKVNGFTCTGVVTEAETYTNFVGYVTTTFKRKHFRPTPDACRSAYNWKMAGDPRYEESPHNPYPDYHWLRTVKTTKESFVIISPSVADLDPYDKSLHSRVFPRGKCSGITVSSTYCSTNHDYTIWMPENPRLGTSCDIFTNSRGKRASKGSKTCGFVDERGLYKSLKGACKLKLCGVLGLRLMDGTWVVIQTSDETKWCPPDQLVNLHDFHSDEIEHLVVEELVKKREECLDALESIMTTKSVSFRRLSHLRKLVPGFGKAYTIFNKTLMEADAHYKSVRTWNEIIPSKGCLRVGGRCHPHVNGVFFNGIILGPDGHVLIPEMQSSLLQQHMELLESSVIPLMHPLADPSTVFKDGDEAEDFVEVRLPDVHKQVSGVDLGLPSWGKYVLMSAGILTALMLMIFLMTCCRRTNGAESIQHSLGETGRKVSVTSQSGRVISSWESYKSGGETKL

SEQ ID NO: 30917 - protein, 524 aa, Artificial Sequence
  derived and/or modified protein sequence (wt) from glycoprotein__RABV__EU267748.1
MIPQVLLFFPLLVFSSCFGKFPIYTIPDKLGPWSPIDIHHLSCPNNLVVEDEGCTNLSGFSYMELKVGYISAIKVNGFTCTGVVTEAETYTNFVGYVTTTFKRKHFRPMPDACRAAYNWKMAGDPRYEESLHNPYPDYHWLRTVKTTKESLVIISPSVADLDPYDRSLHSRVFPGGKCSGITVSSTCCSTNHDYTIWMPENPRLRTSCDIFTNSRGKRAPKGGKTCGFVDERGLYKSLKGACKLKLCGVLGLRLMDGTWVAIQTSDEIKWCSPDQLVNLHDFHSDEIEHLVVEELVKKREECLDALETIMTTKSVSFRRLSHLRKLVPGFGKAYTIFNKTLMEADAHYKSIRTWNEIIPSKGCLRVGGRCHPHVNGVFFNGIILGPDGHVLIPEMQSSLLHQHMELLESSVIPLMHPLADPSTVFKDGDEAEDFVEVHLPDVHKQISGVDLGLPNWGKYVLISAGALTALMSMIFLMTCCRKTNRAESIQHSPGETGRKVSVTSHNGRVISSWESYKSGGETKL

SEQ ID NO: 30918 - protein, 524 aa, Artificial Sequence
  derived and/or modified protein sequence (wt) from glycoprotein__RABV__EU267749.1
MVPQVLLFVPLLVFSSCFGKFPIYTIPDKLGPWSPIDIHHLSCPNNLVVEDEGCTNLSGFSYMELKVGYISAIKVNGFTCTGVVTEAETYTNFVGYVTTTFKRKHFRPMPDACRAAYNWKMAGDPRYEESLHNPYPDYHWLRTVKTTKESLVIISPSVADLDPYDKSLHSRVFPGGKCSGITVSSTCCSTNHDYTIWMPENPRLGTSCDIFTNSRGKRASKGGKTCGFVDERGLYKSLKGACKLKLCGVLGLRLMDGTWVAIQTSDEIKWCSPDQLVNLHDFHSDEIEHLVVEELVKKREECLDALETIMTTKSVSFRRLSHLRKLVPGFGKAYTIFNKTLMGADAHYKSIRTWNEIIPSKGCLRVGGRCHPHVNGVFFNGIILGPDGHALIPEMQSSLLHQHMELLESSVIPLMHPLADPSTVFKDGDEAEDFVEVHLPDVHKQISGVDLGLPNWGKYVLISAGALTALMLMIFLMTCCRKADRAESIQHNPGETGRKVSVTSRNGRVISSWESYKSGGETKL

SEQ ID NO: 30919 - protein, 524 aa, Artificial Sequence
  derived and/or modified protein sequence (wt) from glycoprotein__RABV__EU267750.1
MVPQVLLFVPLLVFSSCFGKFPIYTIPDKLGPWSPIDIHHLSCPNNLVVEDEGCTNLSGFSYMELKVGYISAIKVNGYTCTGVVTEAETYTNFVGYVTTTFKRKHFRPMPDACRAAYNWKMAGDPRYEESLHNPYPDYHWLRTVKTTKESLVIISPSVADLDPYDKSLHSRVFPGGKCSGITVSSTCCSTNHDYTIWMPENPRLGTSCDIFTNSRGKRASKGGKTCGFVDERGLYKSLKGACKLKLCGVLGLRLMDGTWVAIQTSDEIKWCSPDQLVNLHDFHSDEIEHLVVEELVKKGEECLDALETIMTTKSVSFRRLSHLRKLVPGFGKAYTIFNKTLMEADAHYKSIRTWNEIIPSKGCLRVGGRCHPHVNGVFFNGIILGPDGHVLIPEMQSSLLHQHMELLESSVIPLMHPLADPSTVFKDGDEAEDFVEVHLPDVHKQISGVDLGLPNWGRYVLISAGALTALMLMIFLMTCCRKANRAESIQHNPEETGRKVSVTSHNGRVISSWESYKSGGETKL

SEQ ID NO: 30920 - protein, 524 aa, Artificial Sequence
  derived and/or modified protein sequence (wt) from glycoprotein__RABV__EU267751.1
MVPQVLLFVPLLVFSSCFGKFPIYTIPDKLGPWSPIDIHHLGCPNNLVVEDEGCTNLSGFSYMELKVGYISAIKVNGFTCTGVVTEAETYTNFVGYVTTTFKRKHFRPMPDACRAAYNWKMAGDPRYEESLHNPYPDYHWLRTVKTTKESLVIISPSVADLDPYDKSLHSRVFPGGKCSGITVSSTCCSTNHDYTIWMPENPRLGTSCDIFTNSRGKRASKGGKTCGFVDERGLYKSLKGACKLKLCGVLGLRLMDRTWVAIQTSDEIKWCSPDQLVNLHDFHSDEIEHLVVEELVKKREECLDALETIMTTKSVSFRRLSHLRKLVPGFGKAYTIFNKTLMEADAHYKSIRTWNEIIPSKGCLRVGGRCHPHVNGVFFNGIILGPDGHVLIPEMQSSLLHQHMELLESSVIPLMHPLADPSTVFKDGDEAEDFVEVHLPDVHKQISGVDLGLPNWGKYVLISAGALTALMLMILLMTCCRKANRAESIQHNPGETGRKVSVTSHNGRVISSWESYKSGGETKL

SEQ ID NO: 30921 - protein, 524 aa, Artificial Sequence
  derived and/or modified protein sequence (wt) from glycoprotein__RABV__EU267752.1
MIPQVLLFVPLLVFSSCFGKFPIYTIPDKLGPWSPIFIHPLLRPNNLVVEDEGCTNLSGFSYMELKVGYISAIKVNGFTCTGVVTEAETYTNFVGYVTTTFKRKHFRPMPDACRAAYNWKMAGDPRYEESLHNPYPDYHWLRTVKTTKESLVIISPSVADLDPYDKSLHSRVFPGGKCSGITVSSTCCSTNHDYTIWMPENPRLGTSCDIFTNSRGKRASKGGKTCGFVDERGLYKSLKGACKLKLCGVLGLRLMDGTWVAIQTSDEIKWCSPDQLVNLHDFHSDEIEHLVVEELVKKREECLDALETIMTTKSVSFRRLSHLRKLVPGFGKAYTIFNKTLMEADAHYKSIRTWNEIIPSKGCLRVGGRCHPHVNGVFFNGIILGPDGHVLIPEMQSSLLHQHMELLESSVIPLMHPLADPSTVFKDGDEAEDFVEVHLPDVHKQISGVDLGLPNWGKYVLISAGALTALMLTIFLMTCCRKTNRAGSIQHSPGETGRKVSVTSHNGRVISSWESYKSGSETKL

SEQ ID NO: 30922 - protein, 524 aa, Artificial Sequence
  derived and/or modified protein sequence (wt) from glycoprotein__RABV__EU267753.1
MIPQVLLFVPLLVFSSCFGKFPIYTIPDKLGPWSPIDIHHLSCPNNLVVEDEGCTNLSGFSYMELKVGYISAIKVNGFTCTGVVTEAETYTNFVGYVTTTFKRKHFRPTPDACRAAYNWKMAGDPRYEESLHNPYPDYHWLRTVKTSKESLVIISPSVADLDPYDKSLHSRVFPGGKCSGITVSSTCCSTNHDYTIWMPENPRLGTSCDIFTNSRGKRASKGGKTCGFVDERGLYKSLKGACKLKLCGVLGLRLMDGTWVAIQTSDEIKWCSPDQLVNLHDFHSDEIEHLVVEELVKKREECLDALETIMTTKSVSFRRLSHLRKLVPGFGKAYTIFNKTLMEADAHYKSIRTWNEIIPSKGCFRVGGRCHPHVNGVFFSGIILGPDGHVLIPEMQSSLLHQHMELLESSVIPLMHPLADPSTVFKDGDEAEDFVEVHLPDVHKQISGVDLGLPNWGKYVLVGAGALTALMLMIFLMTCCRKTNRAESIQHSPGETGRKVSVTSHNGRVISSWESYKSGGETKL

SEQ ID NO: 30923 - protein, 524 aa, Artificial Sequence
  derived and/or modified protein sequence (wt) from glycoprotein__RABV__EU267754.1
MIPQVLLFVPLLVFSSCFGKFPIYTIPDRLGPWSPIDIHHLSCPNNMVVEDEGCTNLSGFSYMELKVGYISAIKVNGFTCTGVVTEAETYTNFVGYVTTTFKRKHFRPMPDACRAAYNWKMAGDPRYEESLHNPYPDYHWLRTVKTTKESLVIISPSVADLDPYDKSLHSRVFPGGKCSGITVSSTCCSTNHDYTIWMPENPRLGTSCDIFTNSRGKRASKGGKTCGFVDERGLYKSLKGACKLRLCGVLGLRLMDGTWVAIQTSDEIKWCSPDQLVNLHDFHSDEIEHLVAEELVKKREECLDALETIMTTKSVSFRRLSHLRKLVPGFGKAYTIFNKTLMEADAHYKSIRTWNEIIPSKGCLRVGGRCHPHVNGVFFNGIILGPDGHVLIPEMQSSLLHQHMELLESSVIPLMHPLADPSTVFKDGDEAEDFVEVHLPDVHKQISGVDLGLPNWGKYVLISAGALTALMLTIFLMTCCRKTSRAESIQHSPGETGRKVSVTSHNGRVISSWESYKSGGETKL

SEQ ID NO: 30924 - protein, 524 aa, Artificial Sequence
  derived and/or modified protein sequence (wt) from glycoprotein__RABV__EU267755.1
MIPQVLLFVPLLVFSSCFGKFPIYTIPDKLGPWSPIDIHHLSCPNNLVVEDEGCTNLSGFSYMELKVGYISAIKVNGFTCTGVVTEAETYTNFVGYVTTTFKRKHFRPTPDACRAAYNWKMAGDPRYEESLHSPYPDYHWPRTVKTSKESLVIISPGVADLDPYDKSLHSRVFPGGKCSGITVSSTCCSTNHDYTIWMPENPRLGTSCDIFTNSRGKRASKGGKTCGFVDERGLYKSLKGACKLKLCGVLGLRLMDGTWVAIQTSDEIEWCSPDQLVNLHDFHSDEIEHLVVEEFVKKREECLDALETIMTTKSVSFRRLSHLRKLVPGFGKAYTIFNKTLMEADAHYKSIRTWNEIIPSKGCLRVGGRCHPHVYGVFFNGIILGPDGHVLIPEMQSSLLRQHMELLESSVIPLMHPLADPSTVFKDGDEAEDFVEVHLPDVHKQISGVDPGLPNWGKYVLVSAGALTALMLMIFLTTCCRKTNRAESIQHSPGETGRKVSVTSHNGRVISSWESYKSGGETKL

SEQ ID NO: 30925 - protein, 524 aa, Artificial Sequence
  derived and/or modified protein sequence (wt) from glycoprotein__RABV__EU267756.1
MIPQVLLFVPLLVFSLCFGKFPIYTIPDKLGPWSPIDILHLSCPNNLVVEDEGCTDLSGFSYMELKVGYISAIKVNGFTCTGVVTEAETYTNFVGYVTTTFKRKHFRPTPDACRAAYNWKMAGDPRYEESLHNPYPDYHWLRTVKTSKESLVIISPSDADLDPYDKSLHSRVFPGGKCSGITVSSTCCSTNHDYTIWMPENPRLGTSCDIFTNSRGKRASKGGKTCGFVDERGLYKSLKGACKLKLCGVLGLRLMDGTWVAIQTSDEIKWCSPDQLVNLHDFHSDEIEHLVVEELVKKREECLDALETIMTTKSVSFRRLSHLRKLVPGFGKAYTIFNKTLMEADAHYKSIRTWNEIIPSKGCLRVGGRCHPHVNGVFFNGIILGPDGHVLIPEMQSSLLHQHMELLESSVIPLMHPLADPSTVFKDGDEAEDFVEVHLPDVHKQISGVDLGLPNWGKYVLVSAGALTALMLMIFLMTCCRKTNRAESIQHSPGETGRKVSVTSHNGRVISSWESYKSGGETKL

SEQ ID NO: 30926 - protein, 524 aa, Artificial Sequence
  derived and/or modified protein sequence (wt) from glycoprotein__RABV__EU267757.1
MIPQVLLFVPLLVFSSCLGKFPIYTIPDKLGPWSPIDIHHLSCPNNLVVEDEGCTNLSGFSYMELKVGYISAIKVNGFTCTGVVTEAETYTNFVGYVTTTFKRKHFRPTPDACRAAYNWKMAGDPRYEESLHNPYPDYHWLRTVKTSKESLVIISPSVADLDPYDKSLHSRVFPGGKCSGITVSSTCCSTNHDYTIWMPENPRLGTSCDIFTNSRGKRASKGGKTCGFVDERGLYKSLKGACKLKLCGVLGLRLMDGTWVAIQTSDEIKWCSPDQLVNLHDFHSDEIEHLVVEELVEKREECLDALGTIMTTKSVSFGRLSHLRKLVPGFGKAYTIFNKTLMEADAHYKSIRTWNEIIPSKGCLRVGGRCHPHVNGVFFNGIILGPDRHVLIPEMQSSLLHQHMELLESSVIPLMHPLADPSTVFKDGDEAEDFVEVHLPDVHKQISGVDLGLPNWGKYVLVSAGALTALMLMIFLMTCCRKTNRAESIQHSPGETGRKVSVTSHNGRVISSWESYKSGGETKL

SEQ ID NO: 30927 - protein, 524 aa, Artificial Sequence
  derived and/or modified protein sequence (wt) from glycoprotein__RABV__EU267758.1
MIPQVLLFVPLLVFSSCFGKFPIYTIPDKLGPWIPIDIHHLSCPNNLVVEDEGCTNLSGFSYMELKVGYISAIKVNGFTCTGVVTEAETYTNFVGYVTTTFKRKHFRPMPDVCRAAYNWKMAGDPRYEESLHNPYPDYHWLRTVKTTKESLVIISPSVADLDPYDKSLHSRVFPGGKCSGITVSSTCCSTNHDYTIWMPENPRLGTSCDIFTNSRGKRASKGGKTCGFVDERGLYKSLKGACRLKLCGVLGLRLMDGTWVAIQTSDEIKWCSPDQLVNLHDFHSDEIEHLVVEELVKKRGECLDALETIMTTKSVSFRRLSHLRKLVPRFGKAYTIFNKTLMEADAHYKSIRTWNEIIPSKGCLRVGGRCRPHVNGVFFNGIILGPDGHVLIPEMQSSLLHQHMELLESSVIPLMHPLADPSTVFKDGDEAEDFVEVYLPDVHKQISGVDLGLPNWGKYVLISAGALTALMSMIFLMTCCRKTNRAESIQHSPGETGRKVSVTSHNGRDIFSWESYKSGGETKL

SEQ ID NO: 30928 - protein, 524 aa, Artificial Sequence
  derived and/or modified protein sequence (wt) from glycoprotein__RABV__EU267759.1
MIPQVLLFVPLLVFSSCFGKFPIYTIPDKLGPWSPIDIHHLSCPNNLVVEDEGCTNLSGFSYMELKVGYISAIKVNGFTCTGVVTEAETYTNFVGYVTTTFKRKHFRPTPDACRAAYNWKMAGDPRYEESLHNPYPDYHWLRTVETSKESLVIISPSVADLDPYDKSLHSRVFPGGKCSGITVSSTCCSTNHDYTIWMPENPRLGTSCDIFTNSRGKRASKGGKTCGFVDERGLYKSLKGACKLKLCGVLGLRLMDGTWVAIQTSDEIKWCSPDQLVNLHGFHSDEIEHLVVEELVKKREECLDALETIMTTKSVSFRRLSHLRKLVPGFGKAYTIFNKTLMEADAHYKSIRTWNEIIPSKGCLRVGGRCHPHVNGVFFNGIILGPDGHVLIPEMQSSLLHQHMELLESSVIPLMHPLADPSTVFKDGDEAEDFVEVHLPDVHKQISGVDLGLPNWGKYVLVSAGALTALMLMIFLMTCCRKTNRAESIQHSPGETGRKVSVTSHNGRVISSWESYKSGGETKL

SEQ ID NO: 30929 - protein, 524 aa, Artificial Sequence
  derived and/or modified protein sequence (wt) from glycoprotein__RABV__EU267760.1
MIPQVLLFVPLLVFSSCFGKFPIYTIPDKLGPWSPIDIHHLSCPNNLVVEDEGCTNLSGFSYMELKVGYISAIKVNGFTCTGVVTVAETYTNFVGYVTTTFKRKHFRPMPDACRAAYNWKMAGDPRYEESLHNSYPDYHWLRTVKTPKESLVIISPSVADLDPYDKSLHSRVFPGGKCSGITVSSTCCSTNHDYTIWMPENPRLGTSCDIFTNSRGKRASKGGKTCGFVDERGLYKSLKGACKLKLCGVLGLRLMDGTWVAIQTSDEIKWCSPDQLVNLHDFHSDEIEHLVVEELVKKREECLDALETIMTTKSVSFRRLSHLRKLVPGFGKAYTIFNKTLMEADAHYKSIRTWNEIIPSKGCLRVGGRCHPHVNGVFFNGIILGPDGHVLIPEMQSSLLHQHMELLESSVIPLMHPLADPSTVFKDGDEAEDFVEVHLPDVHKQISGVDLGLPNWGKYVLISAGALTALMLMIFLMTCCRKTNRAESIQHSPGETGRKVSVTSHNGRVISSWEPYKSGGETKL

SEQ ID NO: 30930 - protein, 524 aa, Artificial Sequence; identical to SEQ ID NO: 30843
  derived and/or modified protein sequence (wt) from glycoprotein__RABV__EU267761.1

SEQ ID NO: 30931 - protein, 524 aa, Artificial Sequence; identical to SEQ ID NO: 30839
  derived and/or modified protein sequence (wt) from glycoprotein__RABV__EU267762.1

SEQ ID NO: 30932 - protein, 524 aa, Artificial Sequence
  derived and/or modified protein sequence (wt) from glycoprotein__RABV__EU267763.1
MIPQVLLFVPLLVFSSCFGKFPIYTIPDKLGPWSPIDIHHLSCPNNLVVEDEGCTNLSGFSYMELKVGYISAIKVNGFTCTGVVTEAETYTNFVGYVTTTLKRKHFRPMPDACRAAYNWKIAGDPRYEESLHNPYPDYHRLRTVKTTKESLVIISPSVADLDPYDKSLHSRVFPGGKCSGITVSSTCCSTNHDYTIWMPENPRLGTSCDIFTNSRGKRASKGGKTCGFVDERGLYKSLKGACKLKLCGVLGLRLMDGTWVAIQTSDEIKWCSPDQLVNLHDFHSDEIEHLVVEELVKMREECLDALETIMTTKSVSFRRLSHLRKLVPGFGKAYTIFNKTLMEADAHYKSIRTWNEIIPSKGCLRVGGRCHPHVNGVFFNGIILGPDGHVLIPEMQSSLLHQHMELLESSVIPLMHPLADPSTVFKDGDEAEDFVEVHLPDVHKQISGVDLGLPNWGKYVLISAGALTALMSMIFLMTCCRKTNRAESIQHSPGETGRKVSVTSHNGRVISSWESYKSGGETKL

SEQ ID NO: 30933 - protein, 524 aa, Artificial Sequence
  derived and/or modified protein sequence (wt) from glycoprotein__RABV__EU267764.1
MIPQVLLFVPLLVSSSCFGKFPIYTIPDKLGPWSPIDIHHLSCPNNLVVEDEGCTSLSGFSYMELKVGYISAIKVNGFTCTGVVTEAETYTNFVGYVTTTFKRKHFRPMPDACRAAYNWKMAGDPRYEESLHNPYPDYHWLRTVKTTKESLVIISPSVADLDPYDKSLHSRVFPGGKCSGITVSSTCCSTNHDYTIWMPENPRLGTSCDVFTNSRGKRASKGGKTCGFVDERGLYKSLKGACKLKLCGVLGLRLMDGTWVAIQTSDGIKWCSPDQLVNLHDFHSDEIEHLVVEELVKKREECLDALETIMTTKSVSFRRLSHLRKLVPGFGKAYTIFNKTLMEADAHYKSIRTWNEIIPSKGCLRVGGRCHPHVNGVFFNGIILGPDGHVLIPEMQSSLLHQHMELLESSVIPLMHPLADPSTVFKDGDEAEDFVEVHLPDVHKQISGVDLGLPNWGKYVLISAGALTALMSMIFLMTCCRKTNRAESIQHSPGETGRKVSVTSHNGRVISSWESYKSGGETKL

SEQ ID NO: 30934 - protein, 524 aa, Artificial Sequence
  derived and/or modified protein sequence (wt) from glycoprotein__RABV__EU267765.1
MIPQVLLFVPLLVFSSCFWKFPIYTIPDKLGPWSPIDIHHLSCPSNLVVEDEGCTNLFGFSYMELKVGYISAIKVNGFTCTGVVTEAETYTNFVGYVTTTFKRKHFRPMPDACRAAYNWKMAGDPRYEESLHNPYPDYHWLRTVKTTKESLVIISPSVADLDPYDKSLHSRVFPGGKCSGITVSSTCCSTNHDYTIWMPENPRLGTSCDIFTNSRGKRASKGGKTCGFVDERGLYKSLKGACKLKLCGVLGLRLMDGTWVAIQTSDEIKWCSPDQLVNLHDFHSDEIEHLVVEELVKKREECLDALETIMTTKSVSFRRLSHLRKLVPGFGKAYTIFNKTLMEADAHYKSIRTWNEIIPSKGCLRVGGRCHPHVNGVFFNGIILGPDGHVLIPEMQSSLLHQHMELLESSVIPLMHPLADPSTVFKDGDEAEDFVEVHLPDVHKQISGVDLGLPNWGKYVLISAGALTALMSMIFLMTCCRKTIRAESIQHSPGETGRKVSVTSHNGRVISSWESYKSGGETKL

SEQ ID NO: 30935 - protein, 524 aa, Artificial Sequence
  derived and/or modified protein sequence (wt) from glycoprotein__RABV__EU267766.1
MIPQVLLFVPLLVFSSCFGKFPIYTIPDKLGPWSPIDIHHLSCPNNLVVEDDGCTNLSGLSYMELKVGYISAIKVNGFTCTGVVTEAETYTNFVGYVTTTFKRKHFRPMPDACRAAYNWKIAGDPRYEESLHNPYPDYHWLRTVKTTKESPVIISPSVADLDPYDKSLHSRVFPGGKCSGITVSSTCCSTNHDYTIWMPENPRLGTSCDIFTNSRGKRASKGGKTCGFVDERGLYKSLKGACKLKLCGVLGLKLMDGTWVAIQTSDEIKWCSPDQLVNLHDFHSDEIEHLVVEELVKKREECLDALETIMTTKSVSFRRLSHLRKLVPGFGKAYTIFNKTLMEADAHYKSIRTWNEIIPSKGCLRVGGRCHPHVNGVFFNGIILGPDGHVLIPEMQSSLLHQHMELLESSVIPLMHPLADPSTVFKDGDEAEDFVEVHLPDVHKQISGVDLGLPNWGKYVLISAGALTALMSMIFLMTCCRKTNRAESIQHSPGETGRKVSVTSHNGRVISSWESYKSGGETKL

SEQ ID NO: 30936 - protein, 524 aa, Artificial Sequence
  derived and/or modified protein sequence (wt) from glycoprotein__RABV__EU267767.1
MTPQVLLFVPLLVFSSCFGRFPIYTIPDKLGPWSPIDIHHLSCPNNLVVEDEGCTNLSGFSCMELKVGYISAIKVNGFTCTGVVTEAETYTNFVGYVTTTFKRKHFRPMPDACRAAYNWKMAGDPRYEESLHNPYPDYHWLRTVKTTKESLVIISPSVADLDPYDKSLHSRVFPGGKCSGITVSSTRCSTNHDYTIWMPENPRLGTSCDIFTNSRGKRASKGGKTCGFVDERGLYKSLKGACKLKLCGVLELRLMDGTWAAIQTSDEIKWCSPDQLVNLHDFHSDEIDHLVVEELVKKREECLDALETIMTTKSVSFRRLSHLRKLVPGFGKAYTIFNKTLMEADAHYKSIRTWNEIIPSKGCLRVGGRCHPHVNGVFFNGIILGPDGHVLIPEMQSSLLHQHMELLESSVIPLMHPLAGPSTVFKDGDEAEDFVEVHLPDVHKQISGVDLGLPNWGKYVLISAGALTALMSMIFLMTCCRKTNRAESIQHSPGETGRKVSVTSHNGRVISSWESYKSGGETKL

SEQ ID NO: 30937 - protein, 524 aa, Artificial Sequence
  derived and/or modified protein sequence (wt) from glycoprotein__RABV__EU267768.1
MIPQVLLFVPLLVFSSCFGKFPIYTIPDKLGPWSPIDIHHLSCPNNLVVEDEGCTNLSGFSYMELKVGYISAIKVSGFTCTGVVTEAETYTNFVGYVTTTFKRKHFRPMPDACRAAYNWKMAGDPRYEESLHNPYPDYHWLRTVKTTKESLVIISPSVADLDPYDKSLHSRVFPGGKCSGITVSSTCCSTNHDYTIWMPENPRLGTSCDIFTNSRGKRASKGGKTCGFVDERGLYKSLKGACKLKLCGVLGLRLMDGTWVAIQTSDEIKWCSPDQLVNLHDFHSDEIEHLVVEELVKKREECLDALETVMTTKSVSFRRLSHLRKLVPGFGKAYTIFNKTLMEADAHYKSIRTWNEIIPSKGCLRVGGRCHPHVNGVFFDGIILGPDGRVLIPEMQSSLLHQHMELLESSVIPLMHPLADPSTVFKDGDEAEDFVEVHLPDVHKLISGVDLGLPNWGKYVLISAGALTALMSMIFLMTCCRKTNRAESIQHSPGETGRKVSVTSHNGRVISSWESYKSGGETKL

SEQ ID NO: 30938 - protein, 524 aa, Artificial Sequence
  derived and/or modified protein sequence (wt) from glycoprotein__RABV__EU267769.1
MIPQVLLFVPLLVFSSCFGKFPIYTIPDKLGPWSPIDIHHLSCPNNMVVEDEGCTNLSGFSYMELKVGYISAIKVNGFTCTGVVTEAETYTNFVGYVTTTFKRKHFRPMPDACRAAYNWKMAGDPRYEESLHNPYPDYHWLRTVKTTKESLVIISPSVADLDPYDKSLHSRVFPGGKCSGITASSTCCSTNHDYTIWMPENPRLGTSCDIFTNSRGKRASKGGKTCGFVGGRGLYKSLKGACKLKLCGVLGLRLMDGTWVAIQTSDGIKWCSPDQLVNLHDFHSDEIEHLVVEELVKKREECLDALVTIMTTKSVSFRRLSHLRKLVPGFGKAYTIFNKTLMEADAHYKSIRTWNEIIPSKGCLRVGGRCHPHVNGVFFNGIILGPDGHVLIPEMQSSLLHQHMELLESSVIPLMHPLADPSTVFKDGDEAEDFVEVHLPDVHKQISGVDLGLPNWGKYVLISAGALTALMLTIFLMTCCRKTSRAESIQHSPGETGRKVSVTSHNGRVISSWESYKSGGETKL

SEQ ID NO: 30939 - protein, 524 aa, Artificial Sequence
  derived and/or modified protein sequence (wt) from glycoprotein__RABV__EU267770.1
MIPQVLLFVPLLVFSSCFGKFPIYTIPDKLGPWSPIDIHHLSCPNNMVVEDEGCTNLSGFSYMELKVGYISAIKVNGFTCTGVVTEAETYTNFVGYVTTTFKRKHFRPMPDACRAAYNWKMAGDPRYEESLHNPYPDYHWLRTVKTTKESLVIISPSVADLDPYDKSLHSRVFPGGKCSGITVSSTCCSTNHDYTIWMPENPRLGTSCDIFTNSRGKRASKGGKTCGFVDERGLYKSLKGACKLKLCGVLGLRLMDGTWVAIQTSDEIKWCSPDQLVNLHDFHSDEIEHLVVEELVKKREECLDALETIMTTKSVSFRRLNHLRKLVPGFGKAYTIFNKTLMEADAHYKSIRTWNEIIPSKGCLRVGGRCHPHVNGVFFNGIILGPDGHVLIPEMQSSLLHQHMELLESSVIPLMHPLADPSTVFKDGDEAEDFVEVHLPDVHKQISGVDLGLPNWGKYVLISAGALTALMLTIFLMTCCRKTSRAESIQHSPGETGRKVSVTSHNGRVISSWESYKSGGETKL

SEQ ID NO: 30940 - protein, 524 aa, Artificial Sequence
  derived and/or modified protein sequence (wt) from glycoprotein__RABV__EU267771.1
MIPQVLLFVPLLVFSSCFGKFPIYTIPDKLGPWSPIDIHHLSCPNNMVVEDEGCTNLSGFSYMELKVGYISAIKVSGFTCTGVVTEAETYTNFVGYVTTTFKRKHFRPMPDACRAAYNWKMAGDPRYEESLHNPHPDYHWLRTVKTTKESLVIISPSVADLDPYDKSLHSRVFPGGKCSGITVSSTCCSTNHDYTIWMPENPRLGTSCDIFTNSRGKRASKGGKTCGFVDERGLYKSLKGACKLKLCGVLGLRLMDGTWVAIQTSDEIKWCSPDQLVNLHDFHSDGIEHLVVEELVKKREECLDALETIMTTKSVSFRRLSHLRKLVPGFGKAYTIFNKTLMEADAHYKSIRTWNEIIPSKGCLRVGGRCHPHVNGVFFNGIILGPDGHVLIPEMQSSLLHQHMELLESSVIPLMHPLADPSTVFKDGDEAEDFVEVHLPDVHKQISGVDLGLPNWGKYVLISAGALTALMLTIFLMTCCRKTSRAESIQHSPGETGRKVSVTSHSGRVISSWESYKSGGETKL

SEQ ID NO: 30941 - protein, 524 aa, Artificial Sequence
  derived and/or modified protein sequence (wt) from glycoprotein__RABV__EU267772.1
MVPQALLFVPLLVFPLCFGKFPIYTIPDKLGPWSPIDIHHLSCPNNLVVEDEGCTNLSGFSYMELKVGYILAIKMNGFTCTGVVTEAETYTNFVGYVTTTFKRKHFRPTPDACRAAYNWKMAGDPRYEESLHNPYPDYRWLRTVKTTKESLVIISPSVADLDPYDRSLHSRVFPSGKCSGVAVSSTYCSTNHDYTIWMPENPRLGMSCDIFTNSRGKRASKGSETCGFVDERGLYKSLKGACKLKLCGVLGLRLMDGTWVAMQTSNETKWCPPDQLVNLYDFRSDEIEHLVVEELVRKREECLDALESIMTTKSVSFRRLSHLRKLVPGFGKAYTIFNKTLMEADAHYKSVRTWNEILPSKGCLRVGGRCHPHVNGVFFNGIILGPDGNVLIPEMQSSLLQQHMELLESSVIPLVHPLADPSTVFKDGDEAEDFVEVHLPDVHNQVSGVDLGLPNWGKYVLLSAGALTALMLIIFLMTCCRRVNRSEPTQHNLRGTGREVSVTPQSGKIISSWESHKSGGETRL

SEQ ID NO: 30942 - protein, 524 aa, Artificial Sequence
  derived and/or modified protein sequence (wt) from glycoprotein__RABV__EU267773.1
MIPQVLLFVPLLVFSSCFGKFPIYTIPDKLGPWSPIDIHHLSCPNNLVVEDEGCTNLSGFSYMELKVGYISAIKVNGFTCTGVVTEAETYTNFVGYVTTTFKRKHFRPMPDACRAAYNWKMAGDPRYEESLHNPYPDYHWLRTVKTTKESLVIISPSVADLDPYDKSLHSRVFPGGKCSGIAVSSTCCSTNHDYTIWMPENPRLGTSCDIFTNSRGKRASKGGKTCGFVDERGLYKSLKGACKLKLCGVLGLRLMDGTWVAIQTSDEIKWCSPVQLVNLHDFHSDEIEHLVVEELVKKREECLDVLETIMTTKSVSFRRLSHLRKLVPGFGKAYTIFNKTLMEADAHYKSIRTWNKIIPSKGCLRVGGRCHPHVNGVFFNGIILGPDGHVLIPEMQSSLLHQHMELLESSVIPLMHPLADPSTVFKDGDEAEDFVEVHLPDVHKQISGVDLGLPNWGKYVLISAGALTALMLTIFLMTCCRKTNRAESIQHSPGETGRKVSVTSHNGRVISSWESYKSGSETKL

SEQ ID NO: 30943 - protein, 524 aa, Artificial Sequence
  derived and/or modified protein sequence (wt) from glycoprotein__RABV__EU267774.1
MIPQVLLFVPLLVFSSCFGKFPIYTIPDKLGPWSPTDIHHLSCPNNLVVEDEGCTNLSGFSYMELKVGYISAIKVNGFTCTGVVTEAETYTNFVGYVTTTFKRKHFRPMPDACRAAYNWKMAGDPRYEESLHNPYPDYHWLRTVKTTKESLVIISPSVADLDPYDKSLHSRVFPGGKCSGITVSSTCCSTNHDYTIWMPENPRLGTSCDIFTNSRGKRASKGGKTCGFVDERGLYKSLKGACKLKLCGVLGLRLMDGTWVAIQTSDEIKWCSPDQLVNLHDFHSDEIEHLVVEELVKKREECLDALETIMTTRSVSFRRLSHLRKLVPGFGKAYTIFNKTLMEADAHYKSIRTWNEIIPSKGCLRVGGRCHPHVNGVFFNGIILGPDGHVLIPEMQSSLLHQHMELLESSVIPLMHPLADPSTVFKDGGEAEDFVEVHLPDVHKQISGVDLGLPNWGKYVLISAGALTALMSMIFLMTCCRKTNRAESIQHSPGETGRKVSVTSHNGRVISSWESYKSGGETKL

SEQ ID NO: 30944 - protein, 524 aa, Artificial Sequence
  derived and/or modified protein sequence (wt) from glycoprotein__RABV__EU267775.1
MIPQVLLFVPLLVFSSCFRKFPIYTIPDKLGPWSPIDIHHLSCLNNLVVEDEGCTNLSGFSYMELKVGYISAIKVNGFTCTGVVTEAETYTNFVGYVTTTFKRKHFRPMPDACRAAYNWKMAGDPRYEESLHNPYPDYHWLRTVKTTKESLVIISPSVADLDPYDKSLHSRVFPSGKCSGITVSSTCCSTNHDYTIWMPENPRLGTSCDIFTNSRGKRASKGGKTCGFVDERGLYKSLRGACKLKLCGVLGLRLMDGTWVAIQTSDEIKWCSPDQLVNLHDFHSDEIEHLVVEELVKKREECLDALETIMTTKSVSFRRLSHLRKLVPGFGKAYTIFNKTLMEADAHHKSIRTWNEIIPSKGCLRVGGRCHPHVNGVFSNGIILGPDGHVLIPEMQSSLLHQHMELLESSVIPLMHPLADPSTVFKDSDEAEDFVEVHLPDVHKQISGVDLGLPNWGKYVLISAGALTALMLMIFLMTCCRKTNRAESIQHSPGETGRKVSVTSHNGRVISSWESYKSGSETKL

SEQ ID NO: 30945 - protein, 524 aa, Artificial Sequence
  derived and/or modified protein sequence (wt) from glycoprotein__RABV__EU267776.1
MIPQVLLFVPLLVFSSCFGKFPIYTIPDKLGPWSPIDIHHLSCPNNLVVEDEGCTNLSGFSYMELKVGYISAIKVNGFTCTGVVTEAETYTNFVGYVTTTFKRKHFRPMPDACRAAYNWKMAGDPRYEESLHNPYPDYHWLRTVKTTKESLVIISPSVADLDPYDKSLHSRVFPSGKCSGITVSSTCCSTNHDYTIWMPENPRLGTSCDIFTNSRGKRASKGGKTCGFVDERGLYKSLRGACKLKLCGVLGLRLMDGTWVAIQTSDEIKWCSPDQLVNLHDFHSDEIEHLVVEELVKKREECLDALETIMTTKSVSFRRLSHLRKLVPGFGKAYTIFNKTLMEADAHYKSIRTWNEIIPSKGCLRVGGRCHPHVNGVFFNGIILGPDGHVLIPEMQSSLLHQHMELLESSVIPLMHPLADPSTVFKDGDEAEDFVEVHLPDVHKQISGVDLGLPNWGKYVLISAGALTALMLMIFLMTCRRKTNRAESIQHSPGETGRKVSVTSHNGRVISSWESYKSGSETKL

SEQ ID NO: 30946 - protein, 524 aa, Artificial Sequence
  derived and/or modified protein sequence (wt) from glycoprotein__RABV__EU275240.1
MIPQALLFVPLLVFSSCFGKFPIYTIPDKLGPWSPIDIHHLSCPNNLVVEDEGCTNLSGFSYMELKVGYISAIKVNGFTCTGVVTEAETYTNFVGYVTTTFKRKHFRPMPDACRAAYNWKMAGDPRYEESLHNPYPDYHWLRTVKTTKESLVIISPSVADLDPYDKSLHSRVFPDGKCSGITVSSTCCSTNHDYTIWMPENPRLGTSCDIFTNSRGKRASKGGKTCGFVDERGLYKSLKGACKLKLCGVLGLRLMDGTWVAIQTSDEIKWCSPDQLVNLHDFHSDEIEHLVVEELVKKREECLDALETIMTTKSVSFRRLSHLRKLVPGFGKAYTIFNKTLMEADAHYKSIRTWNEIIPSKGCLRVGGRCHPHVNGVFFNGIILGPDGHVLIPEMQSSLLHQHMELLESSVIPLMHPLADPSTVFKDGDEAEDFVEVHLPDVHKQISGVDLGLPNWGKYVLISAGALTALMLMIFLMTCCRKANRAESIQHNPGETGRKVSVTSHNGRVISSWESYKSGSETKL

SEQ ID NO: 30947 - protein, 524 aa, Artificial Sequence
  derived and/or modified protein sequence (wt) from glycoprotein__RABV__EU275241.1
MIPQALLFVPLLVFSSRFGKFPIYTIPDKLGPWSPIDIHHLSCPNYLVVEDEGCTNLSGFSYMELKVGYISAIKVNGFTCTGVVTEAETYTNFVGYVTTTFKRKHFRPTPDACRAAYNWKMAGDPRYEESLHNPYPDYHWLRTVKTSKESLVIISPSVADLDPYDKPLHSRVFPGGKCSGITVSSTCCSTNHDYTIWMPENPRLRTSCDIFTNSRGKRASKGGKTCGFVDERGLYKSLKGACKLKLCGVLGLRLMDGTWVAIQTSDEIKWCSPDQLVNLHDFHSDEIEHLVVEELVKKREECLDALETIMTTKSVSFRRLSHLRKLVPGFGKAYTIFNKTLMEADAHYKSIRTWNEIIPSKGCLRVGGRCHPHVNGVFFNGIILGPDGHVLIPEMQSSLLHQHMELLESSVIPLMHPLADPSTVFKDGDEAEDFVEVHLPDVHKQISGVDLGLPNWGKYVLVSAGALTALMLMIFLMTCCRKTNRAESIQHSPGETGRKVSVTSHNGRVISSWESYKSGSETKL

SEQ ID NO: 30948 - protein, 524 aa, Artificial Sequence
  derived and/or modified protein sequence (wt) from glycoprotein__RABV__EU275242.1
MTPQALLFVPLLVFSLCFGKFPIYTIPDKLGPWSPIDIHHLSCPNNLVVEDEGCTNLPGFSYMELKVGYISAIKVNGFTCTGVVTEAETYTNFVGYVTTTFKRKHFRPTPDACRAAYNWKMAGDPRYEESLHNPYPDYHWLRTVKTTKESLVIISPSVSDLGPYDKSLHSRVFPSGKCSGITVSSTYCPTNHDYTIWMPENPRLGTSCDIFTNSRGKRASKGSKTCGFVDERGLYKSLKGACKLKLCGVLGLRLMDGTWAAIQTSDEAKWCPPDQLVNIHDFRSDEIEHLVVEELVKKREECLDALESIMTTKSVSFRRLSHLRKLVPGFGKAYTIFNKTLMEADAHYKSVRTWNEIIPSKGCLRVGGRCHPHANGVFFNGIILGPDGHVLIPEMQSSLLQQHMELLESSVIPLMHPLADPSTVFKDGDEAEDFVEVHLPDVHKQVSGVDLGLPSWGKYVLMSVGALIALMLMIFLATCCRKANGAESIQHRLGETGRKVSVTSQNGRVISSWESYKSGGETKL

SEQ ID NO: 30949 - protein, 524 aa, Artificial Sequence
  derived and/or modified protein sequence (wt) from glycoprotein__RABV__EU293111.1
MIPQALLFLPLLVFSLCSGKFPIYTIPDKLGPWSPIDIHHLSCPNNLVVEDEGCTNLSGFSYMELKVGYISAIKVNGFTCTGVVTEAETYTNFVGYVTTTFKRKHFRPTPDACRAAYNWKMAGDPRYEESLHNPYPDYHWLRTVKTTKESLVIISPSVSDLDPYDKSLHSRVFPSGKCSGITVSSTYCPTSHDYTIWMPENPRLGTSCDIFINSRGKRASKGSKTCGFVDERGLYKSLKGACKLKLCGVLGLRLMDGTWVAIQTSDEAKWCPPDQLVNIHDFHSDEIEHLVVEELVKKREECLDALESIMTTKSVSFRRLSHLRKLVPGFGKAYTIFNKTLMEADAHYKSVRTWNEIIPSKGCLRVGGRCHPHVNGVFFNGIILGPDGHVLIPEMQSSLLQQHMELLESSVIPLMHPLADPSTVFKDGDEAEDFVEVHLPDVHKQVSGVDLGLPNWGKYVLVSVGALIALMLMIFLMTCCRKANGVESMQHRLGETGRKVSVTSQSGRVISSWESYKSGGETKL

SEQ ID NO: 30950 - protein, 524 aa, Artificial Sequence
  derived and/or modified protein sequence (wt) from glycoprotein__RABV__EU293115.1
MVPQALLFVPLLVFSLCFGKFPIYTIPDKLGPWSPIDIHHLSCPNNLVVEDEGCTNLSGFSYMELKVGYISSIKVNGFTCTGVVTEAETYTNFVGYVTTTFKRKHFRPTPDACRAAYNWKMAGDPRYEESLHNPYPDYHWLRTVKTTKESLVIISPSVADLDPYDKSLHSRVFPGGKCSGITVSSTYCSTNHDYTIWLPENPRLGTSCDIFTNSRGKRASKGSKTCGFVDERGLYKSLKGACKLKLCGVLGLRLMDGTWVAMQTSDETKWCPPDQLVNLHDFRSDEIEHLVVEELVKKREECLDALESIMTTKSVSFRRLSHLRKLVPGFGKAYTIFNKTLMEADAHYKSVRTWNEIIPSKGCLRVGGRCHHHVNGVFFNGIILGPDGHVLIPEMQSSLLQQHMELLESSVIPLMHPLADPSTVFKDGDEAEDFVEVHLPDVHKQVSGVDLGLPNWGKYVLLSAGALVALMLIIFLMTCCRRVNRPESTRRSFGGTERKVSITPQSGKVISSWESYKSGSETRL

SEQ ID NO: 30951 - protein, 524 aa, Artificial Sequence
  derived and/or modified protein sequence (wt) from glycoprotein__RABV__EU293116.1
MILQALLFVPLLISSLCFGKFPIYTIPDKLGPWSPIDIHHLSCPNNLVVEDEGCTSLSGFSYMELKVGYISAIKVNGFTCTGVVTEAETYTNFVGYVTTTFKRKHFRPTPDACRAAYNWKVAGDPRYEESLQNPYPDYHWLRTVKTTKESLIIISPSVADLDPYDKSLHSRVFPSGKCLGITISSTYCSTNHDYTIWMPEEARLGTSCDIFTNSKGKKASKGGRTCGFVDERGLYKSLKGACKLKLCGVPGLRLMDGTWVTIQTSDETKWCPPDQLVNLHDFHSDEIEHLVVEELVKKREECLDALESIMTTKSVSFRRLSHLRKLVPGFGKAYTIFNKTLMEADAHYKSVRTWNEIIPSKGCLKVGGRCHPHVDGVFFNGIILGPDGNVLIPEMQSSLLQQHMELLESSVIPLMHPLADPSTVFKDGDEAEDFVEVHLPDVHKQISGVDLGLPNWGKYLLMIAGALAGLILIIFLMACCRRAKRTESRRRGSGESERKVPVPPQNGKVISSWELYKSEGETGL

SEQ ID NO: 30952 - protein, 524 aa, Artificial Sequence
  derived and/or modified protein sequence (wt) from glycoprotein__RABV__EU293121.1
MIPQALLFVPLLVFSLCFGKFPIYTIPDKLGPWSPIDIHHLSCPNNLVVEDEGCTNLSGFSYMELKVGYISAIKVNGFTCTGVVTEAETYTNFVGYVTTTFKRKHFRPTPDACRAAYNWKMAGDPRYEESLHNPYPDYHWLRTVKTTKESLVIISPSVSDLDPYDKSLHSRVFPSGKCSGITVSSTYCPTNHDYTIWMPENPRLGTSCDIFTNSRGKRASKGSKTCGFVDERGLYRSLKGACKLKLCGVLGLRLMDGTWAAIQTSDEAKWCPPDQLVNIHDFRSDEIEHLVVEELVKKREECLDALESIMTTKSVSFRRLSHLRKLVPGFGKAYTIFNKTLMEADAHYKSVRTWNEIIPSKGCLRVGGRCHPHVNGVFFNGIILGPDGHVLIPEMQSSLLRQHMELLESSVIPLMHPLADPSTVFKDGDEAEDFVEVHLPDVHEQISGVDLGLPSWGKYVLMSVGAMIALMLVIFLTTCCRKANGAETIQHRLGETGRKVSVTSQSGRVISSWESYKSGGETKL

SEQ ID NO: 30953 - protein, 524 aa, Artificial Sequence
  derived and/or modified protein sequence (wt) from glycoprotein__RABV__EU352767.1
MVPQVLLFVPLLGFSLCFGKFPIYTIPDELGPWSPIDIHHLSCPNNLVVEDEGCTNLSEFSYMELKVGYISAIKVNGFTCTGVVTEAETYTNFVGYVTTTFKRKHFRPTPDACRAAYNWKMAGDPRYEESLHNPYPDYHWLRTVRTTKESLIIISPSVTDLDPYDKSLHSRVFPGGKCSGITVSSTYCSTNHDYTIWMPEDPRPRTPCNIFTNSRGKRASKGNKTCGFVDERGLYKSLKGACRLKLCGVLGLRLMDGTWVAMQTSDETKWCPPDQLVNLHDFHSDEIEHLVVEELVKKREECLDALESIMTTKSVSFRRLSHLRKLVPGFGKAYTIFNKTLMEADAHYKSVRTWNEIIPSKGCLKVGGRCHPHVNGVFFNGIILGPDGHVLIPEMQSSLLQQHMELLKSSVIPLMHPLADPSTVFKEGDEAEDFVEVHLPDVYKRISGVDLGLPNWGKYVLMTAGAMIGLVLIFSLMTWCRRANRPESKQRSFGGTGRNVSVTSQSGKVIPSWESYKSGGEIRL

SEQ ID NO: 30954 - protein, 524 aa, Artificial Sequence
  derived and/or modified protein sequence (wt) from glycoprotein__RABV__EU549783.1
MIPQVLLFVPLLVFSSCFGKFPIYTIPDKLGPWSPIDIHHLSCPNNLVVEDEGCTNLSGFSYMELKVGYSSAIKVNGFTCTGVVTEAETYTNFVGYVTTTFKRKHFRPMPDACRAAYNWKMAGDPRYEESLHNPYPDYHWLRTVKTTKESLVIISPSVTDLDPYDKSLHSRVFPGGKCSGITVSSTCCSTNHDYTIWMPENPRLGTSCDIFTNSRGKRASKGGKTCGFVDERGLYKSLKGACKLKLCGVLGLRLMDGTWVAIQTSDEIKWCSPDQLVNLHDFHSDEIEHLVVEELVKKREECLDALETIMTTKSVSFRRLSHLRKLVPGFGKAYTIFNKTLMEADAHYKSIRTWNEIIPSKGCLRVGGRCHPHVNGVFFNGIILGPDGHVLIPEMQSSLLHQHMELLESSVIPLMHPLADPSTVFKDGDEAEDFVEVHLPDVHKQISGVDLGLPNWGKYVLISAGALTALMLTIFLMTCCRKTNRAGSIQHSPGGTGRKVSVTPHNGRVICSWESYKSGSETKL

SEQ ID NO: 30955 - protein, 524 aa, Artificial Sequence
  derived and/or modified protein sequence (wt) from glycoprotein__RABV__EU643590.1
MVPQALLFVPLLAVPLCFGKFPIYTIPDKLGPWSPIDIHHLSCPNNLVVEDEGCTNLSGFSYMELKVGYISAIKVNGFTCTGVVTEAETYTNFVGYVTTTFKRKHFRPTPDACRSAYNWKMAGDPRYEESLHNPYPDYHWLRTVKTTKESFVIISPSVADLDPYDKSLHSRVFPRGKCSGITVSSTYCSTNHDYTIWMPENPRLGTSCDIFTNSRGKRASKGSKTCGFVDERGLYKSLKGACKLKLCGVLGLRLMDGTWVAIQTSDETKWCPPDQLVNLHDFHSDEIEHLVVEELVKKREECLDALESIMTTKSVSFRRLSHLRKLVPGFGKAYTIFNKTLMEADAHYKSVRTWNEIIPSKGCLRVGGRCHPHVNGVFFNGIILGPDGHVLIPEMQSSLLQQHMELLESSVIPLMHPLADPSTVFKDGDEAEDFVEVHLPDVHKQVSGVDLGLPSWGKYVLMSAGILTALMLTIFLMTCCRRTNRAESIQHSLGETGRKVSVTSQSGRVISSWESYKSGGETKL

SEQ ID NO: 30956 - protein, 524 aa, Artificial Sequence
  derived and/or modified protein sequence (wt) from glycoprotein__RABV__EU700029.1
MIPQVLLFVPLLVFSSCFGKFPIYTIPDKLGPWSPIDIHHLSCPNNLVVEDEGCTNLSGFSYMELKVGYISAIKVNGFTCTGVVTEAETYTNFVGYVTTTFKRKHFRPMPDACRAAYNWKMAGDPRYEESLHNPYPDYHWLRTVKTTKESLVIISPSVADLDPYDKSLHSRVFPGGKCSGITVSSTCCSTNHDYTIWMPENPRLGTSCDIFTNSRGKRASKGGKTCGFVDERGLYKSLKGACKLKLCGVLGLRLMDGTWVAIQTSDEIKWCPPDQLVNLHDFHSDEIEHLVVEELVKKREECLDALETIMTTKSVSFRRLSHLRKLVPGFGKAYTIFNKTLMEADAHYKSIRTWNEIIPSKGCLRVGGRCHPHVNGVFFNGIILGPDGHVLIPEMQSSLLHQHMELLESSVIPLMHPLADPSTVFKDGDEAEDFVEVHLPDVHKQISGVDLGLPNWGKYVLISAGALTALMLTIFLMTCCRKTNRAGSIQHSPGETGRKVSVTSHNGRVISSWESYKSGSETKL

SEQ ID NO: 30957 - protein, 524 aa, Artificial Sequence
  derived and/or modified protein sequence (wt) from glycoprotein__RABV__EU700030.1
MVPLALLLVPLLVFSSCFGKFPIYTIPDKLGPWSPIDIHHLSCPNNLVVEDEGCTNLSGFSYMELKVGYISAIKVNGFTCTGVVTEAETYTNFVGYVTTTFKRKHFRPMPDACRAAYNWKMAGDPRYEESLHNPYPDYHWLRTVKTTKESLVIISPSVADLDPYDKSLHSRVFPGGKCSGITVSSTCCSTNHDYTIWMPENPRLGTSCDIFTNSRGKRASKGGKTCGFVDERGLYKSLKGACKLKLCGVLGLRLMDGTWVAIQTSDEIKWCSPDQLVNLHDFHSDEIEHLVVEELVKKREECLDALETIMTTKSVSFRRLSHLRKLVPGFGKAYTIFNKTLMEADAHYKSIRTWNEIIPSKGCLRVGGRCHPHVNGVFFNGIILGPDGHVLIPEMQSSLLHQHMELLESSVIPLMHPLADPSTVFKDGDEAEDFVEVHLPDVHKQISGVDLGLPNWGKYVLISAGALTALMLTIFLMTCCRKTNRAESIQHSPGEIGRKVSVTSHNGRVISSWESYKSGSETKL

SEQ ID NO: 30958 - protein, 524 aa, Artificial Sequence
  derived and/or modified protein sequence (wt) from glycoprotein__RABV__EU827276.1
MVPLTLLVAPLLVLSLCSGKFPIYTIPDKLGPWSPIDIHHLSCPNNLVVEDEGCTNLSGFSYMELKVGYISAIKVNGFTCTGVVTEAETYTNFVGYVTTTFRRKHFRPTPDACRTAYNWKMAGDPRYEESLHNPYPDYHWLRTVKTTKESLVIISPSVADLDPYDRSLHSRVFPNGKCSGITVSSTYCPTNHDYTIWMPENPRLGTSCDIFVNSRGKRASKGSKTCGFVDERGLYKSLKGACKLKLCGVLGLRLMDGTWVAMRTSDETKWCPPDQLVNIHDFHSDEIEHLVVEELVKKREECLDALESIMTTKSVSFRRLSHLRKLVPGFGKAYTIFNKTLMEADAHYKSVRTWDEIIPSKGCLRVGGRCHPHVHGVFFNGIILGPDGHVLIPEMQSSLLQQHMELLESSVIPLMHPLADPSTVFKDDDEAEDFVEVHLPDVHKQISGVDLGLPNWGKYVLMSAGALIALMLLIFLMTCCRKIKRPESTQHSPRGTGRKVSVTSQNGKVISSWESYKSGGETRL

SEQ ID NO: 30959 - protein, 524 aa, Artificial Sequence
  derived and/or modified protein sequence (wt) from glycoprotein__RABV__EU827277.1
MVPLTLLVVPLLVLSLCSGKFPIYTIPDKLGPWSPIDIHHLSCPNNLVVEDEGCTNLSGFSYMELKVGYISAIKVNGFTCTGVVTEAETYTNFVGYVTTTFRRKHFRPTPDACRTAYNWKMAGDPRYEESLHNPYPDYHWLRTVKTTKESLIIISPSVADLDPYDRSLHSRVFPNGKCSGITVSSTYCPTNHDYTIWMPENPRLGTSCDIFVNSRGKRASKGSKTSGFVDERGLYKSLKGACKLKLCGVLGLRLMDGTWVAMRTSDETKWCPPVQLVNIHDFHSDEIEHLVVEELVKKREECLDALESIMTTKSVSFRRLSHLRKLVPGFGKAYTIFNKTLMEADAHYKSVRTWDEIIPSKGCLRVGGRCHPHVHGVFFNGIILGPDGHVLIPEMQSSLLQQHMELLESSVIPLMHPLADPSTVFKDGDEAEDFVEVHLPDVHKQISGVDLGLPNWGKYVLMSAGALIALMLIIFLMTCCRKIKRPESTQHSPGGTGRKVSVTSQNGKVISSWESYKSGGETRL

SEQ ID NO: 30960 - protein, 524 aa, Artificial Sequence; identical to SEQ ID NO: 30858
  derived and/or modified protein sequence (wt) from glycoprotein__RABV__EU877067.1

SEQ ID NO: 30961 - protein, 524 aa, Artificial Sequence
  derived and/or modified protein sequence (wt) from glycoprotein__RABV__FJ418876.1
MIPQALLFVPLLVFSLCFGKFPIYTIPDKLGPWSPIDIHHLSCPNNLVVEDEGCTNLSGFSYMELKVGYISAIKVNGFTCTGVVTEAETYTNFVGYVTTTFKRKHFRPTPDACRAAYNWKMAGDPRYEESLHNPYPDYHWLRTVKTTKESLVIISPSVADLDPYDKSLHSRVFPSGKCSGITVSSTYCSTNHDYTIWMPENPRLGTSCDIFVNSRGKRASKGSKTCGFVDERGLYKSLKGACKIKLCGVLGLRLMDGTWVAIQTSDETKWCPPDQLVNLHDFRSDEIEHLVVEELVKKREECLDALESIMTTKSVSFRRLSHLRKLVPGFGKAYTIFNKTLMEADAHYKSVRTWNEIIPSKGCLRVGGRCHPHVNGVFFNGIILGPDGHVLIPEMQSSLLQQHMELLESSVIPLMHPLADPSTIFKDGDEAEDFVEVHLPDVHKQVSGVDLGLPNWGKYVLMSAGALIALMLMIFLMTCCRKTDRTGSTHHSPGETGRKVSVTSQNGRVIASWESYKSGGETRL

SEQ ID NO: 30962 - protein, 524 aa, Artificial Sequence
  derived and/or modified protein sequence (wt) from glycoprotein__RABV__FJ418877.1
MVPQALLFVPLLAIPLCFGKFPIYTIPDKLGPWSPIDIHHLSCPNNLVVEDEGCTNLSGFSYMELKVGYISAIKVNGFTCTGVVTEAETYTNFVGYVTTTFKRKHFRPTPDACRSAYNWKMAGDPRYEESLHNPYPDYHWLRTVKTTKESFVIISPSVADLDPYDKSLHSRVFPRGKCSGITVSSTYCSTNHDYTIWMPENPRLGTSCDIFTNSRGKRASKGSKTCGFVDERGLYKSLKGACKMKLCGVLGLRLMDGTWVAIQTSDETKWCPPDQLVNLHDFHSDEIEHLVVEELVKKREECLDALESIMTTKSVSFRRLSHLRKLVPGFGKAYTIFNKTLMEADAHYKSVRTWNEIIPSKGCLRVGGRCHPHVNGVFFNGIILGPDGHVLIPEMQSSLLQQHMELLESSVIPLMHPLADPSTVFKDGDEAEDFVEVHLPDVHKQVSGVDLGLPSWGKYVLMSAGILTALMLMIFLMTCCRRTNRAESIQHSLGETGRKVSVTSQSGRVISSWESYKSGGETKL

SEQ ID NO: 30963 - protein, 524 aa, Artificial Sequence
  derived and/or modified protein sequence (wt) from glycoprotein__RABV__FJ418878.1
MIPQVLLFVPLLVFSSCFGKFPIYTIPDKLGPWSPIDIHHLSCPNNLVVEDEGCTNLSGFSYMELKVGYISAIKVNGFTCTGVVTEAETYTNFVGYVTTTFKRKHFRPMPDACRAAYNWKMAGDPRYEESLHNPYPDYHWLRTVKTTKESLVIISPSVADLDPYDKSLHSRVFPGGKCSGITVSSTCCSTNHDYTIWMPENPRLGTSCDIFTNSRGKRASKGGKTCGFVDERGLYKSLKGACKMKLCGVLGLRLMDGTWVAIQTSDEIKWCSPDQLVNLHDFHSDEIEHLVVEELVKKREECLDALETIMTTKSVSFRRLSHLRKLVPGFGKAYTIFNKTLMEADAHYKSIRTWNEIIPSKGCLRVGGRCHPHVNGVFFNGIILGPDGHVLIPEMQSSLLHQHMELLESSVIPLMHPLADPSTVFKDGDEAEDFVDVHLPDVHKQISGVDLGLPNWGKYVLISAGALTALMLMIFLMTCCRKANRAESIQHNPGETGRKVSVTSHNGRVISSWESYKSGGETKL

SEQ ID NO: 30964 - protein, 524 aa, Artificial Sequence
  derived and/or modified protein sequence (wt) from glycoprotein__RABV__FJ418879.1
MIPQVLLFVPLLVFSSCLGKFPIYTIPDKLGPWSPIDIHHLSCPNNLVVEDEGCTNLSGFSYMELKVGYISAIKVNGFTCTGVVTEAETYTNFVGYVTTTFKRKHFRPMLDACRAAYNWKMAGDPRYEESLHNPYPDYHWLRTVKTSKESLVIISPSVADLDPYDKSLHSRVFPGGKCSGITVSSTCCSTNHDYTIWMPENPRLGTSCDIFTNSRGKRASKGGKTCGFVDERGLYKSLKGACKVKLCGVLGLRLMDGTWVAIQTSDEIKWCSPDQLVNLHDFHSDEIEHLVVEELVKKREECLDALETIMTTKSVSFRRLSHLRKLVPGFGKAYTIFNKTLMEADAHYKSIRTWNEIIPSKGCLRVGGRCHPHVNGVFFNGIILGPDGHVLIPEMQSSLLHQHMELLESSVIPLMHPLADPSTVFKDGDEAEDFVEVHLPDVHKQISGVDLGLPNWGKYVLISAGALTASMLMIFLMTCCRKTNRAESIQHSPGETGRKVSVTSHNGRVISSWESYKSGGETKL

SEQ ID NO: 30965 - protein, 524 aa, Artificial Sequence; identical to SEQ ID NO: 30962
  derived and/or modified protein sequence (wt) from glycoprotein__RABV__FJ418880.1

SEQ ID NO: 30966 - protein, 524 aa, Artificial Sequence
  derived and/or modified protein sequence (wt) from glycoprotein__RABV__FJ418881.1
MIPQVLLFVPLLVFSSCFGKFPIYTIPDKLGPWSPIDIHHLSCPNNLVVEDEGCTNLSGFSYMELKVGYISAIKVNGFTCTGVVTEAETYTNFVGYVTTTFKRKHFRPMPDACRAAYNWKMAGDPRYEESLHNPYPDYHWLRTVKTSKESLVIISPSVADLDPYDKSLHSRVFPGGKCSGITVSSTCCSTNHDYTIWMPENPRPGTSCDIFTNSRGKRASKGGKTCGFVDERGLYKSLKGACKVMLCGVLGLRLMDGTWVAIQTSDEIKWCSPDQLVNLHDFHSDEIEHLVVEELVKKREECLDALETIMTTKSVSFRRLSHLRKLVPGFGKAYTIFNKTLMEADAHYKSIRTWNEIIPSKGCLRVGGRCHPHVNGVFFNGIILGPDGHVLIPEMQSSLLHQHMELLESSVIPLMHPLADPSTVFKDGDEAEDFVEVHLPDVHKQISGVDLGLPNWGKYVLISAGALTALMLMIFLMTCCRKTNRAESIQHSPGETGRKVSVTSHNGRVISSWESYKSGGETKL

SEQ ID NO: 30967 - protein, 524 aa, Artificial Sequence
  derived and/or modified protein sequence (wt) from glycoprotein__RABV__FJ418883.1
MIPQVLLFVPLLVFSSCFGKFPIYTIPDKLGPWSPIDIHHLSCPNNLVVEDEGCTNLSGFSYMELKVGYISAIKVNGFTCTGVVTEAETYTNFVGYVTTTFKRKHFRPMPDACRAAYNWKMAGDPRYEESLHNPYPDYHWLRTVKTTKESLVIISPSVADLDPYDKSLHSRVFPGGKCSGITVSSTCCSTNHDYTIWMPENPRLGTSCDIFTNSRGKRASKGGKTCGFVDERGLYKSLKGACKMKLCGVLGLRLMDGTWVAIQTSDEIKWCSPDQLVNLHDFHSDEIEHLVVEELVKKREECLDALETIMTTKSVSFRRLSHLRKLVPGFGKAYTIFNKTLMEADAHYKSIRTWNEIIPSKGCLRVGGRCHPHVNGVFFNGIILGPDGHVLIPEMQSSLLHQHMELLESSVIPLMHPLADPSTVFKDGDEAEDFVEVHLPDVHKQISGVDLGLPNWGKYVLISAGALTALMLKIFLMTCCRKTNRAESIQHSPGEIGRKVSVTSHNGRVISSWESYKSGSETKL

SEQ ID NO: 30968 - protein, 524 aa, Artificial Sequence
  derived and/or modified protein sequence (wt) from glycoprotein__RABV__FJ418884.1
MIPQVLLFVPLLVFSSCFGKFPIYTIPDKLGPWSPIDIHHLSCPNNLVVEDEGCTNLSGFSYMELKVGYISAIKVNGFTCTGVVTEAETYTNFVGYVTTTFKRKHFRPMPDACRAAYNWKMAGDPRYEESLHNPYPDYHWLRTVKTTKESLVIISPSVADLDPYDKSLHSRVFPGGKCSGITVSSTCCSTNHDYTIWMPENPRLGTSCDIFTNSRGKRASKGGKTCGFVDERGLYKSLKGACKMKLCGVLGLRLMDGTWVAIQTSDEIKWCSPDQLVNLHDFHSDEIEHLVVEELVKKREECLDALETIMTTKSVSFRRLSHLRKLVPGFGKAYTIFNKTLMEADAHYKSIRTWNEIIPSKGCLRVGGRCHPHVNGVFFNGIILGPDGHVLIPEMQSSLLHQHMELLESSVIPLMHPLADPSTVFKDGDEAEDFVEVHLPDVHKQISGVDLGLPNWGKYVLISAGALTALMLTIFLMMCCRKTNRAESIQHSPGEIGRKVSVTSHNGRVISSWESYKSGSETKL

SEQ ID NO: 30969 - protein, 524 aa, Artificial Sequence
  derived and/or modified protein sequence (wt) from glycoprotein__RABV__FJ418885.1
MVPQVLLFVPLLVFSSCFGKFPIYTIPDKLGPWSPIDIHHLSCPNNLVVEDEGCTNLSGFSYMELKVGYISAIKVNGFTCTGVVTEAETYTNFVGYVTTTFKRKHFRPMPDACRAAYNWKMAGDPRYEESLHNPYPDYHWLRTVKTTKESLVIISPSVADLDPYDKSLHSRVFPGGKCSGITVSSTCCSTNHDYTIWMPENPRLGTSCDIFTNSRGKRASKGGKTCGFVDERGLYKSLKGACKMKLCGVLGLRLMDGTWVAIQTSDEIKWCSPDQLVNLHDFHSDEIEHLVVEELVKKREECLDALETIMTTKSVSFRRLSHLRKLVPGFGKAYTIFNKTLMEADAHYKSIRTWNEIIPSKGCLRVGGRCHPHVNGVFFNGIILGPDGHVLIPEMQSSLLHQHMELLESSVIPLMHPLADPSTVFKDGDEAEDFVEVHLPDVHKQISGVDLGLPNWGKYVLISAGALTALMLMIFLMTCCRKANRAESIQHNPGETGRKVSVTSHNGRVISSWESYKSGGETKL

SEQ ID NO: 30970 - protein, 524 aa, Artificial Sequence
  derived and/or modified protein sequence (wt) from glycoprotein__RABV__FJ418886.1
MIPQVLLFVPLLVFSSCFGKFPIYTIPDKLGPWSPIDIHHLSCPNNLVVEDEGCTNLSGFSYMELKVGYISAIKVNGFTCTGVVTEAETYTNFVGYVTTTFKRKHFRPMPDACRAAYNWKMAGDPRYEESLHNPYPDYHWLRTVKTTKESLVIISPSVADLDPYDKSLHSRVFPGGKCSGITVSSTCCSTNHDYTIWMPENPRLGTSCDIFTNSRGKRASKGGKTCGFVDERGLYKSLKGACKMKLCGVLGLRLMDGTWVAIQTSDEIKWCSPDQLVNLHDFHSDEIEHLVVEELVKKREECLDALETIMTTKSVSFRRLSHLRKLVPGFGKAYTIFNKTLMEADAHYKSIRTWNEIIPSKGCLRVGGRCHPHVNGVFFNGIILGPDGHVLIPEMQSSLLHQHMELLESSVIPLMHPLADPSTVFKDGDEAEDFVEVHLPDVHKQISGVDLGLPNWGKYVLISAGALTALMLQIFLMTCCRKTIRAESIQHSPGETGRKVSVTFHNGRVISSWESYKSGSETKL

SEQ ID NO: 30971 - protein, 524 aa, Artificial Sequence
  derived and/or modified protein sequence (wt) from glycoprotein__RABV__FJ418887.1
MVPQVLLFVPLLVFSSCFGKFPIYTIPDKLGPWSPIDIHHLSCPNNLVVEDEGCTNLSGFSYMELKVGYISAIKVNGFTCTGVVTEAETYTNFVGYVTTTFKRKHFRPMPDACRAAYNWKMAGDPRYEESLHNPYPDYHWLRTVKTTKESLVIISPSVADLDPYDKSLHSRVFPGGKCSGITVSSTCCSTNHDYTIWMPENPRLGTSCDIFTNSRGKRASKGGKTCGFVDERGLYKSLKGACKMKLCGVLGLRLMDGTWVAIQTSDEIKWCSPDQLVNLHDFHSDEIEHLVVEELVKKREECLDALETIMTTKSVSFRRLSHLRKLVPGFGKAYTIFNKTLMEADAHYKSIRTWNEIIPSKGCLRVGGRCHPHVNGVFFNGIILGPDGHVLIPEMQSSLLHQHMELLESSVIPLMHPLADPSTVFKDGDEAEDFVEVHLPDVHKQISGVDLGLPNWGKYVLISAGALTALMLMIFLMTCCRRANRAESIQHNPGETGRKVSVTSHNGRVISSWESYKSGGETKL

SEQ ID NO: 30972 - protein, 524 aa, Artificial Sequence
  derived and/or modified protein sequence (wt) from glycoprotein__RABV__FJ465384.1
MVSQSLLFVPLLGFSLCFGKFPIYTIPDKLGPWSPIDIHHLSCPNNLVVEDEGCTNLSGFSYMELKVGYISAIKVNGFTCTGVVTEAETYTNFVGYVTTTFRRKHFRPTPDACRAAYHWKMAGDPRYEESLHNPYPDYHWLRTVKTTKESLVIISPSVADLDPYDKSLHSRVFPNGKCSGLTVSSTYCSTNHDYTMWMPENPRLGTSCDIFTNSRGKRASRGNKTCGFVDERGLYKSLKGACKLKLCGVLGLRLIDGTWVAMQTSDETKWCPPDQLVNLHDFRSDEIEHLVVEELVKKREECLDALESIMTTKSVSFRRLSHLRKLVPGFGKAYTIFNKTLMEADAHYKSIRTWDEIVPSKGCLRVGGKCHPHINGVFFNGIILGSDGHVLIPEMQSSLLQQHIELLESSVVPLMHPLADPSTVFKDGNEAEDFVEVHLPDVHKQVSEIDLGLPNWGKYILVSAGALIALMLTILLITCCRRVHRPEPKQHRLRGTERKVAVTSQSGKAISSWESYKNGGETRM

SEQ ID NO: 30973 - protein, 524 aa, Artificial Sequence
  derived and/or modified protein sequence (wt) from glycoprotein__RABV__FJ465385.1
MFPQALLFVPLLGLSLCSGRFPIYTIPDKLGPWSPIDIHHLSCPNNLVVEDEGCTNLSGFSYMELKVGYISSIKVSGFTCTGVVTEAETYTNFVGYVTTTFRRKHFRPTPDACRAAHNWKMAGDPRYEESLHNPYPDYHWLRTVKTTKESLVIISPSVADLDPYDKSLHSRVFPNGKCSGLTVFSTYCSTNHEYTVWMPENPRLGTSCDIFTNSRGKRASKGNKTCGFVDERGLYKSLKGACKLKLCGVLGLRLMDGTWVAMQTSDETKWCPPDQLVNLHDFRSDEIEHLVVEELVKKREECLDALESIMTTKSVSFRRLSHLRKLVPGFGKAYTIFNKTLMEADAHYKSVRTWNEIIPSKGCLRVGGRCHPHVNGVFFNGIILGSDGHVLIPEMQSSLLQQHVELLESSVIPLMHPLADPSTVFKGGDEAEDFVEVHLPDVHKQVSGVDLGLPNWGKYILVSAGALIALILIIFLMTCCRRFRRPKPAQHNLGGTGRKVSVTSQSGKVVSSWESYKNGGETRL

SEQ ID NO: 30974 - protein, 524 aa, Artificial Sequence
  derived and/or modified protein sequence (wt) from glycoprotein__RABV__FJ465386.1
MFSRSLLFVSLLGFPLCFGKFPIYTIPDKLGPWSPIDIHHLSCPNNLVVEDEGCTNLSGFSYMELKVGYISAIKVNGFTCTGVVTEAETYTNFVGYVTTTFRRKHLRPTPDACRSAYNWKMAGDPRYEESLHNPYPDYHWLRTVKTTKESLVIISPSVADLDPYDKSLHSRVFPNGKCSGLTVSSTYCSTNHDYTIWMPENPRLGTSCDIFTNSKGKRASRGNKTCGFVDERGLYKSLKGACKLKLCGVLGLRLIDGTWVAMHTSDETKWCPPDQLVNLHDFRSDEIEHLVVEELVKKREECLDALESIMTTKSVSFRRLSHLRKLVPGFGKAYTIFNKTLMEADAHYKSIRTWDEIVPSKGCLRVGGRCHPHVNGVFFNGIILGSDGHVLIPEMQSSLLQQHVELLESSVVPLMHPLADPSTVFKDGNEAEDFVEVHLPDVHKQVSGVDLGLPDWGKYILVSAGALIALMLIIFLMTCCRRVYRRESKQHSLRGTERKVSVTSQNGKAISSWESYKNGSETRM

SEQ ID NO: 30975 - protein, 524 aa, Artificial Sequence
  derived and/or modified protein sequence (wt) from glycoprotein__RABV__FJ465387.1
MFSRSLLFVSLLGFPLCFGKFPIYTIPDKLGPWSPIDIHHLSCPNNLVVEDEGCTNLSGFSYMELKVGYISAIKVNGFTCTGVVTEAETYTNFVGYVTTTFRRKHLRPTPDACRSAYNWKMAGDPRYEESLHNPYPDYHWLRTVKTTKESLVIISPSVADLDPYDKSLHSRVFPNGKCSGLTVSSTYCSTNHDYTIWMPENPRLGTSCDIFTNSKGKRASRGNKTCGFVDERGLYKSLKGACKLKLCGVLGLRLIDGTWVAMHTSDETKWCPPDQLVNLHDFRSDEIEHLVVEELVKKREECLDALESIMTTKSVSFRRLSHLRKLVPGFGKAYTIFNKTLMEADAHYKSIRTWDEIIPSKGCLRVGGRCHPHVNGVFFNGIILGSDGHVLIPEMQSSLLQQHVELLESSVVPLMHPLADPSTVFKDGNEAEDFVEVHLPDVHKQVSGVDLGLPDWGKYILVSAGALIALMLIIFLMTCCRRVHRRESKQHSLRGTERKVSVTSQNGKAISSWESYKNGSETRM

SEQ ID NO: 30976 - protein, 524 aa, Artificial Sequence
  derived and/or modified protein sequence (wt) from glycoprotein__RABV__FJ465388.1
MFSQSLLFVPLLGFSLCFGKFPIYTIPDKLGPWSPIDIHHLSCPNNLVVEDEGCTNLSGFSYMELKVGYISAIRVSGFTCTGVVTEAETYTNFVGYVTTTFKRKHFRPTPDACRAAYHWKMAGDPRYEESLHNPYPDYHWLRTVKTTKESLVIISPSVADLDPYDKSLHSRVFPNGKCSGLTVSSTYCLTNHDYTIWMPENPRLGTSCDIFTNSRGKRASRGNKTCGFVDERGLYKSLKGACKLKLCGVLGLRLIDGTWVAMQTSDETKWCPPDQLVNLHDFRSDEIEHLVVEELVKKREECLDALESIMTTKSVSFRRLSHLRKLVPGFGKAYTIFNKTLMEADAHYKSIRTWDEIVPSKGCLRVGGRCHPHVNGVFFNGIILGSDGHVLIPEMQSSLLQQHVELLESSVVPLMHPLADPSTVFKDGNEAEDFVEVHLPDVHKQVSGVDLGLPNWGKYILVSAGALIALMLTIFLMTCCRRVRRPEPKQHRLRGTEKKVAVTPQSGKAISSWESYKNGDETRM

SEQ ID NO: 30977 - protein, 524 aa, Artificial Sequence
  derived and/or modified protein sequence (wt) from glycoprotein__RABV__FJ465389.1
MLSQSLLLVSLLGFPLCFGKFPIYTIPDKLGPWSPIDIHHLSCPNNLVVEDEGCTSLSGFSYMELKVGYISAIKVNGFTCTGVVTEAETYTNFVGYVTTTFRRKHLRPTPDACRSAYNWKMAGDPRYEESLHNPYPDYHWLRTVKTTKESLVIISPSVADLDPYDKSLHSRVFPNGKCSGLTVSSTYCSTNHDYTIWMPENPRLGTSCDIFTNSRGKRASRGNKTCGFVDERGLYKSLKGACKLKLCGVLGLRLIDGTWVAMHTSDETKWCPPDQLVNLHDFRSDEIEHLVVEELVKKREECLDALESIMTTKSVSFRRLSHLRKLVPGFGKAYTIFNKTLMEADAHYKSIRTWDEIVPSKGCLRVGGRCHPHVNGVFFNGIILGSDGHVLIPEMQSSLLQQHVELLESSVVPLMHPLADPSTVFKDGNEAEDFVEVHLPDVHKQVSGVDLGLPDWGKYILVSAGALIALMLIIFLMTCCRRVHRRESKQHSLRGTERKVSVISQNGKTISSWESYKNGSDTRM

SEQ ID NO: 30978 - protein, 524 aa, Artificial Sequence
  derived and/or modified protein sequence (wt) from glycoprotein__RABV__FJ465390.1
MFSQTLLFVPLLGLSLCFGKFPIYTIPDKLGPWSPIDIHHLSCPNNLVVEDEGCTNLSGFSYMELKVGYISAIKVNGFTCTGVVTEAETYTNFVGYVTTTFRRKHFRPTPDACRAAYNWKMAGDPRYEESLHNPYPDYHWLRTVKTTKESLVIISPSVADLDPYDKSLHSRVFLNGKCSGLTVSSTYCSTNHDYTIWMPEDPRLGTSCDIFINSRGKRASKGSKTCGFVDERGLYKSLKGACKLKLCGVLGLRLIDGTWVAMQTSEEPKWCPPDQLVNLHNFRSDEIEHLVVEELVKKREECLDALESIITTKSVSFRRLSHLRKLVPGFGKAYTIFNKTLMEADAHYKSIRTWDEIIPSKGCLRVGGRCHPHVNGVFFNGIILGSDGHVLIPEMQSSLLQQHVELLESSVIPLMHPLADPSTVFKGGDEAEDFVEIHLPDVHKQISGVDLGLPNWGKYILVGAGALIALMLIIFLITCCRGFHRPKSTQHSLGGTGRKVSVTPQSGKVISSWESYKKGSETRL

SEQ ID NO: 30979 - protein, 524 aa, Artificial Sequence
  derived and/or modified protein sequence (wt) from glycoprotein__RABV__FJ465391.1
MPSQSLLFVSLLGFSLCFGKFPIYTIPDKLGPWSPIDIHHLSCPNNLVVEDEGCTNLSGFSYMELKVGYISAIKVNGFTCTGVVTEAETYTNFVGYVTTTFRRKHFRPTPDACRSAYNWKMAGDPRYEESLHNPYPDYHWLRTVKTTKESLVIISPSVADLDPYDKSLHSRVFPNGKCSGLTVSSTYCSTNHDYTIWMPENPRLGTSCDIFTNSRGKRASRGNKTCGFVDERGLYKSLKGACKLKLCGVLGLRLIDGTWVAMHTSDETKWCPPDQLVNLHDFRSDEIEHLVVEELVKKREECLDALESIMTTKSVSFRRLSHLRKLVPGFGKAYTIFNKTLMEADAHYKSIRTWDEIVPSKGCLRVGGRCHPHVNGVFFNGIILGSDGHVLIPEMQSSLLQQHVELLESSVVPLMHPLADPSTVFKDGNEAEDFVEVHLPDVHKQVSGVDLGLPDWGRYILVSAGALITLMLIIFLMTCCRRVHRRESKQHSLRGTERKVSVTSQSGKAISSWESYKNGSETRM

SEQ ID NO: 30980 - protein, 524 aa, Artificial Sequence
  derived and/or modified protein sequence (wt) from glycoprotein__RABV__FJ465392.1
MFPQTLLFVPLLGLSLCFGKFPIYTIPDKLGPWSPIDIHHLSCPNNLVVEDEGCTNLSGFSYMELKVGYISAIKVNGFTCTGVVTEAETYTNFVGYVTTTFRRKHFRPTPDACRAAYNWKMAGDPRYEESLHNPYPDYHWLRTVKTTKESLVIISPSVADLDPYDKSLHSRVFLNGKCSGLTVSSTYCSTNHDYTIWMPENPRLGTSCDIFINSRGKRASKGNKTCGFVDERGLYKSLKGACKLKLCGVLGLRLIDGTWVAMQTSEEPKWCPPDQLVNLHNFRSDEIEHLVVEELVKKREECLDALESIMTTKSVSFRRLSHLRKLVPGFGKAYTIFNKTLMEADAHYKSIRTWDEIIPSKGCLRVGGRCHPHVNGVFFNGIILGSDGHVLIPEMQSSLLQQHVELLESSVIPLMHPLADPSTVFKDGDEAEDFVEIHLPDVHKQISGVDLGLPNWGKYILVSAGALITLMLTIFLITCCRGFRRPKSTQHSLGGTGMKVSVTPQSGKVISSWESYKKGGETRL

SEQ ID NO: 30981 - protein, 524 aa, Artificial Sequence
  derived and/or modified protein sequence (wt) from glycoprotein__RABV__FJ465393.1
MFSQSLLFVPLLGFSLCSGKFPIYTIPDKLGPWSPIDIHHLSCPNNLVVEDEGCTNLSGFSYMELKVGYISAIRVSGFTCTGVVTEAETYTNFVGYVTTTFKRKHFRPTPDACRAAYHWKMAGDPRYEESLHNPYPDYHWLRTVKTTKESLIIISPSVADLDPYDKSLHSRVFPNGKCSGLTVSSTYCSTNHDYTIWMPENPRLGTSCDIFTNSRGKRASRGNKTCGFVDERGLYKSLKGACKLKLCGVLGLRLIDGTWVAMQTSDETKWCPPDQLVNLHDFRSDEIEHLVVEELVKKREECLDALESIMTTKSVSFRRLSHLRKLVPGFGKAYTIFNKTLMEADAHYKSIRTWDEIVPSKGCLRVGGRCHPHVNGVFFNGIILGSDGHVLIPEMQSSLLQQHVELLESSVVPLMHPLADPSTVFKDGNEAEDFVEVHLPDVHKQVSGVDLGLPNWGRYILVGAGALIALMLTIFLLTCCRRVHQPEPKQHRLREAERKVAVTSQSGKAISSWESYKNGGETRM

SEQ ID NO: 30982 - protein, 524 aa, Artificial Sequence
  derived and/or modified protein sequence (wt) from glycoprotein__RABV__FJ465394.1
MFSRSLLFVSLLGFPLCFGKFPIYTIPDKLGPWSPIDIHHLSCPNNLVVEDEGCTNLSGFSYMELKVGYISAIKVNGFTCTGVVTEAETYTNFVGYVTTTFRRKHLRPTPDACRSAYNWKMAGDPRYEESLHNPYPDYHWLRTVKTTKESLVIISPSVADLDPYDKSLHSRVFPNGKCSGLTVSSTYCSTNHDYTIWMPENPRLGTSCDIFTNSKGKRASRGNKTCGFVDERGLYKSLKGACKLKLCGVLGLRLIDGTWVAMHTSDETKWCPPDQLVNLHDFRSDEIEHLVVEELVKKREECLDALESIMTTKSVSFRRLSHLRKLVPGFGKAYTIFNKTLMEADAHYKSIRTWDEIVPSKGCLRVGGRCHPHVNGVFFNGIILGSDGHVLIPEMQSSLLQQHVELLESSVVPLMHPLADPSTVFKDGNEAEDFVEVHLPDVHKQVSGVDLGLPDWGKYILVSAGALIALMLIIFLMTCCRRVHRRESKQHSLRGTERKVSVTSQNGKAISSWESYKNGSETRM

SEQ ID NO: 30983 - protein, 524 aa, Artificial Sequence
  derived and/or modified protein sequence (wt) from glycoprotein__RABV__FJ465395.1
MSSQSLLFVSLLGFSLCFGKFPIYTIPDKLGPWSPIDIHHLSCPNNLVVEDEGCTNLSGFSYMELKVGYISAIKVNGFTCTGVVTEAETYTNFVGYVTTTFRRKHFRPTPDACRSAYNWKMAGDPRYEESLHNPYPDYHWLRTVKTTKESLVIISPSVADLDPYDKSLHSRVFPNGKCSGLTVFSTYCSTNHDYTIWMPENPRLGTSCDIFTNSRGKRASRGNKTCGFVDERGLYKSLKGACKLKLCGVLGLRLIDGTWVSMHTSDETKWCPPDQLVNLHDFRSDEIEHLVVEELVKKREECLDALESIMTTKSVSFRRLSHLRKLVPGFGKAYTIFNKTLMEADAHYKSIRTWDEIVPSKGCLRVGGRCHPHVNGVFFNGIILGSDGHVLIPEMQSSLLQQHVELLESSVVPLMHPLADPSTVFKDGNEAEDFVEVHLPDVHKQVSGVDLGLPDWGRYLLVSAGALITLMLIIFLMTCCRRVHRRESKQHSLRGTERKVSVTSQSGKAISSWESYKNGSETRM

SEQ ID NO: 30984 - protein, 524 aa, Artificial Sequence
  derived and/or modified protein sequence (wt) from glycoprotein__RABV__FJ465396.1
MLSQSLLLVSLLGFPLCFGKFPIYTIPDKLGPWSPIDIHHLSCPNNLVVEDEGCTNLSGFSYMELKVGYISAIKVNGFTCTGVVTEAETYTNFVGYVTTTFRRKHLRPTPDACRSAYNWKMAGDPRYEESLHNPYPDYHWLRTVKTTKESLVIISPSVADLDPYDKSLHSRVFPNGKCSGLTVSSTYCSTNHDYTIWMPENPRLGTSCDIFTNSRGKRASRGNKTCGFVDERGLYKSLKGACKLKLCGVLGLRLIDGTWVAMHTSDETKWCPPDQLVNLHDFRSDEIEHLVVEELVKKREECLDALESIMTTKSVSFRRLSHLRKLVPGFGKAYTIFNKTLMEADAHYKSIRTWDEIVPSKGCLRVGGRCHPHVNGVFFNGIILGSDGHVLIPEMQSSLLQQHVELLESSVVPLMHPLADPSTVFKDGNEAEDFVEVHLPDVHKQVSGVDLGLPDWGKYILVSAGALIALMLIIFLMTCCRRVHRRESKQHSLRGTERKVSVISQNGKAISSWESYKNGSDTRM

SEQ ID NO: 30985 - protein, 524 aa, Artificial Sequence
  derived and/or modified protein sequence (wt) from glycoprotein__RABV__FJ465397.1
MVSQSLLFVPLLGFSLCFGKFPIYTIPDKLGPWSPIDIHHLSCPNNLVVEDEGCTNLSGFSYMELKVGYISAIKVNGFTCTGVVTEAETYTNFVGYVTTTFRRKHFRPIPDACRAAYHWKMAGDPRYEESLHNPYPDYHWLRTVKTTKESLVIISPSVADLDPYDKSLHSRVFPNGKCSGLTVSSTYCSTNHDYTIWMPENPRLGTSCDIFTNSRGKRASRGNKTCGFVDERGLYKSLKGACKLKLCGVLGLRLIDGTWVAMQTSDETKWCPPDQLVNLHDFRSDEIEHLVVEELVKKREECLDALESIMTTKSVSFRRLSHLRKLVPGFGKAYTIFNKTLMEADAHYKSIRTWDEIVPSKGCLRVGGRCHPHINGVFFNGIILGSDGHVLIPEMQSSLLQQHMELLESSVVPLMHPLADPSTVFKDGNEAEDFVEVHLPDVHKQVSEIDLGLPNWGKYILVSAGALIALMLTILLITCCRKVHRPKPKQHRLRGTERKVAVTSQSGKAISSWESYKNGGETRM

SEQ ID NO: 30986 - protein, 524 aa, Artificial Sequence
  derived and/or modified protein sequence (wt) from glycoprotein__RABV__FJ465398.1
MSSQSLLFVSLLGFSLCFGKFPIYTIPDKLGPWSPIDIHHLSCPNNLVVEDEGCTNLSGFSYMELKVGYISAIKVNGFTCTGVVTEAETYTNFVGYVTTTFRRKHFRPTPDACRSAYNWKMAGDPRYEESLHNPYPDYHWLRTVKTTKESLVIISPSVADLDPYDKSLHSRVFPNGKCSGLTVSSTYCSTNHDYTIWMPENPRLGTSCDIFTNSRGKRASRGNKTCGFVDERGLYKSLKGACKLKLCGVLGLRLIDGTWVAMHTSDETKWCPPDQLVNLHDFRSDEIEHLVVEELVKKREECLDALESIMTTKSVSFRRLSHLRKLVPGFGKAYTIFNKTLMEADAHYKSIRTWDEIVPSKGCLRVGGRCHPHVNGVFFNGIILGSDGHVLIPEMQSSLLQQHVELLESSVVPLMHPLADPSTVFKDGNEAEDFVEVHLPDVHKQVSGVDLGLPDWGRYILVSAGALITLMLIIFLMTCCRRVHLRESKRHSLRGTERKVSVTSQSGKAISSWESYKNGSETRM

SEQ ID NO: 30987 - protein, 524 aa, Artificial Sequence
  derived and/or modified protein sequence (wt) from glycoprotein__RABV__FJ465399.1
MSSQSLLFVSLLGFSLCFGKFPIYTIPDKLGPWSPIDIHHLSCPNNLVVEDEGCTNLSGFSYMELKVGYISAIKVNGFTCTGVVTEAETYTNFVGYVTTTFRRKHFRPTPDACRSAYNWKMAGDPRYEESLHNPYPDYHWLRTVKTTKESLVIISPSVADLDPYDKSLHSRVFPNGKCSGLTVFSTYCSTNHDYTIWMPENPRLGTSCDIFTNSRGKRASRGNKTCGFVDERGWYKSLKGACKLKLCGVLGLRLIDGTWVAMHTSDETKWCPPDQLVNLHDFRSDEIEHLVVEELVKKREECLDALESIMTTKSVSFRRLSHLRKLVPGFGKAYTIFNKTLMEADAHYKSIRTWDEIVPSKGCLRVGGRCHPHVNGVFFNGIILGSDGHVLIPEMQSSLLQQHVELLESSVVPLMHPLADPSAVFKDGNEAEDFVEVHLPDVHKQVSGVDLGLPDWGRYILVSAGALITLMLIIFLMTCCRRVHRRESKQHSLRGTERKVSVTSQSGKAISSWESYKNGSETRM

SEQ ID NO: 30988 - protein, 524 aa, Artificial Sequence
  derived and/or modified protein sequence (wt) from glycoprotein__RABV__FJ465400.1
MFPQTLLFVPLLGLSLCFGKFPIYTIPDKLGPWSPIDIHHLSCPNNLVVEDEGCTNLSGFSYMELKVGYISAIKVNGFTCTGVVTEAETYTNFVGYVTTTFRRKHFRPTPDACRAAYNWKMAGDPRYEESLHNPYPDYHWLRTVKTTKESLVIISPSVADLDPYDKSLHSRVFLNGKCSGLTVSSTYCSTNHDYSIWMPENPRLGTSCDIFVNSRGKRASKGNKTCGFVDERGLYKSLKGACKLKLCGVLGLRLIDGTWVAMQTSEEPKWCPPDQLVNLHNFRSDEIEHLVVEELVKKREECLDALESIMTTKSVSFRRLSHLRKLVPGFGKAYTIFNKTLMEADAHYKSIRTWDEIIPSKGCLRVGGRCHPHVNGVFFNGIILGSDGHVLIPEMQSSLLQQHVELLESSVIPLMHPLADPSTAFKDGDEAEDFVEIHLPDVHKQISGVDLGLPNWGKYILVSAGALIALMLTIFLITCCRGFHQPKSTQHSLGGTERKVSVTPLSGKVISSWESYKKGGETRL

SEQ ID NO: 30989 - protein, 524 aa, Artificial Sequence
  derived and/or modified protein sequence (wt) from glycoprotein__RABV__FJ465401.1
MSSQSLLFASLLGFSLCFGKFPIYTIPDKLGPWSPIDIHHLSCPNNLVVEDEGCTNLSGFSYMELKVGYISAIKVNGFTCTGVVTEAETYTNFVGYVTTTFRRKHFRPTPDACRSAYNWKMAGDPRYEESLHNPYPDYHWLRTVKTTKESLVIISPSVADLDPYDKSLHSRVFPNGKCSGLTVSSTYCSTNHDYTIWMPENPRLGTSCDIFTNSRGKRASRGNKTCGFVDERGLYKSLKGACKLKLCGVLGLRLIDGTWVAMHTSDETKWCPPDQLVNLHDFRSDEIEHLVVEELVKKREECLDALESIMTTKSVSFRRLSHLRKLVPGFGKAYTIFNKTLMEADAHYKSIRTWDEIVPSKGCLRVGGRCHPHVNGVFFNGIILGSDGHVLIPEMQSSLLQQHVELLESSVVPLMHPLADPSTVFKDGNEAEDFVEVHLPDVHKQVSGVDLGLPDWGRYLLVSAGALITLMLIIFLMTCCRRVHRRESKQHSLRGTERKVSVTSQSGKAISSWESYKNGSETRM

SEQ ID NO: 30990 - protein, 524 aa, Artificial Sequence
  derived and/or modified protein sequence (wt) from glycoprotein__RABV__FJ465402.1
MFPQALLFVPLLGFSLCFGKFPIYTIPDKLGPWSPIDIHHLSCPNNLVVEDEGCTNLSGFSYMELKVGYISAIKVNGFTCTGVVTEAETYTNFVGYVTTTFRRKHFRPTSDACRAAYNWKMAGDPRYEESLHNPYPDYHWLRTVKTTKESLVIISPSVADLDPYDKSLHSRVFPNGRCSGLTVSSTYCSTNHDYTIWMPENPRLGTSCDIFTNSRGKRASKGNRTCGFVDERGLYKSLKGACKLKLCGVLGLRLMDGTWVAMQTSEETKWCPPDQLVNLHDFRSDEIEHLVVEELVKKREECLDALESIMTTKSVSFRRLSHLRKLVPGFGKAYTIFNKTLMEADAHYKSIRTWNEIIPSKGCLRVGGRCHPHVNGVFFNGIILGSDGHVLIPEMQSSLLQQHVELLESSVVPLMHPLADPSTVFKDGGEAEDFVEVHLPDVHKQVSGVDLGLPSWGKYILVGSGALIALVLIIFLMTCCRRVSRPESTQHSLRGTGMKVSITSQSGKAIPSWESYKSKNETKM

SEQ ID NO: 30991 - protein, 524 aa, Artificial Sequence
  derived and/or modified protein sequence (wt) from glycoprotein__RABV__FJ465403.1
MFPQTLLFVPLLGLSLCFGKFPIYTIPDKLGPWSPIDIHHLSCPNNLVVEDEGCTNLSGFSYMELKVGYISAIKVNGFTCTGVVTEAETYTNFVGYVTTTFRRKHFRPTPDACRAAYNWKVAGDPRYEESLHNPYPDYHWLRTVKTTKESLVIISPSVADLDPYDKSLHSRVFLNGKCSGLTVSSTYCSTNHDYTIWMPENPRLGTSCDILSNSRGKRASKGNKTCGFVDERGLYKSLKGACKLKLCGVLGLRLIDGTWVAMQTSEEPKWCPPDQLVNLHNFRSDEIEHLVVEELVKKREECLDALESIMTTKSVSFRRLSHLRKLVPGFGKAYTIFNKTLMEADAHYKSIRTWDEIIPSKGCLRVGGRCHPHVNGVFFNGIILGSDGHVLIPEMQSSLLQQHVELLESSVIPLMHPLADPSTVFKDGDEAEDFVEIHLPDVHKQISGVDLGLPNWGKYILMSAGALITLMLTIFLITCCRGFRRPKSTQHSLGGTGMKVSVTPQSGKVISSWESYKKGGETRL

SEQ ID NO: 30992 - protein, 524 aa, Artificial Sequence
  derived and/or modified protein sequence (wt) from glycoprotein__RABV__FJ465404.1
MFPQALLFVPLLGFSLCFGKFPIYTIPDKLGPWSPIDIHHLSCPNNLVVEDEGCTNLSGFSYMELKVGYISAIKVNGFTCTGVVTEAETYTNFVGYVTTTFRRKHFRPTSDACRAAYNWKMAGDPRYEESLHNPYPDYHWLRTVKTTKESLVIISPSVADLDPYDKSLHSRVFPNGRCSGLTVSSTFCSTNHDYTIWMPENPRLGTSCDIFTNSRGKRASKGNRTCGFVDERGLYKSLKGACKLKLCGVLGLRLMDGTWVAMQTSEETKWCPPDQLVNLHDFRSDEIEHLVVEELVKKREECLDALESIMTTKSVSFRRLSHLRKLVPGFGKAYTIFNKTLMEADAHYKSIRTWNEIIPSKGCLRVGGRCHPHVNGVFFNGIILGSDGHVLIPEMQSSLLQQHVELLESSVVPLMHPLADPSTVFKNGGEAEDFVEVHLPDVHKQVSGVDLGLPSWGKYILVSSGALIALVLVIFLMTCCRKVNRPESTQHSLRGTGMKVSITSQSGKAIPSWESYKSENETKM

SEQ ID NO: 30993 - protein, 524 aa, Artificial Sequence
  derived and/or modified protein sequence (wt) from glycoprotein__RABV__FJ465405.1
MFSQSLLLVSLLGFPLSFGKFPIYTIPDKLGPWSPIDIHHLSCPNNLVVEDEGCTNLSGFSYMELKVGYISAIKVNGFTCTGVVTEAETYTNFVGYVTTTFRRKHLRPTPDACRSAYNWKVAGDPRYEESLHNPYPDYHWLRTVKTTKESLVIISPSVADLDPYDKSLHSRVFPNGKCSGLTVSSTYCSTNHDYTIWMPENPRLGTSCDIFTNSRGKRASKGNKTCGFVDERGLYKSLKGACKLKLCGVLGLRLIDGTWVAMHTSDETKWCPPDQLVNLHDFRSDEIEHLVVEELVKKREECLDALESIMTTKSVSFRRLSHLRKLVPGFGKAYTIFNKTLMEADAHYKSIRTWDEIIPSKGCLRVGGRCHPHVNGVFFNGIILGSDGHVLIPEMQSSLLQQHIELLESSVVPLMHPLADPSTVFKDGDEAEDFVEVHLPDVHKQVSGVDLGLPDWGKYILVSAGALIALMLIIFLMTCCRRVHRRESKQHSFRGTERKVSVTSQNGKAISSWESYKNGSDTRM

SEQ ID NO: 30994 - protein, 524 aa, Artificial Sequence
  derived and/or modified protein sequence (wt) from glycoprotein__RABV__FJ465406.1
MFSQSLLLVSLLGFPLCFGKFPIYTIPDKLGPWSPIDIHHLSCPNNLVVEDEGCTNLSGFSYMELKVGYISAIKVNGFTCTGVVTEAETYTNFVGYVTTTFRRKHLRPTPDACRSAYNWKMAGDPRYEESLHNPYPDYHWLRTVKTTKESLVIISPSVADLDPYDKSLHSRVFPNGKCSGLTVSSTYCSTNHDYTIWMPENPRLGTSCDIFTNSRGKRASRGNKTCGFVDERGLYKSLKGACKLKLCGVLGLRLIDGTWVAMHTSDETKWCPPDQLVNLHDFRSDEIEHLVVEELVKKREECLDALESIMTTKSVSFRRLSHLRKLVPGFGKAYTIFNKTLMEADAHYKSIRTWDEIVPSKGCLRVGGRCHPHVNGVFFNGIILGSDGHVLIPEMQSSLLQQHVELLESSVVPLMHPLADPSTVFKEGNEAEDFVEVHLPDVHKQVSGVDLGLPDWGKYILVSAGALIALMLIILLMTCCRRVHRRESKQHSLRGTERKVSVTSQNGKAISSWESYKNRSDTRM

SEQ ID NO: 30995 - protein, 524 aa, Artificial Sequence
  derived and/or modified protein sequence (wt) from glycoprotein__RABV__FJ465407.1
MFPQALLFVPLLGFSLCFGKFPIYTIPDKLGPWSPIDIHHLSCPNNLVVEDEGCTNLSGFSYMELKVGYISAIKVNGFTCTGVVTEAETYTNFVGYVTTTFRRKHFRPTSDACRAAYNWKMAGDPRYEESLHNPYPDYHWLRTVKTTKESLVIISPSVADLDPYDKSLHSRVFPNGRCSGLTVSSTFCSTNHDYTIWMPENPRLGTSCDIFTNSRGKRASKGNRTCGFVDERGLYKSLKGACKLKLCGVLGLRLMDGTWVAMQTSEETKWCPPDQLVNLHDFRSDEIEHLVVEELVKKREECLDALESIMTTKSVSFRRLSHLRKLVPGFGKAYTIFNKTLMEADAHYKSIRTWNEIIPSKGCLRVGGRCHPHVNGVFFNGIILGSDGHVLIPEMQSSLLQQHVELLESSVVPLMHPLADPSTVFKDGGEAEDFVEVHLPDVHKQVSGVDLGLPSWGKYILVGSGALIALVLVIFLMTCCRKVNRPESTQHSLRGTGMKVSITSQSGKAIPSWESYKSENETKM

SEQ ID NO: 30996 - protein, 524 aa, Artificial Sequence
  derived and/or modified protein sequence (wt) from glycoprotein__RABV__FJ465409.1
MFPQTLLFVPLLGLSLCFGKFPIYTIPDKLGPWSPIDIHHLSCPNNLVVEDEGCTNLSGFSYMELKVGYISAIKVNGFTCTGVVTEAETYTNFVGYVTTTFRRKHFRPTPDACRAAYNWKMAGDPRYEESLHNPYPDYHWLRTVKTTKESLVIISPSVADLDPYDKSLHSRVFLNGKCSGLTVSSTYCSTNHDYSIWMPENPRLGTSCDIFVTSRGKRASKGSKTCGFVDERGLYKSLKGACKLKLCGVLGLRLIDGTWVAMQTSEEPKWCPPDQLVNLHNFRSDEIEHLVVEELVKKREECLDALESIMTTKSVSFRRLSHLRKLVPGFGKAYTIFNKTLMEADAHYKSIRTWDEIIPSKGCLRVGGRCHPHVNGVFFNGIILGSDGHVLIPEMQSSLLQQHVELLESSVIPLMHPLADPSTAFKDGDEAEDFVEIHLPDVHKQISGVDLGLPNWGKYILVSAGALIALMLTIFLITCCRGFHQPKSTQHSLGGTGRKVSVTPLSGKVISSWESYKKGGETRL

SEQ ID NO: 30997 - protein, 524 aa, Artificial Sequence
  derived and/or modified protein sequence (wt) from glycoprotein__RABV__FJ602447.1
MIPQVFLFVPLLVFSSCFGKFPIYTIPDKLGPWSPIDIHHLSCPNNLVVEDEGCTNLSGFSYMELKVGYISAIKVNGFTCTGVVTEAETYTNFVGYVTTTFKRKHFRPMPDACRAAYNWKMAGDPRYEESLHNPYPDYHWLRTVKTTKESLVIISPSVADLDPYDKSLHSRVFPGGKCSGITVSSTCCSTNHDYTIWMPENPRLGTSCDIFTNSRGKRASKGGKTCGFVDERGLYKSLKGACKLKLCGVLGLRLMDGTWVAIQTSDEIKWCSPDQLVNLHDFHSDEIEHLVVEELVKKREECLDALETIMTTKSVSFRRLSHLRKLVPGFGKAYTIFNKTLMEADAHYKSIRTWNEIIPSKGCLRVGGRCHPHVNGVFFNGIILGPDGHVLIPEMQSSLLHQHMELLESSVIPLMHPLADPSTVFKDGDEAEDFVEVHLPDVHKQISGVDLGLPNWGKYVLISAGALTALMLTIFLMTCCRKTNRAESIQHSPGETGRKVSVTSHNGRVISSWESYKSGSETKL

SEQ ID NO: 30998 - protein, 524 aa, Artificial Sequence; identical to SEQ ID NO: 30845
  derived and/or modified protein sequence (wt) from glycoprotein__RABV__FJ602448.1

SEQ ID NO: 30999 - protein, 524 aa, Artificial Sequence
  derived and/or modified protein sequence (wt) from glycoprotein__RABV__FJ602449.1
MIPQVLLFVPLLVFSSCFGKFPIYTIPDKLGPWSPIDIHHLSCPNNLVVEDEGCTNLSGFSYMELKVGYISAIKVNGFTCTGVVTEAETYTNFVGYVTTTFKRKHFRPMPDACRAAYNWKMAGDPRYEESLHNPYPDYHWLRTVKTTKESLVIISPSVADLDPYDKSLHSRVFPGGKCSGITVSSTCCSTNHDYTIWMPENPRLGTSCDIFTNSRGKRASKGGKTCGFVDERGLYKSLKGACKLKLCGVLGLRLMDGTWVAIQTSDEIKWCSPDQLVNLHDFHSDEIEHLVVEELVKKREECLDALETIMTTKSVSFRRLSHLRKLVPGFGKAYTIFNKTLMEADAHYKSIRTWNEIIPSKGCLRVGGRCHPHVNGVFFNGIILGPDGHVLIPEMQSSLLHQHMELLESSVIPLMHPLADPSTVFKDGDDAEDFVEVHLPDVHKQISGVDLGLPNWGKYVMISAGALTALMLMIFLMTCCRKTNRAESIQHSPGETGRKVSVTSHNGRVISSWESYKSGGETKL

SEQ ID NO: 31000 - protein, 524 aa, Artificial Sequence
  derived and/or modified protein sequence (wt) from glycoprotein__RABV__FJ602450.1
MIPQVLLFVPLLIFSSCLGKFPIYTIPDKLGPWSPIDIHHLSCPNNLVVEDEGCTNLSGFSYMELKVGYISAIKVNGFTCTGVVTEAETYTNFVGYVTTTFKRKHFRPMPDACRAAYNWKMAGDPRYEESLHNPYPDYHWLRTVKTSKESLVIISPSVADLDPYDKSLHSRVFPGGKCSGITVSSTCCSTNHDYTIWMPENPRLGTSCDIFTNSRGKRASKGGKTCGFVDERGLYKSLKGACKLKLCGVLGLRLMDGTWVAIQTSDEIKWCSPDQLVNLHDFHSDEIEHLVVEELVKKREECLDALETIMTTKSVSFRRLSHLRKLVPGFGKAYTIFNKTLMEADAHYKSIRTWNEIIPSKGCLRVGGRCHPHVNGVFFNGIILGPDGHVLIPEMQSSLLHQHMELLESSVIPLMHPLADPSTVFKDGDEAEDFVEVHLPDVHKQISGVDLGLPNWGKYVLISAGALTASMLMIFLMTCCRKTNRAESIQHSPGETGRKVSVTSHNGRVISSWESYKSGGETKL

SEQ ID NO: 31001 - protein, 524 aa, Artificial Sequence; identical to SEQ ID NO: 30843
  derived and/or modified protein sequence (wt) from glycoprotein__RABV__FJ602451.1

SEQ ID NO: 31002 - protein, 524 aa, Artificial Sequence; identical to SEQ ID NO: 30527
  derived and/or modified protein sequence (wt) from glycoprotein__RABV__FJ602452.1

SEQ ID NO: 31003 - protein, 524 aa, Artificial Sequence; identical to SEQ ID NO: 30827
  derived and/or modified protein sequence (wt) from glycoprotein__RABV__FJ602453.1

SEQ ID NO: 31004 - protein, 524 aa, Artificial Sequence; identical to SEQ ID NO: 30843
  derived and/or modified protein sequence (wt) from glycoprotein__RABV__FJ602454.1

SEQ ID NO: 31005 - protein, 524 aa, Artificial Sequence; identical to SEQ ID NO: 30843
  derived and/or modified protein sequence (wt) from glycoprotein__RABV__FJ602455.1

SEQ ID NO: 31006 - protein, 524 aa, Artificial Sequence; identical to SEQ ID NO: 30843
  derived and/or modified protein sequence (wt) from glycoprotein__RABV__FJ602456.1

SEQ ID NO: 31007 - protein, 524 aa, Artificial Sequence; identical to SEQ ID NO: 30845
  derived and/or modified protein sequence (wt) from glycoprotein__RABV__FJ602457.1

SEQ ID NO: 31008 - protein, 524 aa, Artificial Sequence; identical to SEQ ID NO: 30845
  derived and/or modified protein sequence (wt) from glycoprotein__RABV__FJ602458.1

SEQ ID NO: 31009 - protein, 524 aa, Artificial Sequence
  derived and/or modified protein sequence (wt) from glycoprotein__RABV__FJ602459.1
MIPQVLLFVPLLVFSSCLGKFPIYTIPDKLGPWSPIDIHHLSCPNNLVVEDEGCTNLSGFSYMELKVGYISAIKVNGFTCTGVVTEAETYTNFVGYVTTTFKRKHFRPMLDACRAAYNWKMAGDPRYEESLHNPYPDYHWLRTVKTSKESLVIISPSVADLDPYDKSLHSRVFPGGKCSGITVSSTCCSTNHDYTIWMPENPRLGTSCDIFTNSRGKRASKGGKTCGFVDERGLYKSLKGACKLKLCGVLGLRLMDGTWVAIQTSDEIKWCSPDQLVNLHDFHSDEIEHLVVEELVKKREECLDALETIMTTKSVSFRRLSHLRKLVPGFGKAYTIFNKTLMEADAHYKSIRTWNEIIPSKGCLRVGGRCHPHVNGVFFNGIILGPDGHVLIPEMQSSLLHQHMELLESSVIPLMHPLADPSTVFKDGDEAEDFVEVHLPDVHKQISGVDLGLPNWGKYVLISAGALTASMLMIFLMTCCRKTNRAESIQHSPGETGRKVSVTSHNGRVISSWESYKSGGETKL

SEQ ID NO: 31010 - protein, 524 aa, Artificial Sequence
  derived and/or modified protein sequence (wt) from glycoprotein__RABV__FJ712193.1
MIPQVLLFVPLLVFSSCFGKFPIYTIPDKLGPWSPIDIHHLSCPNNLVVEDEGCTNLSGFSYMELKVGYISAIKVNGFTCTGVVTEAETYTNFVGYVTTTFKRKHFRPMPDACRAAYNWKMAGDPRYEESLHNPYPDYHWLRTVKTTKESLVIISPSVADLDPYDKSLHSRVFPGGKCSGITVSSTCCSTNHDYTIWMPENPRLGTSCDIFTNSRGKRASKGGKTCGFVDERGLYKSLKGACKLKLCGVLGLRLMDGTWVAIQTSDEIKWCSPDQLVNLHDFHSDEIEHLVVEELVKKREECLDALETIMTTKSVSFRRLSHLRKLVPGFGKAYTIFNKTLMEADAHYKSIRTWNEIIPSKGCLRVGGRCHPHVNGVFFNGIILGPDGHVLIPEMQSSLLHQHMELLESSVIPLMHPLADPSTVFKDGDEAEDFVEVHLPDVHKQISGIDLGLPNWGKYVLISAGALTALMLTIFLMTCCRKTNRAESIQHSPGETGRKVSVTSHNGRVISSWESYKSGSETKL

SEQ ID NO: 31011 - protein, 524 aa, Artificial Sequence; identical to SEQ ID NO: 30845
  derived and/or modified protein sequence (wt) from glycoprotein__RABV__FJ712194.1

SEQ ID NO: 31012 - protein, 524 aa, Artificial Sequence
  derived and/or modified protein sequence (wt) from glycoprotein__RABV__FJ712195.1
MIPQALLFVPLLVVPLCFGKFPIYTIPDKLGPWSPIDIHHLSCPNNLVVEDEGCTNLSGFSYMELKVGYISAIKVNGFTCTGVVTEAETYTNFVGYVTTTFKRKHFRPTPDACRSAYNWKMAGDPRYEESLHNPYPDYHWLRTVKTTKESFVIISPSVADLDPYDKSLHSRVFPRGKCSGITVSSTYCSTNHDYTIWMPENPRLGTSCDIFTNSRGKRAFKGSKTCGFVDERGLYKSLKGACKLKLCGVLGLRLMDGTWVAIQTSDETKWCPPDQLVNLHDFHSDEIEHLVVEELVKKREECLDALESIMTTKSVSFRRLSHLRKLVPGFGKAYTIFNKTLMEADAHYKSVRTWNEIIPSKGCLRVGGRCHPHVNGVFFNGIILGPDGHVLIPEMQSSLLQQHMELLESSVIPLMHPLADPSTVFKNGDEAEDFVEVHLPDVHKQVSGVDLGLPSWGKYVLMSAGILTALMLMIFLMTCCRRTNRPESIQHSLGETGRKVSVTSQSGRVISSWESYKSGGETKL

SEQ ID NO: 31013 - protein, 524 aa, Artificial Sequence
  derived and/or modified protein sequence (wt) from glycoprotein__RABV__FJ712196.1
MIPQALLFVPLLVVPLCFGKFPIYTIPDKLGPWSPIDIHHLSCPNNLVVEDEGCTNLSGFSYMELKVGYISAIKVNGFTCTGVVTEAETYTNFVGYVTTTFKRKHFRPTPDACRSAYNWKMAGDPRYEESLHNPYPDYHWLRTVKTTKESFVIISPSVADLDPYDKSLHSRVFPRGKCSGITVSSTYCSTNHDYTIWMPENPRLGTSCDIFTNSRGKRAFKGSKTCGFVDERGLYKSLKGACKLKLCGVLGLRLMDGTWVAIQTSRETKWRPPDQLVNLHDFHSDEIEHLVVEELVKKREECLDALESIMTTKSVSFRRLSHLRKLVPGFGKAYTIFNKTLMEADAHYKSVRTWNEIIPSKGCLRVGGRCHPHVNGVFFNGIILGPDGHVLIPEMQSSLLQQHMELLESSVIPLMHPLADPSTVFKNGDEAEDFVEVHLPDVHKQVSGVDLGLPSWGKYVLMSAGILTALMLMIFLMTCCRRTNRPESIQHSLGETGRKVSVTSQSGRVISSWESYKSGGETKL

SEQ ID NO: 31014 - protein, 524 aa, Artificial Sequence
  derived and/or modified protein sequence (wt) from glycoprotein__RABV__FJ719749.1
MIPQALLFVPLLVVPLCFGKFPIYTIPDKLGPWSSIDIHHLSCPNNLVVEDEGCTNLSGFSYMELKVGYISAIKVNGFTCTGVVTEAETYTNFVGYVTTTFKRKHFRPTPDACRSAYNWKMAGDPRYEESLHNPYPDYHWLRTVKTTKESFVIISPSVADLDPYDKSLHSRVFPRGKCSGITVSSTYCPTNHDYTIWMPENPRLGTSCDIFTNSRGKRALKGSKTCGFVDERGLYKSLKGACKLKLCGVPGLRLMDGTWVAIQTSDETKWCPPDQLVNLHDFHSDEIEHLVVEELVKKREECLDALESIMTTKSVSFRRLSHLRKLVPGFGKAYTIFNKTLMEADAHYKSVRTWNEIIPSKGCLRVGGRCHPHVNGVFFNGIILGPDGHVLIPEMQSSLLQQHMELLESSVIPLMHPLADPSTVFKNGDEVEDFVEVHLPDVHKQVSGVDFGLPSWGKYVLMSAGILTALMLVIFLMTCCRRTNRSESIQHSLGETGRKVSVTSQSGRVISSWESYKSGGETKL

SEQ ID NO: 31015 - protein, 524 aa, Artificial Sequence
  derived and/or modified protein sequence (wt) from glycoprotein__RABV__FJ719752.1
MIPQALLFVPLLVVPLCFGKFPIYTIPDKLGPWSPIDIHHLSCPNNLVVEDEGCTNLSGFSYMELKVGYISAIKVNGFTCTGVVTEAETYTNFVGYVTTTFKRKHFRPTPDACRSAYNWKMAGDPRYEESLHNPYPDYHWLRTVKTTKESFVIISPSVADLDPYDKSLHSRVFPRGKCSGITVSSTYCPTNHDYTIWMPENPRLGTSCDIFTNSRGKRAFKGSKTCGFVDERGLYKSLKGACKLKLCGVLGLRLMDGTWVAIQTSDETKWCPPDQLVNLHDFHSDEIEHLVVEELVKKREECLDALESIMTTKSVSFRRLSHLRKLVPGFGKAYTIFNKTLMEADAHYKSVRTWNEIIPSKGCLRVGGRCHPHVNGVFFNGIILGPDGHVLIPEMQSSLLQQHMELLESSVIPLMHPLADPSTVFKNGDEAEDFVEVHLPDVHKQVSGVDLGLPSWGKYVLMSAGILTALMLMIFLMTCCRRTNRPESIQHSLGETGRKVSVTSQSGRVISSWESYKSGGETKL

SEQ ID NO: 31016 - protein, 524 aa, Artificial Sequence; identical to SEQ ID NO: 31012
  derived and/or modified protein sequence (wt) from glycoprotein__RABV__FJ719756.1

SEQ ID NO: 31017 - protein, 524 aa, Artificial Sequence
  derived and/or modified protein sequence (wt) from glycoprotein__RABV__FJ825129.1
MIPQVLLFVPLLVFSSCFGKFPIYTIPDKLGPWSPIDIHHLSCPNNLVVEDEGCTNLSGFSYMELKVGYISAIKVNGFTCTGVVTEAETYTNFVGYVTTTFKRKHFRPMPDACRAAYNWKMAGDPRYEESLHNPYPDYHWLRTVKTTKESLVIISPSVADLDPYDKSLHSRVFPGGKCSRITVSSTCCSTNHDYTIWMPENPRLRTSCDIFTNSRGKRASKRGKTCGFVDERGLYKSLKGACKLKLCGVLGLRLMDGTWVAIQTSDEIKWCSPDQLVNLHDFHSDEIEHLVVEELVKKREECLDALETIMTTKSVSFRRLSHLRKLVPGFGKAYTIFNKTLMEADAHYKSIRTWNEIIPSKGCLRVGGRCHPHVNGVFFNGIILGPDGHVLIPEMQSSLLHQHMELLESSVIPLMHPLADPSTVFKDGDEAEDFVEVHLPDVHKQISGIDLGLPNWGKYVLISAGALTALMLTIFLMTCCRKTNRAESIQHSPGETGRKVSVTSHNGRVISSWESYKSGSETKL

SEQ ID NO: 31018 - protein, 524 aa, Artificial Sequence; identical to SEQ ID NO: 30845
  derived and/or modified protein sequence (wt) from glycoprotein__RABV__FJ825130.1

SEQ ID NO: 31019 - protein, 524 aa, Artificial Sequence
  derived and/or modified protein sequence (wt) from glycoprotein__RABV__FJ825131.1
MIPQVLLFVPLLVFSSCFGKFPIYTIPDKLGPWSPIDIHHLSCPNNLVVEDEGCTNLSGFSYMELKVGYISAIKVNGFTCTGVVTEAETYTNFVGYVTTTFKRKHFRPMPDACRAAYNWKMAGDPRYEESLHNPYPDYHWLRTVKTTKESLVIISPSVADLDPYDKSLHSRVFPGGKCSGITVSSTCCSTNHDYTIWMPENPRLGTSCDIFTNSRGKRASKGGKTCGFVHERGLYKSLKGACKLKLCGVLGLRLMDGTWVAIQTSDEIKWCSPDQLVNLHDFHSDEIEHLVVEELVKKREECLDALETIMTTKSVSFRRLSHLRKLVPGFGKAYTIFNKTLMEADAHYKSIRTWNEIIPSKGCLRVGGRCHPHVNGVFFNGIILGPDGHVLIPEMQSSLLHQHMELLESSVIPLMHPLADPSTVFKDGDEAEDFVEVHLPDVHKQISGVDLGLPNWGKYVLISAGALTALMLTIFLMTCCRKTNRAESIQHSPGETGRKVSVTSHNGRVISSWESYKSGSETKL

SEQ ID NO: 31020 - protein, 524 aa, Artificial Sequence
  derived and/or modified protein sequence (wt) from glycoprotein__RABV__FJ825132.1
MIPQVLLFVPLLVFSSCFGKFPIYTIPDKLGPWSPIDIHHLSCPNNLVVEDEGCTNLSGFSYMELKVGYISAIKVNGFTCTGVVTEAETYTNFVGYVTTTFKRKHFRPMPDACRAAYNWKMAGDPRYEESLHNPYPDYHWLRTVKTTKESLVIISPSVADLDPYDKSLHSRVFPGGKCSGITVSSTCCSTNHDYTIWMPENPRLGTSCDIFTNSRGKRASKGGKTCGFVDERGLYKSLRGACKLKLCGVLGLRLMDGTWVAIQTSDEIKWCSPDQLVNLHDFHSDEIEHLVVEELVKKREECLDALETIMTTKSVSFRRLSHLRKLVPGFGKAYTIFNKTLMEADAHYKSIRTWNEIIPSKGCLRVGGRCHPHVNGVFFNGIILGPDGHVLIPEMQSSLLHQHMELLESSVIPLMHPLADPSTVFKDGDEAEDFVEVHLPDVHKQISGVDLGLPNWGKYVLISAGALTALMLMIFLMTCCRKTNRAESIQHSPGETGWKVSVTSHNGRVISSWESYKSGSETKL

SEQ ID NO: 31021 - protein, 524 aa, Artificial Sequence
  derived and/or modified protein sequence (wt) from glycoprotein__RABV__FJ825133.1
MIPQVLLFVPLLVFSSCFGKFPIYTIPDKLGPWSPIDIHHLSCPNNLVVEDEGCTNLSGFSYMELKVGYISAIKVNGFTCTGVVTEAETYTNFVGYVTTTFKRKHFRPMPDACRAAYNWKMAGDPRYEESLHNPYPDYHWLRTVKTTKESLVIISPSVADLDPYDKSLHSRVFPGGKCSRITVSSTCCSTNHDYTIWMPENPRLGTSCDIFTNSRGKRASKGGKTCGFVDERGLYKSLRGACKLKLCGVLGLRLMDGTWVAIQTSDEIKWCSPDQLVNLHDFHSDEIEHLVVEELVKKREECLDALETIMTTKSVSFRRLSHLRKLVPGFGKAYTIFNKTLMEADAHYKSIRTWNEIIPSKGCLRVGGRCHPHVNGVFFNGIILGPDGHVLIPEMQSSLLHQHMELLESSVIPLMHPLADPSTVFKDGDEAEDFVEVHLPDVHKQISGVDLGLPNWGKYVLISAGALTALMLMIFLMTCCRKTNRAESIQHSPGETGRKVSVTSHNGRVISSWESYKSGSETKL

SEQ ID NO: 31022 - protein, 524 aa, Artificial Sequence; identical to SEQ ID NO: 31012
  derived and/or modified protein sequence (wt) from glycoprotein__RABV__FJ825134.1

SEQ ID NO: 31023 - protein, 524 aa, Artificial Sequence
  derived and/or modified protein sequence (wt) from glycoprotein__RABV__FJ866832.1
MIPQVLLFVPLLVFSSCFGKFPIYTIPDKLGPWSPIDIHHLSCPNNLVVEDEGCTNLSGFSYMELKVGYISAIKVNGFTCTGVVTEAETYTNFVGYVTTTFKRKHFRPMPDACRAAYNWKMAGDPRYEESLHNPYPDYHWLRTVKTTKESLVIISPSVADLDPYDKSLHSRVFPGGKCSGITVSSTCCSTNHDYTIWMPENPRLGTSCDIFANSRGKRASKGGKTCGFVDERGLYKSLKGACKLKLCGVLGLRLMDGTWVAIQTSDEIKWCSPDQLVNLHDFHSDEIEHLVVEELVKKREECLDALETIMTTKSVSFRRLSHLRKLVPGFGKAYTIFNKTLMEADAHYKSIRTWNEIIPSKGCLRVGGRCHPHVNGVFFNGIILGPDGHVLIPEMQSSLLHQHMELLESSVIPLMHPLADPSTVFKDGDEAEDFVEVHLPDVHKQISGVDLGLPNWGKYVLISAGALTALMLTIFLMTCCRKTNRAESIQHSPGETGRKVSVTSHNGRVISSWESYKSGSETKL

SEQ ID NO: 31024 - protein, 524 aa, Artificial Sequence
  derived and/or modified protein sequence (wt) from glycoprotein__RABV__FJ866834.1
MIPQVLLFVPLLVFSSCFGKFPIYTIPDKLGPWSPIDIHHLSCPNNLVVEDEGCTNLSGFSYMELKVGYISAIKVNGFTCTGVVTEAETYTNFVGYVATTFKRKHFRPMPDACRAAYNWKMAGDPRYEESLHNPYPDYHWLRTVKTTKESLVIISPSVADLDPYDKSLHSRVFPGGKCSGITVSSTCCSTNHDYTIWMPENPRLGTSCDIFTNSRGKRASKGGKTCGFVDERGLYKSLKGACKLKLCGVLGLRLMDGTWVAIQTSDEIKWCSPDQLVNLHDFHSDEIEHLVVEELVKKREECLDALETIMTTKSVSFRRLSHLRKLVPGFGKACTIFNKTLMEADAHYKSIRTWNEIIPSKGCLRVGGRCHPHVNGVFFNGIILGPDGHVLIPEMQSSLLHQHMELLESSVIPLMHPLADPSTVFKDGDEAEDFVEVHLPDVHKQISGVDLGLPNWGKYVLISAGALTALMLTIFLMTCCRKTNRAESIQHSPGETGRKVSVTSHNGRVISSWESYKSGSETKL

SEQ ID NO: 31025 - protein, 524 aa, Artificial Sequence
  derived and/or modified protein sequence (wt) from glycoprotein__RABV__FJ866835.1
MIPQVLLFVPLLVFSSCFGKFPIYTIPDKLGPWSPIDIHHLSCPNNLVVEDEGCTNLSGFSYMELKVGYISAIKVNGFTCTGVVTEAETYTNFVGYVTTTFKRKHFRPMPDACRAAYNWKMAGDPRYEESLHNPYPDYHWLRTVKTTKESLVIISPSVADLDPYDKSLHSRVFPGGKCSGITVSSTCCSTNHDYTIWMPENPRLGTSCDIFTNSRGKGASKGGKTCGFVDERGLYKSLKGACKLKLCGVLGLRLMDGTWVAIQTSAEIKWCSPDQLVNLHDFHSDEIEHLVVEELVKKREECLDALETIMTTKSVSFRRLSHLRKLVPGFGKAYTIFNKTLMEADAHYKSIRTWNEIIPSKGCLRVGGRCHPHVNGVFFNGIILGPDGHVLIPEMQSSLLHQHMELLESSVIPLMHPLADPSTVFKDGDEAEDFVEVHLPDVHKQISGVDLGLPNWGKYVLISAGALTALMLTIFLMTCCRKTNRAESIQHSPGETGRKVSVTSHNGRVISSWESYKSGSETKL

SEQ ID NO: 31026 - protein, 524 aa, Artificial Sequence
  derived and/or modified protein sequence (wt) from glycoprotein__RABV__FJ959397.1
MIPQALLFVPLLVFPLCFGKFPIYTIPDKLGPWSPIDIHHLSCPNNLVVEDEGCTNLSGFSYMELKVGYISAIKVNGFTCTGVVTEAETYTNFVGYVTTTFKRKHFRPTPDACRSAYNWKMAGDPRYEESLHNPYPDYHWLRTVKTTKESVVIISPSVADLDPYDKSLHSRVFPRGKCSGITVSSAYCSTNHDYTIWMPENPRLGTSCDIFTNSRGKRASKGSKTCGFVDERGLYKSLKGACKLKLCGVLGLRLMDGTWVAIQTSNETKWCPPDQLVNLHDFHSDEIEHLVVEELVKKREECLDALESIMTTKSVSFRRLSHLRKLVPGFGKAYTIFNKTLMEADAHYKSVRTWNEIIPSKGCLRVGGRCHPHVNGVFFNGIILGPDGHVLIPEMQSSLLQQHMELLESSVIPLMHPLADPSTVFKDGDEVEDFVEVHLPDVHKQVSGVDLGLPNWGKDVLMGAGVLTALMLMIFLMTCCRRTNRAESIQHSLGETGRKVSVTSQSGRVISSWESYKSGGETKL

SEQ ID NO: 31027 - protein, 524 aa, Artificial Sequence
  derived and/or modified protein sequence (wt) from glycoprotein__RABV__FJ979833.1
MVPQALLFVPLLGFSLCFGKFPIYTIPDELGPWSPIDIHHLSCPNNLVVEDEGCTNLSEFSYMELKVGYISAIKVNGFTCTGVVTEAEAYTNFVGYVTTTFKRKHFRPTPDACRAAYNWKMAGDPRYEESLHNPYPDYHWLRTVRTTKESLIIISPSVTDLDPYDKSLHSRVFPGGKCSGITVSSTYCSTNHDYTIWMPEDPRPRTPCDIFTNSRGKRASKGNKTCGFVDERGLYKSLKGACRLKLCGVLGLRLMDGTWVAMQTSDETKWCPPDQLVNLHDFQSDEIEHLVVEELVKKREGCLDALESIMTTKSVSFRRFSHLRKLVPGFGKAYTIFNKTLMEADAHYKSVRTWNEIIPSKGCLKVGGRCHPHVNGVFFNGIILGPDGHVLIPEMQSSLLQQHMELLKSSVIPLMHPLADPSTVFKEGDEAEDFVEVHLPDVYKRISGVDLGLPNWGKYVLMTAGAMIGLVLIFSLMTWCRRANRPESKQRSFGGTGRNVSVTSQSGKVIPSWESYKSGGETGL

SEQ ID NO: 31028 - protein, 524 aa, Artificial Sequence
  derived and/or modified protein sequence (wt) from glycoprotein__RABV__GQ303557.1
MIPQALLFVPLLVFSSCFGKFPIYTIPDKLGPWSPIDIHHLSCPNNLVVEDEGCTNLSGFSYMELKVGYISAIKVNGFTCTGVVTEAETYTNFVGYVTTTFKRKHFRPTPDACRAAYNWKMAGDPRYEESLHNPYPDYHWLRTVKTTKESLVIISPSVSDLDPYDKSLHSRVFPSGKCSGITVSSTYCPTNHDYTIWMPENPRLGTSCDIFTNSRGKRASKGGKTCGFVDERGLYKSLKGACKLKLCGVLGLRLMDGTWVAIQTSDEAKWCPPDQLVNIHDFRSDEIEHLVVEELVKKREECLDALESIMTTKSVSFRRLSHLRKLVPGFGKAYTIFNKTLMEADAHYKSVRTWNEIIPSKGCLRVGGRCHPHVNGVFFNGIILGPDGHVLIPEMQSSLLQQHMELLESSVIPLMHPLADPSTVFKDGDEAEDFVEVHLPDVHKQVSGVDLGLPSWGKYVLMSVGAMIALMLMIFLMTCCRKANGAETIQHRLGETGRKVSVTSQSGRVISSWESYKSGGETKL

SEQ ID NO: 31029 - protein, 524 aa, Artificial Sequence; identical to SEQ ID NO: 30857
  derived and/or modified protein sequence (wt) from glycoprotein__RABV__GQ406342.1

SEQ ID NO: 31030 - protein, 524 aa, Artificial Sequence
  derived and/or modified protein sequence (wt) from glycoprotein__RABV__GQ412744.1
MVPQALLLVPLLGFSLCFGKFPIYTIPDTLGPWSPIDIHHLSCPNNLVVEDEGCTNLSGFSYMELKVGHISAIKVNGFTCTGVVTEAETYTNFVGYVTTTFKRKHFRPTPDACRAAYNWKMAGDPRYEESLHSPYPDYHWLRTVKTTKESLVIISPSVANLDPYDNSLHSRVFPSGKCSGITVPSVYCSTNHDYTVWMPEILRLGTSCDIFTNSRGKRASKGSKTCGFVDERGLYKSLKGACKLKLCGVPGLRLMDGTWVAMQTSNETKWCPPGQLVNLHDLHSDEIEHLVVEELVKKREECLDALESIITTKSVSFRRLSHLRKLVPGFGKAYTIFNKTLMEAEAHYKSVRTWNEIIPSKGCLRVGGRCHPHVNGVFFNGIILGPDGHVLIPEMQSSLLQQHIELLESSVIPLMHPLADPFTVFKDGDEIEDFVEVHLPDVHEQVSGVDLGLPNWGEYVLLSAGTLIALMLIIFLITCCKRVDRPESTQRSLRGTGRNVSVTSQSGKFIPSWESYKSGGETGL

SEQ ID NO: 31031 - protein, 524 aa, Artificial Sequence
  derived and/or modified protein sequence (wt) from glycoprotein__RABV__GQ472535.1
MVPQALLFVPLLAVPLCFGKFPIYTIPDKLGPWSPIDIHHLSCPNNLVVEDEGCTNLSGFSYMELKVGYISAIKVNGFTCTGVVTEAETYTNFVGYVTTTFKRKHFRPTPDACRSTYNWKMAGDPRHEESLHNPYPDYHWLRTVKTTKESFVIISPSVADLDPYDKSLHSRVFPRGKCSGITVSSTYCSTNHDYTIWMPENPRLGTSCDIFTNSRGKRASKGSKTCGFVDERGLYKSLKGACKLKLCGVLGLRLMDGTWVAIQTSDETKWCPPDQLVNLHDFHSDEIEHLVVEELVKKREECLDALESIMTTKSVSFRRLSHLRKLVPGFGKAYTIFNKTLMEADAHYKSVRTWNEIIPSKGCLRVGGRCHPHVNGVFFNGIILGPDGHVLIPEMQSSLLQQHMELLESSVIPLMHPLADPSTVFKDGDEAEDFVEVHLPDVHKQVSGVDLGLPSWGKYALMSAGILTALMLMIFLMTCCRRTNRAESIQHSLGETGRKVSVTSQNGRVISSWESYKSGGETKL

SEQ ID NO: 31032 - protein, 524 aa, Artificial Sequence
  derived and/or modified protein sequence (wt) from glycoprotein__RABV__GQ472536.1
MVPQALLFVPLLAIPLCFGKFPIYTIPDKLGPWSPIDIHHLSCPNNLVVEDEGCTNLSGFSYMELKVGYISAIKVNGFTCTGVVTEAETYTNFVGYVTTTFKRKHFRPTPDACRSAYNWKMAGDPRYEESLHNPYPDYHWLRTVKTTKESFVIISPSVADLDPYDKSLLSRVFPRGKCSGITVSSTYCSTNHDYTIWMPENPRLGTSCDIFTNSRGKRASKGSKTCGFVDERGLYKSLKGACKLKLCGVLGLRLMDGTWVAIQTSDETKWCPPDQLVNLHDFHSDEIEHLVVEELVKKREECLDALESIMTTKSVSFRRLSHLRKLVPGFGKAYTIFNKTLMEADAHYKSVRTWNEIIPSKGCLRVGGRCHPHVNGVFFNGIILGPDGHVLIPEMQSSLLQQHMELLESSVIPLMHPLADPSTVFKDGDEAEDFVEVHLPDVHKQVSGVDLGLPSWGKYVLMSAGILTALMLMIFLMTCCRRTNRAESIQHSLGETGRKVSVTSQSGRVISSWESYKSGGETKL

SEQ ID NO: 31033 - protein, 524 aa, Artificial Sequence; identical to SEQ ID NO: 30527
  derived and/or modified protein sequence (wt) from glycoprotein__RABV__GQ472537.1

SEQ ID NO: 31034 - protein, 524 aa, Artificial Sequence
  derived and/or modified protein sequence (wt) from glycoprotein__RABV__GQ472539.1
MIPQVLLFVPLLVFSSCFGKFPIYTIPDKLGPWSPIDIHHLSCPNNLVVEDEGCTNLSGFSYMELKVGYISAIKVNGFTCTGVVTEAETYTNFVGYVTTTFKRKHFRPMPDACRAAYNWKMAGDPRYEESLHNPYPDYHWLRTVKTTKESLVIISPSVADLDPYDKSLHSRVFPGGKCSGITVSSTCCSTNHDYTIWMPENPRLGTSCDIFTNSRGKRASKGGKTCGFVDERGLYKSLKGACKLKLCGVLGLRLMDGTWVAIQTSDEIKWCSPDQLVNLHDFHSDEIEHLVVEELVKKREECLDALETIMTTKSVSFRRLSHLRKLVPGFGKAYTIFNKTLMEADAHYKSIRTWNEIIPSKGCLRVGGRCHPHVNGVFFNGIILGLDGHVLIPEMQSSLLHQHMELLESSVIPLMHPLADPSTVFKDGDEAEDFVEVHLPDVHKQISGVDLGLPNWGKYVLTSAGALTALMLMIFLMTCCRKTNRAESIQRSPGETERKVSVTSHNGRVISSWESYKSGGETKL

SEQ ID NO: 31035 - protein, 524 aa, Artificial Sequence
  derived and/or modified protein sequence (wt) from glycoprotein__RABV__GQ472540.1
MVPQALLFVPLLAVPLCFGKFPIYTIPDKLGPWSPIDIHHLSCPNNLVVEDEGCTNLSGFSYMELKVGYISAIKVNGFTCTGVVTEAETYTNFVGYVTTTFKRKHFRPTPDACRSAYNWKMAGDPRYEESLHNPYPDYHWLRTVKTTKESFVIISPSVADLDPYDKSLHSRVFPRGKCSGITVSSTYCSTNHDYTIWMPENPRLGTSCDIFTNSRGKRASKGSKTCGFVDEGGLYKSLKGACKLKLCGVLGLRLMDGTWVAIQTSDETKWCPPDQLVNLHDFHSDEIEHLVVEELVKKREECLDALESIMTTKSVSFRRLSHLRKLVPGFGKAYTIFNKTLMEADAHYKSVRTWNEIIPSKGCLRVGGRCHPHVNGVFFNGIILGPDGHVLIPEMQSSLLQQHMELLESSVIPLMHPLADPSTVFKDGDEAEDFVEVHLPDVHKQVSGVDLGLPSWGKYVLMSAGILTALMLTIFLMTCCRRTNRAESIQHSLGETGRKVSVTSQSGRVISSWESYKSGGETKL

SEQ ID NO: 31036 - protein, 524 aa, Artificial Sequence
  derived and/or modified protein sequence (wt) from glycoprotein__RABV__GQ472541.1
MVPQALLFVPLLAIPLCFGKFPIYTIPDKLGPWSPIDIHHLSCPNNLVVEDEGCTNLSGFSYMELKVGYISAIKVNGFTCTGVVTEAETYTNFVGYVTTTFKRKHFRPTPDACRSAYNWKMAGDPRYEESLHNPYPDYHWLRTVKTTKESFVIISPSVADLDPYDKSLHSRVFPRGKCSGITVSSTYCSTNHDYTIWMPENPRLGTSCDIFTNSRGKRASKGSKTCGFVDERGLYKSLKGACKLKLCGVLGLRLMDGTWVAIQTSDETKWCPPDQLVNLHDFHSDEIEHLVVEELVKKREECLDALESIMTTKSVSFRRLSHLRKLVPGFGKAYTIFNKTLMEADAHYKSVRTWNEIIPSKGCLRVGGRCHPHVNGVFFNGIILGPDGHVLIPEMQSSLLQQHMELLESSVIPLMHPLADPSTVFKDGDEAEDFDEVHLPDVHKQVSGVDLGLPSWGKYVLMSAGILTALMLMIFLMTCCRRTNRAESIQHSLGETGRKVSVTSQSGRVISSWESYKSGGETKL

SEQ ID NO: 31037 - protein, 524 aa, Artificial Sequence
  derived and/or modified protein sequence (wt) from glycoprotein__RABV__GQ472542.1
MIPQVLLFVPLLVFSSCFGKFPIYTIPDKLGPWSPIDIHHLSCPNNLVVEDEGCTNLSGFSYMELKVGYISAIKVNGFTCTGVVTEAETYTNFVGYVTTTFKRKHFRPMPDACRAAYNWKMAGDPRYEESLHNPYPDYHWLRTVKTTKESLVIISPSVADLDPYDKSLHSRVFPGGKCSGITVSSTCCSTNHDYTIWMPENPRLGTSCDIFTNSRGKRASKGGKTCGFVDERGLYKSLKGACKLKLCGVLGLRLMDGTWVAIQTSDEIKWCSPDQLVNLHDFHSDEIEHLVVEELVKKGEECLDALETIMTTKSVSFRRLSHLRKLVPGFGKAYTIFNKTLMEADAHYKSIRTWNEIIPSKGCLRVGGRCHPHVNGVFFNGIILGPDGHVLIPEMQSSLLHQHMELLESSVIPLMHPLADPSTVFKDGDEAEDFVEVHLPDVHKQISGVDLGLPNWGKYVLISAGALTASMLMIFLMTCCRKANRAESIQHNPGETGRKVSVTSHNGRVISSWESYKSGGETKL

SEQ ID NO: 31038 - protein, 524 aa, Artificial Sequence; identical to SEQ ID NO: 30527
  derived and/or modified protein sequence (wt) from glycoprotein__RABV__GQ472543.1

SEQ ID NO: 31039 - protein, 524 aa, Artificial Sequence
  derived and/or modified protein sequence (wt) from glycoprotein__RABV__GQ472544.1
MIPQVLLFVPLLVFSSCFGKFPIYTIPDKLGPWSPIDIHHLSCPNNLVVEDEGCTNLSGFSYMELKVGYISAIKVNGFTCTGVVTEAETYTNFVGYVTTTFKRKHFRPMPDACRAAYNWKMAGDPRYEESLHNPYPDYHWLRTVKTTKESLVIISPSVADLDPYDKSLHSRVFPGGKCSGITVSSTCCSTNHDYTIWMPENPRLGTSCDIFTNSRGKRASKGGKTCGFVDERGLYKSLKGACKLKLCGVLGLRLMDGTWVAIQTSDEIKWCSPDQLVNLHDFHSDEIEHLVVEELVKKREECLDALETIMTTKSVSFRRLSHLRKLVPGFGKAYTIFNKTLMEADAHYKSIRTWNEIIPSKGCLRVGGRCHPHVNGVFFNGIILGPDGHVLIPEMQSSLLHQHMELLGSSVIPLMHPLADPSTVFKDGDEAEDFVEVHLPDVHKQISGVDLGLPNWGKYVLISAGALTASMLMIFLMTCCRKANRAESIQHNPGETGRKVSVTSHNGRVISSWESYKSGGETKL

SEQ ID NO: 31040 - protein, 524 aa, Artificial Sequence
  derived and/or modified protein sequence (wt) from glycoprotein__RABV__GQ472545.1
MVPQVLLFVPLLVFSSCFGKFPIYTIPDKLGPWSPIDIHHLSCPNNLVVEDEGCTNLSGFSYMELKVGYISAIKVNGFTCTGVVTEAETYTNFVGYVTTTFKRKHFRPMPDACRAAYNWKMAGDPRYEESLHNPYPDYHWLRTVKTTKESLVIISPSVADLDPYDKSLHSRVFPGGKCSGITVSSTCCSTNHDYTIWMPENPRLGTSCDIFTNSRGKRASKGGKTCGFVDERGLYKSLKGACKLKLCGVLGLRLMDGTWVAIQTSDEIKWCSPDQLVNLHDFHSDEIEHFVVEELVKKREECLDALETIMTTKSVSFRRLSHLRKLVPGFGKAYTIFNKTLMEADAHYKSIRTWNEIIPSKGCLRVGGRCHPHVNGVFFNGIILGPDGHVLIPEMQSSLLHQHMELLESSVIPLMHPLADPSTVFKDGDEAEDFVEVHLPDVHKQISGVDLGLPNWGKYVLISAGALTALMLMIFLMTCCRKANRAESIQHNPGETGRKVSVTSHNGRVISSWESYKSGGETKL

SEQ ID NO: 31041 - protein, 524 aa, Artificial Sequence; identical to SEQ ID NO: 30527
  derived and/or modified protein sequence (wt) from glycoprotein__RABV__GQ472546.1

SEQ ID NO: 31042 - protein, 524 aa, Artificial Sequence
  derived and/or modified protein sequence (wt) from glycoprotein__RABV__GQ472547.1
MVPQALLFVPLLAIPLCFGKFPIYTIPDKLGPWSPIDIHHLSCPNNLVVEDEGCTNLSGFSYMELKVGYISAIKVNGFTCTGVVTEAETYTNFVGYVTTTFKRKHFRPTPDACRSAYNWKMAGDPRYEESLHNPYPDYHWLRTVKTTKESFVIISPSVADLDPYDKSLHSRVFPRGKCSGITVSSTYCSTNHDYTIWMPENPRLGTSCDIFTNSRGKRASKGSKTCGFVDERGLYKSLKGACKLKLCGVLGLRLMDGTWVAIQTSDETKWCPPDQLVNLHDFHSDEIEHLVVEELVKKREECLDALESIMTTKSVSFRRLSHLRKLVPGFGKAYTIFNKTLMEADAHYKSVRTWNEIIPSKGCLRVGGRCHPHVNGVFFNGIILGPDGHVLIPEMQSSLLQQHMELLESSVIPLMHPLADPSTVFKDGDEAEDFVEVHLPDVHKQVSGVDLGLPSWGKYVLMSAGILTALMLMIFLMTCCRRTNRAESIQHSLGETGRKVSVTSQSGRVISSWESYKSEGETKL

SEQ ID NO: 31043 - protein, 524 aa, Artificial Sequence
  derived and/or modified protein sequence (wt) from glycoprotein__RABV__GQ472548.1
MIPQVLLFVPLLVFSSCFGKFPIYTIPDKLGPWSPIDIHHLSCPNNLVVEDEGCTNLSGFSYMELKVGYISAIKVNGFTCTGVVTEAETYTNFVGYVTTTFKRKHFRPMPDACRAAYNWKMAGDPRYEESLHNPYPDYHWLRTVKTTKESLVIISPSVADLDPYDKSLHSRVFPGGKCSGITVSSTCCSTNHDYTIWMPENPRLGTSCDIFTNSRGKRASKGGKTCGFVDERGLYKSLKGACKLKLCGVLGLRLMDGTWVAIQTSDEIKWCSPDQLVNLHDFHSDEIEHLVVEELVKKREECLDALETIMTTKSVSFRRLSHLRKLVPGFGKAYTIFNKTLMEADAHYKSIRTWNEIIPSKGCLRVGGRCHPHVNGVFFNGIILGPDGHVLIPEMQSSLLHQHMELLESSVIPLMHPLADPSTVFKDGDEAEDFVEVHLPDVHKQISGVDLGLPNWGKYVLTSAGALTALMLMIFLMTCCRETNRAESIQRSPGETERKVSVTSHNGRVISSWESYKSGGETKL

SEQ ID NO: 31044 - protein, 524 aa, Artificial Sequence
  derived and/or modified protein sequence (wt) from glycoprotein__RABV__GQ472549.1
MVPQALLFVPLLAVPLCLGKFPIYTIPDKLGPWSPIDIHHLSCPNNLVVEDEGCTNLSGFSYMELKVGYISAIKVNGFTCTGVVTEAETYTNFVGYVTTTFKRKHFRPTPDACRSAYNWKMAGDPRYEESLHNPYPDYHWLRTVKTTKESFVIISPSVADLDPYDKSLHSRVFPRGKCSGITVSSTYCSTNHDYTIWMPENPRLGTSCDIFTNSRGKRASKGSKTCGFVDERGLYKSLKGACKLKLCGVLGLRLMDGTWVAIQTSDETKWCPPDQLVNLHDFHSDEIEHLVVEELVKKREECLDALESIMTTKSVSFRRLSHLRKLVPGFGKAYTIFNKTLMEADAHYKSVRTWNEIIPSKGCLRVGGRCHPHVNGVFFNGIILGPDGHVLIPEMQSSLLQQHMELLESSVIPLMHPLADPSTVFKDGDEAEDFVEVHLPDVHKHVSGVDLGLPSWGKYVLVSAGILTALMLTIFLMTCCRRTNRAESIQHSLGETGRKVSVTSQSGRVISSWESYKSGGETKL

SEQ ID NO: 31045 - protein, 524 aa, Artificial Sequence
  derived and/or modified protein sequence (wt) from glycoprotein__RABV__GQ472550.1
MVPQALLFVPLLAIPLCFGKFPIYTIPDKLGPWSPIDIHHLSCPNNLVVEDEGCTNLSGFSYMELKVGYISAIKVNGFTCTGVVTEAETYTNFVGYVTTTFKRKHFRPTPDACRSAYNWKMAGDPRYEESLHNPYPDYHWLRTVKTTKESFVIISPSVADLDPYDKSLHSRVFPRGKCSGITVSSTYCSTNHDYTIWMPENPRLGTSCDIFTNSRGKRASKGSKTCGFVDERGLYKSLKGACKLKLCGVLGLRLMDGTWVAIQTSDETKWCPPDQLVNLHDFHSDEIEHLVVEELVKKRGECLDALESIMTTKSVSFRRLSHLRKLVPGFGKAYTIFNKTLMEADAHYKSVRTWNEIIPSKGCLRVGGRCHPHVNGVFFNGIILGPDGHVLIPEMQSSLLQQHMELLESSVIPLMHPLADPSTVFKDGDEAEDFVEVHLPDVHKQVSGVDLGLPSWGKYVLMSAGILTALMLMIFLMTCCRRTNRAESIQHSLGETGRKVSVTSQSGRVISSWESYKSGGETKL

SEQ ID NO: 31046 - protein, 524 aa, Artificial Sequence
  derived and/or modified protein sequence (wt) from glycoprotein__RABV__GQ472551.1
MVPQVLLFVPLLVFSSCFGKFPIYTIPDKLGPWSPIDIHHLSCPNNLVVEDEGCTNLSGFSYMELKVGYISAIKVNGFTCTGVVTEAETYTNFVGYVTTTFKRKHFRPMPDACRAAYNWKMAGDPRYEESLHNPYPDYHWLRTVKTTKESLVIISPSVADLDPYDKSLHSRVFPGGKCSGITVSSTCCSTNHDYTIWMPENPRLGTSCDIFTNSRGKRASKGGKTCGFVDERGLYKSLKGACKLKLCGVLGLRLMDGTWVAIQTSDEIKWCSPDQLVNLHDFHSDEIEHLVVEELVKKREECLDALETIMTTKSVSFRRLSHLRKLVPGFGKAYTIFNKTLMEADAHYKSIRTWNEIIPSKGCLRVGGRCHPHVNGVFFNGIILGPDGHVLIPEMQSSLLHQHMELLESSVIPLMHPLADPSTVFKDGDEAEDFVEVHLPDVHKQISGVDLGLPNWGKYVLISAGALTALMLMIFLMTCCRKANRAESMQHNPGETGRKVSVTSHNGRVISSWESYKSGGETKL

SEQ ID NO: 31047 - protein, 524 aa, Artificial Sequence
  derived and/or modified protein sequence (wt) from glycoprotein__RABV__GQ472552.1
MIPQALLFVPLLVFSLCFGKFPIYTIPDKLGPWSPIDIHHLSCPNNLVVEDEGCTNLSGFSYMELKVGYISAIKVNGFTCTGVVTEAETYTNFVGYVTTTFKRKHFRPTPDACRAAYNWKMAGDPRYEESLHNPYPDYHWLRTVKTTKESLVIISPSVSDLDPYDKSLHSRVFPSGKCSGITVSSTYCPTNHDYTIWMPENPRLGTSCDIFTNSRGKRASKGSKTCGFVDERGLYKSLKGACKLKLCGVLGLRLMDGTWAAIQASDEAKWCPPDQLVNIHDFRSDEIEHLVVEELVKKREECLDALESIMTTKSVSFRRLSHLRKLVPGFGKAYTIFNKTLMEADAHYKSVRTWNEIIPSKGCLRVGGRCHPHVNGVFFNGIILGPDGHVLIPEMQSSLLQQHMELLESSVIPLMHPLADPSTVFKDGDEAEDFVEVHLPDVHKQVSGVDLGLPSWGKYVLMSVGAMIALMLMIFLTTCCRKANGAESIQHRLGETGRKVSVTSQSGRVISSWESYKSGGETKL

SEQ ID NO: 31048 - protein, 524 aa, Artificial Sequence; identical to SEQ ID NO: 31043
  derived and/or modified protein sequence (wt) from glycoprotein__RABV__GQ472553.1

SEQ ID NO: 31049 - protein, 524 aa, Artificial Sequence; identical to SEQ ID NO: 30527
  derived and/or modified protein sequence (wt) from glycoprotein__RABV__GQ472554.1

SEQ ID NO: 31050 - protein, 524 aa, Artificial Sequence
  derived and/or modified protein sequence (wt) from glycoprotein__RABV__GQ472555.1
MVPQVLLFVPLLVFSSCFGKFPIYTIPDKLGPWSPIDIHHLSCPNNLVVEDEGCTNLSGFSYMELKVGYISAIKVNGFTCTGVVTEAETYTNFVGYVTTTFKRKHFRPMPDACRAAYNWKMAGDPRYEESLHNPYPDYHWLRTVKTTKESLVIISPSVADLDPYDKSLHSRVFPGGKCSGITVSSTCCSTNHDYTLWMPENPRLGTSCDIFTNSRGKRASKGGKTCGFVDERGLYKSLKGACKLKLCGVLGLRLMDGTWVAIQTSDEIKWCPPDQLVNLHDFHSDEIEHLVVEELVKKREECLDALETIMTTKSVSFRRLSHLRKLVPGFGKAYTIFNKTLMEADAHYKSIRTWNEIIPSKGCLRVGGRCHPHVNGVFFNGIILGPDGHVLIPEMQSSLLHQHMELLESSVIPLMHPLADPSTVFKDGDEAEDFVEVHLPDEHKQISGVDLGLPNWRKYVLISAGALTALMLMIFLMTCCRKANRAESIQHNPGETGRKVSVTSPNGRVISSWESYKSGGETKL

SEQ ID NO: 31051 - protein, 524 aa, Artificial Sequence
  derived and/or modified protein sequence (wt) from glycoprotein__RABV__GQ472556.1
MVPQVLLFVPLLVFSSCFGKFPIYTIPDKLGPWSPIDIHHLSCPNNLVVEDEGCTNLSGFSYMELKVGYISAIKVNGFTCTGVVTEAETYTNFVGYVTTTFKRKHFRPMPDACRTAYNWKMAGDPRYEESLHNPYPDYHWLRTVKTTKESLVIISPSVADLDPYDKSLHSRVFPGGKCSGITVSSTCCSTNHDYTIWMPENPRLGTSCDIFTNSRGKRASKGGKTCGFVDERGSYKSLKGACKLKLCGVLGLRLMDGTWVAIQTSDEIKWCSPDQLVNLHDFHSDEIEHLVVEELVKKREECLDALETIMTTKSVSFRRLSHLRKLVPGFGKAYTIFNKTLMEADAHYKSIRTWNEIIPSKGCLRVGGRCHPHVNGVFFNGIILGPDGHVLIPEMQSSLLHQHMELLESSVIPLMHPLADPSTVFKDGDEAEDFVEVHLPDVHKQISGVDLGLPNWGKHVLISAGALTALMLMIFLMTCCRKANRAESIQHNPGETGRKVSVTSHNGRVISSWESYKSGGETKL

SEQ ID NO: 31052 - protein, 524 aa, Artificial Sequence; identical to SEQ ID NO: 30527
  derived and/or modified protein sequence (wt) from glycoprotein__RABV__GQ472557.1

SEQ ID NO: 31053 - protein, 524 aa, Artificial Sequence
  derived and/or modified protein sequence (wt) from glycoprotein__RABV__GQ472558.1
MAPQALLFVPLLAVPLCLGKFPIYTIPDKLGPWSPIDIHHLSCPNNLVVEDEGCTNLSGFSYMELKVGYISAIKVNGFTCTGVVTEAETYTNFVGYVTTTFKRKHFRPTPDACRSAYNWKMAGDPRYEESLHNPYPDYHWLRTVKTTKESFVIISPSVADLDPYDKSLHSRVFPRGKCSGITVSSTYCSTNHDYTIWMPENPRLGTSCDIFTNSRGKRASKGSKTCGFVDERGLYKSLKGACKLKLCGVLGLRLMDGTWVAIQTSDETKWCPPDQLVNLHDFHSDEIEHLVVEELVKKREECLDALESIMTTKSVSFRRLSHLRKLVPGFGKAYTIFNKTLMEADAHYKSVRTWNEIIPSKGCLRVGGRCHPHVNGVFFNGIILGPDGHVLIPEMQSSLLQQHMELLESSVIPLMHPLADPSTVFKDGDEAEDFVEVHLPDVHKQVSGVDLGLPSWGKYVLMSAGILTALMLTIFLMTCCRRTNRAESIQHSLGETGRKVSVTSQSGRVISSWESYKSGGETKL

SEQ ID NO: 31054 - protein, 524 aa, Artificial Sequence
  derived and/or modified protein sequence (wt) from glycoprotein__RABV__GQ472559.1
MASQALLFVPLLAIPLCFGKFPIYTIPDKLGPWSPIDIHHLSCPNNLVVEDEGCTNLSGFSYMELKVGYISAIKVNGFTCTGVVTEAETYTNFVGYVTTTFKRKHFRPTPDACRSAYNWKMAGDPRYEESLHNPYPDYHWLRTVKTTKESLVIISPSVADLDPYDKSLHSRVFPRGKCSGITVSSTYCSTNHDYTIWMPENPRLGTSCDIFTNSRGKRASKGSKTCGFVDERGLYKSLKGACKLKLCGVLGLRLMDGTWVAIQTSDETKWCPPDQLVNLHDFHSDEIEHLVVEELVKKREECLDALESIMTTKSVSFRRLSHLRKLVPGFGKAYTIFNKTLMEADAHYKSVRTWNEIIPSKGCLRVGGRCHPHVNGVFFNGIILGPDGHVLIPEMQSSLLQQHMELLESSVIPLMHPLADPSTVFKDGDEAEDFVEVHLPDVHKQVSGVDLGLPSWGKYVLMSAGILTALMLMIFLMTCCRRTNRAESIQHSLGETGRKVSVTSQSGRVISSWESYKSGGETKL

SEQ ID NO: 31055 - protein, 524 aa, Artificial Sequence
  derived and/or modified protein sequence (wt) from glycoprotein__RABV__GQ472560.1
MVPQVLLFVPLLVFSSCFGKFPIYTIPDKLGPWSPIDIHHLSCPNNLVVEDEGCTNLSGFSYMELKVGYISAIKVNGFTCTGVVTEAETYTNFVGYVTTTFKRKHFRPTPDACRAAYNWKMAGDPRYEESLHNPYPDYHWLRTVKTTKESLVIISPSVADLDPYDKSLHSGVFPGGKCSGITVSSTCCSTNHDYTIWMPENPRLGTSCDIFTNSRGKRASKGGKTCGFVDERGLYKSLKGACKLKLCGVLGLRLMDGTWVAIQTSDEIKWCSPDQLVNLHDFHSDEIEHLVVEELVKKRKECLDALETIMTTKSVSFRRLSHLRKLVPGFGKAYTIFNKTLMEADAHYKSIRTWNEIIPSKGCLRVGGRCHPHVNGVFFNGIILGPDGHVLIPEMQSSLLHQHMELLESSVIPLMHPLADPSTVFKDGDEAEDFVEVHLPDVHKQISGVDLGLPNWGKYVLISAGALTALMLMIFLMTFCRKANRAESIQHNPGETGRKVSVTSHNGRVISSWESYKSGGETKL

SEQ ID NO: 31056 - protein, 524 aa, Artificial Sequence; identical to SEQ ID NO: 30827
  derived and/or modified protein sequence (wt) from glycoprotein__RABV__GQ857450.1

SEQ ID NO: 31057 - protein, 524 aa, Artificial Sequence
  derived and/or modified protein sequence (wt) from glycoprotein__RABV__GQ857451.1
MIPQVLLFVPLLVFSSCFGKFPIYTIPDKLGPWSPIDIHHLSCPNNLVVEDEGCTNLSGFSYMELKVGYISAIKVNGFTCTGVVTEAETYTNFVGYVTTTFKRKHFRPTPDACRAAYNWKMAGDPRYEESLHNPYPDYHWLRTVKTSKESLVIISPSVADLDPYDKSLHSRVFPGGKCSGITVSSTCCSTNHDYTIWMPENPRLRTSCDIFTNSRGKRASKGGKTCGFVDERGLYKSLKGACKLKLCGVLGLRLMDGTWVAIQTSDEIKWCSPDQLVNLHDFHSDEIEHLVVEELVKKREECLDALETIMTTKSVSFRRLSHLRKLVPGFGKAYTIFNKTLMEADAHYKSIRTWNEIIPSKGCLRVGGRCHPHVNGVFFNGIILGPDGHVLIPEMQSSLLHQHMELLESSVIPLMHPLADPSTVFKDGDEAEDFVEVHLPDVHKQISGVDLGLPNWGKYVLVSAGALTALMLMIFLMTCCRKTNRAESIQHSPGETGRKVSVTSHNGRVISSWESYKSRGETKL

SEQ ID NO: 31058 - protein, 524 aa, Artificial Sequence; identical to SEQ ID NO: 30827
  derived and/or modified protein sequence (wt) from glycoprotein__RABV__GQ857452.1

SEQ ID NO: 31059 - protein, 524 aa, Artificial Sequence
  derived and/or modified protein sequence (wt) from glycoprotein__RABV__GQ857453.1
MIPQVLLFVPLLVFSSCFGKFPIYTIPDKLGPWSPIDIHHLSCPNNLVVEDEGCTNLSGFSYMELKVGYISAIKVNGFTCTGVVTEAETYTNFVGYVTTTFKRKHFRPTPDACRAAYNWKMAGDPRYEESLHNPYPDYHWLRTVKTSKESLVIISPSVADLDPYDKSLHSRVFPGGKCSGITVSSTCCSTNHDYTIWMPENPRLGTSCDIFTNSRGKRASKGGKTCGFVDERGLYKSLKGACKLKLCGVLGLRLMDGTWVAIQTSDEIKWCSPDQLVNLHDFHSDEIEHLVVEELVKKREECLDALETIMTTKSVSFRRLSHLRKLVPGFGKAYTIFNKTLMEADAHYKSIRTWNEIIPSKGCLRVGGRCHPHVNGVFFNGIILGPDGHVLIPEMQSSLLHQHMELLESSVIPLMHPLADPSTVFKDGDEAEDFVEVHLPDVHKQISGVDLGLPNWGKYVLVSAGALTALMLMIFLMTCCRKTNRVESIQHSPGETGRKVSVTSHNGRVISSWESYKSGGETKL

SEQ ID NO: 31060 - protein, 524 aa, Artificial Sequence; identical to SEQ ID NO: 30827
  derived and/or modified protein sequence (wt) from glycoprotein__RABV__GQ857454.1

SEQ ID NO: 31061 - protein, 524 aa, Artificial Sequence
  derived and/or modified protein sequence (wt) from glycoprotein__RABV__GQ857455.1
MIPQVLLFVPLLVFSSCFGKFPIYTIPDKLGPWSPIDIHHLSCPNNLVVEDEGCTNLSGFSYMELKVGYISAIKVNGFTCTGVVTEAETYTNFVGYVTTTFKRKHFRPTPDACRAAYNWKMAGDPRYEESLHNPYPDYHWLRTVKTSKESLVIISPSVADLDPYDKSLHSRVFPGGKCSGITVSSTCCSTNHDYTIWMPENPRLGTSCDIFTNSRGKRASKGGKTCGFVDERGLYKSLKGACKLKLCGVLGLRLMDGTWVAIQTSDEIKWCSPDQLVNLHDFHSDEIEHLVVEELVKKREECLDALETIMTTKSVSFRRLSHLRKLVPGFGKAYTIFNKTLMEADAHYKSIRTWNEIIPSKGCLRVGGRCHPHVNGVFFNGIILGPDGHVLIPEMQSSLLHQHMELLESSVIPLMHPLADPSTVFKDGDEAEDFVEVHLPDVHKQISGVDLGLPNWGKYVLVSAGALTALVLMIFLMTCCRKTNRAESIQHSPGETGRKVSVTSHNGRVISSWESYKSGGETKL

SEQ ID NO: 31062 - protein, 524 aa, Artificial Sequence; identical to SEQ ID NO: 30827
  derived and/or modified protein sequence (wt) from glycoprotein__RABV__GQ857459.1

SEQ ID NO: 31063 - protein, 524 aa, Artificial Sequence; identical to SEQ ID NO: 30827
  derived and/or modified protein sequence (wt) from glycoprotein__RABV__GQ857460.1

SEQ ID NO: 31064 - protein, 524 aa, Artificial Sequence
  derived and/or modified protein sequence (wt) from glycoprotein__RABV__GQ857461.1
MIPQVLLFVPLLVFSSCFGKFPIYTIPDKLGPWSPIDIHHLSCPNNLVVEDEGCTNLSGFSYMELKVGYISAIKVNGFTCTGVVTEAETYTNFVGYVTTTFKRKHFRPTPDACRAAYNWKMAGDPRYEESLHNPYPDYHWLRTVKTSKESLVIISPSVADLDPYDKSLHSRVFPGGKCSGITVSSTCCSTNHDYTIWMPENPRLGTSCDIFTNSRGKRASKGGKTCGFVDERGLYKSLKGACKLKLCGVLGLRLMDGTWVAIQTSDEIKWCSPDQLVNLHDFHSDEIEHLVVEELVKKREECLDALEAIMTTKSVSFRRLSHLRKLVPGFGKAYTIFNKTLMEADAHYKSIRTWNEIIPSKGCLRVGGRCHPHVNGVFFNGIILGPDGHVLIPEMQSSLLHQHMELLESSVIPLMHPLADPSTVFKDGDEAEDFVEVHLPDVHKQISGVDLGLPNWGKYVLVSAGALTALMLMIFLMTCCRKTNRAESIQHSPGETGRKVSVTSHNGRVISSWESYKSGGETKL

SEQ ID NO: 31065 - protein, 524 aa, Artificial Sequence; identical to SEQ ID NO: 30827
  derived and/or modified protein sequence (wt) from glycoprotein__RABV__GQ857463.1

SEQ ID NO: 31066 - protein, 524 aa, Artificial Sequence; identical to SEQ ID NO: 30827
  derived and/or modified protein sequence (wt) from glycoprotein__RABV__GQ857464.1

SEQ ID NO: 31067 - protein, 524 aa, Artificial Sequence
  derived and/or modified protein sequence (wt) from glycoprotein__RABV__GQ857465.1
MIPQVLLFVPLLVFSSCFGKFPIYTIPDKLGPWSPIDIHHLSCPNNLVVEDEGCTNLSGFSYMELKVGYISAIKVNGFTCTGVVTEAETYTNFVGYVTTTFKRKHFRPMPDACRAAYNWKMAGDPRYEESLHNPYPDYHWLRTVKTTKESLVIISPSVADLDPYDKSLHSRVFPGGKCSGITVSSTCCSTNHDYTIWMPENPRLGTSCDIFTNSRGKRASKGGKTCGFVDERGLYKSLRGACKLKLCGVLGLRLMDGTWVAIQTSDEIKWCSPDQLVNLHDFHSDEIEHLVVEELVKKREECLDALETIMTTKSVSFRRLSHLRKLVPGFGKAYTIFNKTLMEADAHYKSIRTWNEIIPSKGCLRVGGRCHPHVNGVFFNGIILGPDGHVLIPEMQSSLLHQHMELLESSVIPLMHPLADPSTVFKDGDEAEDFVEVHLPDVHKQISGVDLGLPNWGKYVLISAGALTALMLTIFLMTCCRKTNRAESIQHSPGETGRKVSVTSHNGRVISSWESYKSGSETKL

SEQ ID NO: 31068 - protein, 524 aa, Artificial Sequence
  derived and/or modified protein sequence (wt) from glycoprotein__RABV__GQ857466.1
MIPQVLLFVPLLVFSSCFGKFPIYTIPDKLGPWSPIDIHHLSCPNNLVVEDEGCTNLSGFSYMELKVGYISAIKVNGFTCTGVVTEAETYTNFVGYVTTTFKRKHFRPMPDACRAAYNWKMAGDPRYEESLHNPYPDYHWLRTVKTTKESLVIISPSVADLDPYDKSLHSRVFPGGKCSGITVSSTCCSTNHDYTIWMPENPRLGTSCDIFTNSRGKRASNGGKTCGFVDERGLYKSLKGACKLKLCGVLGLRLMDGTWVAIQTSDEIKWCSPDQLVNLHDFHSDEIEHLVVEELVKKREECLDALETIMTTKSVSFRRLSHLRKLVPGFGKAYTIFNKTLMEADAHYKSIRTWNEIIPSKGCLRVGGRCHPHVNGVFFNGIILGPDGHVLIPEMQSSLLHQHMELLESSVIPLMHPLADPSTVFKDGDEAEDFVEVHLPDVHKQISGIDLGLPNWGKYVLISAGALTALMLTIFLMTCCRKTNRAESIQHSPGETGRKVSVTSHNGRVISSWESYKSGSETKL

SEQ ID NO: 31069 - protein, 524 aa, Artificial Sequence
  derived and/or modified protein sequence (wt) from glycoprotein__RABV__GQ857467.1
MIPQVLLFVPLLVFSSCFGKFPIYTIPDKLGPWSPIDIHHLSCPNNLVVEDEGCTNLSGFSYMELKVGYISAIKVNGFTCTGVVTEAETYTNFVGYVTTTFKRKHFRPMPDACRAAYNWKMAGDPRYEESLHNPYPDYHWLRTVKTTKESLVIISPSVADLDPYDKSLHSRVFPGGKCSGITVSSTCCSTNHDYTIWMPENPRLGTSCDIFTNSRGKRASKWGKTCGFVDERGLYKSLKGACKLKLCGVLGLRLMDGTWVAIQTSDEIKWCSPDQLVNLHDFHSDEIEHLVVEELVKKREECLDALETIMTTKSVSFRRLSHLRKLVPGFGKAYTIFNKTLMEADAHYKSIRTWNEIIPSKGCLRVGGRCHPHVNGVFFNGIILGPDGHVLIPEMQSSLLHQHMELLESSVIPLMHPLADPSTVFKDGDEAEDFVEVHLPDVHKQISGVDLGLPNWGKYVLISAGALTALMLTIFLMTCCRKTNRAESIQHSPGETGRKVSVTSHNGRVISSWESYKSGSETKL

SEQ ID NO: 31070 - protein, 524 aa, Artificial Sequence
  derived and/or modified protein sequence (wt) from glycoprotein__RABV__GQ857470.1
MIPQVLLFVPLLVFSSCFGKFPIYTIPDKLGPWSPIDIHHLSCPNNLVVEDEGCTNLSGFSYMELKVGYISAIKVNGFTCTGVVTEAETYTNFVGYVTTTFKRKHFRPMPDACRAAYNWKMAGDPRYEESLHNPYPDYHWLRTVKTTKESLVIISPSVADLDPYDKSLHSRVFPGGKCSGITVSSTCCSTNHDYTIWMPENPRLGTSCDIFTNSRGKRASKGGKTCGFVDERGLYKSLKGACKMKLCGVLGLRLMDGTWVAIQTSDEIKWCSPDQLVNLHDFHSDEIEHLVVEELVKKREECLDALETIMTTKSVSFRRLSHLRKLVPGFGKAYTIFNKTLMEADAHYKSIRTWNEIIPSKGCLRVGGRCHPHVNGVFFNGIILGPDGHVLIPEMQSSLLHQHMELLESSVIPLMHPLADPSTVFKDGDEAEDFVEVHLPDVHKQISGVDLGLPNWGKYVLISAGALTALMLTIFLMTCCRKTNKAESIQHSPGETGRKVSVTSHNGRVISSWESYKSGSETKL

SEQ ID NO: 31071 - protein, 524 aa, Artificial Sequence
  derived and/or modified protein sequence (wt) from glycoprotein__RABV__GQ857471.1
MIPQVLLFVPLLVFSSCFGKFPIYTIPDKLGPWSPIDIHHLSCPNNLVVEDEGCTNLSGFSYMELKVGYISAIKVNGFTCTGVVTEAETYTNFVGYVTTTFKRKHFRPMPDACRAAYNWKMAGDPRYEESLHNPYPDYHWLRTVKTSKESLVIISPSVADLDPYDKSLHSRVFPGGKCSGITVSSTCCSTNHDYTIWMPENPRLGTSCDIFTNSRGKRASKGGKTCGFVDERGLYKSLKGACKLKLCGVLGLRLMDGTWVAIQTSDEIKWCSPDQLVNLHDFHSDEIEHLVVEELVKKREECLDALETIMTTKSVSFRRLSHLRKLVPGFGKAYTIFNKTLMEADAHYKSIRTWNEIIPSKGCLRVGGRCHPHVNGVFFNGIILGPDGHVLIPEMQSSLLHQHMELLESSVIPLMHPLADPSTVFKDGDEAEDFVEVHLPDVHKQISGVDLGLPNWGKYVLISAGALTALMLMIFLMTCCRKTNRAESIQHSPGETGRKVSVTSHSGRVISSWESYKSGGETKL

SEQ ID NO: 31072 - protein, 524 aa, Artificial Sequence
  derived and/or modified protein sequence (wt) from glycoprotein__RABV__GQ857472.1
MIPQVLLFVPLLVFSSCFGKFPIYTIPDKLGPWSPIDIHHLSCPNNLVVEDEGCTNLSGFSYMELKVGYISAIKVNGFTCTGVVTEAETYTNFVGYVTTTFKRKHFRPMPDACRAAYNWKMAGDPRYEESLHNPYPDYHWLRTVKTSKESLVIISPSVADLDPYDKSLHSRVFPGGKCSGITVSSTCCSTNHDYTIWMPENPRLGTSCDIFTNSRGKRASKGGKTCGFVDERGLYKSLKGACKMKLCGVLGLRLMDGTWVAIQTSDEIKWCSPDQLVNLHDFHSDEIEHLVVEELVKKREECLDALETIMTTKSVSFRRLSHLRKLVPGFGKAYTIFNKTLMEADAHYKSIRTWNEIIPSKGCLRVGGRCHPHVNGVFFNGIILGPDGHVLIPEMQSSLLHQHMELLESSVIPLMHPLADPSTVFKDGDEAEDFVEVHLPDVHKQISGVDLGLPNWGKYVLISAGALTALMLMIFLMTCCRKTNRAESIQHSPGETGRKVSVTSHNGRVISSWESYKSGGETKL

SEQ ID NO: 31073 - protein, 524 aa, Artificial Sequence
  derived and/or modified protein sequence (wt) from glycoprotein__RABV__GQ918139.1
MVPQVLLFVLLLGFSLCFGKFPIYTIPDELGPWSPIDIHHLSCPNNLVVEDEGCTNLSEFSYMELKVGYISAIKVNGFTCTGVVTEAETYTNFVGYVTTTFKRKHFRPTPDACRAAYNWKMAGDPRYEESLHNPYPDYHWLRTVRTTKESLIIISPSVTDLDPYDKSLHSRVFPGGKCSGITVSSTYCSTNHDYTIWMPENPRPRTPCDIFTNSRGKRASNGNKTCGFVDERGLYKSLKGACRLKLCGVLGLRLMDGTWVAMQTSDETKWCPPDQLVNLHDFRSDEIEHLVVEELVKKREECLDALESIMTTKSVSFRRLSHLRKLVPGFGKAYTIFNKTLMEADAHYKSVRTWNEIIPSKGCLKVGGRCHPHVNGVFFNGIILGPDDHVLIPEMQSSLLQQHMELLKSSVIPLMHPLADPSTVFKEGDEAEDFVEVHLPDVYKQISGVDLGLPNWGKYVLMTAGAMIGLVLIFSLMTWCRRANRPESKQRSFGGTGGNVSVTSQSGKVIPSWESYRSGGEIRL

SEQ ID NO: 31074 - protein, 524 aa, Artificial Sequence
  derived and/or modified protein sequence (wt) from glycoprotein__RABV__GU186379.1
MVPQALLFVPLLAVPLCFGKFPIYTIPDKLGPWSPIDIHHLSCPNNLVVEDEGCTNLSGFSYMELKVGYISAIKVNGFTCTGVVTEAETYTNFVGYVTTTFKRKHFRPTPDACRSAYNWKMAGGPRYEESLHNPYPDYHWLRTVKTTKESFVIISPSMADLDPYDKSLHSRVFPRGKCSGITVSSTYCSTNHDYTIWMLENPRLGTSCDIFTNSRGKRASKGSKTCGFVDERGLYKSLKGACKLKLCGVLGLRLMDGTWVAIQTSDETKWCPPDQLVNLHDFHSDEIEHLVVEELVKKREECLGALESIMTTKSVSFRRLSHLRKLVPGFGKAYTIFNKTLMEADAHYKSVRTWNEIIPSKGCLRVGGRCHPHVNGVFFNGIILGPDGHVLIPEMQSSLLQQHMELLESSVIPLMHPLADPSTVFKDGDEAEDFVEVHLPDVHKQVSGVDLGLPSWGKYVLMSAGILTALMLMIFLMTCCRRTNRAESIQHSLGETGRKVSVTSQNGRVISSWESYKSGGETKL

SEQ ID NO: 31075 - protein, 524 aa, Artificial Sequence
  derived and/or modified protein sequence (wt) from glycoprotein__RABV__GU186380.1
MVPQALLFVPLLAVPLCFGKFPIYTIPDKLGPWSPIDIHHLSCPNNLVVEDEGCTNLSGFSYMELKVGYISAIKVNGFTCTGVVTEAETYTNFVGYVTTTFKRKHFRPTPDACRSAYNWKMAGDPRYEESLHNPYPDYHWLRTVKTTKESFVIISPSVADLDPYDESLHSRVFPRGKCSGITVSSTYCSTNHDYTIWMPENPRLGTSCDIFTNSRGKRASKGSKTCGFVDERGLYKSLKGACKLKLCGVLGLRLMDGTWVAIQTSDETKWCPPDQLANLHDFHSDEIEHLVVEELVRKREECLDALESIMTTKSVSFRRLSHLRKLVPGFGKAYTIFNKTLMEADAHYKSVRTWNEIIPSKGCLRVGGRCHPHVNGVFFNGIILGPDGHVLIPEMQSSLLQQHMELLESSVIPLMHPLADPSTVFKDGDEAEDFVEVHLPDVHKQVSGVDLGLPSWGRYVLMSAGILTALMLMIFLMTCCRRTNRAKSIQHSLGETGRKVSVTSQNGRVISSWESYKSGGETKL

SEQ ID NO: 31076 - protein, 524 aa, Artificial Sequence; identical to SEQ ID NO: 30839
  derived and/or modified protein sequence (wt) from glycoprotein__RABV__GU186381.1

SEQ ID NO: 31077 - protein, 524 aa, Artificial Sequence
  derived and/or modified protein sequence (wt) from glycoprotein__RABV__GU186382.1
MIPQVLLFVPLLVFSSCFGKFPIYTIPDKLGPWSPIDIHHLSCPNNLVVEDEGCTNLSGFSYMELKVGYISAIKVNGFTCTGVVTEAETYTNFVGYVTTTFKRKHFRPMPDACRAAYNWKMAGDPRYEESLHNPYPDYHWLRTVKTTKESLVIISPSVADLDPYDKSLHSRVFPGGKCSGITVSSTCCSTNHDYTIWMPENPRLGTSCDISTNSRGKRASKGGKTCGFVDERGLYKSLKGACKLKLCGVLGLRLMDGTWVAIQTSDEIKWCSPDQLVNLHDFHSDEIEHLVVEELVKKREECLDALETIMTTKSVSFRRLSHLRKLVPGFGKAYTIFNKTLMEADAHYKSIRTWNEIIPSKGCLRVGGRCHPHVNGVFFNGIILGPDGHVLIPEMQSSLLHQHMELLESSVIPLMHPLADPSTVFKDGDEAEDFVEVHLPDVHKQISGVDLGPPNWGKYVLISAGALTALMSMIFLMTCCRKTNRAESIQHSPGETGRKVSVTSHNGRVISSWESYKSGGETKL

SEQ ID NO: 31078 - protein, 524 aa, Artificial Sequence
  derived and/or modified protein sequence (wt) from glycoprotein__RABV__GU186383.1
MIPQVLLFVPLLVFSSCFGKFPIYTIPDKLGPWSPIDIHHLSCPNNLVVEDEGCTNLSGFSYMELKVGYISAIKVNGFTCTGVVTEAETYTNFVGYVTTTFKRKHFRPMPDACRAAYNWKMAGDPRYEESLHNPYPDYHWLRTVKTTKESLVIISPSVADLDPYDKSLHSRVFPGGKCSGITVSSTCCSTNHDYTIWMPENPRLGTSCDIFTNSRGKRASKGGKTCGFVDERGLYKSLKGACKLKLCGVLGLRLMDGTWVAIQTSDEIKWCSPDQLVNLHDFHSDEIEHLVVEELVKKREECLDALETIMTTKSVSFRRLSHLRELVPGFGKAYTIFNKTLMEADAHYKSIRTWNEIIPSKGCLRVGGRCHPHVNGVFFNGIILGPDGHVLIPEMQSSLLHQHMELLESSVIPLMHPLADPSTVFKDGDEAEDFVEVHLPDVHKQISGVDLGLPNWGKYVLISAGALTALISMIFLMTCCRKTNRAESIQHSPGETGRKVSVTSHNGRVISSWESYKSGGETKL

SEQ ID NO: 31079 - protein, 524 aa, Artificial Sequence
  derived and/or modified protein sequence (wt) from glycoprotein__RABV__GU186384.1
MIPQVLLFVPLLVFSSCFGKFPIYTIPDKLGPWSPIDIHHLSCPNNLVVEDEGCTNLSGFSYMELKVGYISAIKVNGFTCTGVVTEAETYTNFVGYVTTTFKRKHFRPMPDACRAAYNWKMAGDPRYEESLHNPYPDYHWLRTVKTTKESLVIISPSVADLDPYDKSLHSRVFPGGKCSGITVSSTCCSTNHDYTIWMPENPRLGTSCDIFTNSRGKRASKGGKTCGFVDERGLYKSLKGACKLKLCGVLGLRLMDGTWVAIQTSDEIKWCSPDQLVNLHDFHSDEIEHLVVEELVKKREECLDALETIMTTKSVSFRRLSHLRKLVPGFGKAYTIFNKTLMEADAHYKSIRTWNEIIPSKGCLRVGGRCHPHVNGVFFNGIILGPDGHVLIPEMQSSLLHQHMELLESSVIPLMHPLADPSTVFKDGDEAEDFVDVHLPDVHKQISGVDLGLPNWGKYVLISAGALTALMLMIFLMTCCRKANRAESIQHNPGGTGRKVSVTSHNGRVISSWESYKSGGETKL

SEQ ID NO: 31080 - protein, 524 aa, Artificial Sequence
  derived and/or modified protein sequence (wt) from glycoprotein__RABV__GU186385.1
MIPQVLLFVPLLVFSSCFGKFPIYTIPDKLGPWSPIDIHHLSCPNNMVVEDEGCTNLSGFSYMELKVGYISAIKVNGFTCTGVVTEAETYTNFVGYVTTTFKRKHFRPMPDACRAAYNWKMAGDPRYEESLHNPYPDYHWLRTVKTTKESLVIISPSVADLDPYDKSLHSRVFPGGKCSGITVSSTCCSTNHDYTIWMPENPRLGTSCDIFTNSRGKRASKGGKTCGFVDERGLYKSLKGACKLKLCGVLGLRLMDGTWVAIQTSDEIKWCSPDQLVNLHDFHSDEIEHLVVEELVKKREECLDALETIMTTKSVSFRRLSHLRKLVPGFGKAYTIFNKTLMEADAHYKSIRTWNEIIPSKGCLRVGGRCHPHVNGVFFNGIILGPDGHVLIPEMQSSLLHQHMELLESSVIPLMHPLADPSTVFKDGDEAEDFVEVHLPDVHKQISGVDLGLPNWGKYVLISAGALTALMLTIFLMTCCRKTSRAESIQHSPGETGRKVSVTSHNGRVISSWESYKSGGETKL

SEQ ID NO: 31081 - protein, 524 aa, Artificial Sequence
  derived and/or modified protein sequence (wt) from glycoprotein__RABV__GU186386.1
MVPQALLFVPLLAVPLCFGKFPIYTIPDKLGPWSPIDIHHLSCPNNLVVEDEGCTNLSGFSYMELKVGYISAIKVNGFTCTGVVTEAETYTNFVGYVTTTFKRKHFRPTPDACRSAYNWKMAGDPRYEESLHNPYPDYHWLRTVKTTKESFVIISPSVADLDPYDKSLHSRVFPRGKCSGITVSSTYCSTNHDYTIWMPENPRLGTSCDIFTNSRGKRASKGSKTCGFVDERGLYKSLKGACKLKLCGVLGLRLMDGTWVAIQTSDETKWCPPDQLVNLHDFHSDEIEHLVVEELVKKREECLDALESIMTTKSVSFRRLSHLRKLVPGFGKAYTIFNKTLMEADAHYKSVRTWNEIIPSKGCLRVGGRCHPHVNGVFFNGIILGPDGHVLIPEMQSSLLQQHMELLESSVIPLMHPLADPSTVFKDGDEAEDFVEVHLPDVHKQVSGVDLGLPSWGKYVLMSAGILTALMLMIFLTTCCRRTNRAESIQHSLGETGRKVSVTSQNGRVISSWESYKSGGETKL

SEQ ID NO: 31082 - protein, 524 aa, Artificial Sequence
  derived and/or modified protein sequence (wt) from glycoprotein__RABV__GU186387.1
MIPQALLFVPLLVFSLCFGKFPVYAIPDKLGPWSPIDIHHLSCPNNLVVEDEGCTNLSGFSYMELKVGYISAIKVNGFTCTGVVTEAETYTNFIGYVTTTFKRKHFRPTPDACRAAYNWKMAGDPRYEESLHNPYPDYHWLRTVKTTKESLVVISPSVADLDPYDKSLHSRVFPSGKCSGITVSSTCCSTNHDYTIWMPENPRLGTSCDIFVNSRGKRASKGSKTCGFVDERGLYKSLKGACKLKLCGVLGLRLMDGTWVAIQTSDETKWCPPDQLVNLHDFRSDEIEHLVVEELVKKREECLDALESIMTTKSVSFRRLSHLRKLVPGFGKAYTIFNKTLMEADAHYKSVRTWNEIIPSKGCLRVGGRCHPHVNGVFFNGIILGPDGHVLIPEMQSSLLQQHMELLESSVIPLMHPLADPSTIFKNGDEAEDFVEVHLPDVHKQVSGVDLGLPNWGKYVLMSAGALIALMLMIFLMTCCRKTDRTGSTHHSPGETGRKVSVTSQNGRVIASWESYKSGGETKL

SEQ ID NO: 31083 - protein, 524 aa, Artificial Sequence; identical to SEQ ID NO: 30839
  derived and/or modified protein sequence (wt) from glycoprotein__RABV__GU186388.1

SEQ ID NO: 31084 - protein, 524 aa, Artificial Sequence
  derived and/or modified protein sequence (wt) from glycoprotein__RABV__GU186389.1
MIPQVLLFVPLLVFSSCFGKFPIYTIPDKLGPWSPIDIHHLSCPNNLVVEDEGCTNLSGFSYMELKVGYISAIKVNGFTCTGVVTEAETYTNFVGYVTTTFKRKHFRPMPDACRAAYNWKMAGDPRYEESLHNPYPDYHWLRTVKTTKESLVIISPSVADLDPYDKSLHSRVFPGGKCSGITVSSTCCSTNHDYTIWMPENPRLGTSCDIFTNSRGKRASKGGKTCGFVDERGLYKSLRGACKLKLCGVLGLRLMDGTWVAIQTSDEIKWCSPDQLVNLHDFHSDEIEHLVVEELVKKREECLDALETIMTTKSVSFRRLSHLRKLVPGFGKAYTIFNKTLMEADAHYKSIRTWNEIIPSKGCLRVGGRCHPHVNGVFFNGIILGPDGHVLIPEMQSSLLHQHMELLESSVIPLMHPLADPSTVFKDGDEAEDFVEVHLPDVHKQISGVDLGLPNWGKYVLISAGALTALMLMIFLMTCCRKTNRAESIQHSPGETGRKVSVTSHNGRVISSWESYKSGSETKL

SEQ ID NO: 31085 - protein, 524 aa, Artificial Sequence; identical to SEQ ID NO: 30827
  derived and/or modified protein sequence (wt) from glycoprotein__RABV__GU186390.1

SEQ ID NO: 31086 - protein, 524 aa, Artificial Sequence
  derived and/or modified protein sequence (wt) from glycoprotein__RABV__GU186392.1
MIPQVLLFVPLLVFSSCFGKFPIYTIPDKLGPWSPIDIHHLSCPNNLVVEDEGCTNLSGFSYMELKVGYISAIKVNGFTCTGVVTEAETYTNFVGYVTTTFKRKHFRPTPDACRAAYNWKMAGDPRYEESLHNPYPDYHWLRTVKTSKESLVIISPSVADLDPYDKSLHSRVFPGGKCSGITVSSTCCSTNHDYTIWMPENPRLGTSCDIFTNSRGKRASKGGKTCGFVDERGLYKSLKGACKLKLCGVLGLRLMDGTWVAIQTSDEIKWCSPDQLVNLHDFHSDEIEHLVVEELVKKREECLDALETIMTTKSVSFRRLSHLRKLVPGFGKAYTIFNKTLMEADAHYKSIRTWNEIIPSKGCLRVGGRCHPHVNGVFFNGIILGPDGHVLIPEMQSSLLHQHMELLESSVIPLMHPLADPSTVFKDGDEAEDFVEVHLPDVHKQISEVDLGLPNWGKYVLVSAGALTALMLMIFLMTCCRKTNRAESIQHSPGETGRKVSVTSHNGRVISSWESYKSGGETKL

SEQ ID NO: 31087 - protein, 524 aa, Artificial Sequence
  derived and/or modified protein sequence (wt) from glycoprotein__RABV__GU186396.1
MIPQALLFVPLLVFSLCFGKFPIYTIPDKLGPWSPIDIHHLSCPNNLVVEDEGCTNLSGFSYMELKVGYISAIKVNGFTCTGVVTEAETYTNFVGYVTTTFKRKHFRPTPDACRAAYNWKMAGDPRYEESLNNPYPDYHWLRTVKTTKESLVVISPSVADLDPYDESLHSRVFPSGKCSGITVSSTCCSTNHDYTIWMPENPRLGTSCDIFVNSRGKRASKGSKTCGFVDERGLYKSLKGACKLKLCGVLGLRLMDGTWVAIQTSDETKWCPPDQLVNLHDFRSDEIEHLVVEELVKKREECLDALESIMTTKSVSFRRLSHLRKLVPGFGKAYTIFNKTLMEADAHYKSVRTWNEIIPSKGCLRVGGRCHPHVNGVFFNGIILGPDGHVLIPEMQSSLLQQHMELLESSVIPLMHPLADPSTIFKDGDEAEDFVEVHLPDVHKQVSGVDLGLPNWGKYVLMSAGALIALMLMIFSMTCCRKTDRIGSTHHGPGETGRKVSVTSQNGRVIASWESYKSGGETKL

SEQ ID NO: 31088 - protein, 524 aa, Artificial Sequence
  derived and/or modified protein sequence (wt) from glycoprotein__RABV__GU186397.1
MIPQALLFVPLLVFSLCFGKFPIYTIPDKLGPWSPIDIHHLSCPNNLVVEDEGCTNLSGFSYMELKVGYISAIKANGFTCTGVVTEAETYTNFVGYVTTTFKRKHFRPTPDACRAAHNWKMAGEPRYEESLHNPYPDYHWLRTVKTTKESLVIISPSVADLDPYDKSLHSRVFPSGKCSGITVSSTYCSTNHDYTIRMPENPRLGTSCDIFVNSRGKRASKGSKTCGFVDERGLYKSLKGACKLKLCGVLGLRLMDGTWVAIQTSDETKWCPPDQLVNLHDFRSDEIEHLVVEELVKKREECLDALESIMTTKSVSFRRLSHLRKLVPGFGKAYTIFNKTLMEADAHYKSVRTWNEIIPSKGCLRVGGRCHPHVNGVFFNGIILGPDGHVLIPEMQSSLLQQHMELLESSVIPLMHPLADPSTIFKDGDEAEDFVEVHLPDVHRQVSGVDLGLPNWGKYVLMSAGALVALMLMIFLMTCCVKTDRTGSTHHSPGETGRKVSVTSQNGRVIASWESYKSGGETKL

SEQ ID NO: 31089 - protein, 524 aa, Artificial Sequence; identical to SEQ ID NO: 30527
  derived and/or modified protein sequence (wt) from glycoprotein__RABV__GU186398.1

SEQ ID NO: 31090 - protein, 524 aa, Artificial Sequence
  derived and/or modified protein sequence (wt) from glycoprotein__RABV__GU186400.1
MVPQALLFVPLLAVPLCFGKFPIYTIPDKLGPWSPIDIHHLSCPNNLVVEDEGCTNLSGFSYMELKVGYISAIKVNGFTCTGVVTEAETYTNFVGYVTTTFKRKHFRPTSDACRSAYNWKMAGDPRYEESLHNPYPDYHWLRTVKTTKESFVIISPSVADLDPYDKSPHSRVFPRGKCSGITVSSTYCSTNHDYTIWMPENPRLGTSCDIFTNSRGKRASKGSKTCGFVDERGLYKSLKGACKLKLCGVLGLRLMDGTWVAIQTSDETKWCPPDQLVNLHDFHSDEIEHLVVEELVKKREECLDALESIMTTKSVSFRRLSHLRKLVPGFGKAYTIFNKTLMEADAHYKSVRTWNEIIPSKGCLRVGGRCHPHVNGVFFNGIILGPDGHVLIPEMQSSLLQQHMELLESSVIPLMHPLADPSTVFKDGDEAEDFVEVHLPDVHKQVSGVDLGLPSWGKYVLMSAGILTALMLTIFLMTCCRRTNRAKSIQHSLGETGRKVSVTSQSGRVISSWESYKSGGETKL

SEQ ID NO: 31091 - protein, 524 aa, Artificial Sequence
  derived and/or modified protein sequence (wt) from glycoprotein__RABV__GU186401.1
MVPQALLFVPLLAVPLCFGKFPIYTIPDKLGPWSPIDIHHLSCPNNLVVEDEGCTNLSGFSYMELKVGYTSAIKVNGFTCTGVVTEAETYTNFVGYVTTTFKRKHFRPTSDACRSAYNWKMAGDPRYEESLHNPYPDYHWLRTVKTTKESFVIISPSVADLDPYDKSLHSRVFPRGKCSGITVSSTYCSTNHDYTIWMPENPRLGTSCDIFTNSRGKRASKGSKTCGFVDERGLYKSLKGACKLKLCGVLGLRLMDGTWVAIQTSDETKWCPPDQLVNLHDFHSDEIEHLVVEELVKKREECLDALESIMTTKSVSFRRLSHLRKLVPGFGKAYTIFNKTLMEADAHYKSVRTWNEIIPSKGCLRVGGRCHPHVNGVFFNGIILGPDGHVLIPEMQSSLLQQHMELLESSVIPLMHPLADPSTVFKDGDEAEDFVEVHLPDVHKQVSGVDLGLPSWGKYVLMSAGILTALMLTIFLMTCCRRTNRAKSIQHSLGETGRKVSVTSQSGRVISSWESYKSGGETKL

SEQ ID NO: 31092 - protein, 524 aa, Artificial Sequence
  derived and/or modified protein sequence (wt) from glycoprotein__RABV__GU186402.1
MAPQALLFVPLLAVPLCLGKFPIYTIPDKLGPWSPIDIHHLSCPNNLVVEDEGCTNLSGFSYMELKVGYISAIKVNGFTCTGVVTEAETYTNFVGYVTTTFKRKHFRPTPDACRSAYNWKMAGDPRYEESLHNPYPDYHWLRTVKTTKESFVIISPSVADLDPYDKSLHSRVFPRGKCSGITVSSTYCSTNHDYTIWMPENPRLGTSCDIFTNSRGKRASKGSKTCGFVDERGLYKSLKGACKLKLCGVLGLRLMDGTWVAIQTSDETKWCPPDQLVNLHDFHSDEIEHLVVEELVKKREECLDALESIMTTKSVSFRRLSHLRKLVPGFGKAYTIFNKTLMEADAHYKSVRTWNEIIPSKGCLRVGGRCHPHVNGVFFNGIILGPDGHVLIPEMQSSLLQQHMELLESSVIPLMHPLADPSTVFKDGDEAEDFVEVHLPDVHKHVSGVDLGLPSWGKYVLVSAGILTALMLTIFLMTCCRRTNRAESIQHSLGETGRKVSVTSQSGRVISSWESYKSGGETKL

SEQ ID NO: 31093 - protein, 524 aa, Artificial Sequence
  derived and/or modified protein sequence (wt) from glycoprotein__RABV__GU186403.1
MIPQVLLFVPLLVFSSCFGKFPIYTIPDKLGPWSPIDIHHLSCPNNLVVEDEGCTNLSGFSYMELKVGYISAIKVNGFTCTGVVTEAETYTNFVGYVTTTFKRKHFRPMPDACRAAYNWKMAGDPRYEESLHNPYPDYHWLRTVKTTKESLVVISPSVADLDPYDKSLHSRVFPGGKCSGITVSSTCCSTNHDYTIWMPENPRLGTSCDIFTNSRGKRASKGGKTCGFVDERGLYKSLKGACKLKLCGVLGLRLMDGTWVAIQTSDEIKWCSPDQLVNLHDFHSDEIEHLVVEELVKKREECLDALETIMTTKSVSFRRLSHLRKLVPGFGKAYTIFNKTLMEADAHYKSIRTWNEIIPSKGCLRVGGRCHPHVNGVFFNGIILGPDGHVLIPEMQSSLLHQHMELLESSVIPLMHPLADPSTVFKDGDEAEDFVEVHLPDVHKQISGVDLGLPNWGKYVLISAGALTALMLTIFLMTCCRKTNRAGSIQHSPGETGRKVSVTSHNGRVISSWESYKSGSETKL

SEQ ID NO: 31094 - protein, 524 aa, Artificial Sequence; identical to SEQ ID NO: 30845
  derived and/or modified protein sequence (wt) from glycoprotein__RABV__GU186404.1

SEQ ID NO: 31095 - protein, 524 aa, Artificial Sequence
  derived and/or modified protein sequence (wt) from glycoprotein__RABV__GU186406.1
MIPQVLLFVPPLVFSSCFGKFPIYTIPDKLGPWSPIDIHHLSCPNNLVVEDEGCTNLSGFSYMELKVGYISAIKVNGFTCTGVVTEAETYTNFVGYVTTTFKRKHFRPMPDACRAAYNWKMAGDPRYEESLHNPYPDYHWLRTVKTTKESLVIISPSVADLDPYDKSLHSRVFPGGKCSGITVSSTCCSTNHDYTIWMPENPRLGTSCDIFTNSRGKRASKGGKTCGFVDERGLYKSLKGACKLKLCGVLGLRLMDGTWVAIQTSDEIKWCSPDQLVNLHDFHSDEIEHLVVEELVKKREECLDALETIMTTKSVSFRRLSHLRKLVPGFGKAYTIFNKTLMEADAHYKSIRTWNEIIPSKGCLRVGGRCHPHVNGVFFNGIILGPDGHVLIPEMQSSLLHQHMELLESSVIPLMHPLADPSTVFKDGDEAEDFVEVHLPDVHKQISGVDLGLPNWGKYVLISAGALTALMLMTFLMTCCRKTNRAESIQHSPGETGRKVSVTSHNGRVISSWESYKSGGETKL

SEQ ID NO: 31096 - protein, 524 aa, Artificial Sequence
  derived and/or modified protein sequence (wt) from glycoprotein__RABV__GU186407.1
MIPQVLLFVPLLVFSSCFGKFPIYTIPDKLGPWSPIDIHHLSCPNNLVVEDEGCTNLSGFSYMELKVGYISAIKVNGFTCTGVVTEAETYTNFVGYVTTTFKRKHFRPMPDACRAAYNWKMAGDPRYEESLHNPYPDYHWLRTVKTTKESLVIISPSVADLDPYDKSLHSRVFPGGKCSGITVSSTCCSTNHDYTIWMPENPRLGTSCDIFTNSRGKRASKGGKTCGFVDERGLYKSLKGACKLKLCGVLGLRLMDGTWVAIQTSDEIKWCSPDQLVNLHDFHSDEIEHLVVEELVKKREECLDALETIMTTKSVSFRRLSHLRKLVPGFGKAYTIFNKTLMEADAHYKSIRTWNEIIPSKGCLRVGGRCHPHVNGVFFNGIILGPDGHVLIPEMQSSLLHQHMELLESSVIPLMHPLADPSTVFKDGDEAEDFVEVHLPDVHKQISGVDLGLPNWGKYVLISAGALTALMLMTFLMTCCRKTNRAESIQHSPGETGRKVSVTSHNGRVISSWESYKSGGETKL

SEQ ID NO: 31097 - protein, 524 aa, Artificial Sequence; identical to SEQ ID NO: 31096
  derived and/or modified protein sequence (wt) from glycoprotein__RABV__GU186408.1

SEQ ID NO: 31098 - protein, 524 aa, Artificial Sequence
  derived and/or modified protein sequence (wt) from glycoprotein__RABV__GU186409.1
MIPQVLLFVPLLVFSSCFGKFPIYTIPDKLGPWSPIDIHHLSCPNNLVVEDEGCTNLSGFSYMELKVGYISAIKVNGFTCTGAVTEAETYTNFVGYVTTTFKRKHFRPMPDACRAAYNWKMAGDPRYEESLHNPYPDYHWLRTVKTTKESLVIISPSVADLDPYDKSLHSRVFPGGKCSGITVSSTCCSTNHDYTIWMPENPRLGTSCDIFTNSRGKRASKGGKTCGFVDERGLYKSLKGACKLKLCGVLGLRLMDGTWVAIQTSDEIKWCPPDQLVNLHDFHSDEIEHLVVEELVKKREECLDALETIMTTKSVSFRRLSHLRKLVPGFGKAYTIFNKTLMEADAHYKSIRTWNEIIPSKGCLRVGGRCHPHVNGVFFNGIILGPDGHVLIPEMQSSLLHQHMELLESSVIPLMHPLADPSTVFKDGDEAEDFVEVHLPDVHKQISGVDLGLPNWGKYVLISAGALTALMLTIFLMTCCRKTNRAGSIQHSPGETGRKVSVTSHNGRVISSWESYKSGSETKL

SEQ ID NO: 31099 - protein, 524 aa, Artificial Sequence
  derived and/or modified protein sequence (wt) from glycoprotein__RABV__GU186410.1
MIPQVLLFVPLLVFSSGFGKFPIYTIPDKLGPWSPIDIHHLSCPNNLVVEDEGCTNLSGFSYMELKVGYISAIKVNGFTCTGVVTEAETYTNFVGYVTTTFKRKHFRPMPDACRAAYNWKMAGDPRYEESLHNPYPDYHWLRTVKTTKESLVIISPSVADLDPYDKSLHSRVFPGGKCSGITVSSTCCSTNHDYTIWMPENPRLGTSCDIFTNSRGKRASKGGKTCGFVDERGLYKSLKGACKLKLCGVLGLRLMDGTWVAIQTSDEIKWCSPDQLVNLHDFHSDEIEHLVVEELVKKREECLDALETIMTTKSVSFRRLSHLRKLVPGFGKAYTIFNKTLMEADAHYKSIRTWNEIIPSKGCLRVGGRCHPHVNGVFFNGIILGPDGHVLIPEMQSSLLHQHMELLESSVIPLMHPLADPSTVFKDGDEAEDFVEVHLPDVHKQISGVDLGLPNWGKYVLISAGALTALMLTIFLMTCCRKTNRAGSIQHSPGETGRKVSVTSHNGRVISSWESYKSGSETKL

SEQ ID NO: 31100 - protein, 524 aa, Artificial Sequence; identical to SEQ ID NO: 30852
  derived and/or modified protein sequence (wt) from glycoprotein__RABV__GU345746.1

SEQ ID NO: 31101 - protein, 524 aa, Artificial Sequence
  derived and/or modified protein sequence (wt) from glycoprotein__RABV__GU345747.1
MIPQALLFVPLLVFSLCFGKFPIYTIPDKLGPWSPIDIHHLSCPNNLVVEDEGCTNLSGFSYMELKVGYISAIKVNGFTCTGVVTEAETYTNFVGYVTTTFKRKHFRPTPDACRAAYNWKMAGDPRYEESLHNPYPDYHWLRTVKTTKESLVIISPSVADLDPYDKSLHSRVFPSGKCSGITVSSTYCSTNHDYTIWMPENPRLGTSCDIFVNSRGKRASKGSKTCGFVDERGLYKSLKGACKLKLCGVLGLRLMDGTWVAIQTSDETKWCPPDQLVNLHDFRSDEIEHLVVEELVKKREECLDALESIMTTKSVSFRRLSHLRKLVPGFGKAYTIFNKTLMEADAHYKSVRTWNEIIPSKGCLRVGGRCHPHVNGVFFNGIILGPDGHVLIPEMQSSLLQQHMELLESSVIPLMHPLADPSTIFKDGDEAEDFVEVHLPDVHKQVSGVDLGLPNWGKYVLMSAGALIALMLMIFLMTCCRKTDRTGSTHHSPGETGRKVSVTSQNGRVIASWESYKSGGETRL

SEQ ID NO: 31102 - protein, 524 aa, Artificial Sequence
  derived and/or modified protein sequence (wt) from glycoprotein__RABV__GU565703.1
MVPQVLLFVPLLGFSLCFGKFPIYTIPDKLGPWSPIDIHHLSCPNNLVVEDEGCTNLSEFSYMELKVGYISAIKVNGFTCTGVVTEAETYTNFVGYVTTTFKRKHFRPTPDACRAAYNWKMAGDPRYEESLHNPYPDYHWLRTVKTTKESLVIISPSVTDLDPYDKSLHSRVFPGGNCSGITVSSTYCSTNHDYTIWMPENLRLGTSCDIFTNSRGKRASKGGKTCGFVDERGLYKSLKGACKLKLCGVLGLRLMDGTWVAMQTSDETKWCPPGQLVNLHDFRSDEIEHLVVEELVKKREECLDALESIMTTKSVSFRRLSHLRKLVPGFGKAYTIFNKTLMEADAHYKSVRTWNEIIPSKGCLRVGGRCHPHVNGVFFNGIILGSDGHVLIPEMQSSLLQQHMELLESSVIPLMHPLADPSTVFKDGDEVEDFVEVHLPDVHEQVSGVELGLPNWGKYVLMIAGALIALMLIIFLMTCCRRVNRPESTQSSLGETGRNVSVTSQSGKVISSWESYKSGGETRL

SEQ ID NO: 31103 - protein, 524 aa, Artificial Sequence
  derived and/or modified protein sequence (wt) from glycoprotein__RABV__GU565704.1
MVPQVLLFAPLLVFSLCFGKFPIYTIPDKLGPWSPIDLHHLSCPNNLVVEDEGCTNLSGFSYMELKVGYISAIKVNGFTCTGVVTEAETYTNFVGYVTTTFKRKHFRPTPDACRAAYNWKMAGDPRYEESLHNPYPDYHWLRTVKTTKESLVIISPSVTDLDPYDKSLHSRVFPGGNCSGITVSSTYCSTNHDYTIWMPENLRLGTSCDIFTHSRGKRASKGDKTCGFVDERGLYKSLKGACKLKLCGVLGLRLMDGTWVAMQTSDETKWCPPGQLVNLHDFRSDEIEHLVVEELVKKREECLDALESIMTTKSVSFRRLSHLRKLVPGFGKAYTIFNKTLMEADAHYKSVQTWNEIIPSKGCLRVGERCHPHVNGVFFNGIILGSDGHVLIPEMQSSLLQQHMELLESSVIPLMHPLADPSTVFKDGDEVEDFVEVHLPDVHKQVSGVDLGLPKWGKYVLMIAGALIALMLIIFLMTCCRRVNRPESTQSNLGGTGRNVSVTSQSGKVISSWESYKSGGETRL

SEQ ID NO: 31104 - protein, 524 aa, Artificial Sequence; identical to SEQ ID NO: 31084
  derived and/or modified protein sequence (wt) from glycoprotein__RABV__GU591789.1

SEQ ID NO: 31105 - protein, 524 aa, Artificial Sequence; identical to SEQ ID NO: 31084
  derived and/or modified protein sequence (wt) from glycoprotein__RABV__GU591791.1

SEQ ID NO: 31106 - protein, 524 aa, Artificial Sequence
  derived and/or modified protein sequence (wt) from glycoprotein__RABV__GU647092.1
MIPQALLFVPLLVVPLCFGKFPIYTIPDKLGPWSPIDIHHLSCPNNLVMEDEGCTNLSGFSYMELKVGYISAIKVNGFTCTGVVTEAETYTNFVGYVTTTFKRKHFRPTPDACRSAYNWKMAGDPRYEESLHNPYPDYHWLRTVKTTKEPFVIISPSVADLDPYDKSLHSRVFPRGKCSGITVSSTYCPTNHDYTIWMPENPRSGTSCDIFTNSRGKRAFKGSKTCGFVDERGLYKSLKGACKLKLCGVLGLRLMDGTWVAIQTSDETKWCPPDQLVNLHDFHSDEIEHLVVEELVKKREECLDALESIMTTKSVSFRRLSHLRKLVPGFGKAYTIFNKTLMEADAHYKSVRTWNEIIPSKGCLRVGGRCHPHVNGVFFNGIILGPDGHVLIPEMQSSLLQQHMELLESSVIPLMHPLADPSTVFKNGDEAEDFVEVHLPDVHKQVSGVDLGLPSWGKYVLMSAGILTALMLMIFLMTCCRRTNRPESIQHSLGETGRKVSVTSQSGRVISSWESYKSGGETKL

SEQ ID NO: 31107 - protein, 524 aa, Artificial Sequence
  derived and/or modified protein sequence (wt) from glycoprotein__RABV__GU937024.1
MVPQALLFVPLLVFSMCFGKFPIYTIPDKLGPWSPIDIHHLSCPNNLVVEDEGCTNLSGFSYMELKVGYISAIKVNGFTCTGVVTEAETYTNFVGYVTTTFKRKHFRPTPDACRAAYNWKMAGDPRYEESLHNPYPDYHWLRTVKTTKESLVIISPSVADLDPYDKSLHSRVFPNGKCSGITISSTYCPTNHDYTIWLPENPRLGTSCDIFTNSRGKRASKGSKTCGFVDERGLYKSLKGACKLKLCGVLGLRLMDGTWVAMQASDETKWCPPDQLVNLHDFRSDEIEHLVVEELVKKREECLDALESIMTTKSVSFRRLSHLRKLVPGFGKAYTIFNKTLMEADAHYKSVRTWNEIIPSKGCLRVGGRCHPHVNGVFFNGIILGPDGHVLIPEMQSSLLQQHMELLESSVIPLMHPLADPSTVFKDGDEAENFVEVHLPDVHKQISGVDLGLPNWGKYVLVSAGVLIALMLIIFLMTCCGRVNRPKSTQHNLGGTGREVSVTPQSGKVISSWESYKSGGETRL

SEQ ID NO: 31108 - protein, 524 aa, Artificial Sequence
  derived and/or modified protein sequence (wt) from glycoprotein__RABV__GU937025.1
MVPQALLFVPLLVFSMCFGKFPIYTIPDKLGPWSPIDIHHLSCPNNLVVEDEGCTNLSGFSYMELKVGYISAIKVNGFTCTGVVTEAETYTNFVGYVTTTFKRKHFRPTPDACRAAYNWKMAGDPRYEESLHNPYPDYHWLRTVKTTKESLVIISPSVADLDPYDKSLHSRVFPNGKCSGITISSTYCPTNHYYTIWLPENPRQETSCDIFTNSRGKRASKGSKTCGFVDERGLYKSLKGACKLKLCGVLGLRLMDGTWVAMQASDETKWCPPDQLVNLHDFRSDEIEHLVVEELVKKREECLDALESIMTTKSVGFRRLSHLRKLVPGFRKAYTIFNKTLMEADAHYKSVRTWNEIIPSKGCLRVGGRCHPHVNGVFFNGIILGPDGHVLIPEMQSSLLQQHMGLLESSVIPLMHPLADPSTVFKDGDEAENFVEVHLPDVHKQISGVDLGLPNWGKYVLVSAGVLIALMLIIFLMTCCGRVNRPKSTQHNLGGTGREVSVTPQSGKVISSWESYKSGGETRL

SEQ ID NO: 31109 - protein, 524 aa, Artificial Sequence
  derived and/or modified protein sequence (wt) from glycoprotein__RABV__GU937026.1
MVPQALLFVPLLVFSMCFGKFPIYTIPDKLGPWSPIDIHHLSCPNNLVVEDEGCTNLSGFSYMELKVGYISAIKVNGFTCTGVVTEAETYTNFVGYVTTTFKRKHFRPTPDACRAAYNWKMAGDPRYEESLHNPYPDYHWLRTVKTTKESLVIISPSVADLDPYDKSLHSRVFPNGKCSGITISSTYCPTNHDYTIWLPENPRLGTSCDIFTNSRGKRASKGSKTCGFVDERGLYKSLKGACKLKLCGVLGLRLMDGTWVAMQASDETKWCPPDQLVNLHDFRSDEIEHLVVEELVKKREECLDALESIMTTKSVSFRRLSHLRKLVPGFGKAYTIFNKTLMEADAHYKSVRTWNEIIPSKGCLRVGGRCHPHVNGVFFNGIILGPDGHVLIPEMQSSLLQQHMELLESSVVPLMHPLADPSTVLKDGDEAENFVEVHLPDVHKQISGVDLGLPNWGKYVLVSAGVLIALMLIIFLMTCCGRVNRPKSTQHNLGGTGRKVSVTPQSGKVISSWESYKSGGETRL

SEQ ID NO: 31110 - protein, 524 aa, Artificial Sequence
  derived and/or modified protein sequence (wt) from glycoprotein__RABV__GU937027.1
MVPQALLFVPLLVFSMCFGKFPIYTIPDKLGPWSPIDIHHLSCPNNLVVEDEGCTNLSGFSYMELKVGYISAIKVNGFTCTGVVTEAETYTNFVGYVTTTFKRKHFRPTPDACRAAYNWKMAGDPRYEESLHNPYPDYHWLRTVKTTKESLVIISPSVADLDPYDKSLHSRVFPNGKCSGITISSTYCPTNHYYTIWLPENPRLGTSCDIFTNSRGKRASKGSKTCGFVDERGLYKSLKGACKLKLCGVLGLRLMDGTWVAMQASDETKWCPPDQLVNLHDFRSDEIEHLVVEELVKKREECLDALESIMTTKSVSFRRLSHLRKLVPGFGKAYTIFNKTLMEADAHYKSVRTWNEIIPSKGCLRVGGRCHPHVNGVFFNGIILGPDGRVLIPEMQSSLLQQHMELLESSVIPLMHPLADPSTVFKDGDEAENFVEVHLPDVHKQISGVDLGLPNWGKYVLVSAGVLIALMLIIFLMTCCGRVNRPKSTQHNLGGTGREVSVTPQSGKVISSWESYKSGGETRL

SEQ ID NO: 31111 - protein, 524 aa, Artificial Sequence
  derived and/or modified protein sequence (wt) from glycoprotein__RABV__GU937028.1
MVPQALLFVPLLVFSMCFGKFPIYTIPDKLGPWSPIDIHHLSCPNNLVVEDEGCTNLSGFSYMELKVGYISAIKVNGFTCTGVVTEAETYTNLVGYVTTTFKRKHFRPTPDACRAAYNWKMAGDPRYEESLHNPYPDYHWLRTVKTTKESLVIISPSVADLDPYDKSLHSRVFPNGKCSGITISSTYCPTNHDYTIWLPENPRLGTSCDIFTNSRGKRASKGSKTCGFVDERGLYKSLKGACKLKLCGVLGLRLMDGTWVAMQASDETKWCPPDQLVNLHDFRSDEIEHLVVEELVKKREECLDALESIMTTKSVSFRRLSHLRKLVPGFGKAYTIFNKTLMEADAHYKSVRTWNEIIPSKGCLRVGGRCHPHVNGVFFNGIILGPDGHVLIPEMQSSLLQQHMELLESSVIPLMHPLADPSTVFKDGDEAENFVEVHLPDVHKQISGVDLGLPNWGKYVLVSAGVLIALMLIIFLMTCCGRVNRPKSTQHNLGGTGREVSVTPQSGKVISSRESYKSGGETRL

SEQ ID NO: 31112 - protein, 524 aa, Artificial Sequence
  derived and/or modified protein sequence (wt) from glycoprotein__RABV__GU937029.1
MVPQALLFVPLLVFSMCFGKFPIYTIPDKLGPWSPIDIHHLSCPNNLVVEDEGCTNLSGFSYMELKVGYISAIKVNGFTCTGVVTEAETYTNLVGYVTTTFKRKHFRPTPDACRAAYNWKMAGDPRYEESLHNPYPDYHWLRTVKTTKESLVIISPSVADLDPYDKSLHSRVFPNGKCSGITISSTYCPTNHDYTIWLPENPRLGTSCDIFTNSRGKRASKGSKTCGFVDERGLYKSLKGACKLKLCGVLGLRLMDGTWVAMQASDETKWCPPDQLVNLHDFRSDEIEHLVVEELVKKREECLDALESIMTTKSVSFRRLSHLRKLVPGFGKAYTIFNKTLMEADAHYKSVRTWDEIIPSKGCLRVGGRCHPHVNGVFFNGIILGPDGHVLIPEMQSSLLQQHMELLESSVIPLMHPLADPSTVFKDGDEAENFVEVHLPDVHKQISGVDLGLPNWGKYVLVSAGVLIALMLIILLMTCCGRVNRPKSTQHNLGGTGREVSVTPQSGKVISSWESYKSGGETRL

SEQ ID NO: 31113 - protein, 524 aa, Artificial Sequence
  derived and/or modified protein sequence (wt) from glycoprotein__RABV__GU937030.1
MVPQALLFVPLLVFSMCFGKFPIYTIPDKLGPWSPIDIHHLSCPNNLVVEDEGCTNLSGFSYMELKVGYISAIKVNGFTCTGVVTEAETYTNFVGYVTTTFKRKHFRPTPDACRAAYNWKMAGDPRYEESLHNPYPDYHWLRTVKTTKESLVIISPSVADLDPYDKSLHSRVFPNGKCSGITISSTYCPTNHDYTIWLPENPRLGTSCDIFTNSRGKRASKGSKTCGFVDERGLYKSLKGACKLKLCGVLGLRLMDGTWVAMQASDETKWCPPDQLVNLHDFRSDEIEHLVVEELVKKREECLDALESIMTTKSVSFRRLSHLRKPVPGFGKAYTIFNKTLMEADAHYKSVRTWNEIIPSKGCLRVGGRCHPHVNGVFFNGIILGPDGHVLIPEMQSSLLQQHMELLESSVIPLMHPLADPSTVFKDGDEAENFVEVHLPDVHKQISGVDLGLPNWGEYVLVSAGVLIALMLIIFLMTCCGRVNRPKSTQHNLGGTGREVSVTPQSGKVISSWESYKSGGETRL

SEQ ID NO: 31114 - protein, 524 aa, Artificial Sequence
  derived and/or modified protein sequence (wt) from glycoprotein__RABV__GU937031.1
MVPQALLFVPLLVFSMCFGKFPIYTIPDKLGPWSPIDIHHLSCPNNLVVEDEGCTNLSGFSYMELKVGYISAIKVNGFTCTGVVTEAETYTNFVGYVTTTFKRKHFRPTPDACRAAYNWKMAGDPRYEESLHNPYPDYHWLRTVKTTKESLVIISPSVADLDPYDKSLHSRVFPNGRCSGITISSTYCPTNHDYTIWLPENPRLGTSCDIFTNSRGKRASKGSKTCGFVDERGLYKSLKGACKLKLCGVLGLRLMDGTWVAMQASDETKWCPPDQLVNLHDFRSDEIEHLVVEELVKKREECLDALESIMTTKSVSFRRLSHLRKLVPGFGKAYTIFNKTLMEADAHYKSVRTWNEIIPSKGCLRVGGRCHPHVNGVFFNGIILGPDGHVLIPEMQSSLLQQHMELLESSVIPLMHPLADPSTVFKDGDEAENFVEVHLPDVHKQISGVDLGLPNWGKYVLVSAGVLIALMLIIFLMTCCGRVNRPKSTQHNLGGTGREVSVTPQSGKVISSWESYKSGGETRL

SEQ ID NO: 31115 - protein, 524 aa, Artificial Sequence
  derived and/or modified protein sequence (wt) from glycoprotein__RABV__GU937032.1
MVPQALLFVPLLAFSMCFGKFPIYTIPDKLGPWSPIDIHHLSCPNNLVVEDEGCTNLSGFSYMELKVGYISAIKVNGFTCTGVVTEAETYTNFVGYVTTTFKRKHFRPTPDACRAAYNWKMAGDPRYEESLHNPYPDYHWLRTVKTTKESLVIISPSVADLDPYDKSLHSRVFPNGKCSGITISSTYCPTNHDYTIWLPENPRLGTSCDIFTNSRGKRASKGSKTCGFVDERGLYKSLKGACKLKLCGVLGLRLMDETWVAMQASDETKWCPPDQLVNLHDFRSDEIEHLVVEELVKKREECLDALESIMTTKSVSFRRLSHLRKLVPGFGKAYTIFNKTLMEADAHYKSVRTWNEIIPSKGCLRVGGRCHPHVNGVFFNGIILGPDGHVLIPEMQSSLLQQHMELLESSVIPLMHPLADPSTVFKDGDEAENFVEVHLPDVHKQISGVDLGLPNWGKYVLVSAGVLIALMLIIFLMTCCGRVNRPKSTQHNLGGTGREVSVTPQSGKVISSWESYKSGGETRL

SEQ ID NO: 31116 - protein, 524 aa, Artificial Sequence
  derived and/or modified protein sequence (wt) from glycoprotein__RABV__GU937033.1
MVPQALLFVPLLVFSMCFGKFPIYTIPDKLGPWSPIDIHHLSCPNNLVVEDEGCTNLSGFSYMELKVGYISAIKVNGFTCTGVVTEAETYTNFVGYVTTTFKRKHFRPTPDACRAAYNWKMAGDPRYEESLHNPYPDYHWLRTVKTTKESLVIISPSVADLDPYDKSLHSRVFPNGKCSGITISSTYCPTNHDYTIWLPENPRLGTSCDIFTNSRGKRASKGSKTCGFVDERGLYKSLKGACKLKLCGVLGLRLMDGTWVAMQASDETKWCPPDQLVNLHDFRSDEIEHLVVEELVKKREECLDALESIMTTKSVSFRRLSHLRKLVPGFGKAYTIFNKTLMEADAHHKSVRTWNEIIPSKGCLRVGGRCHPHVNGVFFNGIILGPDGHVLIPEMQSSLLQQHMELLESSVVPLMHPLADPSTVLKDGDEAENFVEVHLPDVHKQISGVDLGLPNWGKYVLVSAGVLIALMLIIFLMTCCGRVNRPKSTQHNLGGTGRKVSVTPQSGKVISSWESYKSGGETRL

SEQ ID NO: 31117 - protein, 524 aa, Artificial Sequence
  derived and/or modified protein sequence (wt) from glycoprotein__RABV__GU937034.1
MVPQALLFVPLLVFSMCFGKFPIYTIPDKLGPWSPIDIHHLSCPNNLVVEDEGCTNLSGFSYMELKVGYISAIKVNGFTCTGVVTEAETYTNFVGYVTTTFKRKHFRPTPDVCRAAYNWKMAGDPRYEESLHNPYPDYHWLRTVKTTKESLVIISPSVADLDPYDKSLHSRVFPNGKCSGITISSTYCPTNHDYTIWLPENPRLGTPCDIFTNSRGKRASKGSKTCGFVDERGLYKSLKGACKLKLCGVLGLRLMDGTWVAMQASDETKWCPPDQLVNLHDFRSDEIEHLVVEELVKKREECLDALESIMTTKSVSFRRLSHLRKLVPGFGKAYTIFNKTLMEADAHYKSVRTWNEIIPSKGCLRVGGRCHPHVNGVFFNGIILGPDGHVLIPEMQSSLLQQHMELLESSVIPLMHPLADPSTVFKDGDEAENFVEVHLPDVHKQISGVDLGLPNWGKYVLVSAGVLIALMLIIFLMTCCGRVNQPKSTQHNLGGTGREVSVTPQSGKVISSWESYKSGGETRL

SEQ ID NO: 31118 - protein, 524 aa, Artificial Sequence
  derived and/or modified protein sequence (wt) from glycoprotein__RABV__HE801606.1
MVPQVLLFVPLLVFSMCFGKFPIYTIPDKLGPWSPIDIHHLSCPNNLVVEDEGCTNLSGFSYMELKVGYISAIKVNGFTCTGVVTEAETYTNFVGYVTTTFKRKHFRPTPDACRAAYNWKLAGDPRYEESLHNPYPDYHWLRTVKTTKESLVIISPSVADLDPYDKSLHSRVFPSGKCLGITISSTYCSTNHDYTIWMPENPRLGTSCDIFTNSRGKRASKGSKTCGFVDERGLYKSLKGACKLKLCGVLGLRLMDGTWVAMQTSDETKWCPPDQLVNLHDFRSDEIEHLVVEELVKKREECLDALESIMTTKSVSFRRFSHLRKLVPGFGKAYPIFNKTLMEADAHYKSVRTWNEIIPSKGCLRVGGRCHPHVNGVFFNGIILGPDGHVLIPEMQSSLLQQHMELLESSVIPLMHPLADPSTVFKDGDEAEDFVEVHLPDVHKQISGVDLGLPSWGKYVLVSAGVLVVLMLTIFTMTCCGRVHRPKSTQHSLGGTGRKVSVTSQSGKVISSWESYKSGGETRL

SEQ ID NO: 31119 - protein, 524 aa, Artificial Sequence
  derived and/or modified protein sequence (wt) from glycoprotein__RABV__HE801607.1
MVPQVHMFVPLLVYAMCFGKFPIYTIPDKLGPWSPIDIHHLSCPNNLVVEDEGCTNLSGFSYMELKVGYISAIKVSGFTCTGVVTEAETYTNFVGYVTTTFKRKHFRPTPDACRAAYNWKLAGDPRYEESLHNPYPDYHWLRTVKTTKESLVIISPSVADLDPYDKSLHSRVFPSGKCLGITISSTYCSTNHDYTIWMPENPRLGTSCDIFTNSRGKRASKGSKTCGFVDERGLYKSLKGACKLKLCGVLGLRLMDGTWVAMQTSDETKWCPPDQLVNLHDFRSDEIEHLVVEELVKKREECLDALESIMTTKSVSFRRLSHLRKLVPGFGKAYTIFNKTLMEADAHYKSVRTWNEIIPSKGCLRVGGRCHPHVNGVFFNGIILGPDGHVLIPEMQSSLLQQHMELLESSVIPLMHPLADPSTVFKDGDEAEDFVEVHLPDVHKQISGVDLGLPSWGKYVLVSAGVLVVLMLAIFIMTCCGRVHRPKSTQHSLGGTGRKASVTSQSGKVISSWESYKSGGETRL

SEQ ID NO: 31120 - protein, 524 aa, Artificial Sequence
  derived and/or modified protein sequence (wt) from glycoprotein__RABV__HE801608.1
MVPQVLLFVPLLVFSMCFGKFPIYTIPDKLGPWSPIDIHHLSCPNNLVVEDEGCTNLSGFSYMELKVGYISAIKVNGFTCTGVVTEAETYTNFVGYVTTTFKRKHFRPTPDACRTAYNWKLAGDPRYEESLHNPYPDYHWLRTVKTTKESLVIISPSVADLDPYDKSLHSRVFPSGKCLGITISSTYCSTNHDYTIWMPENPRLGTSCDIFTNSRGKRASKGSKTCGFVDERGLYKSLKGACKLKLCGVLGLRLMDGTWVAMQTSDETKWCPPDQLVNLHDFRSDEIEHLVVEELVKKREECLDALESIMTTKSVSFRRLSHLRKLVPGFGKAYTIFNKTLMEADAHYKSVRTWNEIIPSKGCLRVGGRCHPHVNGVFFNGIILGPDGHVLIPEMQSSLLQQHMELLESSVIPLMHPLADPSTVFKDGDEAEDFVEVHLPDVHKQISGVDLGLPSWGKYVLVSAGVLVVLMLTIFIMTCCGRVHRPKSTQHSLGGTGRKVSVTSQSGKVISSWESYKSGGETRL

SEQ ID NO: 31121 - protein, 524 aa, Artificial Sequence
  derived and/or modified protein sequence (wt) from glycoprotein__RABV__HE801609.1
MVPQVLLFVPLLVFSMCFGKFPIYTIPDKLGPWSPIDIHHLSCPNNLVVEDEGCTNLSGFSYMELKVGYISAIKVNGLTCTGVVTEAETYTNFVGYVTTTFKRKHFRPTPDACRAAYNWKLAGDPRYEESLHNPYPDYHWLRTVKTTKESLVIISPSVADLDPYDKSLHSRVFPSGKCLGITISSTYCSTNHDYTIWMPENPRLGTSCDIFTNSRGKRASKGSKTCGFVDERGLYKSLKGACKLKLCGVLGPRLMDGTWVAMQTSDETKWCPPDQLVNLHDFRSDEIEHLVVEELVKKREECLDALESIMTTKSLSFRRLSHLRKLVPGFGKAYTIFNKTLMEADAHYKSVRTWNEIIPSKGCLRVGGRCHPHVNGVFFNGIILGPDGHVLIPEMQSSLLQQHMELLESSVIPLMHPLADPSTVFKDGDEAEDFVEVHLPDVHKQISGVDLGLPSWGKYVLVSAGVLVVLMLTIFIMTCCGRVHRPKSTQHSLGGIGRKVSVTSQSGKVISSWESYKSGGETRL

SEQ ID NO: 31122 - protein, 524 aa, Artificial Sequence
  derived and/or modified protein sequence (wt) from glycoprotein__RABV__HE801610.1
MVPQVLLFVPLLVFSMCFGKFPIYTIPDKLGPWSPIDIHHLSCPNNLVVEDEGCTNLSGFSYMELKVGYISAIKVNGFTCTGVVTEAETYTNFVGYVTTTFKRKHFRPTPDACRAAYNWKLAGDPRYEESLLNPYPDYHWLRTVKTTKESLVIISPSVADLDPYDKSLHSKVFPSGKCLGITISSTYCSTNHDYTIWMPENPRLGTSCDIFTNSRGKRASKGSKTCGFVDERGLYKSLKGACKLKLCGVLGLRLMDGTWVAMQTSDETKWCPPDQLVNLHDFRSDEIEHLVVEELVKKREECLDALESIMTTKSVSFRRLSHLRKLVPGFGKAYTIFNKTLMEADAHYKSVRTWNEIIPSKGCLRVGGRCHPHVNGVFFNGIILGPDGHVLIPEMQSSLLQQHMELLESSVIPLMHPLADPSTVFKDGDEAEDFVEVHLPDVHKQISGVDLGLPSWGKYVLVSAGVLVVLMLAIFIMTCCGRVHQPKSTQHSLGGTGRKVSVTSQSGKVISSWESYKSGGETRL

SEQ ID NO: 31123 - protein, 524 aa, Artificial Sequence
  derived and/or modified protein sequence (wt) from glycoprotein__RABV__HE801611.1
MVPQVLLFVPLLVFSMCFGKFPIYTIPDKLGPWSPIDIHHLSCPNNLVVEDEGCTNLSGFSYMELKVGYISAIKVNGFTCTGVVTEAETYTNFVGYVTTTFKRKHFRPTPDACRAAYNWKLAGDPRYEESLHNPYPDYHWLRTVKTTKESLVIISPSVADLDPYDKSLHSRVFPSGKCLGITISSTYCSTNHDYTIWMPENPRLGTSCDIFTNSRGKRASKGSKTCGFVDERGLYKSLKGACKLKLCGVLGLRLMDGTWVAMQTSDETKWCPPDQLVNLHDFRSDEIEHLVVEELVKKREECLDALESIMTTKSVSFRRLSHLRKLVPGFGKAYTIFNKTLMEADAHYKSIRTWNEIIPSKGCLRVGGRCHPHVNGVFFNGIILGPDGHVLIPEMQSSLLQQHMELLESSVIPLMHPLADPSTVFKDGDEAEDFVEVHLPDVHKQISGVDLGLPSWGKYVLVSAGVLVVLMLTIFIMTCCGRVHRPKSMQHSLGGTGRKVSVTSQSGKVISSWESYKSGGETRL

SEQ ID NO: 31124 - protein, 524 aa, Artificial Sequence
  derived and/or modified protein sequence (wt) from glycoprotein__RABV__HE801612.1
MVPQVLLFVPLLVFSMCFGKFPIYTIPDKLGPWSPIDIHHLSCPNNLVVEDEGCTNLSGFSYMELKVGYISAIKVNGFTCTGVVTEAETYTNFVGYVTTTFKRKHFRPTPDACRAAYNWKLAGDPRYEESLHNPYPDYHWLRTVKTTKESLVIISPSVADLDPYDKSLHSRVFPSGKCLGITISSTYCSTNHDYTIWMPENPRLGTSCDIFTNSRGKRASKGSKTCGFVDERGLYKSLKGACKLKLCGVLGLRLMDGTWVAMQTSDETKWCPPDQLVNLHDFRSDEIEHLVVEELVKKREECLDALESIMTTKSVSFRRLSHLRKLVPGFGKAYTIFNKTLMEADAHYKSVRTWNEIIPSKGCLRVGGRCHPHVNGVFFNGIILGPDGHVLIPEMQSSLLQQHMELLESSVIPLMHPLADPSTVFKDGDEAEDFVEVHLPDVHKQISGVDLGLPSWGKYVLVSAGVLVVLMLTIFIMTCCGRVHRPKSTQHSLGGTGRKVSVTSQSGKVISSWESYKSGGETRL

SEQ ID NO: 31125 - protein, 524 aa, Artificial Sequence
  derived and/or modified protein sequence (wt) from glycoprotein__RABV__HE801613.1
MVPQVLLFVPLLVFSMCFGKFPIYTIPDKLGPWSPIDIHHLSCPNNLVVEDEGCTNLSGFSYMELKVGYISAIKVNGFTCTGVVTEAETYTNFVGYVTTTFKRKHFRPTPDACRAAYNWKLAGDPRYEESLHNPYPDYHWLRTVKTTKESLVIISPSVADLDPYDKSLHSKVFPSGKCLGITISSTYCSTNHDYTIWMPENPRLGTSCDIFTNSRGKRASKGSKTCGFVDERGLYKSLKGACKLKLCGVLGLRLMDGTWVAMQTSDETKWCPPDQLVNLHDFRSDEIEHLVVEELVKKREECLDALESIMTTKSVSFRRLSHLRKLVPGFGKAYTIFNKTLMEADAHYKSVRTWNEIIPSKGCLRVGGRCHPHVNGVFFNGIILGPDGHVLIPEMQSSLLQQHMELLESSVIPLMHPLADPSTVFKDGDEAEDFVEVHLPDVHKQISGVDLGLPSWGKYVLVSAGVLVVLMLAIFIMTCCGRVHQPKSTQHSLGGTGRKVSVTSQSGKVISSWESYKSGGETRL

SEQ ID NO: 31126 - protein, 524 aa, Artificial Sequence
  derived and/or modified protein sequence (wt) from glycoprotein__RABV__HE801614.1
MVPQVLLFVPLLVFSMCFGKFPIYTIPDKLGPWSPIDIHHLSCPNNLVVEDEGCTNLSGFSYMELKVGYISAIKVNGFTCTGVVTEAETYTNFVGYVTTTFKRKHFRPTPDACRAAYNWKMAGDPRYEESLHNPYPDYHWLRTVKTTKESLVIISPSVADLDPYDKSLHSRVFPSGKCLGITISSTYCSTNHDYTIWMPENPRLGTSCDIFTNSRGKRASKGSKTCGFVDERGLYKSLKGACKLKLCGVLGLRLMDGTWVAMQTSDETKWCPPDQLVNLHDFRSDEIEHLVVEELVKKREECLDALESIMTTKSVSFRRLSHLRKLVPGFGKAYTIFNKTLMEADAHYKSVRTWNEIIPSKGCLRVGGRCHPHVNGVFFNGIILGPDGHVLIPEMQSSLLQQHMELLESSVIPLMHPLADPSTVFKDGDEAEDFVEVHLPDVHKQISGVDLGLPSWGKYVLVSAGVLVVLMLTIFIMTCCGRVRRPKSTQHSLGGTGRKVSVTSQSGKVISSWESYKSGGETRL

SEQ ID NO: 31127 - protein, 524 aa, Artificial Sequence
  derived and/or modified protein sequence (wt) from glycoprotein__RABV__HE801615.1
MVPQVLLFVPLLVFSMCFGKFPIYTIPDKLGPWSPIDIHHLSCPNNLVVEDEGCTNLSGFSYMELKVGYISAIKVNGFTCTGVVTEAETYTNFVGYVTTTFKRKHFRPTPDACRTAYNWKLAGDPRYEESLHNPYPDYHWLRTVKTTKESLVIISPSVADLDPYDKSLHSRVFPSGKCLGITISSTYCSTNHDYTIWMPENPRLGTSCDIFTNSRGKRASKGSKTCGFVDERGLYKSLKGACKLKLCGVLGLRLMDGTWVAMQTSDETKWCPPDQLVNLHDFRSDEIEHLVVEELVKKREECLDALESIMTTKSVSFRRLSHLRKLVPGFGKAYTIFNKTLMEADAHYKSVRTWNEIIPSKGCLRVGGRCHHHVNGVFFNGIILGPDGHVLIPEMQSSLLQQHMELLESSVIPLMHPLADPSTVFKDGDEAEDFVEVHLPDVHKQISGVDLGLPSWGKYVLVSAGVLVVLMLTIFIMTCCGRVHRPKSTQHSLGGTGRKVSVTSQSGKVISSWESYKSGGETRL

SEQ ID NO: 31128 - protein, 524 aa, Artificial Sequence
  derived and/or modified protein sequence (wt) from glycoprotein__RABV__HE801616.1
MVPQVLLFVPLLVFSMCFGKFPIYTIPDKLGPWSPIDIHHLSCPNNLVVEDEGCTNLSGFSYMELKVGYISAIKVNGFTCTGVVTEAETYTNFVGYVTTTFKRKHFRPTPDACRAAYNWKMAGDPRYEESLHNPYPDYHWLRTVKTTKESLVIISPSVADLDPYDKSLHSRVFPSGKCLGITISSTYCSTNHDYTIWMPENPRLGTSCDIFTNSRGKRASKGSKTCGFVDERGLYKSLKGACKLKLCGVLGLRLMDGTWVAMQTSDETKWCPPDQLVNLHDFRSDEIEHLVVEELVKKREECLDALEPIMTTKSVSFRRLSHLRKLVPGFGKAYTIFNKTLMEADAHYKSVRTWNEIIPSKGCLRVGGRCHPHVNGVFFNGIILGPDGHVLIPEMQSSLLQQHMELLESSVIPLMHPLADPSTVFKDGDEAEDFVEVHLPDVHKQISGVDLGLPSWGKYVLVSAGVLVVLMLTIFIMTCCGRVRRPKSTQHSLGGTGRKVSVTSQSGKVISSWESYKSGGETRL

SEQ ID NO: 31129 - protein, 524 aa, Artificial Sequence
  derived and/or modified protein sequence (wt) from glycoprotein__RABV__HE801617.1
MVPQVLLFVPLLVFSMCFGKFPIYTIPDKLGPWSPIDIHHLSCPNNLVVEDEGCTNLSGFSYMELKVGYISAIKVNGFTCTGVVTEAETYTNFVGYVTTTFKRKHFRPTPDACRAAYNWKMAGDPRYEESLHNPYPDYHWLRTVKTTKESLVIISPSVADLDPYDKSLHSRVFPSGKCLGITISSTYCSTNHDYTIWMPENPRLGTSCDIFANSRGKRASKGSKTCGFVDERGLYKSLKGACKLKLCGVLGLRLMDGTWVAMQTSDETKWCPPDQLVNLHDFRSDEIEHLVVEELVKKREECLDALESIMTTKSVSFRRLSHLRKLVPGFGKAYTIFNKTLMEADAHYKSVRTWNEIIPSKGCLRVGGRCHPHVNGVFFNGIILGPDGHVLIPEMQSSLLQQHMELLESSVIPLMHPLADPSTVFKDGDEAEDFVEVHLPDVHKQISGVDLGLPSWGKYVLVSAGVLVVLMLTIFIITCCGRVHRPKSIQHSLGGTGRKVSVTSQSGKVISSWESYKSGGETRL

SEQ ID NO: 31130 - protein, 524 aa, Artificial Sequence
  derived and/or modified protein sequence (wt) from glycoprotein__RABV__HE802675.1
MVPQVLLFVPLLVFSMCFGKFPIYTIPDKLGPWSPIDIHHLSCPNNLVVEDEGCTNLSGFSYMELKVGYISAIKVNGFTCTGVVTEAETYTNFVGYVTTTFKRKHFRPTPDACRAAYNWKMAGDPRYEESLHNPYPDYHWLRTVKTTKESLVIISPSVADLDPYDKSLHSRVFPSGKCSGITISSTYCSTNHDYTIWMPENPRLGTSCDIFTNSRGKRASKGGKTCGFVDERGLYKSLKGACKLKLCGVLGLRLMDGTWVAMQTSDETKWCPPDQLVNLHDFRSDEIEHLVVEELVKKREECLDALESIMTTKSVSFRRLSHLRKLVPGFGKAYTIFNKTLMEADAHYKSVRTWNEIIPSKGCLRVGGRCHPHVKGVFFNGIILGPDGHVLIPEMQSSLLQQHMELLESSVIPLMHPLADPSTVFKDGDEAEDFVEVHLPDVHKQISGVDLGLPSWGKYVLVSAGVLVVLMLTIFIITCCGRIHRPKSTQHGLGGTGRKVSVTSQSGKVISSWESYKSGGETRL

SEQ ID NO: 31131 - protein, 524 aa, Artificial Sequence
  derived and/or modified protein sequence (wt) from glycoprotein__RABV__HM535790.1
MVPQVLLFVLLLGFSLCFGKFPIYTIPDELGPWSPIDIHHLSCPNNLVVEDEGCTNLSEFSYMELKVGYISAIKVNGFTCTGVVTEAETYTNFVGYVTTTFKRKHFRPTPDACRAAYNWKMAGDPRYEESLHNPYPDYHWLRTVRTTKESLIIISPSVTDLDPYDKSLHSRVFPGGKCSGITVSSTYCSTNHDYTIWMPENPRPRTPCDIFTNSRGKRASNGNKTCGFVDERGLYKSLKGACRLKLCGVLGLRLMDGTWVAMQTSDETKWCPPDQLVNLHDFRSDEIEHLVVEELVKKREECLDALESIMTTKSVSFRRLSHLRKLVPGFGKAYTIFNKTLMEADAHYKSVRTWNEIIPSKGCLKVGGRCHPHVNGVFFNGIILGPDDHVLIPEMQSSLLQQHMELLESSVIPLMHPLADPSTVFKEGDEAEDFVEVHLPDVYKQISGVDLGLPNWGKYVLMTAGAMIGLVLIFSLMTWCRRANRPESKQRSFGGTGGNVSVTSQSGKVIPSWESYKSGGEIRL

SEQ ID NO: 31132 - protein, 524 aa, Artificial Sequence; identical to SEQ ID NO: 31028
  derived and/or modified protein sequence (wt) from glycoprotein__RABV__HQ166186.1

SEQ ID NO: 31133 - protein, 524 aa, Artificial Sequence
  derived and/or modified protein sequence (wt) from glycoprotein__RABV__HQ232301.1
MIPQALLFVPFLVFPLCFGKFPIYTIPDKLGPWSPIDIHHLSCPNNLVVEDEGCTNLSGFSYMELKVGYISAIKVNGFTCTGVVTEAETYTNFVGYVTTTFKRKHFRPTPDACRAAYNWKMAGDPRYEESLHNPYPDYHWLRTVKTTKESLVIISPSVSDLDPYDKSLHSRVFPSGKCSGITVSSTYCPTSHDYTIWMPENPRLGTSCDIFINSRGKRASKGSKTCGFVDERGLYKSLKGACKLKLCGVLGLRLMDGTWAAIQTSDEAKWCPPDQLVNIHDFHSDEIEHLVVEELVKKREECLDALESIMTTKSVSFRRLSHLRKLVPGFGKAYTIFNKTLMEADAHYKSVRTWNEIIPSKGCLRVGGRCHPHVNGVFFNGIILGPDGHVLIPEMQSSLLQQHMELLESSVIPLMHPLADPSTVFKDGDEAEDFVEVHLPDVHKQVSGVDLGLPSWGKYVLMSVGALIALMLMIFLMTCCRKANGVESMQHRLGETGRKVSVTSQSGRVISSWESYKSGGETKL

SEQ ID NO: 31134 - protein, 524 aa, Artificial Sequence
  derived and/or modified protein sequence (wt) from glycoprotein__RABV__HQ266618.1
MVPQALLFVPLLVFSLCFGKFPIYTIPDKLGPWSPIDIHHLSCPNNLVVEDEGCTNLSGFSYMELKVGYISAIKVNGFTCTGVVTEAETYTNFVGYVTTTFKRKHFRPLPDACRAAYNWKMAGDPRYEESLHNPYPDYHWLRTVKTTKESLVIISPSVADLDPYDKSLHSRVFPSGKCSGITVSSTFCSTNHDYTIWMPENPRLGTSCDIFANSRGKRASKGGKTCGFVDERGLYKSLKGACKLKLCGVLGLRLMDGTWVAMQTSDETKWCPPDQLVNMHDFRSDEIEHLVVEELVKKREECLDALESIMTTKSVSFRRLSHLRKLVPGFGKAYTIFNKTLMEADAHYKSVRTWNEIIPSKGCLRVGGRCHPHVNGVFFNGIILGPDGHVLIPEMQSSLLQQHMELLESSVIPLMHPLADPSTVFKDGDEAEDFVEVHLPDVHKQVSGVDLGLPNWGKYVLLSAGTLIALMLIIFLMTCCKRVNQPESTKRSLGGTGRKVSVTSQSGKVISSWESYKSGGETRL

SEQ ID NO: 31135 - protein, 524 aa, Artificial Sequence
  derived and/or modified protein sequence (wt) from glycoprotein__RABV__HQ266620.1
MVPQALLFLPLLVFPLCFGRFPIYTIPDKLGPWSPIDIHHLSCPNNLVVEDEGCTNLSGFSYMELKVGYISAIKVNGFTCTGVVTEAETYTNFVGYVTTTFKRKHFRPIPDACRAAYNWKMAGDPRYEESLHNPYPDYHWLRTVKTTKESLVIISPSVADLDPYDKSLHSRVFPSGKCSGITVSSTFCSTNHDYTIWMPENPRLGTSCDIFANSRGKRASKGGKTCGFVDERGLYKSLKGACKLKLCGVLGLRLMDGTWVAMQTSDETKWCPPDQLVNIHDFRSDEIEHLVVEELVKKREECLDALESIMTTKSVSFRRLSHLRKLVPGFGKAYTIFNKTLMEADAHYKSVRTWNEIIPSKGCLRVGGRCHPHVNGVFFNGIILGPDGHVLIPEMQSSLLQQHMELLESSVIPLMHPLADPSTVFKDGDEAEDFVEVHLPDVHKQVSGVDLGLPNWGKYILLSAGTLIALMLIIFLMTCCRRVNRPESTERSLGGTGRKVSVTSQSGKVISSWESYKSGGETRL

SEQ ID NO: 31136 - protein, 524 aa, Artificial Sequence
  derived and/or modified protein sequence (wt) from glycoprotein__RABV__HQ266621.1
MVPQALLFVPLLGFSLCFGKFPIYTIPDKLGPWSPIDIHHLSCPNNLVVEDEGCTNLSGFSYMELKVGYISAIKVNGFTCTGVVTEAETYTNFVGYVTTTFKRKHFRPIPDACRAAYNWKVAGDPRYEESLHNPYPDYHWLRTVKTTKESLVIISPSVADLDPYDKSLHSRVFPSGKCSGITVSSTYCSTNHDYTIWMPENPRLGTSCDIFANSRGKRASKGGKTCGFVDERGLYKSLKGACKLKLCGVLGLRLMDGTWVAMQTSDETKWCPPDQLVNMHDFRSDEIEHLVVEELVKKREECLDALESIMTTKSVSFRRLSHLRKLVPGFGKAYTIFNKTLMEADAHYKSVRTWNEIIPSKGCLRVGGRCHPHVNGVFFNGIILGPDGHVLIPEMQSSLLQQHMELLESSVIPLMHPLADPSTVFKDGDEAEDFVEVHLPDVHKQVSGVDLGLPNWGKYVLLSAGTLIALMLIIFLMTCCRRVNRPESTQRSLGGTGRKVSVTSQSGKVISSWESYKSGGETRL

SEQ ID NO: 31137 - protein, 524 aa, Artificial Sequence
  derived and/or modified protein sequence (wt) from glycoprotein__RABV__HQ266622.1
MVPQALLFIPLLGFSLCFGKFPIYTIPDKLGPWSPIDIHHLSCPNNLVVEDEGCTNLSGFSYMELKVGYISAIRVTGFTCTGVVTEAETYTNFVGYVTTTFKRKHFRPTPDACRAAYNWKMAGDPRYEESLHNPYPDYHWLRTVKTTKESLVIISPSVADLDPYDKSLHSRVFPSGKCSGITVSSTYCSTNHDYTIWMPENPRLGTSCDIFANSRGKRASKGGKTCGFVDERGLYKSLKGACKLKLCGVLGLRLMDGTWVAMQTSDETKWCPPDQLVNMHDFRSDEIEHLVVEELVKKREECLDALESIMTTKSVSFRRLSHLRKLVPGFGKAYTIFNKTLMEADAHYKSVRTWNEIIPSKGCLRVGGRCHPHVNGVFFNGIILGPDGHVLIPEMQSSLLQQHMELLESSVIPLMHPLADPSAVFKDGDEAEDFVEVHLPDVHKQVSGVDLGLPNWGKYVLLSAGTLVALMLIIFLMTCCRRVNRPESTQCSLGGTGRKGSVTSQSGKVISSWESYKSGGETRL

SEQ ID NO: 31138 - protein, 524 aa, Artificial Sequence; identical to SEQ ID NO: 31026
  derived and/or modified protein sequence (wt) from glycoprotein__RABV__HQ317918.1

SEQ ID NO: 31139 - protein, 524 aa, Artificial Sequence
  derived and/or modified protein sequence (wt) from glycoprotein__RABV__JN234411.1
MVPQALLLVPLLGFSLCFGKFPIYTIPDTLGPWSPIDIHHLSCPNNLVVEDEGCTNLSGFSYMELKVGHISAIKVNGFTCTGVVTEAETYTNFVGYVTTTFKRKHFRPTPDACRAAYNWKMAGDPRYEESLHSPYPDYHWLRTVKTTKESLVIISPSVANLDPYDNSLHSRVFPSGKCSGITVPSVYCSTNHDYTVWMPEILRLGTSCDIFTNSRGKRASKGSKTCGFVDERGLYKSLKGACKLKLCGVPGLRLMDGTWVAMQTSNETKWCPPGQLVNLHDLHSDEIEHLVVEELVKKREECLDALESVITTKSVSFRRLSHLRKLVPGFGKAYTIFNKTLMEAEAHYKSVRTWNEIIPSKGCLRVGGRCYPHVNGVFFNGIILGPDGHVLIPEMQSSLLQQHIELLESSVIPLMHPLADPFTVFKDGDEIEDFVEVHLPDVHEQVSGVDLGLPNWGEYVLLSAGTLIALMLIIFLITCCKRVDRPESTQRSLRGTGRNVSVTSQSGKFIPSWESYKSGGETGL

SEQ ID NO: 31140 - protein, 524 aa, Artificial Sequence
  derived and/or modified protein sequence (wt) from glycoprotein__RABV__JN234412.1
MVPQALLLVPLLGFSLCFGKFPIYTIPDTLGPWSPIDIHHLSCPNNLVVEDEGCTNLSGFSYMELKVGHISAIKVNGFTCTGVVTEAETYTNFVGYVTTTFKRKHFRPTPDACRAAYNWKMAGDPRYEESLHSPYPDYHWLRTVKTTKESLVIISPSVANLDPYDNSLHSRVFPSGKCSGITVPSVYCSTNHDYTVWMPEILRLGTSCDIFTNSRGKRASKGSKTCGFVDERGLYKSLKGACKLKLCGVPGLRLMDGTWVAMQTSNETKWCPPGQLVNLHDLHSDEIEHLVVEELVKKREECLDALESIITTKSVSFRRLSHLRKLVPGFGKAYTIFNKTLMEAEAHYKSVRTWNEIIPSKGCLRVGGRCYPHVNGVFFNGIILGPDGHVLIPEMQSSLLQQHIELLESSVIPLMHPLADPFTVFKDGDEIEDFVEVHLPDVHEQVSGVDLGLPNWGEYVLLSAGTLIALMLIIFLITCCKRVDRPESTQRSLRGTGRNVSVTSQSGKFIPSWESYKSGGETGL

SEQ ID NO: 31141 - protein, 524 aa, Artificial Sequence; identical to SEQ ID NO: 31030
  derived and/or modified protein sequence (wt) from glycoprotein__RABV__JN234413.1

SEQ ID NO: 31142 - protein, 524 aa, Artificial Sequence
  derived and/or modified protein sequence (wt) from glycoprotein__RABV__JN234420.1
MIPQALLFVPLLVFPLCFGKFPIYTIPDKLGPWSPIDIHHLSCPNNLVVEDEGCTNLSGFSYMELKVGYISAIKVNGFTCTGVVTEAETYTNFVGYVTTTFKRKHFRPTPDACRSAYNWKMAGDPRYEESLHNPYPDYHWLRTVKTTKESVVIISPSVADLDPYDKSLHSRVFPRGKCSGITVSSAYCSTNHDYTIWMPENPRLGTSCDIFTNSRGKRASKGSKTCGFVDERGLYKSLKGACKLKLCGVLGLRLMDGTWVAIQTSNETKWCPPDQLVNLHDFHSDEIEHLVVEELVKKREECLDALESIMTTKSVSFRRLSHLRKLVPGFGKAYTIFNKTLMEADAHYKSVRTWNEIIPSKGCLRVGGRCHPHVNGVFFNGIILGPDGHVLIPEMQSSLLQQHMELLKSSVIPLMHPLADPSTVFKDGDEVEDFVEVHLPDVHKQVSGVDLGLPNWGKDVLMGAGVLTALMLMIFLMTCCRRTNRAESIQHSLGETGRKVSVTSQSGRVISSWESYKSGGETKL

SEQ ID NO: 31143 - protein, 524 aa, Artificial Sequence; identical to SEQ ID NO: 31142
  derived and/or modified protein sequence (wt) from glycoprotein__RABV__JN234423.1

SEQ ID NO: 31144 - protein, 524 aa, Artificial Sequence
  derived and/or modified protein sequence (wt) from glycoprotein__RABV__JN234424.1
MVPQALLFVPLLVFPLCFGKFPIYTIPDKLGPWSPIDIHHLSCPNNLVVEDEGCTNLSGFSYMELKVGYISAIKTNGFTCTGVVTEAETYTNFVGYVTTTFKRKHFRPTPDACRAAYNWKMAGDPRYEESLHNPYPDYHWLRTVKTTKESLVIISPSVADLDPYDRSLHSRVFPGGNCSGVAVSSTYCSTNHDYTIWMPENPRLGMSCDIFTNSRGKRASKGSETCGFVDERGLYKSLKGACKLKLCGVLGLRLMDGTWVAMQTSNETKWCPPGQLVNLHDFRSDEIEHLVVEELVKKREECLDALESIMTTKSVSFRRLSHLRKLVPGFGKAYTIFNKTLMEADAHYKSVRTWNEIIPSKGCLRVGGRCHPHVNGVFFNGIILGPDGNVLIPEMQSSLLQQHMELLVSSVIPLMHPMADPSTVFKNGDEAEDFVEVHLPDVHERISGVDLGLPNWGKYVLLSAGALTALMLIIFLMTCWRRVNRSEPTQHNLRGTGREVSVTPQSGKIISSWESYKSGGETGL

SEQ ID NO: 31145 - protein, 524 aa, Artificial Sequence; identical to SEQ ID NO: 31028
  derived and/or modified protein sequence (wt) from glycoprotein__RABV__JN786877.1

SEQ ID NO: 31146 - protein, 524 aa, Artificial Sequence
  derived and/or modified protein sequence (wt) from glycoprotein__RABV__JN786878.1
MIPQALLFVPLLVFSSCFGKFPIYTIPDKLGPWSPIDIHHLRCPNNLVVEDEGCTNLSGFSYMELKVGYISAIKVNGFTCTGVVTEAETYTNFVGYVTTTFKRKHFRPTPDACRAAYNWKMAGDPRYEESLHNPYPDYHWLRTVKTTKESLVIISPSVSDLDPYDKSLHSRVFPSGKCSGITVSSTYCPTNHDYTIWMPENPRLGTSCDIFTNSRGKRASKGGKTCGFVDERGLYKSLKGACKLKLCGVLGLRLMDGTWVAIQTSDEAKWCPPDQLVNIHDFRSDEIEHLVVEELVKKREECLDALESIMTTKSVSFRRLSHLRKLVPGFGKAYTIFNKTLMEADAHYKSVRTWNEIIPSKGCLRVGGRCHPHVNGVFFNGIILGPDGHVLIPEMQSSLLQQHMELLESSVIPLMHPLADPSTVFKDGDEAEDFVEVHLPDVPKQVSGVDLGLPSWGKYVLMSVGAMIALMLMIFLMTCCRKANGAETIQHRLGETGRKVSVTSQSGRVISSWESYKSGGETKL

SEQ ID NO: 31147 - protein, 524 aa, Artificial Sequence; identical to SEQ ID NO: 30845
  derived and/or modified protein sequence (wt) from glycoprotein__RABV__JN936687.1

SEQ ID NO: 31148 - protein, 524 aa, Artificial Sequence
  derived and/or modified protein sequence (wt) from glycoprotein__RABV__JN936688.1
MVPQVLLFVPLLAVPLCFGKFPIYTIPDKLGPWSPIDIHHLSCPNNLVVEDEGCTNLSGFSYMELKVGYISAIKVNGFTCTGVVTEAETYTNFVGYVTTTFKRKHFRPTPDACRSAYNWKMAGDPRYEESLHNPYPDYHWLRTVKTTKESFVIISPSVADLDPYDKSLHSRVFPRGKCSGITVSSTYCSTNHDYTIWMPENPRLGTSCDIFTNSRGKRASKGSKTCGFVDERGLYKSLKGACKLKLCGVLGLRLMDGTWVAIQTSDETKWCPPDQLVNLHDFHSDEIEHLVVEELVKKREECLDALESIMTTKSVSFRRLSHLRKLVPGFGKAYTIFNKTLMEADAHYKSVRTWNEIIPSKGCLRVGGRCHPHVNGVFFNGIILGPDGHVLIPEMQSSLLQQHMELLESSVIPLMHPLADPSTVFKDGDEAEDFVEVHLPDVHKQVSGVDLGLPSWGKYVLMSAGILTALMLMIFLMTCCRRTNRAESIQHSLGETGRKVSVTSQNGRVISSWESYKSGGETKL

SEQ ID NO: 31149 - protein, 524 aa, Artificial Sequence
  derived and/or modified protein sequence (wt) from glycoprotein__RABV__JN936689.1
MVPQVLLFVPLLAVPLCFGKFPIYTIPDKLGPWSPIDIHHLSCPNNLVVEDEGCTNLSGFSYMELKVGYISAIKVNGFTCTGVVTEAETYTNFVGYVTTTFKRKHFRPTPDACRSAYNWKMAGDPRYEESLHNPYPDYHWLRTVKTTKESFVIISPSVADLDPYDKSLHSRVFPRGKCSGITVSSTYCSTNHDYTIWMPENPRLGTSCDIFTNSRGKRASKGSKTCGFVDERGLYKSLKGACKLKLCGVLGLRLMDGTWVAIQTSDETKWCPPDQLVNLHDFHSDEIEHLVVEELVKKREECLDALESIMTTKSVSFRRLSHLRKLVPGFGKAYTIFNKTLMEADAHYKSVRTWNEIIPSKGCLRVGGRCHPHVNGVFFNGIILGPDGHVLIPEMQSSLLQQHMELLESSVIPLMHPLADPSTVFKDGDEAEDFVEVHLPDVHKQVSGVDLGLPSWGKYVLMSAGILTALMLTIFLMTCCRRTNRAESIQHSLGETGRKVSVTSQSGRVISSWESYKSGGETKL

SEQ ID NO: 31150 - protein, 524 aa, Artificial Sequence
  derived and/or modified protein sequence (wt) from glycoprotein__RABV__JN936690.1
MVPQAVLFVPLLAVPLCFGKFPIYTIPDKLGPWSPIDIHHLSCPNNLVVEDEGCTNLSGFSYMELKVGYISAIKVNGFTCTGVVTEAETYTNFVGYVTTTFKRKHFRPTPDACRSAYNWKMAGDPRYEESLHNPYPDYHWLRTVKTTKESFVIISPSVADLDPYDKSLHSRVFPRGKCSGITVSSTYCSTNHDYTIWMPENPRLGTSCDIFTNSRGKRASKGSKTCGFVDERGLYKSLKGACKLKLCGVLGLRLMDGTWVAIQTSDETKWCPPDQLVNLHDFHSDEIEHLVVEELVKKREECLDALESIMTTKSVSFRRLSHLRKLVPGFGKAYTIFNKTLMEADAHYKSVRTWNEIIPSKGCLRVGGRCHPHVNGVFFNGIILGPDGHVLIPEMQSSLLQQHMELLESSVIPLMHPLADPSTVFKDGDEAEDFVEVHLPDVHKQVSGVDLGLPSWGKYVLMSAGILTALMLMIFLMTCCRRTNRAESIQHSLGETGRKVSVTSQNGRVISSWESYKSGGETKL

SEQ ID NO: 31151 - protein, 524 aa, Artificial Sequence
  derived and/or modified protein sequence (wt) from glycoprotein__RABV__JN936691.1
MIPQVLLFVPLLVFSSCFGKFPIYTIPDKLGPWSPIDIHHLSCPNNMVVEDEGCTNLSGFSYMELKVGYISAIKVNGFTCTGVVTEAETYTNFVGYVTTTFKRKHFRPMPDACRAAYNWKMAGDPRYEESLHNPYPDYHWLRTVKTTKESLVIISPSVADLDPYDKSLHSRVFPGGKCSGITVSSTCCSTNHDYTIWMPENPRLGTSCDIFTNSRGKRASKGGKTCGFVDERGLYKSLKGACKLKLCGVLGLRLMDGTWVAIQTSDEIKWCSPDQLVNLHDFHSDEIEHLVVEELVKKREECLDALETIMTTKSVSFRRLSHLRKLVPGFGKAYTIFNKTLMEADAHYKSIRTWNEIIPSKGCLRVGGRCHPHVNGVFFNGIILGPDGHVLIPEMQSSLLHQHMELLESSVIPLMHPLADPSTVFKDGDEAEDFVEVHLPDVHKQISGVDLGLPNWGKYVLISAGALTALMLTIFLMTCCRKTNRAESIQHSPGETGRKVSVTSHNGRVISSWESYKSGGETKL

SEQ ID NO: 31152 - protein, 524 aa, Artificial Sequence; identical to SEQ ID NO: 30845
  derived and/or modified protein sequence (wt) from glycoprotein__RABV__JN936692.1

SEQ ID NO: 31153 - protein, 524 aa, Artificial Sequence
  derived and/or modified protein sequence (wt) from glycoprotein__RABV__JN936693.1
MVPQAFLFVPLLAIPLCFGKFPIYTIPDKLGPWSPIDIHHLSCPNNLVVEDEGCTNLSGFSYMELKVGYISAIKVNGFTCTGVVTEAETYTNFVGYVTTTFKRKHFRPTPDACRSAYNWKMAGDPRYEESLHNPYPDYHWLRTVKTTKESFVIISPSVADLDPYDKSLHSRVFPRGKCSGITVSSTYCSTNHDYTIWMPENPRLGTSCDIFTNSRGKRASKGSKTCGFVDERGLYKSLKGACKLKLCGVLGLRLMDGTWVAIQTSDETKWCPPDQLVNLHDFHSDEIEHLVVEELVKKREECLDTLESIMTTKSVSFRRLSHLRKLVPGFGKAYTIFNKTLMEADAHYKSVRTWNEIIPSKGCLRVGGRCHPHVNGVFFNGIILGPDGHVLIPEMQSSLLQQHMELLESSVIPLMHPLADPSTVFKDGDEAEDFVEVHLPDVHKQVSGVDLGLPSWGKYVLMSAGILTALMLMIFLMTCCRRTNRAESIQHSLGETGRKVSVTSQSGRVISSWESYKSGGETKL

SEQ ID NO: 31154 - protein, 524 aa, Artificial Sequence
  derived and/or modified protein sequence (wt) from glycoprotein__RABV__JN936694.1
MVPQALLFVPLLVFSSCFGKFPIYTIPDKLGPWSPIDIHHLSCPNNFVVEDEGCTNLSGFSYMELKVGYISAIKVNGFTCTGVVTEAETYTNFVGYVTTTFKRKHFRPMPDACRAAYNWKMAGDPRYEESLHNPYPDYHWLRTVKTTKESLVIISPSVADLDPYDKSLHSRVFPGGKCSGITVSSTCCSTNHDYTIWMPENPRLGTSCDIFTNSRGKRASKGGKTCGFVDERGLYKSLKGACKLKLCGVLGLRLMDGTWVAIQTSDEIKWCSPDQLVNLHDFHSDEIEHFVVEELVKKREECLDALETIMTTKSVSFRRLSHLRKLVPGFGKAYTIFNKTLMEADAHYKSIRTWNEIIPSKGCLRVGGRCHPHVNGVFFNGIILGPDGHVLIPEMQSSLLHQHMELLESSVIPLMHPLADPSTVFKDGDEAEDFVEVHLPDVHKQISGVDLGLPNWGKYVLISAGALTALMLMIFLMTCCRKANRAESIQHNPGETGRKVSVTSHNGRVISSWESYKSGGETKL

SEQ ID NO: 31155 - protein, 524 aa, Artificial Sequence
  derived and/or modified protein sequence (wt) from glycoprotein__RABV__JN936695.1
MVPQAFLFVPLLAIPLCFGKFPIYTIPDKLGPWSPIDIHHLSCPNNLVVEDEGCTNLSGFSYMELKVGYISAIKVNGFTCTGVVTEAETYTNFVGYVTTTFKRKHFRPTPDACRSAYNWKMAGDPRYEESLHNPYPDYHWLRTVKTTKESFVIISPSVADLDPYDKSLHSRVFPRGKCSGITVSSTYCSTNHDYTIWMPENPRLGTSCDIFTNSRGKRASKGSKTCGFVDERGLYKSLKGACKLKLCGVLGLRLMDGTWVAIQTSDETKWCPPDQLVNLHDFHSDEIEHLVVEELVKKREECLDALESIMTTKSVSFRRLSHLRKLVPGFGKAYTIFNKTLMEADAHYKSVRTWNEIIPSKGCLRVGGRCHPHVNGVFFNGIILGPDGHVLIPEMQSSLLQQHMELLESSVIPLMHPLADPSTVFKDGDEAEDFVEVHLPDVHKQVSGVDLGLPSWGKYVLMSAGILTALMLMIFLMTCCRRANRAESIQHSLGETGRKVSVTSQSGRVISSWESYKSGGETKL

SEQ ID NO: 31156 - protein, 524 aa, Artificial Sequence
  derived and/or modified protein sequence (wt) from glycoprotein__RABV__JN936696.1
MILQVLLFVPFLVFSSCFGKFPIYTIPDKLGPWSPIDIHHLSCPNNLVVEDEGCTNLSGFSYMELKVGYISAIKVNGFTCTGVVTEAETYTNFVGYVTTTFKRKHFRPMPDACRAAYNWKMAGDPRYEESLHNPYPDYHWLRTVKTTKESLVIISPSVADLDPYDKSLHSRVFPGGKCSGITVSSTCCSTNHDYTIWMPENPRLGTSCDIFTNSRGKRASKGGKTCGFVDERGLYKSLKGACKLKLCGVLGLRLMDGTWVAIQTSDEIKWCPPDQLVNLHDFHSDEIEHLVVEELVKKREECLDALETIMTTKSVSFRRLSHLRKLVPGFGKAYTIFNKTLMEADAHYKSIRTWNEIIPSKGCLRVGGRCHPHVNGVFFNGIILGPDGHVLIPEMQSSLLHQHMELLESSVIPLMHPLADPSTVFKDGDEAEDFVEVHLPDVHKQISGVDLGLPNWGKYVLISAGALTALMLMIFLMTCCRKNNRAESIQHSPGETGRKVSVTSHNGRVISSWESYKSGGETKL

SEQ ID NO: 31157 - protein, 524 aa, Artificial Sequence
  derived and/or modified protein sequence (wt) from glycoprotein__RABV__JN936697.1
MVPQAFLFVPLLAIPLCFGKFPIYTIPDKLGPWSPIDIHHLSCPNNLVVEDEGCTNLSGFSYMELKVGYISAIKVNGFTCTGVVTEAETYTNFVGYVTTTFKRKHFRPTPDACRSAYNWKMAGDPRYEESLHNPYPDYHWLRTVKTTKESFVIISPSVADLDPYDKSLHSRVFPRGKCSGITVSSTYCSTNHDYTIWMPENPRLGTSCDIFTNSRGKRASKGSKTCGFVDERGLYKSLKGACKLKLCGVLGLRLMDGTWVAIQTSDETKWCPPDQLVNLHDFHSDEIEHLVVEELVKKREECLDALESIMTTKSVSFRRLSHLRKLVPGFGKAYTIFNKTLMEADAHYKSVRTWNEIIPSKGCLRVGGRCHPHVNGVFFNGIILGPDGHVLIPEMQSSLLQQHMELLESSVIPLMHPLADPSTVFKDGDEAEDFVEVHLPDVHKQVSGVDLGLPSWGKYVLMSAGILTALMLMIFLMTCCRRTNRAESIQHSLGETGRKVSVTSQSGRVISSWESYKSGGETKL

SEQ ID NO: 31158 - protein, 524 aa, Artificial Sequence; identical to SEQ ID NO: 30827
  derived and/or modified protein sequence (wt) from glycoprotein__RABV__JN936698.1

SEQ ID NO: 31159 - protein, 524 aa, Artificial Sequence
  derived and/or modified protein sequence (wt) from glycoprotein__RABV__JN936699.1
MVPQVLLFVPFLVFSSCFGKFPIYTIPDKLGPWSPIDIHHLSCPNNLVVEDEGCTNLSGFSYMELKVGYISAIKVNGFTCTGVVTEAETYTNFVGYVTTTFKRKHFRPMPDACRAAYNWKMAGDPRYEESLHNPYPDYHWLRTVKTTKESLVIISPSVADLDPYDKSLHSRVFPGGKCSGITVSSTCCSTNHDYTIWMPENPRLGTSCDIFTNSRGKRASKGGKTCGFVDERGLYKSLKGACKLKLCGVLGLRLMDGTWVAIQTSDEIKWCSPDQLVNLHDFHSDEIEHLVVEELVKKREECLDALETIMTTKSVSFRRLSHLRKLVPGFGKAYTIFNKTLMEADAHYKSIRTWNEIIPSKGCLRVGGRCHPHVNGVFFNGIILGPDGHVLIPEMQSSLLHQHMELLESSVIPLMHPLADPSTVFKDGDEAEDFVEVHLPDVHKQISGVDLGLPNWGKYVLISAGALTALMLMIFLMTCCRKANRAESIQHNPGETGRKVSVTSHNGRVISSWESYKSGGETKL

SEQ ID NO: 31160 - protein, 524 aa, Artificial Sequence; identical to SEQ ID NO: 30526
  derived and/or modified protein sequence (wt) from glycoprotein__RABV__JN936700.1

SEQ ID NO: 31161 - protein, 524 aa, Artificial Sequence; identical to SEQ ID NO: 31159
  derived and/or modified protein sequence (wt) from glycoprotein__RABV__JN936701.1

SEQ ID NO: 31162 - protein, 524 aa, Artificial Sequence; identical to SEQ ID NO: 30526
  derived and/or modified protein sequence (wt) from glycoprotein__RABV__JN936702.1

SEQ ID NO: 31163 - protein, 524 aa, Artificial Sequence; identical to SEQ ID NO: 30526
  derived and/or modified protein sequence (wt) from glycoprotein__RABV__JN936703.1

SEQ ID NO: 31164 - protein, 524 aa, Artificial Sequence
  derived and/or modified protein sequence (wt) from glycoprotein__RABV__JN936704.1
MVPQVLLFVPLLAFSSCFGKFPIYTIPDKLGPWSPIDIHHLSCPNNLVVEDEGCTNLSGFSYMELKVGYISAIKVNGFTCTGVVTEAETYTNFVGYVTTTFKRKHFRPMPDACRAAYNWKMAGDPRYEESLHNPYPDYHWLRTVKTTKESLVIISPSVADLDPYDKSLHSRVFPGGKCSGITVSSTCCSTNHDYTIWMPENPRLGTSCDIFTNSRGKRASKGGKTCGFVDERGLYKSLKGACKLKLCGVLGLRLMDGTWVAIQTSDEIKWCSPDQLVNLHDFHSDEIEHLVVEELVKKREECLDALETIMTTKSVSFRRLSHLRKLVPGFGKAYTIFNKTLMEADAHYKSIRTWNEIIPSKGCLRVGGRCHPHVNGVFFNGIILGPDGHVLIPEMQSSLLHQHMELLESSVIPLMHPLADPSTVFKDGDEAEDFVEVHLPDVHKQISGVDLGLPNWGRYVLISAGALTALMLMIFLMTCCRKANRAELIQHNPGETGRKVSVTSHNGRVISSWESYKSGGETKL

SEQ ID NO: 31165 - protein, 524 aa, Artificial Sequence
  derived and/or modified protein sequence (wt) from glycoprotein__RABV__JN936705.1
MIPQVLLFVPLLVFSSCFGKFPIYTIPDKLGPWSPIDIHHLSCPNNMVVEDEGCTNLSGFSYMELKVGYISAIKVNGFTCTGVVTEAETYTNFVGYVTTTFKRKHFRPMPDACRAAYNWKMAGDPRYEESLHNPYPDYHWLRTVKTTKESLVIISPSVADLDPYDKSLHSRVFPGGKCSGITVSSTCCSTNHDYTIWMPENPRLGTSCDIFTNSRGKRASKGGKTCGFVDERGLYKSLKGACKLKLCGVLGLRLMDGTWVAIQTSDEIKWCSPDQLVNLHDFHSDEIEHLVVEELVKKREECLDALETIMTTKSVSFRRLSHLRKLVPGFGKAYTIFNKTLMEADAHYKSIRTWNEIIPSKGCLRVGGRCHPHVNGVFFNGIILGPDGHVLIPEMQSSLLHQHMELLESSVIPLMHPLADPSTVFKDGDEAEDFVEVHLPDVHKQISGVDLGLPNWGKYVLISACALTALMLTIFLMTCCRKTSRAESIQHSPGETGRKVSVTSHNGRVISSWESYKSGGETKL

SEQ ID NO: 31166 - protein, 524 aa, Artificial Sequence
  derived and/or modified protein sequence (wt) from glycoprotein__RABV__JN936706.1
MIPQVLLFVPFLVFSSCFGKFPIYTIPDKLGPWSPIDIHHLSCPNNLVVEDEGCTNLSGFSYMELKVGYISAIKVNGFTCTGVVTEAETYTNFVGYVTTTFKRKHFRPMPDACRAAYNWKMAGDPRYEESLHNPYPDYHWLRTVKTTKESLVIISPSVADLDPYDKSLHSRVFPGGKCSGITVSSTCCSTNHDYTIWMPENPRLGTSCDIFTNSRGKRASKGGKTCGFVDERGLYKSLKGACKLKLCGVLGLRLMDGTWVAIQTSDEIKWCSPDQLVNLHDFHSDEIEHLVVEELVKKREECLDALETIMTTKSVSFRRLSHLRKLVPGFGKAYTIFNKTLMEADAHYKSIRTWNEIIPSKGCLRVGGRCHPHVNGVFFNGIILGPDGHVLIPEMQSSLLHQHMELLESSVIPLMHPLADPSTVFKDGDEAEDFVEVHLPDVHKQISGVDLGLPNWGKYVLISAGALTALMLMTFLMTCCRKTNRAESIQHSPGETGRKVSVTSHNGRVISSWESYKSGGETKL

SEQ ID NO: 31167 - protein, 524 aa, Artificial Sequence
  derived and/or modified protein sequence (wt) from glycoprotein__RABV__JN936707.1
MVPQAFLFVPLLAVPLCFGKFPIYTIPDKLGPWSPIDIHHLSCPNNLVVEDEGCTNLSGFSYMELKVGYISAIKVNGFTCTGVVTEAETYTNFVGYVTTTFKRKHFRPTPDACRSAYNWKMAGDPRYEESLHNPYPDYHWLRTVKTTKESFVIISPSVADLDPYDKSLHSRVFPRGKCSGITVSSTYCSTNHDYTIWMPENPRLGTSCDIFTNSRGKRASKGSKTCGFVDERGLYKSLKGACKLKLCGVLGLRLMDGTWVAIQTSDETKWCPPDQLVNLHDFHSDEIEHLVVEELVKKREECLDALESIMTTKSVSFRRLSHLRKLVPGFGKAYTIFNKTLMEADAHYKSVRTWNEIIPSKGCLRVGGRCHPHVNGVFFNGIILGPDGHVLIPEMQSSLLQQHMELLESSVIPLMHPLADPSTVFKDGDEAEDFVEVHLPDVHKQVSGVDLGLPSWGKYVLMSAGILTALMLTIFLMTCCRRTNRAESIQHSLGETGRKVSVTSQSGRVISSWESYKSGGETKL

SEQ ID NO: 31168 - protein, 524 aa, Artificial Sequence; identical to SEQ ID NO: 30827
  derived and/or modified protein sequence (wt) from glycoprotein__RABV__JN936708.1

SEQ ID NO: 31169 - protein, 524 aa, Artificial Sequence
  derived and/or modified protein sequence (wt) from glycoprotein__RABV__JN936709.1
MIPQVLLFVPFLVFSLCFGKFPIYTIPDKLGPWSPIDIHHLSCPNNLVVEDEGCTNLSGFSYMELKVGYISAIKVNGFTCTGVVTEAETYTNFVGYVTTTFKRKHFRPMPDACRAAYNWKMAGDPRYEESLHNPYPDYHWLRTVKTTKESLVIISPSVADLDPYDKSLHSRVFPGGKCSGITVSSTCCSTNHDYTIWMPENPRLGTSCDIFTNSRGKRASKGGKTCGFVDERGLYKSLKGACKLKLCGVLGLRLMDGTWVAIQTSDEIKWCSPDQLVNLHDFHSDEIEHLVVEELVKKREECLDALETIMTTKSVSFRRLSHLRKLVPGFGKAYTIFNKTLMEADAHYKSIRTWNEIIPSKGCLRVGGRCHPHVNGVFFNGIILGPDGHVLIPEMQSSLLHQHMELLESSVIPLMHPLADPSTVFKDGDEAEDFVEVHLPDVHKQISGVDLGLPNWGKYVLISAGALTALMLMIFLMTCCRKTNRAESIQHSPGETGRKVSVTSHNGRVISSWESYKSGGETKL

SEQ ID NO: 31170 - protein, 524 aa, Artificial Sequence; identical to SEQ ID NO: 30827
  derived and/or modified protein sequence (wt) from glycoprotein__RABV__JN936710.1

SEQ ID NO: 31171 - protein, 524 aa, Artificial Sequence; identical to SEQ ID NO: 31150
  derived and/or modified protein sequence (wt) from glycoprotein__RABV__JN936711.1

SEQ ID NO: 31172 - protein, 524 aa, Artificial Sequence
  derived and/or modified protein sequence (wt) from glycoprotein__RABV__JN936712.1
MIPQVLLFVPLLVFSLCFGKFPIYTIPDKLGPWSPIDIHHLSCPNNLVVEDEGCTNLSGFSYMELKVGYISAIKVNGFTCTGVVTEAETYTNFVGYVTTTFKRKHFRPMPDACRAAYNWKMAGDPRYEESLHNPYPDYHWLRTVKTTKESLVIISPSVADLDPYDKSLHSRVFPGGKCSGITVSSTCCSTNHDYTIWMPENPRLGTSCDIFTNSRGKRASKGGKTCGFVDERGLYKSLKGACKLKLCGVLGLRLMDGTWVAIQTSDEIKWCSPDQLVNLHDFHSDEIEHLVVEELVKKREECLDALETIMTTKSVSFRRLSHLRKLVPGFGKAYTIFNKTLMEADAHYKSIRTWNEIIPSKGCLRVGGRCHPHVNGVFFNGIILGPDGHVLIPEMQSSLLHQHMELLESSVIPLMHPLADPSTVFKDGDEAEDFVEVHLPDVHKQISGVDLGLPNWGKYVLISAGALTALMLMIFLMTCCRKTNRAESIQHSPGETGRKVSVTSHNGRVISSWESYKSGGETKL

SEQ ID NO: 31173 - protein, 524 aa, Artificial Sequence
  derived and/or modified protein sequence (wt) from glycoprotein__RABV__JN936713.1
MVPQAVLFVPLLAVPLCFGKFPIYTIPDKLGPWSPIDIHHLSCPNNLVVEDEGCTNLSGFSYMELKVGYISAIKVNGFTCTGVVTEAETYTNFVGYVTTTFKRKHFRPTPDACRSAYNWKMAGDPRYEESLHNPYPDYHWLRTVRTTKESFVIISPSVADLDPYDKSLHSRVFPRGKCSGITVSSTYCSTNHDYTIWMPENPRLGTSCDIFTNSRGKRASKGSKTCGFVDERGLYKSLKGACKLKLCGVLGLRLMDGTWVAIQTSDETKWCPPDQLVNLHDFHSDEIEHLVVEELVKKREECLDALESIMTTKSVSFRRLSHLRKLVPGFGKAYTIFNKTLMEADAHYKSVRTWNEIIPSKGCLRVGGRCHPHVNGVFFNGIILGPDGHVLIPEMQSSLLQQHMELLESSVIPLMHPLADPSTVFKDGDEAEDFVEVHLPDVHKQVSGVDLGLPSWGKYVLMSAGILTALMLMIFLMTCCRRTNRAESIQHSLGETGRKVSVTSQNGRVISSWESYKSGGETKL

SEQ ID NO: 31174 - protein, 524 aa, Artificial Sequence; identical to SEQ ID NO: 30839
  derived and/or modified protein sequence (wt) from glycoprotein__RABV__JN936714.1

SEQ ID NO: 31175 - protein, 524 aa, Artificial Sequence
  derived and/or modified protein sequence (wt) from glycoprotein__RABV__JN936715.1
MVPQALLFVPLLAVPLCFGKFPIYTIPDKLGPWSPIDIHHLSCPNNLVVEDEGCTNLSGFSYMELKVGYISAIKVNGFTCTGVVTEAETYTNFVGYVTTTFKRKHFRPTPDACRSAYNWKMAGDPRYEESLHNPYPDYHWLRTVKTTKESFVIISPSVADLDPYDKSLHSRVFPRGKCSGITVSSTYCSTNHDYTIWMPENPRLGTSCDIFTNSRGKRASKGSKTCGFVDERGLYKSLKGACKLKLCGVLGLRLMDGTWVAIQTSDETKWCPPDQLVNLHDFHSDEIEHLVVEELVKKREECLDALESIMTTKSVSFRRLSHLRKLVPGFGKAYTIFNKTLMEADAHYKSVRTWNEIIPSKGCLRVGGRCHPHVNGVFFNGIILGPDGHVLIPEMQSSLLQQHMELLESSVIPLMHPLADPSTVFKDGDEAEDFVEVHLPDVHKQVSGVDLGLPSWGKYVLMSAGILTALMLMIFLMTCCRRTNRAESIQHSLGETGRKVSVTSQNGRVISSWESYKSGGETKL

SEQ ID NO: 31176 - protein, 524 aa, Artificial Sequence
  derived and/or modified protein sequence (wt) from glycoprotein__RABV__JN936716.1
MIPQVLLLVPLLVFSSCFGKFPIYTIPDKLGPWSPIDIHHLSCPNNLVVEDEGCTNLSGFSYMELKVGYISAIKVNGFTCTGVVTEAETYTNFVGYVTTTFKRKHFRPMPDACRAAYNWKMAGDPRYEESLHNPYPDYHWLRTVKTTKESLVIISPSVADLDPYDKSLHSRVFPGGKCSGITVSSTCCSTNHDYTIWMPENPRLGTSCDIFTNSRGKRASKGGKTCGFVDERGLYKSLKGACKLKLCGVLGLRLMDGTWVAIQTSDEIKWCSPDQLVNLHDFHSDEIEHLVVEELVKKREECLDALETIMTTKSVSFRRLSHLRKLVPGFGKAYTIFNKTLMEADAHYKSIRTWNEIIPSKGCLRVGGRCHPHVNGVFFNGIILGPDGHVLIPEMQSSLLHQHMELLESSVIPLMHPLADPSTVFKDGDEAEDFVEVHLPDVHKQISGVDLGLPNWGKYVLISAGALTALMSMIFLMTCCRKTNRAESIQHSPGETGRKVSVTSHNGRVISSWESYKSGGETKL

SEQ ID NO: 31177 - protein, 524 aa, Artificial Sequence
  derived and/or modified protein sequence (wt) from glycoprotein__RABV__JN936717.1
MIPQALLLVPLLVFSSCFGKFPIYTIPDKLGPWSPIDIHHLSCPNNLVVEDEGCTNLSGFSYMELKVGYISAIKVNGFTCTGVVTEAETYTNFVGYVTTTFKRKHFRPMPDACRAAYNWKMAGDPRYEESLHNPYPDYHWLRTVKTTKESLVIISPSVADLDPYDKSLHSRVFPGGKCSGITVSSTCCSTNHDYTIWMPENPRLGTSCDIFTNSRGKRASKGGKTCGFVDERGLYKSLKGACKLKLCGVLGLRLMDGTWVAIQTSDEIKWCSPDQLVNLHDFHSDEIEHLVVEELVKKREECLDALETIMTTKSVSFRRLSHLRKLVPGFGKAYTIFNKTLMEADAHYKSIRTWNEIIPSKGCLRVGGRCHPHVNGVFFNGIILGPDGHVLIPEMQSSLLHQHMELLESSVIPLMHPLADPSTVFKDGDEAEDFVEVHLPDVHKQISGVDLGLPNWGKYVLISAGALTALMSMIFLMTCCRKTNRAESIQHSPGETGRKVSVTSHNGRVISSWESYKSGGETKL

SEQ ID NO: 31178 - protein, 524 aa, Artificial Sequence
  derived and/or modified protein sequence (wt) from glycoprotein__RABV__JN936718.1
MIPQVLLLVPLLVFSSCFGKFPIYTIPDKLGPWSPIDIHHLSCPNNLVVEDEGCTNLSGFSYMELKVGYISAIKVNGFTCTGVVTEAETYTNFVGYVTTTFKRKHFRPMPDACRAAYNWKMAGDPRYEESLHNPYPDYHWLRTVKTTKESLVIISPSVADLDPYDKSLHSRVFPGGKCSGITVSSTCCSTNHDYTIWMPENPRLGTSCDIFTNSRGKRASKGGQTCGFVDERGLYKSLKGACKLKLCGVLGLRLMDGTWVAIQTSDEIKWCSPDQLVNLHDFHSDEIEHLVVEELVKKREECLDALETIMTTKSVSFRRLSHLRKLVPGFGKAYTIFNKTLMEADAHYKSIRTWNEIIPSKGCLRVGGRCHPHVNGVFFNGIILGPDGHVLIPEMQSSLLHQHMELLESSVIPLMHPLADPSTVFKDGDEAEDFVEVHLPDVHKQISGVDLGLPNWGKYVLISAGALTALMSMIFLMTCCRKTNRAESIQHSPGETGRKVSVTSHNGRVISSWESYKSGGETKL

SEQ ID NO: 31179 - protein, 524 aa, Artificial Sequence
  derived and/or modified protein sequence (wt) from glycoprotein__RABV__JN936719.1
MIPQALLFVPLLAVPLCFGKFPIYTIPDKLGPWSPIDIHHLSCPNNLVVEDEGCTNLSGFSYMELKVGYISAIKVNGFTCTGVVTEAETYTNFVGYVTTTFKRKHFRPTPDACRSAYNWKMAGDPRYEESLHNPYPDYHWLRTVKTTKESFVIISPSVADLDPYDKSLHSRVFPRGKCSGITVSSTYCSTNHDYTIWMPENPRLGTSCDIFTNSRGKRASKGSKTCGFVDERGLYKSLKGACKLKLCGVLGLRLMDGTWVAIQTSDETKWCPPDQLVNLHDFHSDEIEHLVVEELVKKREECLDALESIMTTKSVSFRRLSHLRKLVPGFGKAYTIFNKTLMEADAHYKSIRTWNEIIPSKGCLRVGGRCHPHVNGVFFNGIILGPDGHVLIPEMQSSLLHQHMELLESSVIPLMHPLADPSTVFKDGDEAEDFVEVHLPDVHKQISGVDLGLPSWGKYVLMSAGALTALMLMIFLMTCCRRTNRAESIQHSLGETGRKVSVTSQNGRVISSWESYKSGGETKL

SEQ ID NO: 31180 - protein, 524 aa, Artificial Sequence
  derived and/or modified protein sequence (wt) from glycoprotein__RABV__JN936720.1
MIPQALLFVPLLVFPLCFGKFPIYTIPDKLGPWSPIDIHHLSCPNNLVVEDEGCTNLSGFSYMELKVGYISAIKVNGFTCTGVVTEAETYTNFVGYVTTTFKRKHFRPTPDACRSAYNWKMAGDPRYEESLHNPYPDYHWLRTVKTTKESVVIISPSVADLDPYDKSLHSRVFPRGKCSGITVSSAYCSTNHDYTIWMPENPRLGTSCDIFTNSRGKRASKGSKTCGFVDERGLYKSLKGACKLKLCGVLGLRLMDGTWVAIQTSNETKWCPPDQLVNLHDFHSDEIEHLVVEELVEKREECLDALESIMTTKSVSFRRLSHLRKLVPGFGKAYTIFNKTLMEADAHYKSVRTWNEIIPSKGCLRVGGRCHPHVNGVFFNGIILGPDGHVLIPEMQSSLLQQHMELLESSVIPLMHPLADPSTVFKDGDEAEDFVEVHLPDVHKQVSGVDLGLPSWGKYVLMSAGILTALMLMIFLMTCCRRTNRAESIQHSLGETGRKVSVTSQNGRVISSWESYKSGGETKL

SEQ ID NO: 31181 - protein, 524 aa, Artificial Sequence
  derived and/or modified protein sequence (wt) from glycoprotein__RABV__JN936721.1
MIPQALLFVPLLVFPLCFGKFPIYTIPDKLGPWSPIDIHHLSCPNNLVVEDEGCTNLSGFSYMELKVGYISAIKVNGFTCTGVVTEAETYTNFVGYVTTTFKRKHFRPTPDACRSAYNWKMAGDPRYEESLHNPYPDYHWLRTVKTTKESVVIISPSVADLDPYDKSLHSRVFPRGKCSGITVSSAYCSTNHDYTIWMPENPRLGTSCDIFTNSRGKRASKGSKTCGFVDERGLYKSLKGACKLKLCGVLGLRLMDGTWVAIQTSNETKWCPPDQLVNLHDFHSDEIEHLVVEELVEKREECLDALETIMTTKSVSFRRLSHLRKLVPGFGKAYTIFNKTLMEADAHYKSIRTWNEIIPSKGCLRVGGRCHPHVNGVFFNGIILGPDGHVLIPEMQSSLLHQHMELLESSVIPLMHPLADPSTVFKDGDEAEDFVEVHLPDVHKQISGVDLGLPNWGKYVLISAGALTALMSMIFLMTCCRKTNRAESIQHSPGETGRKVSVTSHNGRVISSWESYKSGGETKL

SEQ ID NO: 31182 - protein, 524 aa, Artificial Sequence
  derived and/or modified protein sequence (wt) from glycoprotein__RABV__JN936722.1
MIPQALLFVPLLVFPLCFGKFPIYTIPDKLGPWSPIDIHHLSCPNNLVVEDEGCTNLSGFSYMELKVGYISAIKVNGFTCTGVVTEAETYTNFVGYVTTTFKRKHFRPTPDACRSAYNWKMAGDPRYEESLHNPYPDYHWLRTVKTTKESVVIISPSVADLDPYDKSLHSRVFPRGKCSGITVSSAYCSTNHDYTIWMPENPRLGTSCDIFTNSRGKRASKGSKTCGFVDERGLYKSLKGACKLKLCGVLGLRLMDGTWVAIQTSNETKWCPPDQLVNLHDFHSDEIEHLVVEELVEKREECLDALESIMTTKSVSFRRLSHLRKLVPGFGKAYTIFNKTLMEADAHYKSIRTWNEIIPSKGCLRVGGRCHPHVNGVFFNGIILGPDGHVLIPEMQSSLLHQHMELLESSVIPLMHPLADPSTVFKDGDEAEDFVEVHLPDVHKQISGVDLGLPNWGKYVLISAGALTALMSMIFLMTCCRKTNRAESIQHSPGETGRKVSVTSHNGRVISSWESYKSGGETKL

SEQ ID NO: 31183 - protein, 524 aa, Artificial Sequence
  derived and/or modified protein sequence (wt) from glycoprotein__RABV__JN936723.1
MIPQALLLVPLLAFPLCFGKFPIYTIPDKLGPWSPIDIHHLSCPNNLVVEDEGCTNLSGFSYMELKVGYISAIKVNGFTCTGVVTEAETYTNFVGYVTTTFKRKHFRPTPDACRSAYNWKMAGDPRYEESLHNPYPDYHWLRTVKTTKESLVIISPSVADLDPYDKSLHSRVFPRGKCSGITVSSTCCSTNHDYTIWMPENPRLGTSCDIFTNSRGKRASKGSKTCGFVDERGLYKSLKGACKLKLCGVLGLRLMDGTWVAIQTSDEIKWCPPDQLVNLHDFHSDEIEHLVVEELVKKREECLDALETIMTTKSVSFRRLSHLRKLVPGFGKAYTIFNKTLMEADAHYKSIRTWNEIIPSKGCLRVGGRCHPHVNGVFFNGIILGPDGHVLIPEMQSSLLHQHMELLESSVIPLMHPLADPSTVFKDGDEAEDFVEVHLPDVHKQISGVDLGLPNWGKYVLISAGALTALMSMIFLMTCCRKTNRAESIQHSPGETGRKVSVTSHNGRVISSWESYKSGGETKL

SEQ ID NO: 31184 - protein, 524 aa, Artificial Sequence
  derived and/or modified protein sequence (wt) from glycoprotein__RABV__JN936724.1
MIPQALLFVPLLVFPLCFGKFPIYTIPDKLGPWSPIDIHHLSCPNNLVVEDEGCTNLSGFSYMELKVGYISAIKVNGFTCTGVVTEAETYTNFVGYVTTTFKRKHFRPTPDACRSAYNWKMAGDPRYEESLHNPYPDYHWLRTVKTTKESVVIISPSVADLDPYDKSLHSRVFPRGKCSGITVSSAYCSTNHDYTIWMPENPRLGTSCDIFTNSRGKRASKGSKTCGFVDERGLYKSLKGACKLKLCGVLGLRLMDGTWVAIQTSNETKWCPPDQLVNLHDFHSDEIEHLVVEELVEKREECLDALETIMTTKSVSFRRLSHLRKLVPGFGKAYTIFNKTLMEADAHYKSIRTWNEIIPSKGCLRVGGRCHPHVNGVFFNGIILGPDGHVLIPEMQSSLLHQHMELLESSVIPLMHPLADPSTVFKDGDEAEDFVEVHLPDVHKQISGVDLGLPNWGKYVLISAGALTALMLTIFLMTCCRKTSRAESIQHSPGETGRKVSVTSHNGRVISSWESYKSGGETKL

SEQ ID NO: 31185 - protein, 524 aa, Artificial Sequence; identical to SEQ ID NO: 30846
  derived and/or modified protein sequence (wt) from glycoprotein__RABV__JN936725.1

SEQ ID NO: 31186 - protein, 524 aa, Artificial Sequence; identical to SEQ ID NO: 31067
  derived and/or modified protein sequence (wt) from glycoprotein__RABV__JN936726.1

SEQ ID NO: 31187 - protein, 524 aa, Artificial Sequence; identical to SEQ ID NO: 30846
  derived and/or modified protein sequence (wt) from glycoprotein__RABV__JN936727.1

SEQ ID NO: 31188 - protein, 524 aa, Artificial Sequence; identical to SEQ ID NO: 30846
  derived and/or modified protein sequence (wt) from glycoprotein__RABV__JN936728.1

SEQ ID NO: 31189 - protein, 524 aa, Artificial Sequence; identical to SEQ ID NO: 30846
  derived and/or modified protein sequence (wt) from glycoprotein__RABV__JN936729.1

SEQ ID NO: 31190 - protein, 524 aa, Artificial Sequence; identical to SEQ ID NO: 30845
  derived and/or modified protein sequence (wt) from glycoprotein__RABV__JN936731.1

SEQ ID NO: 31191 - protein, 524 aa, Artificial Sequence; identical to SEQ ID NO: 30845
  derived and/or modified protein sequence (wt) from glycoprotein__RABV__JN936732.1

SEQ ID NO: 31192 - protein, 524 aa, Artificial Sequence
  derived and/or modified protein sequence (wt) from glycoprotein__RABV__JN936733.1
MIPQVLLFVPLLVFSSCFGKFPIYTIPDKLGPWSPIDIHHLSCPNNLVVEDEGCTNLSGFSYMELKVGYISAIKVNGFTCTGVVTEAETYTNFVGYVTTTFKRKHFRPMPDACRAAYNWKMAGDPRYEESLHNPYPDYHWLRTVKTTKESLVIISPSVADLDPYDKSLHSRVFPGGKCSGITVSSTCCSTNHDYTIWMPENPRLGTSCDIFTNSRGKRASKGGKTCGFVDERGLYKSLKGACKLKLCGVLGLRLMDGTWVAIQTSDEIKWCSPDQLVNLHDFHSDEIEHLVVEELVKKREECLDALETIMTTKSVSFRRLSHLRKLVPGFGKAYTIFNKTLMEADAHYKSIRTWNEIIPSKGCLRVGGRCHPHVNGVFFNGIILGPDGHVLIPEMQSSLLHQHMELLESSVIPLMHPLADPSTVFKDGDEAEDFVEVHLPDVHKQISGVDLGLPNWGKYVLISAGALTALMLTIFLMTCCRKTNRAESIHHSPGETGRKVSVTSHNGRVISSWESYKSGSETKL

SEQ ID NO: 31193 - protein, 524 aa, Artificial Sequence; identical to SEQ ID NO: 31192
  derived and/or modified protein sequence (wt) from glycoprotein__RABV__JN936734.1

SEQ ID NO: 31194 - protein, 524 aa, Artificial Sequence; identical to SEQ ID NO: 30846
  derived and/or modified protein sequence (wt) from glycoprotein__RABV__JN936735.1

SEQ ID NO: 31195 - protein, 524 aa, Artificial Sequence; identical to SEQ ID NO: 30846
  derived and/or modified protein sequence (wt) from glycoprotein__RABV__JN936736.1

SEQ ID NO: 31196 - protein, 524 aa, Artificial Sequence
  derived and/or modified protein sequence (wt) from glycoprotein__RABV__JN936737.1
MIPQVLLFVPLLVFSSCFGKFPIYTIPDKLGPWSPIDIHHLSCPNNLVVEDEGCTNLSGFSYMELKVGYISAIKVNGFTCTGVVTEAETYTNFVGYVTTTFKRKHFRPMPDACRAAYNWKMAGDPRYEESLHNPYPDYHWLRTVKTTKESLVIISPSVADLDPYDKSLHSRVFPGGKCSGITVSSTCCSTNHDYTIWMPENPRLGTSCDIFTNSRGKRASKGGKTCGFVDERGLYKSLKGACKLKLCGVLGLRLMDGTWVALQTSDEIKWCSPDQLVNLHDFHSDEIEHLVVEELVKKREECLDALETIMTTKSVSFRRLSHLRKLVPGFGKAYTIFNKTLMEADAHYKSIRTWNEIIPSKGCLRVGGRCHPHVNGVFFNGIILGPDGHVLIPEMQSSLLHQHMELLESSVIPLMHPLADPSTVFKDGDEAEDFVEVHLPDVHKQISGVDLGLPNWGKYVLISAGALTALMLTIFLMTCCRKTNRAGSIQHSPGETGRKVSVTSHNGRVISSWESYKSGSETKL

SEQ ID NO: 31197 - protein, 524 aa, Artificial Sequence; identical to SEQ ID NO: 30845
  derived and/or modified protein sequence (wt) from glycoprotein__RABV__JN936738.1

SEQ ID NO: 31198 - protein, 524 aa, Artificial Sequence; identical to SEQ ID NO: 30845
  derived and/or modified protein sequence (wt) from glycoprotein__RABV__JN936739.1

SEQ ID NO: 31199 - protein, 524 aa, Artificial Sequence; identical to SEQ ID NO: 30845
  derived and/or modified protein sequence (wt) from glycoprotein__RABV__JN936740.1

SEQ ID NO: 31200 - protein, 524 aa, Artificial Sequence; identical to SEQ ID NO: 30845
  derived and/or modified protein sequence (wt) from glycoprotein__RABV__JN936741.1

SEQ ID NO: 31201 - protein, 524 aa, Artificial Sequence; identical to SEQ ID NO: 30845
  derived and/or modified protein sequence (wt) from glycoprotein__RABV__JN936742.1

SEQ ID NO: 31202 - protein, 524 aa, Artificial Sequence; identical to SEQ ID NO: 30845
  derived and/or modified protein sequence (wt) from glycoprotein__RABV__JN936743.1

SEQ ID NO: 31203 - protein, 524 aa, Artificial Sequence
  derived and/or modified protein sequence (wt) from glycoprotein__RABV__JN936744.1
MILQVLLFVPLLVFSSCFGKFPIYTIPDKLGPWSPIDIHHLSCPNNLVVEDEGCTNLSGFSYMELKVGYISAIKVNGFTCTGVVTEAETYTNFVGYVTTTFKRKHFRPMPDACRAAYNWKMAGDPRYEESLHNPYPDYHWLRTVKTTKESLVIISPSVADLDPYDKSLHSRVFPGGKCSGITVSSTCCSTNHDYTIWMPENPRLGTSCDIFTNSRGKRASKGGKTCGFVDERGLYKSLKGACKLKLCGVLGLRLMDGTWVAIQTSDEIKWCPPDQLVNLHDFHSDEIEHLVVEELVKKREECLDALETIMTTKSVSFRRLSHLRKLVPGFGKAYTIFNKTLMEADAHYKSIRTWNEIIPSKGCLRVGGRCHPHVNGVFFNGIILGPDGHVLIPEMQSSLLHQHMELLESSVIPLMHPLADPSTVFKDGDEAEDFVEVHLPDVHKQISGVDLGLPNWGKYVLISAGALTALMLMIFLMTCCRKNNRAESIQHSPGETGRKVSVTSHNGRVISSWESYKSGGETKL

SEQ ID NO: 31204 - protein, 524 aa, Artificial Sequence; identical to SEQ ID NO: 31084
  derived and/or modified protein sequence (wt) from glycoprotein__RABV__JN936745.1

SEQ ID NO: 31205 - protein, 524 aa, Artificial Sequence
  derived and/or modified protein sequence (wt) from glycoprotein__RABV__JN936746.1
MIPQVLLFVPLLVFSSCFGKFPIYTIPDKLGPWSPIDIHHLSCPNNLVVEDEGCTNLSGFSYMELKVGYISAIKVNGFTCTGVVTEAETYTNFVGYVTTTFKRKHFRPMPDACRAAYNWKMAGDPRYEESLHNPYPDYHWLRTVKTTKESLVIISPSVADLDPYDKSLHSRVFPGGKCSGITVSSTCCSTNHDYTIWMPENPRLGTSCDIFTNSRGKRASKGGKTCGFVDERGLYKSLKGACKLKLCGVLGLRLMDGTWVAIQTSDEIKWCSPDQLVNLHDFHSDEIEHLVVEELVKKREECLDALETIMTTKSVSFRRLSHLRKLVPGFGKAYTIFNKTLMEADAHYKSIRTWNEIIPSKGCLRVGGRCHPHVNGVFFNGIILGPDGHVLIPEMQSSLLHQHMELLESSVIPLMHPLADPSTVFKDGDEAEDFVEVHLPDVHKQISGVDLGLPNWGKYVLISAGALTALMLMIFLMTCCRNTNRAESIQHSPGETGRKVSVTSHNGRVISSWESYKSGGETKL

SEQ ID NO: 31206 - protein, 524 aa, Artificial Sequence
  derived and/or modified protein sequence (wt) from glycoprotein__RABV__JN936747.1
MILQVLLFVPLLVFSSCFGKFPIYTIPDKLGPWSPIDIHHLSCPNNLVVEDEGCTNLSGFSYMELKVGYISAIKVNGFTCTGVVTEAETYTNFVGYVTTTFKRKHFRPMPDACRAAYNWKMAGDPRYEESLHNPYPDYHWLRTVKTTKESLVIISPSVADLDPYDKSLHSRVFPGGKCSGITVSSTCCSTNHDYTIWMPENPRLGTSCDIFTNSRGKRASKGGKTCGFVDERGLYKSLKGACKLKLCGVLGLRLMDGTWVAIQTSDEIKWCPPDQLVNLHDFHSDEIEHLVVEELVKKREECLDALETIMTTKSVSFRRLSHLRKLVPGFGKAYTIFNKTLMEADAHYKSIRTWNEIIPSKGCLRVGGRCHPHVNGVFFNGIILGPDGHVLIPEMQSSLLHQHMELLESSVIPLMHPLADPSTVFKDGDEAEDFVEVHLPDVHKQISGVDLGLPNWGKYVLISAGALTALMLMIFLMTCCRKNNRAESIQHSPGETGRKVSVTSHNGRVTSSWESYKSGGETKL

SEQ ID NO: 31207 - protein, 524 aa, Artificial Sequence; identical to SEQ ID NO: 31084
  derived and/or modified protein sequence (wt) from glycoprotein__RABV__JN936748.1

SEQ ID NO: 31208 - protein, 524 aa, Artificial Sequence; identical to SEQ ID NO: 31084
  derived and/or modified protein sequence (wt) from glycoprotein__RABV__JN936749.1

SEQ ID NO: 31209 - protein, 524 aa, Artificial Sequence; identical to SEQ ID NO: 31084
  derived and/or modified protein sequence (wt) from glycoprotein__RABV__JN936750.1

SEQ ID NO: 31210 - protein, 524 aa, Artificial Sequence; identical to SEQ ID NO: 31084
  derived and/or modified protein sequence (wt) from glycoprotein__RABV__JN936751.1

SEQ ID NO: 31211 - protein, 524 aa, Artificial Sequence
  derived and/or modified protein sequence (wt) from glycoprotein__RABV__JN936753.1
MIPQVLLFVPLLVFSSCFGKFPIYTIPDKLGPWSPIDIHHLSCPNNLVVEDEGCTNLSGFSYMELKVGYISAIKVNGFTCTGVVTEAETYTNFVGYVTTTFKRKHFRPTPDACRAAYNWKMAGDPRYEESLNNPYPDYHWLRTVKTSKESLVIISPSVADLDPYDKSLHSRVFPGGKCSGITVSSTCCSTNHDYTIWMPENPRLGTSCDIFTNSRGKRASKGGKTCGFVDERGLYKSLKGACKLKLCGVLGLRLMDGTWVAIQTSDEIKWCSPDQLVNLHDFHSDEIEHLVVEELVKKREECLDALETIMTTKSVSFRRLSHLRKLVPGFGKAYTIFNKTLMEADAHYKSIRTWNEIIPSKGCLRVGGRCHPHVNGVFFNGIILGPDGHVLIPEMQSSLLHQHMELLESSVIPLMHPLADPSTVFKDGDEAEDFVEVHLPDVHKQISGVDLGLPNWGKYVLVSAGALTALMLMIFLMTCCRKTNRAESIQHSPGETGRKVSVTSHNGRVISSWESYKSGGETKL

SEQ ID NO: 31212 - protein, 524 aa, Artificial Sequence; identical to SEQ ID NO: 30827
  derived and/or modified protein sequence (wt) from glycoprotein__RABV__JN936754.1

SEQ ID NO: 31213 - protein, 524 aa, Artificial Sequence
  derived and/or modified protein sequence (wt) from glycoprotein__RABV__JN936755.1
MIPQVLLFVPLLVSSSCFGKFPIYTIPDKLGPWSPIDIHHLSCPNNLVVEDEGCTNLSGFSYMELKVGYISAIKVNGFTCTGVVTEAETYTNFVGYVTTTFKRKHFRPTPDACRAAYNWKMAGDPRYEESLHNPYPDYHWLRTVKTSKESLVIISPSVADLDPYDKSLHSRVFPGGKCSGITVSSTCCSTNHDYTIWMPENPRLGTSCDIFTNSRGKRASKGGKTCGFVDERGLYKSLKGACKLKLCGVLGLRLMDGTWVAIQTSDEIKWCSPDQLVNLHDFHSDEIEHLVVEELVKKREECLDALETIMTTKSVSFRRLSHLRKLVPGFGKAYTIFNKTLMEADAHYKSIRTWNEIIPSKGCLRVGGRCHPHVNGVFFNGIILGPDGHVLIPEMQSSLLHQHMELLESSVIPLMHPLADPSTVFKDGDEAEDFVEVHLPDVHKQISGVDLGLPNWGKYVLVSAGALTALMLMIFLMTCCRKTNRAESIQHSPGETGRKVSVTSHNGRVISSWESYKSGGETKL

SEQ ID NO: 31214 - protein, 524 aa, Artificial Sequence; identical to SEQ ID NO: 31084
  derived and/or modified protein sequence (wt) from glycoprotein__RABV__JN936756.1

SEQ ID NO: 31215 - protein, 524 aa, Artificial Sequence
  derived and/or modified protein sequence (wt) from glycoprotein__RABV__JN936757.1
MIPQVLLFVPLLVFSSCFGKFPIYTIPDKLGPWSPIDIHHLSCPNNLVVEDEGCTNLSGFSYMELKVGYISAIKVNGFTCTGVVTEAETYTNFVGYVTTTFKRKHFRPTPDACRAAYNWKMAGDPRYEESLHNPYPDYHWLRTVKTSKESLVIISPSVADLDPYDKSLHSRVFPGGKCSGITVSSTCCSTNHDYTIWMPENPRLGTSCDIFTNSRGKRASKGGKTCGFVDERGLYKSLKGACKLKLCGVLGLRLMDGTWVAIQTSDEIKWCSPDQLVNLHDFHSDEIEHLVVEELVKKREECLDALETIMTTKSVSFRRLSHLRKLVPGFGKAYTIFNKTLMEADAHYKSIRTWNEIIPSKGCLRVGGRCHPHVNGVFFNGIILGPDGHVLIPEMQSSLLHQHMELLESSVIPLMHPLADPSTVFKDGDEAEDFVEVHLPDVHKQISGVDLGLPNWGKYVLVSAGALTALMLMIFLMTCCRKTDRAESIQHSPGETRRKVSVTSHNGRVISSWESYKSGGETKL

SEQ ID NO: 31216 - protein, 524 aa, Artificial Sequence
  derived and/or modified protein sequence (wt) from glycoprotein__RABV__JN936758.1
MIPQVLLFVPLLVFSSCFGKFPIYTIPDKLGPWSPIDIHHLSCPNNLVVEDEGCTNLSGFSYMELKVGYISAIKVNGFTCTGVVTEAETYTNFVGYVTTTFKRKHFRPMPDACRAAYNWKMAGDPRYEESLHNPYPDYHWLRTVKTTKESLVIISPSVADLDPYDKSLHSRVFPGGKCSGITVSSTCCSTNHDYTIWMPENPRLGTSCDIFTNSRGKRASKGGKTCGFVDERGLYKSLKGACKLKLCGVLGLRLMDGTWVAIQTSDEIKWCSPDQLVNLHDFHSDEIEHLVVEELVKKREECLDALETIMTTKSVSFRRLSHLRKLVPGFGKAYTIFNKTLMEADAHYKSIRTWNEIIPSKGCLRVGGRCHPHVNGVFFNGIILGPDGHVLIPEMQSSLLHQHMELLESSVIPLMHPLADPSTVFKDGDEAEDFVEVHLPDVHKQISGVDLGLPNWGKYVLIGAGALTALMLTIFLMTCCRKTNRAESIQHSPGETGRKVSVTSHNGRVISSWESYKSGSETKL

SEQ ID NO: 31217 - protein, 524 aa, Artificial Sequence
  derived and/or modified protein sequence (wt) from glycoprotein__RABV__JN936759.1
MIPQVLLFVPLLVFSSCFGKFPIYTIPDKLGPWSPIDIHHLSCPNNLVVEDEGCTNLSGFSYMELKVGYISAIKVNGFTCTGVVTEAETYTNFVGYVTTTFKRKHFRPMPDACRAAYNWKMAGDPRYEESLHNPYPDYHWLRTVKTTKESLVIISPSVADLDPYDKSLHSRVFPGGKCSGITVSSTCCSTNHDYTIWMPENPRLGTSCDIFTNSRGKRASKGGKTCGFVDERGLYKSLRGACKLKLCGVLGLRLMDGTWVAIQTSDEIKWCSPDQLVNLHDFHSDEIEHLVVEELVKKREECLDALETIMTTKSVSFRRLSHLRKLVPGFGKAYTIFNKTLMEADAHYKSIRTWNEIIPSKGCLRVGGRCHPHVNGVFFNGIILGPDGHVLIPEMQSSLLHQHIELLESSVIPLMHPLADPSTVFKDGDEAEDFVEVHLPDVHKQISGVDLGLPNWGKYVLISAGALTALMLTIFLMTCCRKTNRAESIQHSPGETGRKVSVTSHNGRVISSWESYKSGSETKL

SEQ ID NO: 31218 - protein, 524 aa, Artificial Sequence
  derived and/or modified protein sequence (wt) from glycoprotein__RABV__JN936760.1
MIPQVLLFVPLLVFSLCFGKFPIYTIPDKLGPWSPIDIHHLSCPNNLVVEDEGCTNLSGFSYMELKVGYISAIKVNGFTCTGVVTEAETYTNFVGYVTTTFKRKHFRPMPDACRAAYNWKMAGDPRYEESLHNPYPDYHWLRTVKTTKESLVIISPSVADLDPYDKSLHSRVFPGGKCSGITVSSTCCSTNHDYTVWMPENPRLGTSCDIFTNSRGKRASKGGKTCGFVDERGLYKSLKGACKLKLCGVLGLRLMDGTWVAIQTSDEIKWCSPDQLVNLHDFHSDEIEHLVVEELVKKREECLDALETIMTTKSVSFRRLSHLRKLVPGFGKAYTIFNKTLMEADAHYKSIRTWNEIIPSKGCLRVGGRCHPHVNGVFFNGIILGPDGHVLIPEMQSSLLHQHMELLESSVIPLMHPLADPSTVFKDGDEAEDFVEVHLPDVHKQISGVDLGLPNWGKYVLISAGALTALMLTIFLMTCCRKTNRAESIQHSPGETGRKVSVTSHNGRVISSWESYKSGSETKL

SEQ ID NO: 31219 - protein, 524 aa, Artificial Sequence
  derived and/or modified protein sequence (wt) from glycoprotein__RABV__JN936761.1
MIPQVLLFVPLLVFSSCFGKFPIYTIPDKLGPWSPIDIHHLSCPNNLVVEDEGCTNLSGFSYMELKVGYISAIKVNGFTCTGVVTEAETYTNFVGYVTTTFKRKHFRPMPDACRAAYNWKMAGDPRYEESLHNPYPDYHWLRTVKTTKESLVIISPSVADLDPYDKSLHSRVFPGGKCSGITVSSTCCSTNHDYTIWMPENPRLGTSCDIFTNSRGKRASKGGKTCGFVDERGLYKSLKGACKLKLCGVLGLRLMDGTWVAIQTSDEIKWCSPDQLVNLHDFHSDEIEHLVVEELVKKREECLDALETIMTTKSVSFRRLSHLRKLVPGFGKAYTIFNKTLMEADAHYKSIRTWNEIIPSKGCLRVGGRCHPHVNGVFFNGIILGPDGHVLIPEMQSSLLHQHMELLESSVIPLMHPLADPSTVFKDGDEAEDFVEVHLPDVHKQISGVDLGLPNWGKYVLISAGALTALMLMIFLMTCCRKTNRAESIQHSPGETGRKVSVTSHNGRVISSWESYKSGSETKL

SEQ ID NO: 31220 - protein, 524 aa, Artificial Sequence; identical to SEQ ID NO: 31084
  derived and/or modified protein sequence (wt) from glycoprotein__RABV__JN936762.1

SEQ ID NO: 31221 - protein, 524 aa, Artificial Sequence; identical to SEQ ID NO: 30827
  derived and/or modified protein sequence (wt) from glycoprotein__RABV__JN936763.1

SEQ ID NO: 31222 - protein, 524 aa, Artificial Sequence
  derived and/or modified protein sequence (wt) from glycoprotein__RABV__JN936764.1
MIPQVLLFVPFLVFSSCFGKFPIYTIPDKLGPWSPIDIHHLSCPNNLVVEDEGCTNLSGFSYMELKVGYISAIKVNGFTCTGVVTEAETYTNFVGYVTTTFKRKHFRPMPDACRAAYNWKMAGDPRYEESLHNPYPDYHWLRTVKTTKESLVIISPSVADLDPYDKSLHSRVFPGGKCSGITVSSTCCSTNHDYTIWMPENPRLGTSCDIFTNSRGKRASKGGKTCGFVDERGLYKSLKGACKLKLCGVLGLRLMDGTWVAIQTSDEIKWCSPDQLVNLHDFHSDEIEHLVVEELVKKREECLDALETIMTTKSVSFRRLSHLRKLVPGFGKAYTIFNKTLMEADAHYKSIRTWNEIIPSKGCLRVGGRCHPHVNGVFFNGIILGPDGHVLIPEMQSSLLHQHMELLESSVIPLMHPLADPSTVFKDGDEAEDFVEVHLPDVHKQISGVDLGLPNWGKYVLISAGALTALMLTIFLMTCCRKTNRAESIQHSPGETGRKVSVTSHNGRVISSWESYKSGSETKL

SEQ ID NO: 31223 - protein, 524 aa, Artificial Sequence; identical to SEQ ID NO: 30845
  derived and/or modified protein sequence (wt) from glycoprotein__RABV__JN936765.1

SEQ ID NO: 31224 - protein, 524 aa, Artificial Sequence; identical to SEQ ID NO: 30845
  derived and/or modified protein sequence (wt) from glycoprotein__RABV__JN936766.1

SEQ ID NO: 31225 - protein, 524 aa, Artificial Sequence; identical to SEQ ID NO: 30845
  derived and/or modified protein sequence (wt) from glycoprotein__RABV__JN936767.1

SEQ ID NO: 31226 - protein, 524 aa, Artificial Sequence; identical to SEQ ID NO: 31067
  derived and/or modified protein sequence (wt) from glycoprotein__RABV__JN936768.1

SEQ ID NO: 31227 - protein, 524 aa, Artificial Sequence; identical to SEQ ID NO: 30846
  derived and/or modified protein sequence (wt) from glycoprotein__RABV__JN936769.1

SEQ ID NO: 31228 - protein, 524 aa, Artificial Sequence
  derived and/or modified protein sequence (wt) from glycoprotein__RABV__JN936770.1
MIPQVLLFVPLLVFSSCFGKFPIYTIPDKLGPWSPIDIHHLSCPNNLVVEDEGCTNLSGFSYMELKVGYISAIKVNGFTCTGVVTEAETYTNFVGYVTTTFKRKHFRPMPDACRSAYNWKMAGDPRYEESLHNPYPDYHWLRTVKTTKESLVIISPSVADLDPYDKSLHSRVFPGGKCSGITVSSTCCSTNHDYTIWMPENPRLGTSCDIFTNSRGKRASKGGKTCGFVDERGLYKSLKGACKLKLCGVLGLRLMDGTWVAIQTSDEIKWCSPDQLVNLHDFHSDEIEHLVVEELVKKREECLDALETIMTTKSVSFRRLSHLRKLVPGFGKAYTIFNKTLMEADAHYKSIRTWNEIIPSKGCLRVGGRCHPHVNGVFFNGIILGPDGHVLIPEMQSSLLHQHMELLESSVIPLMHPLADPSTVFKDGDEAEDFVEVHLPDVHKQISGVDLGLPNWGKYVLISAGALTALMLTIFLMTCCRKTNRAESIQHSPGETGRKVSVTSHNGRVISSWESYKSGSETKL

SEQ ID NO: 31229 - protein, 524 aa, Artificial Sequence; identical to SEQ ID NO: 30827
  derived and/or modified protein sequence (wt) from glycoprotein__RABV__JN936771.1

SEQ ID NO: 31230 - protein, 524 aa, Artificial Sequence; identical to SEQ ID NO: 31192
  derived and/or modified protein sequence (wt) from glycoprotein__RABV__JN936772.1

SEQ ID NO: 31231 - protein, 524 aa, Artificial Sequence
  derived and/or modified protein sequence (wt) from glycoprotein__RABV__JN936773.1
MIPQVLLFVPLLVFSSCFGKFPIYTIPDKLGPWSPIDIHHLSCPNNLIVEDEGCTNLSGFSYMELKVGYISAIKVNGFTCTGVVTEAETYTNFVGYVTTTFKRKHFRPMPDACRAAYNWKMAGDPRYEESLHNPYPDYHWLRTVKTTKESLVIISPSVADLDPYDKSLHSRVFPGGKCSGITVSSTCCSTNHDYTIWMPENPRLGTSCDIFTNSRGKRASKGGKTCGFVDERGLYKSLKGACKLKLCGVLGLRLMDGTWVAIQTSDEIKWCSPDQLVNLHDFHSDEIEHLVVEELVKKREECLDALETIMTTKSVSFRRLSHLRKLVPGFGKAYTIFNKTLMEADAHYKSIRTWNEIIPSKGCLRVGGRCHPHVNGVFFNGIILGPDGHVLIPEMQSSLLHQHMELLESSVIPLMHPLADPSTVFKDGDEAEDFVEVHLPDVHKQISGVDLGLPNWGKYVLISAGALTALMLTIFLMTCCRKTNRAGSIQHSPGETGRKVSVTSHNGRVISSWESYKSGSETKL

SEQ ID NO: 31232 - protein, 524 aa, Artificial Sequence; identical to SEQ ID NO: 30845
  derived and/or modified protein sequence (wt) from glycoprotein__RABV__JN936774.1

SEQ ID NO: 31233 - protein, 524 aa, Artificial Sequence; identical to SEQ ID NO: 30846
  derived and/or modified protein sequence (wt) from glycoprotein__RABV__JN936775.1

SEQ ID NO: 31234 - protein, 524 aa, Artificial Sequence; identical to SEQ ID NO: 30827
  derived and/or modified protein sequence (wt) from glycoprotein__RABV__JN936776.1

SEQ ID NO: 31235 - protein, 524 aa, Artificial Sequence; identical to SEQ ID NO: 30846
  derived and/or modified protein sequence (wt) from glycoprotein__RABV__JN936777.1

SEQ ID NO: 31236 - protein, 524 aa, Artificial Sequence; identical to SEQ ID NO: 30846
  derived and/or modified protein sequence (wt) from glycoprotein__RABV__JN936778.1

SEQ ID NO: 31237 - protein, 524 aa, Artificial Sequence; identical to SEQ ID NO: 31067
  derived and/or modified protein sequence (wt) from glycoprotein__RABV__JN936779.1

SEQ ID NO: 31238 - protein, 524 aa, Artificial Sequence
  derived and/or modified protein sequence (wt) from glycoprotein__RABV__JN936780.1
MIPQVLLFVPLLVFSSCFGKFPIYTIPDKLGPWSPIDIHHLSCPNNLVVEDEGCTNLSGFSYMELKVGYISAIKVNGFTCTGVVTEAETYTNFVGYVTTTFKRKHFRPMPDACRAAYNWKMAGDPRYEESLHNPYPDYHWLRTVKTTKESLVIISPSVADLDPYDKSLHSRVFPGGKCSGITVSSTCCSTNHDYTIWMPENPRLGTSCDIFTNSRGKRASKGGKTCGFVDERGLYKSLKGACKLKLCGVLGLRLMDGTWVAIQTSDEIKWCSPDQLVNLHDFHSDEIEHLVVEELVKKREECLDALETIMTTKSVSFRRLSHLRKLVPGFGKAYTIFNKTLMEADAHYKSIRTWNEIIPSKGCLRVGGRCHPHVNGVFFNGIILGPDGHVLIPEMQSSLLHQHMELLESSVIPLMHPLADPLTVFKDGDEAEDFVEVHLPDVHKQISGVDLGLPNWGKYVLISAGALTALMLTIFLMTCCRKTNRAESIQHSPGETGRKVSVTSHNGRVISSWESYKSGSETKL

SEQ ID NO: 31239 - protein, 524 aa, Artificial Sequence; identical to SEQ ID NO: 30845
  derived and/or modified protein sequence (wt) from glycoprotein__RABV__JN936781.1

SEQ ID NO: 31240 - protein, 524 aa, Artificial Sequence; identical to SEQ ID NO: 30845
  derived and/or modified protein sequence (wt) from glycoprotein__RABV__JN936782.1

SEQ ID NO: 31241 - protein, 524 aa, Artificial Sequence
  derived and/or modified protein sequence (wt) from glycoprotein__RABV__JN936783.1
MIPQVLLFVPLLVFSSCFGKFPIYTIPDKLGPWSPIDIHHLSCPNNLVVEDEGCTNLSGFSYMELKVGYISAIKVNGFTCTGVVTEAETYTNFVGYVTTTFKRKHFRPMPDACRAAYNWKMAGDPRYEESLHNPYPDYHWLRTVKTTKESLVIISPSVADLDPYDKSLHSRVFPGGKCSGITVSSTCCSTNHDYTIWMPENPRLGTSCDIFTNSRGKRASKGGKTCGFVDERGLYKSLKGACKLKLCGVLGLRLMDGTWVAIQTSDEIKWCSPDQLVNLHDFHSDEIEHLVVEELVKKREECLDALETIMTTKSVSFRRLSHLRKLVPGFGKAYTIFNKTLMEADAHYKSIRTWNEIIPSKGCLRVGGRCHPHVNGVFFNGIILGPDGHVLIPEMQSSLLHQHIELLESSVIPLMHPLADPSTVFKDGDEAEDFVEVHLPDVHKQISGVDLGLPNWGKYVLISAGALTALMLTIFLMTCCRKTNRAESIQHSPGETGRKVSVTSHNGRVISSWESYKSGSETKL

SEQ ID NO: 31242 - protein, 524 aa, Artificial Sequence
  derived and/or modified protein sequence (wt) from glycoprotein__RABV__JN936784.1
MIPQVLLFVPLLVFSSCFGKFPIYTIPDKLGPWSPIDIHHLSCPNNLVVEDEGCTNLSGFSYMELKVGYISAIKVNGFTCTGVVTEAETYTNFVGYVTTTFKRKHFRPMPDACRAAYNWKMAGDPRYEESLHNPYPDYHWLRTVKTTKESLVIISPSVADLDPYDKSLHSRVFPGGKCSGITVSSTCCSTNHDYTIWMPENPRLGTSCDIFTNSRGKRASKGGKTCGFVDERGLYKSLKGACKLKLCGVLGLRLMDGTCVAIQTSDEIKWCSPDQLVNLHDFHSDEIEHLVVEELVKKREECLDALETIMTTKSVSFRRLSHLRKLVPGFGKAYTIFNKTLMEADAHYKSIRTWNEIIPSKGCLRVGGRCHPHVNGVFFNGIILGPDGHVLIPEMQSSLLHQHIELLESSVIPLMHPLADPSTVFKDGDEAEDFVEVHLPDVHKQISGVDLGLPNWGKYVLISAGALTALMLTIFLMTCCRKTNRAESIQHSPGETGRKVSVTSHNGRVISSWESYKSGSETKL

SEQ ID NO: 31243 - protein, 524 aa, Artificial Sequence; identical to SEQ ID NO: 31084
  derived and/or modified protein sequence (wt) from glycoprotein__RABV__JN936786.1

SEQ ID NO: 31244 - protein, 524 aa, Artificial Sequence
  derived and/or modified protein sequence (wt) from glycoprotein__RABV__JN936788.1
MIPQALLFVPLLVVSLCFGKFPIYTIPDKLGPWSPIDIHHLSCPNNLVVEDEGCTNLSGFSYMELKVGYISAIKVNGFTCTGVVTEAETYTNFVGYVTTTFKRKHFRPTPDACRSAYNWKMAGDPRYEESLHNPYPDYHWLRTVKTTKESFVIISPSVADLDPYDKSLHSRVFPRGKCSGITVSSTYCSTNHDYTIWMPENPRLGTSCDIFTNSRGKRAFKGSKTCGFVDERGLYKSLKGACKLKLCGVLGLRLMDGTWVAIQTSDETKWCPPDQLVNLHDFHSDEIEHLVVEELVKKREECLDALESIMTTKSVSFRRLSHLRKLVPGFGKAYTIFNKTLMEADAHYKSVRTWNEIIPSKGCLRVGGRCHPHVNGVFFNGIILGPDGHVLIPEMQSSLLQQHMELLESSVIPLMHPLADPSTVFKNGDEAEDFVEVHLPDVHKQVSGVDLGLPSWGKYVLMSAGVLTALMLMIFLMTCCRRTNRPESIQHSLGETGRKVSVTSQNGRVISSWESYKSGGETKL

SEQ ID NO: 31245 - protein, 524 aa, Artificial Sequence; identical to SEQ ID NO: 31222
  derived and/or modified protein sequence (wt) from glycoprotein__RABV__JN936790.1

SEQ ID NO: 31246 - protein, 524 aa, Artificial Sequence; identical to SEQ ID NO: 31084
  derived and/or modified protein sequence (wt) from glycoprotein__RABV__JN936791.1

SEQ ID NO: 31247 - protein, 524 aa, Artificial Sequence; identical to SEQ ID NO: 30845
  derived and/or modified protein sequence (wt) from glycoprotein__RABV__JN936793.1

SEQ ID NO: 31248 - protein, 524 aa, Artificial Sequence
  derived and/or modified protein sequence (wt) from glycoprotein__RABV__JQ595307.1
MIPQALLFVPLLIPSLCLGEFPIYTIPDKLGPWTPIDIHHLSCPNNLVAENDGCTSLSGFSYMELKVGYISAIKVNGFTCTGVVTEAETYTNFVGYVTTTFKRKHFRPMPDACRAAHDWKMAGDPRYEDSLQNPYPDYHWLRTVKTTKESLVIISPSVADLDPYDKSLHSRVFPSGKCLGITVSSTYCSTNHDYTIWMPVEPRLGTSCDIFTNSRGKRASKGGRVCGFVDERGLYKSLKGACKLKLCGVPGIRLMDGTWVSIQTSEDIKWCPPDRLVNLHDFHSDELEHLVVEELIKRRENCLDALESIMTTKSVSFRRLSHLRKLVPGFGKAYTIFNKTLMEADAHYKSVKTWNEVIPSKGCLEVGGKCHPPVNGVFFNGIILGPDGNVLIPEMQSSLLQQHMELLESSVIPLMHPLADPSTVFKEGDEAEDFVEVHLPDVHKQVSDVDLGLPSWGKYLLMSAGALAILILAIVLIICCRRVNKTGSTQRGHRESRGKMSVAPQNGKIISSWELYKSESETGL

SEQ ID NO: 31249 - protein, 524 aa, Artificial Sequence
  derived and/or modified protein sequence (wt) from glycoprotein__RABV__JQ595308.1
MIPQALLFVPLLIPSLCLGEFPIYTIPDKLGPWSPIDIHHLSCPNNLVAENDGCTSLSGFSYMELKVGYISAIKVNGFTCTGVVTEAETYTNFVGYVTTTFKRKHFRPTPDACRAAHDWKMAGDPRYEASLQNPYPDYHWLRTVKTTKESLVIISPSVADLDPYDKSLHSRVFPSGKCLGITVSSTYCSTNHDYTIWMPVEPRLGTSCDIFTNSRGKRASKGGRVCGFVDERGLYKSLKGACRLKLCGVPGIRLLDGTWVSIQTSEDIKWCPPDRLVNLHDFHSDEIEHLVVAELIKRRENCLDALESIMTTKSVSFRRLSHLRKLVPGFGKAYTIFNKTLMEADAHYKSVKTWNEVIPSKGCLEVGGRCHPHVNGVFFNGIILGPDGNVLIPEMQSSLLQQHMELLESSVIPLMHPLADPSTVFKEGDEAEDFVEVHLPDVHKQVSDVDLGLPSWGKYLLISAGALAILILAIVLIICCRRVNKTGSTQRGHRESGGKMSVVPQNGKIISSWELYKSESETGL

SEQ ID NO: 31250 - protein, 524 aa, Artificial Sequence
  derived and/or modified protein sequence (wt) from glycoprotein__RABV__JQ595309.1
MIPQALLFVPLLIPSLCLGEFPIYTIPDKLGPWSPIDIHHLSCPNNLVAENDGCTSLSGFSYMELKVGYISAIKVNGFTCTGVVTEAETYTNFVGYVTTTFKRKHFRPTPDACRAAHDWKMAGDPRYEASLQNPYPDYHWLRTVKTTKESLVIISPSVADLDPYDKSLHSRVFPSGKCLGITVSSTYCSTNHDYTIWMPVEPRLGTSCDIFTNSRGKRASKGGRVCGFVDERGLYKSLKGACRLKLCGVPGIRLLDGTWVSIQTSEDIKWCPPDRLVNLHDFHSDEIEHLVVAELIKRRENCLDALESIMTTKSVSFRRLSHLRKLVPGFGKAYTIFNKTLMEADAHYKSVKTWNEVIPSKGCLEVGGRCHPHVNGVFFNGIILGPDGNVLIPEMQSSLLQQHMELLESSVIPLMHPLADPSTVFKEGDEAEDFVEVHLPDVHKQVSDVDLGLPSWGKYLLISAGALAILILAIVLIICCRRVKKTGSTQRGHRESGGKMSVVPQNGKIISSWELYKSESETGL

SEQ ID NO: 31251 - protein, 524 aa, Artificial Sequence
  derived and/or modified protein sequence (wt) from glycoprotein__RABV__JQ595310.1
MIPQALLFVPLLIPLLCRGEFPIYTIPDKLGPWSPIDIHHLSCPNNLVAENDGCTSLSGFSYMELKVGYISAIKVNGFTCTGVVTEAETYTNFVGYVTTTFKRKHFRPTPDACRAAHDWKMAGDPRYEDSLQNPYPDYHWLRTVKTTKESLVIISPSVADLDPYDKSLHSRVFPSGKCLGITVSSTYCSTNHDYTIWMPVEPRLGTSCDIFTNSRGKRASKGGRVCGFVDERGLYKSLKGACKLKLCGVPGIRLLDGTWVSIQTSEDIKWCPPDRLVNLHDFHSDEIEHLVVEELIKRRENCLDALESIMTTKSVSFRRLSHLRKLVPGFGKAYTIFNNTLMEADAHYKSVKTWNEVIPSKGCLEVGGRCHPPVNGVFFNGIILGPDGNVLIPEMQSSLLQQHMELLESSVIPLMHPLADPSTVFKEGDEAEDFVEVHLPDVHKQVSDVDLGLPSWGKYLLMSAGALAILILAIVLIICCRRVNKTRSSQRGHRESGGKMSVAPQNGKIISSWELYKSESETGL

SEQ ID NO: 31252 - protein, 524 aa, Artificial Sequence
  derived and/or modified protein sequence (wt) from glycoprotein__RABV__JQ595312.1
MIPQALLFVPLLIPSLCLGEFPFYTIPDKLGPWSPMHIHHLSCPNNLVAEDDGCTSLSGFSYMELKVGYISAIKVNGFTCTGVVTEAETYTNFVGYVTTTFKRKHFRPMPDACRAAHDWKMAGDPRYEDSLQNPYPDSHWLRTVKTTKESLVIISPSVADLDPYDKSLHSRVFPSGKCLGITVSSTYCSTNHDYTIWMPVEPRLGTSCDIFTNSRGKRASKGGRVCGFVDERGLYKSLKGACKLKLCGVPGIRLMDGTWVSIQTSEDIKWCPPDRLVNLHDFHSDEIEHLVVEELIKRRENCLDALESIMTTKSVSFRRLSHLRKLVPGFGKAYTIFNKTLMEADAHYKSVKNWNEVIPSKGCLEVGGRCHPPVNGVFFNGIILGPDGNVLIPEMQSSLLQQHMELLESSVIPLMHPLADPSTVFKEGDEAEDFVEVHLPDVHKQVSDVDLGLPSWGKYLLMSAGALAILLLAIVSIICCRRVSKTRSTQRGHRESGGRMSVAPQNGKIISSWELYKSESETGL

SEQ ID NO: 31253 - protein, 524 aa, Artificial Sequence
  derived and/or modified protein sequence (wt) from glycoprotein__RABV__JQ595313.1
MIPQALLFVPLLIPSLGLGKFPIYTIPDKLGPWSPIDIHHLSCPNNLVVEDEGCTSLSGFSYMELKVGYISSIKVNGFTCTGVVTEAETYTNFVGYVTTTFKRKHFRPMPDACRAAHDWKIAGDPRYEDSLQNPYPDYHWLRTVKTTKESLVIISPSVAELDPYDKSLHSRVFPSGKCLGITVSSTYCSTNHDYTIWMPVEARLGTSCDIFTNSRGKKASKGGRTCGFVDERGLYKSLKGACKLKLCGVPGLRLMDGTWVSIQTSDDIKWCPPDQLVNLHDFHSDEIEHLVVEELIKKREGCLDALESIMTTKSVSFRRLSHLRKLVPGFGKAYTIFNNTLMEADAHYKSVRTWNEVIPSKGCLKVGGRCHPPVNGVFFNGIILGPDGNVLIPEMQSSLLQQHMELLESSVIPLMHPLADPSTVFKDGDEAEDFVEVHLPDVHKQVSDVDLGLPSWGKYLLMSAGALATLILAIFLITCCRRANRTESTQRGHRESGGKVSVAPQNGKIISSWELYKSESETGM

SEQ ID NO: 31254 - protein, 524 aa, Artificial Sequence
  derived and/or modified protein sequence (wt) from glycoprotein__RABV__JQ595315.1
MIPQALLFVPLLIPSLCLGKFPIYTIPDKLGPWSPIDIHHLSCPNNLVAEDEGCTSLSGFSYMELKVGYISAIKVNGFTCTGVVTEAETYTNFVGYVTTTFKRKHFRPMPDACRAAHDWKMAGDPRYEDSLQNPYPDYHWLRTVKTTKESLVIISPSVADLDPYDKSLHSRVFPSGKCLGITVSSTYCSTNHDYTIWMPVEARLGTSCDIFTNSKGKKASKGGRTCGFVDERGLYKSLKGACKLKLCGVPGLRLMDGTWVSIQTSDDIKWCPPDQLVNLHDFHSDEIEHLVVEELIKKREGCLDALESIMTTKSVSFRRLSHLRKLVPGFGKAYTIFNNTLMEADAHYKSVRTWNEVIPSKGCLKVGGRCHPPVNGVFFNGIILGPDGNVLIPEMQSSLLQQHMELLESSVIPLMHPLADPSTVFKDGDEAEDFVEVHLPDVHKQVSEIDLGLPSWGKYLLMSAGVLATLILAIFLITCCRRANRTESTQRGRRESGGKVSVAPQNVKIISSWELYKSESETGL

SEQ ID NO: 31255 - protein, 524 aa, Artificial Sequence
  derived and/or modified protein sequence (wt) from glycoprotein__RABV__JQ595316.1
MIPQALLFVPLLIPSLCLGNFPIYTIPDKLGPWSPIDIHHLSCPNNLVAEDEGCTSLSGFSYMELKVGYISAIKVNGFTCTGVVTEAETYTNFVGYVTTTFKRKHFRPMPDACRAAHDWKMAGDPRYEDSLQNPYPDYHWLRTVKTTKESLVIISPSVADLDPYDKSLHSRVFPSGKCLGITVSSTYCSTNHDYTIWMPVEARLGTSCDIFTNSKGKKASKGGRTCGFVDERGLYKSLKGACKLKLCGVPGLRLMDGTWVSIQTSDDIKWCPPDQLVNLHDFHSDEIEHLVVEELIKKREGCLDALESIMTTKSVSFRRLSHLRKLVPGFGKAYTIFNNTLMEADAHYKSVRTWNEVIPSKGCLKVGGRCHPPVNGVFFNGIILGPDGNVLIPEMQSSLLQQHMELLESSVIPLMHPLADPSTVFKDGDEAEDFVEVHLPDVHKQVSEIDLGLPSWGKYLLMSAGVLATLILAIFLITCCRRANRTESTQRGRRESGGKVSVAPQNGKIISSWELYKSESETGL

SEQ ID NO: 31256 - protein, 524 aa, Artificial Sequence
  derived and/or modified protein sequence (wt) from glycoprotein__RABV__JQ595317.1
MIPQALLFVPLLISSLCFGKFPIYTIPDKLGPWSPIDIHHLCCPNNLVAEEEGCTSLSGFSYMELKVGYISAIKVNGFTCTGVVTEAETYTNFVGYVTTTFKRKHFRPMPDACRAAYDWKMAGDPRYEDSLQNPYPDYHWLRTVKTTKESLIIISPSVADLDPYDKSLHSRVFPGGKCLGITISSTYCSTNHDYTIWMPEEARLGTSCNIFTNSRGKKASKGGRTCGFVDERGLYKSLKGACKLKLCGVPGLRLMDGTWVSIQTSNETKWCPPDQLVNLHDFHSDEIEHLVVEELVKKREECLDALESIMTTKSVSFRRLSHLRKLVPGFGKAYTIFNKTLMEADAHYKSVRTWNEIIPSKGCLKVGGRCHPHVDGVFFNGIILGPDGHVLIPEMQSSLLQQHMELLESSVIPLIHPLADPSTVFKDGDEADDFVEVHLPDVHKQVSGVDLGLPGWGKYLLMSAGALATLILTIFLIKCCRGVNRTESVQRSLRDSGGKVSVPPQNGKVISSWELYKSGGETGL

SEQ ID NO: 31257 - protein, 524 aa, Artificial Sequence
  derived and/or modified protein sequence (wt) from glycoprotein__RABV__JQ595319.1
MIPQALLSVPLLISSLCLGKFPIYTIPDKLGPWSPIDIHHLSCPNNLVVEDEGCTSLSGFSYMELKVGYISAIKVNGFTCTGVVTEAETYTNFVGYVTTTFKRKHFRPMPDACRAAHEWKMAGDPRYEDSLQNPYPDYHWLRTVKTTKESLIIISPSVADLDPYDKSLHSRVFPGGNCLGITISSTYCSTNHDYTIWMPEEARLGTSCDIFTNSRGKRASKGGKICGFVDERGLYKSLKGACKLKLCGVPGLRLMDGTWVSIQTSDETKWCPPDQLVNVHDFHSDEIEHLIVEELVKKREECLDALESIMTTKSVSFRRLSHLRKLVPGFGKAYTIFNNTLMEADAHYKSVRTWNEIIPSKGCLKVGGMCHPHVGGVFFNGIILGPDGTVLIPEMQSSLLQQHMELLESSVIPLMHPLADPSTVFKEGDEAEDFVEIHLPDVHKQISGVDLGLPSWGKYLLISAGALATLILTIFLITCCRKVNRTESIQRGHGESERKVSVSPQNGRVISSWELYKSGGETNL

SEQ ID NO: 31258 - protein, 524 aa, Artificial Sequence
  derived and/or modified protein sequence (wt) from glycoprotein__RABV__JQ595320.1
MIFQALLFVPLLISSLCLGKFPIYTIPDKLGPWSPIDIHHLSCPNNLVVEDEGCTSLSGFSYMELKVGYISAIKVNGFTCTGVVTEAETYTNFVGYVTTTFKRKHFRPIPDACRAAYNWKIAGDPRYEESLQNPYPDYHWLRTVKTTKESLIIISPSVADLDPYDKSLHSRLFPGGKCLGITISSTYCSTNHDYTIWMPEEPRLGTSCDIFTNSKGKKASKGGKVCGFVDERGLYKSLKGACKLKLCGVSGLRLMDGTWVTIQTSDETKWCPPDQLVNLHDFHSDEIEHLVVEELVKKREECLDALESIMTTKSVSFRRLSYLRKLVPGFGKAYTIFNKTLMEADAHYKSVRTWNEIIPSKGCLKVSDRCHPHVDGVFFNGIILGPDGNVLIPEMQSSLLQQHMELLESSVIPLMHPLADPSTVFKDGDEAEDFVEVHLPDVHKQISGVDLGLPSWGKYLLMIAGGLATLVLIIFLMACCRRTKRTESRPRGSGESGEKVLATPQPKKVVSSWELYKREGDARL

SEQ ID NO: 31259 - protein, 524 aa, Artificial Sequence
  derived and/or modified protein sequence (wt) from glycoprotein__RABV__JQ595321.1
MIFQALLFVPLLISSLCLGKFPIYTIPDKLGPWSPIDIHHLSCPNNLVVEDEGCTSLSGFSYMELKVGYISAIKVNGFTCTGVVTEAETYTNFVGYVTTTFKRKHFRPIPDACRAAYNWKIAGDPRYEESLQNPYPDYHWLRTVKTTKESLIIISPSVADLDPYDKSLHSRLFPGGKCLGITISSTYCSTNHDYTIWMPEEPRLGTSCDIFTNSKGKKASKGGKVCGFVDERGLYKSLKGACKLKLCGVSGLRLMDGTWVTIQTSDETKWCPPDQLVNLHDFHSDEIEHLVVEELVKKREECLDALESIMTTKSVSFRRLSYLRKLVPGFGKAYTIFNKTLMEADAHYKSVRTWNEIIPSKGCLKVSDRCHPHVDGVFFNGIILGPDGNVLIPEMQSSLLQQHMELLESSVIPLMHPLADPSTVFKDGDEAEDFVEVHLPDVHKQISGVDLGLPSWGKYLLMIAGGLATLVLIIFLMACCRRTKRTESRRRALGESGEKVLATPQPKKVVSSWELYKREGDARL

SEQ ID NO: 31260 - protein, 524 aa, Artificial Sequence
  derived and/or modified protein sequence (wt) from glycoprotein__RABV__JQ595322.1
MIPQALLSVPLLISSLCFGKFPIYTIPEKLGPWSPIDIHHLSCPNNLVVEDEGCNSLSGFSYMELKVGYISAIKVNGFTCTGVVTEAETYTNFVGYVTTTFKRKHFRPMPDACRAAYNWKTAGDPRYEESLHNPYPDYHWLRTVKTTKESLIIISPSVADLDPYDKSLHSRIFPGGKCLGITISSTYCSTNHDYTIWMPEEARLGTSCDIFTNSKGKRASKGGRTCGFVDERGLYKSLKGACKLKLCGVPGLRLMDGTWVAIQTPNETKWCSPDQLVNVHDFRSDEIEHLVVEELIRKREECLDALESIMTTKSVSFRRLSNLRKLVPGFGKAYTIFNKTLMEADAHYKSVRTWNEIIPSRGCLKVGGRCHPHVNGVFFNGIILGPDGHILIPEMQSSLLQQHMELLESSVIPLIHPLADPSTVFKDGDEAEDFVEVHLPDVHQQVSGVDLGLPDWGKYVLMSAGALATVMLTIFLITCCRRVKRTESIHQGLGESGRKVSVTPQNGKVMSSWEYYKSEGGTRL

SEQ ID NO: 31261 - protein, 524 aa, Artificial Sequence
  derived and/or modified protein sequence (wt) from glycoprotein__RABV__JQ595323.1
MISQAVLYVPLLIPSLCIGEFPIYTIPDKIGPWSPIDIHHLSCPNNLVVEDEGCTSLSGFSYMELKVGYISAIKVNGFTCTGVVTEAETYTNFVGYVTTTFKRKHFRPMPDACRAAYNWKMAGDPRYEESLQNPYPDYNWLRTVKTTKESLIIISPSVADLDPYDKSLHSRVFPNGKCLGVTISSTYCSTNHDYTIWMPEEARLGTSCDIFTNSKGKRASKGGRTCGFVDERGLYKSLRGACKLKLCGVPGLRLMDGTWVSIQTSDDTKWCPPDQLVNVHDFHSDEIEHLVVEELVKKREECLDALESIMTTKSVSFRRLSHLRKLVPGFGKAYTIFNKTLMEADAHYKSIQTWNEIIPSKGCLKVGGMCHPHVDGVFFNGIILGPDGNVLIPEMQSSLLQQHMELLESSVIPLMHPLADPSTVFKDGDEAEDFVEVHLPDIHKQVSGIDLGLPDWGKYLLMSAGALAILLLTIFLMTCCRRVNRTKSAQRDPGELGRKVSATPQNRKVISSWELYKSGGDTRL

SEQ ID NO: 31262 - protein, 524 aa, Artificial Sequence
  derived and/or modified protein sequence (wt) from glycoprotein__RABV__JQ595324.1
MIPQALLSVPLLISSLCFGKFPIYTIPEKLGPWSPIDIHHLSCPNNLVVEDEGCNSLSGFSYMELKVGYISAIKVNGFTCTGVVTEAETYTNFVGYVTTTFKRKHFRPMPDACRAAYNWKTAGDPRYEESLHNPYPDYHWLRTVKTTKESLIIISPSVADLDPYDKSLHSRIFPGGKCLGITISSTYCSTNHDYTIWMPEEARLGTSCDIFTNSKGKRASKGGRTCGFVDERGLYKSLKGACKLKLCGVPGLRLMDGTWVAIQTPNETKWCSPDQLVNVHDFRSDEIEHLVVEELIRKREECLDALESIMTTKSVSFRRLSNLRKLVPGFGKAYTIFNKTLMEADAHYKSVRTWNEIIPSRGCLKVGGRCHPHVNGVFFNGIILGPDGHILIPEMQSSLLQQHMELLESSVIPLIHPLADPSTVFKDGDEAEDFVEVHLPDVHQQVSGVDLGLPDWGKYVLMSAGALATVMLTIFLITCCRRVKRTESVHQGLGESGRKVSVAPQNGKVMSSWEYYKSGGGTRL

SEQ ID NO: 31263 - protein, 524 aa, Artificial Sequence
  derived and/or modified protein sequence (wt) from glycoprotein__RABV__JQ595325.1
MIPQALLSVPLLISSLCFGKFPIYTIPEKLGPWSPIDIHHLSCPNNLVVEDEGCNSLSGFSYMELKVGYISAIKVNGFTCTGVVTEAETYTNFVGYVTTTFKRKHFRPMADACRAAYNWKTAGDPRYEESLHNPYPDYHWLRTVKTTKESLIIISPSVADLDPYDKSLHSRIFPGGKCLGITISSTYCSTNHDYTIWMPEEARLGTSCDIFTNSKGKRASKGGRTCGFVDERGLYKSLKGACKLKLCGVPGLRLMDGTWVAIQTPNETKWCSPDQLVNVHDFRSDEIEHLVVEELIRKREECLDALESIMTTKSVSFRRLSNLRKLVPGFGKAYTIFNKTLMEADAHYKSVRTWNEIIPSRGCLKVGGRCHPHVNGVFFNGIILGPDGHILIPEMQSSLLQQHMELLESSVIPLIHPLADPSTVFKDGDEAEDFVEVHLPDVHQQVSGVDLGLPDWGKYVLMSAGALATVMLTIFLITCCRRVKKTESIHQGPGESGRKVSVTPQNGKVMSSWEYYKSGGGTRL

SEQ ID NO: 31264 - protein, 524 aa, Artificial Sequence
  derived and/or modified protein sequence (wt) from glycoprotein__RABV__JQ595326.1
MIPQALLFVPLLFPSLCLGKFPIYTIPEKLGPWSPIDIHHLSCPNNLVVEDEGCDSLSGFSYIELKVGYISAIKVNGFTCTGVVTEAETYTNFVGYVTTTFKRKHFRPMPDACRAAYNWKTAGDPRYEESLHNPYPDYHWLRTVKTTKESLIIISPSVADLDPYDKSLHSRVFPGGKCLGITVSSTYCSTNHDYTIWMPEEARLGTSCDIFTNSKGKRASKGGRTCGFVDERGLYKSLKGACKLKLCGVPGLRLMDGTWVAIQTPGETKWCSPDQLVNLHDFRSDEIEHLVVEELIKKREECLDALESIMTTKSVSFRRLSNLRKLVPGFGKAYTIFNKTLMEADAHYKSVRTWDEIIPSKGCLRVGGRCHPHVNGVFFNGIILGPDGHVLIPEMQSSLLQQHMELLESSVIPLIHPLADPSTVFKDGDEAEDFVEVHLPDVHKQVSGVDLGLPNWGKYVLMSAGVLATVILTIFLLTCCRRVNRTKPKQQSLEESGRKVSVTPQNGKVMSSWEYYKSEGRTSL

SEQ ID NO: 31265 - protein, 524 aa, Artificial Sequence
  derived and/or modified protein sequence (wt) from glycoprotein__RABV__JQ595327.1
MILQALLFVPLLISSLCFGDFPIYTIPEKLGPWSPIDIHHLSCPNNLVVEDEGCSSLSGFSYMELKVGYISAIKVNGFTCTGVVTEAETYTNFVGYVTTTFKRKHFRPMPDACRAAYNWKTAGDPRYEESLQNPYPDYHWLRTVKTTKESLVIISPSVADLDPYDKSLHSRVFSDGKCLGITISSTYCSTNHDYTIWMPEEARLGTSCDIFTTSRGKRASKGGKTCGFVDERGLYKSLKGACKLKLCGVSGLRLMDGTWVSIQAPDEAKWCSTDQLVNIHDIRSDEIEHLVVEELVKKREECLDALESIMTTKSVSFRRLSHLRKLVPGFGKAYTIFNKTLMEADAHYKSVRTWSEVIPSKGCLSVGGRCHPHENGVFFNGIILGPDGSVLIPEMQSSLLQQHMELLESSVIPLMHPLANPSTVFKDGDEAEDFVEVHLPDVQEQISGVDLGLPNWGKYVMMSAGALAILMLTIFLMTCCRRANRTRSTQRDLGGLERKVSVPPKDGRVMSSWESYKSGGETSL

SEQ ID NO: 31266 - protein, 524 aa, Artificial Sequence
  derived and/or modified protein sequence (wt) from glycoprotein__RABV__JQ595328.1
MITQALLFVPLLISSLCLGQFPIYTIPDKLGPWSPIDIHHLSCPNNLVVEDEGCNSLSGFSYMELKVGYISSIKVNGFTCTGVVTEAETYTNFVGYVTTTFKRKHFRPMPDACRAAYSWKMAGDPRYEESLHTPYPDYHWLRTVKTTKESLVIISPSVADLDPYDKSLHSRVFSGGKCLGITISSTYCSTNHDYTIWMPEEARLGTSCDIFTNSKGKRASKGGRTCGFVDERGLYKSLKGACKLKLCGVPGLRLMDGTWVSIQTSDETKWCPPDQLVNIHDFRSDEIEHLVVEELVKKREECLDALESIMTTKSVSFRRLSHLRKLVPGFGKAYTIFNKTLMEADAHYKSVRTWNEIIPSKGCLSVGGRCHPHVNGVFFNGIILGPDGSVLIPEMQSSLLQQHMELLESSVIPLMHPLANPSTVFKDGDEAEDFVEVHLPDVQEQVSGVDLGLPNWGKYVLMSAGVLAILILTIFLMICCRRANRTKSIQQGPGESGRKVSVPPQNGKVISSWESFKSGGETRL

SEQ ID NO: 31267 - protein, 524 aa, Artificial Sequence
  derived and/or modified protein sequence (wt) from glycoprotein__RABV__JQ647510.1
MIPQVLLFVPLLVFSSCFGKFPIYTIPDKLGPWSPIDIHHLSCPNNLVVEDEGCTNLSGFSYMELKVGYISAIKVNGFTCTGVVTEAETYTNFVGYVTTTFKRKHFRPMPDACRTAYNWKMAGDPRYEESLHNPYPDYHWLRTVKTTKESLVIISPSVADLDPYDKSLHSRVFPGGKCSGITVSSTRCSTNHDYTIWMPENPRLGTSCDIFTNSRGKRASKGGKTCGFVDERGLYKSLKGACKLKLCGVLGLRLMDGTWVAIQTSDEIKWCSPDQLVNLHDFHSDEIEHLVVEELVKKREECLDALETIMTTKSVSFRRLSHLRKLVPGFGKAYTIFNKTLMEADAHYKSIRTWNEIIPSKGCLRVGGRCHPHVNGVFFNGIILGPDGHVLIPEMQSSLLHQHMELLESSVIPLMHPLADPSTVFKDGDEAEDFVEVHLPDVHKQISGVDLGLPNWGKYVLISAGSLTALMLMIFLMTCCRKTNRAESIQHSPGETGRKVSVTSHNGRVISSWESYKSGGETKL

SEQ ID NO: 31268 - protein, 524 aa, Artificial Sequence
  derived and/or modified protein sequence (wt) from glycoprotein__RABV__JQ685892.1
MIPQALLYVPLLISSLCFGGFPIYTIPDKLGPWSPIDIHHLSCPNNLVVEDEGCTSLSGFSYMELKVGYISAIKVNGFTCTGVVTEAETYTNFVGYVTTTFKRKHFRPMPDACRAAYNWKMAGDPRYEESLQNPYPDYSWLRTVKTTKESLIIISPSVADLDPYDKSLHSRVFPGGKCLGITISSTYCSTNHDYTIWMPEEARLGTSCDIFTNSRGKRASKGGKTCGFVDERGLYKSLKGACKLKLCGVPGLRLMDGTWVTIQTSDETKWCPSDQLVNLHDFHSDEIEHLVVEELVKKREECLDALESIMTTKSVSFRRLSHLRKLVPGFGKAYTIFNKTLMEADAHYKSIRTWNEIIPSKGCLKVGGRCHPHVDGVFFNGIILGPDGNVLIPEMQSSLLQQHVELLESSVIPLMHPLADPSTVFKDGDEAEDFVEVHLPDIHKQVSGVDLGLPNWGKYLLMSAGALATLMLIIFLMACCRRANRTESIQRDPGESGRKVSIPSQDGKVISSWELYKSGGETRL

SEQ ID NO: 31269 - protein, 524 aa, Artificial Sequence
  derived and/or modified protein sequence (wt) from glycoprotein__RABV__JQ685893.1
MIPQALLYVPLLIPSLCFGGFPIYTIPDKLGPWSPIDIHHLSCPNNLVVEDEGCTSLSGFSYMELKVGYISAIKVNGFTCTGVVTEAETYTNFVGYVTTTFKRKHFRPMPDACRAAYNWKVAGDPRYEESLQNPYPDYSWLRTVKTTKESLIIISPSVADLDPYDKSLHSRVFPGGKCLGITISSTYCSTNHDYTIWMPEEARLGTSCDIFTNSRGKRASKGGKTCGFVDERGLYKSLKGACKLKLCGVPGLRLMDGTWVTIQTSDETKWCPSDQLVNLHDFHSDEIEHLVVEELVKKREECLDALESIMTTKSVSFRRLSHLRKLVPGFGKAYTIFNKTLMEADAHYKSIRTWNEIIPSKGCLKVGGRCHPHVDGVFFNGIILGPDGNVLIPEMQSSLLQQHVELLESSVIPLMHPLADPSTVFKDGDEAEDFVEVHLPDIHKQVSGVDLGLPNWGKYLLMSAGALATLMLTIFLMTCCRRANRTESIQRDPGESGKKVSITSQDGKVISSWELYKSGGETRL

SEQ ID NO: 31270 - protein, 524 aa, Artificial Sequence
  derived and/or modified protein sequence (wt) from glycoprotein__RABV__JQ685894.1
MFPQALLFVSLLISSLCFGKFPIYTIPDKLGPWSPIDIHHLSCPNNLVVEDEGCTNLSGFSYMELKVGYISAIKVNGFTCTGVVTEAETYTNFIGYVTTVFKRKHSRPTPDACRAAYNWKMAGDPRYEESLHNPYPDYHWLRTVKTTKESLVIISPSVADLDPYDKSLHSRVFPSGKCSGITVSSTYCLTNHEYTIWMPENLRLGTSCDIFTNSRGKRASRGSKTCGFVDERGLYKSLKGACKLKLCGVLGLRLMDGTWVAMQTSDETKWCPPDQLVNLHDFRSDEIEHLVVEELVKKREECLDAIESIMTTKSVSFRRLSHLRKLVPGFGKAYTIFNKTLMEADAHYKSVRTWNEIIPSKGCLRVGGRCHPHVKGVFFNGIILGPDGHVLIPEMQSSLLQQHMELLESSIIPLMHPLADPSAVFKDGDEAEDFVEVHLPDVHKQVSGVDLGLPNWGKYILVSAGALIALMLIIFLMTCFRGFNLPKSTQHSLGETERKMSVTPQSGKIISSWESYKSGGETRL

SEQ ID NO: 31271 - protein, 524 aa, Artificial Sequence
  derived and/or modified protein sequence (wt) from glycoprotein__RABV__JQ685896.1
MIPQALLYVPLLISSLCFGGFPIYTIPDKLGPWSPIDIHHLSCPNNLVVEDEGCTSLSGFSYMELKVGYISAIKVNGFTCTGVVTEAETYTNFVGYVTTTFKRKHFRPMPDACRAAYNWKMAGDPRYEESLQNPYPDYSWLRTVKTTKESLIIISPSVADLDPYDKSLHSRVFPGGKCLGITISSTYCSTNHDYTIWMPEEARLGTSCDIFTNSRGKRASKGGKTCGFVDERGLYKSLKGACKLKLCGVPGLRLMDGTWVTIQTSDETKWCPSDQLVNLHDFHSDEIEHLVLEELVKKREECLDALESIMTTKSVSFRRLSHLRKLVPGFGKAYTIFNKTLMEADAHYKSIRTWNEIIPSKGCLKVGGRCHPHVDGVFFNGIILGPDGNVLIPEMQSSLLQQHVELLESSVIPLMHPLADPSTVFKDGDEAEDFVEVHLPDIHKQVSGVDLGLPNWGKYLLMSAGALATLMLIIFLMACCRRANPTESIQRDPGESGRKVSIPSQDGKVISSWELYKSGGETRL

SEQ ID NO: 31272 - protein, 524 aa, Artificial Sequence
  derived and/or modified protein sequence (wt) from glycoprotein__RABV__JQ685897.1
MIPQALLYVPLLISSLCFGGFPIYTIPDKLGPWSPIDIHHLSCPNNLVVEDEGCTSLSGFSYMELKVGYISAIKVNGFTCTGVVTEAETYTNFVGYVTTTFKRKHFRPMPDACRAAYNWKVAGDPRYEESLQNPYPDYSWLRTVKTTKESLIIISPSVADLDPYDKSLHSRVFPGGKCLGITISSTYCSTNHDYTIWMPEEARLGTSCDIFTNSRGKRASKGGKTCGFVDERGLYKSLKGACKLKLCGVPGLRLMDGTWVTIQTSDETKWCPSDQLVNLHDFHSDEIEHLVVEELVKKREECLDALESIMTTKSVSFRRLSHLRKLVPGFGKAYTIFNKTLMEADAHYKSIRTWNEIIPSKGCLKVGGRCHPHVDGVFFNGIILGPDGNVLIPEMQSSLLQQHVELLESSVIPLMHPLADPSTVFKDGDEAEDFVEVHLPDIHKQVSGVDLGLPNWGKYLLISAGALATLMLTIFLMTCCRRANRTESIQRDPGEPGKKVSITSQDGKVISSWELYKSGGETRL

SEQ ID NO: 31273 - protein, 524 aa, Artificial Sequence; identical to SEQ ID NO: 31268
  derived and/or modified protein sequence (wt) from glycoprotein__RABV__JQ685898.1

SEQ ID NO: 31274 - protein, 524 aa, Artificial Sequence
  derived and/or modified protein sequence (wt) from glycoprotein__RABV__JQ685899.1
MVPQALLFVPLLVFPSCLGKFPIYTIPDKLGPWSPIDIHHLSCPNNLVVEDEGCNNLSGFSYMELKVGYISAIKVNGFTCTGVVTEAETYTNFVGYVTTTFKRKHFRPTPDACRAAYNWKMAGDPRYEESLHTPYPDYHWLRTVKTTKESLVIISPSVADLDPYDKSLHSRVFPSGKCSGMTVSSTCCSTNHDYTIWMPENPRLGTSCDIFTNSRGKRASKGSKTCGFVDERGLYKSLKGACKLKLCGVLGLRLMDGTWVAMQISDETKWCPPDQLVNLHDFRSDEIEHLVVEELVKKREECLDALESIMTTKSVSFRRLSHLRKLVPGFGKAYTIFNRTLMEADAHYKSVRTWNEVIPSKGCLRVGGRCHPHVNGVFFNGIILGPDGHVLIPEMQSSLLQQHMELLESSVIPLMHPLANPSTVFKEGDEAEDFVEVHLPDVHKQVSGVDLGLPNWGKYVLMSAGALIALMLIIFLMTCCRRVSRPESMQRSLGGTGRKVSAASQSGKVISSWESYKSGGETRL

SEQ ID NO: 31275 - protein, 524 aa, Artificial Sequence
  derived and/or modified protein sequence (wt) from glycoprotein__RABV__JQ685900.1
MIPQALLFVPLLIPSLCLGEFPIYTIPDKLGPWIPIDIHHLSCPNNLVAENDGCNSLSGFSYMELKVGYISAIKVNGFTCTGVVTEAETYTNFVGYVTTTFKRKHFRPMPDACRAAHDWKMAGDPRYEDSLQNPYPDYHWLRTVKTTKESLVIISPSVADLDPYDKSLHSRVFPSGKCLGITVSSTYCSTNHDYTIWMPVEPRLGTSCDIFTNSRGKRASKGGKVCGFVDERGLYKSLKGACKLKLCGVPGIRLMDGTWVSIQTSEDIKWCPPDRLVNLHDFHSDEIEHLVVEELIKRRENCLDALESIMTTKSVSFRRLSHLRKLVPGFGKAYTIFNKTLMEADAHYKSVKTWNEVIPSKGCLEVGGRCHPPVNGVFFNGIILGPDGNVLIPEMQSSLLQQHMELLESSVIPLMHPLADPSTVFKEGDEAEDFVEVHLPDVHKQVSDVDLGLPSWGKYLLMSAGALAILILAIVLIICCRRVNKTGSTQRGHRESGGKMSVAPQNGKIISSWELYKSESETGL

SEQ ID NO: 31276 - protein, 524 aa, Artificial Sequence
  derived and/or modified protein sequence (wt) from glycoprotein__RABV__JQ685901.1
MVPWVLLFVPFLISSLCFGKFPIYTIPDKLGPWSPIDIHHLSCPNNLVVEDEGCNSLSGFSYMELKVGYISAIKVNGFTCTGVVTEAETYTNFVGYVTTTFKRKHFRPMPDACRSAYNWKMAGDPRYEESLHNPYPDYHWLRTVKTTKESLIIISPSVADLDPYDKSLHSRIFPGGKCTGLTVSSTYCSTNHDYTIWMPEKAGLGTSCDIFTNSKGKRASKGGKTCGFVDERGLYKSLKGACKLKLCGVSGLRLMDGTWVAIQTLDETKWCSPDQLVNLHDFHSDELEHLVVEELVRKREECLDALESIMTTKSVSFRRLSHLRKLVPGFGKAYTIFNKTLMEADAHYKSVRTWSEIIPSKGCLRVGGRCHPHVNGVFFNGIILGPDGHVLIPEMQSSLLQQHVELLESSVIPLMHPLADPSAVFKDGDEAEDFVEVHLPDVHKQISGVDLGLPSWGKYMLMIAGALMTLMLFIFLMTCCRRVNRTESIRQGPRELESKVSVTPQNRKVISSWESYKSGGETKL

SEQ ID NO: 31277 - protein, 524 aa, Artificial Sequence
  derived and/or modified protein sequence (wt) from glycoprotein__RABV__JQ685902.1
MIPQALLFVPLLIPSLCLGEFPIYTIPDKLGPWSPIDIHHLSCPNNLVAENDGCTSLSGFSYMELKVGYISAIKVNGFTCTGVVTEAETYTNFVGYVTTTFKRKHFRPTPDACRAAHDWKMAGDPRYEASLQNPYPDYHWLRTVKTTKESLVIISPSVADLDPYDKSLHSRVFPSGKCLGITVSSTYCSTNHDYTIWMPVEPRLGTSCDIFTNSRGKRASKGGRVCGFVDERGLYKSLKGACRLKLCGVPGIRLLDGTWVSIQTSEDIKWCPPDRLVNLHDFHSDEIEHLVVAELIKRRENCLDALESIMTTKSVTFRRLTHLRKLVPGFGKAYTIFNKTLMEADAHYKSVKTWNEVIPSKGCLEVGGRCHPHVNGVFFNGIILGPDGNVLIPEMQSSLLQQHMELLESSVIPLMHPLADPSTVFKEGDEAEDFVEVHLPDVHKQVSDVDLGLPSWGKYLLISAGALAILILAIVLIICCRRVNKTGSTQRGHRESGGKMSVVPQNGKIISSWELYKSESETGL

SEQ ID NO: 31278 - protein, 524 aa, Artificial Sequence
  derived and/or modified protein sequence (wt) from glycoprotein__RABV__JQ685903.1
MILQALLFVPLLISSLCFGGFPIYTIPDKLGPWSPIDIHHLSCPNNLVVEDEGCTSLSGFSYMELKVGYISAIKVNGFTCTGVVTEAETYTNFVGYVTTTFKRKHFRPMPDSCRAAYNWKTAGDPRYEESLQNPYPDYHWLRTVKTTKESLIIISPSVADLDPYDKSLHSRVFPGGKCLGITVSSTYCSTNHDYTIWMPEEARLGTSCDIFTNSRGKRASKGGRTCGFVDERGLYKSLKGACKLKLCGVLGLRLMDGTWVTIHTSNETKWCPSDQLVNLHDFHSDEIEHLVVEELVKKREECLDALESIMTTKSVSFRRLSHLRKLVPGFGKAYTIFNKTLMEADAHYKSIRTWNEIIPSKGCLKVGGRCHPHVDGVFFNGIILGPDGNVLIPEMQSSLLQQHVELLESSVIPLMHPLADPSTVFKDGDEAEDFVEVHLPDVHKQVSGVDLGLPNWGKYLLMSAGVLATLMLTIFLITCCRRVDRTESIQRGPGELGREMSVTSQNGKVISSWELYKSGGETRL

SEQ ID NO: 31279 - protein, 524 aa, Artificial Sequence
  derived and/or modified protein sequence (wt) from glycoprotein__RABV__JQ685905.1
MIFQALLFVPLLISSLCLGKFPIYTIPDKLGPWSPIDIHHLSCPNNLVVEDEGCTSLSGFSYMELKVGYISAIKVNGFTCTGVVTEAETYTNFVGYVTTTFKRKHFRPIPDACRAAYNWKIAGDPRYEESLQNPYPDYHWLRTVKTTKESLIIISPSVADLDPYDKSLHSRLFPGGKCLGITISSTYCSTNHDYTIWMPEEPRLGTSCDIFTNSKGKKASKGGKVCGFVDERGLYKSLKGACKLKLCGVSGLRLMDGTWVTIQTSDETKWCPPDQLVNLHDFHSDEIEHLVVEELVKKREECLDALESIMTTKSVSFRRLSYLRKLVPGFGKAYTIFNKTLMEADAHYKSVRTWNEIIPSKGCLKVSDRCHPHVDGVFFNGIILGPDGNVLIPEMQSSLLQQHMELLESSVIPLMHPLADPSTVFKDGDEAEDFVEVHLPDVHKQISGVDLGLPSWGKYLLMIAGGLATLVLIIFLMACCRRTKRTESRRRGSGESGEKVLATPQPKKVVSSWELYKREGDARL

SEQ ID NO: 31280 - protein, 524 aa, Artificial Sequence
  derived and/or modified protein sequence (wt) from glycoprotein__RABV__JQ685906.1
MIPQALLYVPLLIPSLCFGGFPIYTIPDKLGPWSPIDIHHLSCPNNLVVEDEGCTSLSGFSYMELKVGYISAIKVNGFTCTGVVTEAETYTNFVGYVTTTFKRKHFRPMPDACRAAYNWKVAGDPRYEESLQNPYPDYSWLRTVKTTKESLIIISPSVADLDPYDKSLHSRVFPGGKCLGITISSTYCSTNHDYTIWMPEEARLGTSCDIFTNSRGKRASKGGKTCGFVDERGLYKSLKGACKLKLCGVPGLRLMDGTWVTIQTSDETKWCPSDQLVNLHDFHSDEIEHLVVEELVKKREECLDALESIMTTKSVSFRRLSHLRKLVPGFGKAYTIFNKTLMEADAHYKSIRTWNEIIPSKGCLKVGGRCHPHVDGVFFNGIILGPDGNVLIPEMQSSLLQQHVELLESSVIPLMHPLADPSTVFKDGDEAEDFVEVHLPDIHKQVSGVDLGLPNWGKYLLMSAGALATLMLTIFLMTCCRRANRTESIQRDPGESGKKVSTTSQDGKVISSWELYKSGGETRL

SEQ ID NO: 31281 - protein, 524 aa, Artificial Sequence
  derived and/or modified protein sequence (wt) from glycoprotein__RABV__JQ685907.1
MIPQALLYVPLLISSLCFGGFPIYTIPDKLGPWSPIDIHHLSCPNNLVVEDEGCTSLSGFSYMELKVGYISAIKVNGFTCTGVVTEAETYTNFVGYVTTTFKRKHFRPMPDACRAAYNWKIAGDPRYEESLQNPYPDYSWLRTVKTTKESLIIISPSVADLDPYDKSLHSRVFPGGKCLGITISSTYCSTNHDYTIWMPEEARLGTSCDIFTNSRGKRASKGGKTCGFVDERGLYKSLKGACKLKLCGVPGLRLMDGTWVTIQTSDETKWCPSDQLVNLHDFHSDEIEHLVVEELVKKREECLDALESIMTTKSVSFRRLSHLRKLVPGFGKAYTIFNKTLMEADAHYKSIRTWNEIIPSKGCLKVGGRCHPHVDGVFFNGIILGPDGNVLIPEMQSSLLQQHVELLESSVIPLMHPLADPSTVFKDGDEAEDFVEVHLPDIHKQVSGVDLGLPNWGKYLLMSAGALATLMLIIFLMACCRRANRTESIQRDPGESGRKVSIPSQDGKVISSWELYKSGGETRL

SEQ ID NO: 31282 - protein, 524 aa, Artificial Sequence
  derived and/or modified protein sequence (wt) from glycoprotein__RABV__JQ685909.1
MIPQALLYVPLLISSLCFGGFPIYTIPDKLGPWSPIDIHHLSCPNNLVVEDEGCTSLSGFSYMELKVGYISAIKVNGFTCTGVVTEAETYTNFVGYVTTTFKRKHFRPMPDACRAAYNWKMAGDPRYEESLQNPYPDYSWLRTVKTTKESLIIISPSVADLDPYDKSLHSRVFPGGKCLGITISSTYCSTNHDYTIWMPEEARLGTSCDIFTNSRGKRASKGGKTCGFVDERGLYKSLKGACKLKLCGVPGLRLMDGTWVTIQTSDETKWCPSDQLVNLHDFHSDEIEHLVVEELVKKREECLDALESIMTTKSVSFRRLSHLRKLVPGFGKAYTIFNKTLMEADAHYKSIRTWNEIIPSKGCLKVGGRCHPHVDGVFFNGIILGPDGNVLIPEMQSSLLQQHVELLESSVIPLMHPLADPSTVFKDGDEAEDFVEVHLPDIHKQVSGVDLGLPNWGKYLLMSAGALATLMLTIFLMTCCRRANRTESIQRDPGESGRKVSITSPDGKVISSWELYKSGGETGL

SEQ ID NO: 31283 - protein, 524 aa, Artificial Sequence
  derived and/or modified protein sequence (wt) from glycoprotein__RABV__JQ685910.1
MIPQAFLFVPLLIPSLCLGEFPIYTIPDKLGPWSPIDIHHLSCPNNLVAENDGCTSLSGFSYMELKVGYISAIKVNGFTCTGVMTEAETYTNFVGYVTTTFKRKHFRPMPDACRAAHDWKIAGDPRYEDSLQNPYPDYHWLRTVKTTKESLVIISPSVADLDPYDKSLHSRVFPSGKCLGITVSSTYCSTNHDYTIWMPVEPRLGTSCDIFTNSRGKRASKGGRVCGFVDERGLYKSLKGACKLKLCGVPGIRLMDGTWVSIQTSEEIKWCPPDRLVNLHDFHSDEIEHLVVEELIKRRENCLDALESIMTTKSVSFRRLSHLRKLVPGFGKAYTIFNKTLMEADAHYKSVKTWNEVIPSKGCLEVGGRCHPPVNGVFFNGIILGPDGNVLIPEMQSSLLQQHMELLESSVIPLMHPLADPSTVFKEGDEAEDFVEVHLPDVHKQVSDVDLGLPSWGKYLLMSAGALAILILVIVLIICCRRVNKTGSTQRGHRESGGKMSVAPQNGKIISSWELYKSESETGL

SEQ ID NO: 31284 - protein, 524 aa, Artificial Sequence
  derived and/or modified protein sequence (wt) from glycoprotein__RABV__JQ685911.1
MIPQALLYVPLLIPSLCFGGFPIYTIPDKLGPWSPIDIHHLSCPNNLVVEDEGCTSLSGFSYMELKVGYISAIKVNGFTCTGVVTEAETYTNFVGYVTTTFKRKHFRPMPDACRAAYNWKVAGDPRYEESLQNPYPDYSWLRTVKTTKESLIIISPSVADLDPYDKSLHSRVFPGGKCLGITISSTYCSTNHDYTIWMPEEARLGTSCDIFTNSRGKRASKGGKTCGFVDERGLYKSLKGACKLKLCGVPGLRLMDGTWVTIQTSDETKWCPSDQLVNLHDFHSDEIEHLVVEELVKKREECLDALESIMTTKSVSFRRLSHLRKLVPGFGKAYTIFNKTLMEADAHYKSIRTWNEIIPSKGCLKVGGRCHPHVDGVFFNGIILGPDGNVLIPEMQSSLLQQHVELLESSVIPLMHPLADPSTVFKDGDEAEDFVEVHLPDIHKQVSGVDLGLPNWGKYLLMSAGALATLMLTIFLMTCCRRSNRTESIQRDPGESGKKVSITSQDGKVISSWELYKSGGETRL

SEQ ID NO: 31285 - protein, 524 aa, Artificial Sequence; identical to SEQ ID NO: 31268
  derived and/or modified protein sequence (wt) from glycoprotein__RABV__JQ685912.1

SEQ ID NO: 31286 - protein, 524 aa, Artificial Sequence; identical to SEQ ID NO: 31268
  derived and/or modified protein sequence (wt) from glycoprotein__RABV__JQ685913.1

SEQ ID NO: 31287 - protein, 524 aa, Artificial Sequence
  derived and/or modified protein sequence (wt) from glycoprotein__RABV__JQ685914.1
MIPQALLFVPLLISSLCFGGFPIYTIPDKLGPWSPIDIHHLSCPNNLVVEDEGCTSLSGFSYMELKVGYISAIKVNGFTCTGVVTEAETYTNFVGYVTTTFKRKHFRPMPDSCRAAYNWKTAGDPRYEESLQNPYPDYHWLRTVKTTKESLIIISPSVADLDPYDKSLHSRVFPGGKCLGITVSSTYCSTNHDYTIWMPEEARLGTSCDIFANSRGKRASKGGRTCGFVDERGLYKSLKGACKLKLCGVLGLRLMDGTWATIHTSNETKWCPSDQLVNLHDFHSDEIEHLVVEELVKKREECLDALESIMTTKSVSFRRLSHLRKLVPGFGKAYTIFNKTLMEADAHYKSIRTWNEIIPSKGCLKVGGRCHPHVDGVFFNGIILGPDGNVLIPEMQSSLLQQHVELLESSVIPLMHPLADPSTVFKDGDEAEDFVEVHLPDVHKQVSGVDLGLPNWGKYLLMSAGALATLMLTIFLITCCRRVDKTESIQRGPGELGREVSVTSQNGKVISSWELYKSGGETRL

SEQ ID NO: 31288 - protein, 524 aa, Artificial Sequence
  derived and/or modified protein sequence (wt) from glycoprotein__RABV__JQ685915.1
MILQALLLLPLLISSWCLGKFPIYTIPDKLGPWSPIDIHHLSCPNNLVVEDEGCTSLSGFSYMELKVGYISAIKVNGFTCTGVVTEAETYTNFVGYVTTTFKRKHFRPMPDACRAAHEWKMAGDPRYEDSLQNPYPDYHWLRTVKTTKESLIIISPSVADLDPYDKSLHSRVFPGGNCLGVTISSTYCSTNHDYTIWMPEEARLGTSCDIFTNSKGKKASKGGKVCGFVDERGLYKSLKGACKLKLCGVPGLRLMDGTWVSIQTSDETKWCPPDQLVNIHDFHSDEIEHLIVEELVKKREECLDALESIMTTKSVSFRRLSHLRKLVPGFGKAYTIFNKTLMEADAHYKSVRTWNEVIPSKGCLKVGGRCHPHVGGVFFNGIILGPDGTVLIPEMQSSLLQQHMELLESSVIPLMHPLADPSKVFKEGDEAEDFVEVHLPDVHKQVSGVDLGLPSWGKYLLMSVGALATLILIIFLITCCRKVKRTESIQRGHGESGRKVSASPQNGKVISSWELYKSEGETNL

SEQ ID NO: 31289 - protein, 524 aa, Artificial Sequence
  derived and/or modified protein sequence (wt) from glycoprotein__RABV__JQ685916.1
MIPQALLSLLLLISSLCLGKFPIYTIPDKLGPWSPIDIHHLSCPNNLVVEDEGCTSLSGFSYMELKVGYISAIKVNGFTCTGVVTEAETYTNFVGYVTTTFKRKHFRPMPDACRAAHEWKMAGDPRYEDSLQNPYPDYHWLRTVKTTKESLIIISPSVADLDPYDKSLHSRVFPGGNCLGITISSTYCSTNHDYTIWMPEEARLGTSCDIFTNSKGKRASKGGKICGFVDERGLYKSLKGACKLKLCGVPGLRLMDGTWVSIQTSDETKWCPPDQLVNVHDFHSDEIEHLIVEELVKKREECLDALESIMTTKSVSFRRLSHLRKLVPGFGKAYTIFNKTLMEADAHYKSVRTWNEIIPSKGCLKVGGMCHPHVGGVFFNGIILGPDGTVLIPEMQSSLLQQHMELLESSVIPLMHPLADPSTVFKEGDEAEDFVEIHLPDVHKQISGVDLGLPSWGKYLLISAGALATLILTIFLITCCRKVNRTESIQRGHGESERKVSVSPQNGRVISSWELYKSGGETNL

SEQ ID NO: 31290 - protein, 524 aa, Artificial Sequence
  derived and/or modified protein sequence (wt) from glycoprotein__RABV__JQ685917.1
MIPQALLYVPLLISSLCFGGFPIYTIPDKLGPWSPIDIHHLSCPNNLVVEDEGCTSLSGFSYMELKVGYISAIKVNGFTCTGVVTEAETYTNFVGYVTTTFKRKHFRPVPDACRAAYNWKVAGDPRYEESLQNPYPDYSWLRTVKTTKESLIIISPSVADLDPYDKSLHSRVFPGGKCLGITISSTYCSTNHDYTIWMPEEARLGTSCDIFTNSRGKRASKGGKTCGFVDERGLYKSLKGACKLKLCGVPGLRLMDGTWVTIQTSDETKWCPSDQLVNLHDFHSDEIEHLVVEELVKKREECLDALESIMTTKSVSFRRLSHLRKLVPGFGKAYTIFNKTLMEADAHYKSIRTWNEIIPSKGCLKVGGRCHPHVDGVFFNGIILGPDGNVLIPEMQSSLLQQHVELLESSVIPLMHPLADPSTVFKDGDEAEDFVEVHLPDIHKQVSGVDLGLPDWGKYLLMSAGALATLMLTIFLMICCRRANRTESIQRDPGESGKKVSITSQDGKVISSWELYKSGGETRL

SEQ ID NO: 31291 - protein, 524 aa, Artificial Sequence
  derived and/or modified protein sequence (wt) from glycoprotein__RABV__JQ685918.1
MIPQSLLFLPLLISSLCFGEFPIYTIPEKLGPWSPIDIHHLSCPNNLVVEDEGCNSLSGFSYMELKVGYISSIKVNGFTCTGVVTEAETYTNFVGYVTTTFKRKHFRPMPDACRAAYSWKMAGDPRYEESLHNPYPDYHWLRTVKTTKESLVIISPSVADLDPYDKSLHSRVFSGGKCLGITISSTYCSTNHDYTIWMPEEARLGTSCDIFTNSKGKRASKGGRTCGFVDERGLYKSLKGACKLKLCGVPGLRLMDGTWVSIQTSNETKWCPPDQLVNIHDFRSDEIEHLVVEELVKKREECLDALESIMTTKSVSFRRLSHLRKLVPGFGKAYTIFNKTLMEADAHYKSVRTWNEVIPSKGCLSVGGRCYPHVSGVFFNGIILGPDGSVLIPEMQSSLLQQHMELLESSVIPLMHPLANPSTVFKDGDEAEDFVEVHLPDVKEQVSGVDLGLPNWGKYVLMSAGALAILMLAIFLMTCCRRANRTKSIQQGPRESGRKVSVPPQNGKVISSWESFKSGGETRL

SEQ ID NO: 31292 - protein, 524 aa, Artificial Sequence
  derived and/or modified protein sequence (wt) from glycoprotein__RABV__JQ685920.1
MIPQALLFVPFLFPSLCLGKFPIYTIPEKLGPWSPIDIHHLSCPNNLVVEDEGCDSLSGFSYMELKVGYISAIKVNGFTCTGVVTEAETYTNFVGYVTTTFKRKHFRPMPDACRAAYNWKTAGDPRYEESLHNPYPDYHWLRTVKTTKESLVIISPSVADLDPYDKSLHSRVFPGGKCLGITISSTYCSTNHDYTIWMPEEARLGTSCDIFTNSKGKRASKGGRTCGFVDERGLYKSLKGACKLKLCGVPGLRLMDGTWVAIQTPGETKWCSPDQLVNLHDFRSDEIEHLVVEELIKKREECLDALESIMTTKSVSFRRLSNLRKLVPGFGKAYTIFNKTLMEADAHYKSVRTWDEIIPSKGCLRVGGRCHPHVNGVFFNGIILGPDGHVLIPEMQSSLLQQHMELLESSVIPLIHPLADPSTVFKDGDEAEDFVEVHLPDVHKQVSGVDLGLPNWGKYVLMSAGVLATVILTIFLLTCCRRVNRTKPKQQSLGESGRKVSVTPQNGKVMSSWEYYKSEGRTSL

SEQ ID NO: 31293 - protein, 524 aa, Artificial Sequence
  derived and/or modified protein sequence (wt) from glycoprotein__RABV__JQ685921.1
MILQALLFVPILISSFCFGDFPIYTIPEKLGPWSPIDIHHLSCPNNLVVEDEGCSSLSGFSYMELKVGYISAIKVNGFTCTGVVTEAETYTNFVGYVTTTFKRKHFRPMPDACRAAYNWKTAGDPRYEESLQNPYPDYHWLRTVKTTKESLVIISPSVADLDPYDKSLHSRVFSDGKCLGITISSTYCSTNHDYTIWMPEEARLGTSCDIFTTSRGKRASKGGKTCGFVDERGLYKSLKGACKLKLCGVSGLRLMDGTWVSIQAPDEAKWCSTDQLVNIHDIRSDEIEHLVVEELVKKREECLDALESIMTTKSVSFRRLSHLRKLVPGFGKAYTIFNKTLMEADAHYKSVRTWSEVIPSKGCLSVGGRCHPHENGVFFNGIILGPDGSVLIPEMQSSLLQQHMELLESSVIPLMHPLANPSTVFKDGDEAEDFVEVHLPDVQEQISGVDLGLPNWGKYVMMSAGALAILMLTIFLMTCCRRANRTRSTQRDLGGLERKVSVPPKDGRVMSSWESYKSGGETSL

SEQ ID NO: 31294 - protein, 524 aa, Artificial Sequence
  derived and/or modified protein sequence (wt) from glycoprotein__RABV__JQ685922.1
MIPQALLFVPLLIPSLCLGKFPIYTIPDKLGPWSPIDIHHLSCPNNLVVEDEGCTSLSGFSYMELKVGYISAIKVNGFTCTGVVTEAETYTNFVGYVTTTFKRKHFRPMPDACRAAHDWKIAGDPRYEDSLQNPYPDYHWLRTVKTTKESLVIISPSVAELDPYDKSLHSRVFPSGKCLGITVSSTYCSTNHDYTIWMPVEARLGTSCDIFTNSRGKKASKGGRTCGFVDERGLYKSLKGACKLKLCGVPGLRLMDGTWVSIQTSDDIKWCPPDQLVNLHDFHSDEIEHLVVEELIKKREGCLDALESIMTTKSVSFRRLSHLRKLVPGFGKAYTIFNNTLMEADAHYKSVRTWNEVIPSKGCLKVGGRCHPPVNGVFFNGIILGPDGNVLIPEMQSSLLQQHMELLESSVIPLMHPLADPSTVFKDGDEAEDFVEVHLPDVHKQVSDVDLGLPSWGKYLLMSAGALATLILAIFLITCCRRANRTESTQRGHRESGGKVSVAPQNGKIISSWELYKSESETGM

SEQ ID NO: 31295 - protein, 524 aa, Artificial Sequence; identical to SEQ ID NO: 31269
  derived and/or modified protein sequence (wt) from glycoprotein__RABV__JQ685923.1

SEQ ID NO: 31296 - protein, 524 aa, Artificial Sequence
  derived and/or modified protein sequence (wt) from glycoprotein__RABV__JQ685925.1
MIPQALLSVPLLISSLCFGKFPIYTIPEKLGPWSPIDIHHLSCPNNLVVEDEGCNSLSGFSYMELKVGYISAIKVNGFTCTGVVTEAETYTNFVGYVTTTFKRKHFRPMPDACRAAYNWKTAGDPRYEESLHNPYPDYHWLRTVKTTKESLIIISPSVADLDPYDKSLHSRIFPGGKCLGITISSTYCSTNHDYTIWMPEEARLGTSCDIFTNSKGKRASKGGRTCGFVDERGLYKSLKGACKLKLCGVPGLRLMDGTWVAIQTPNETKWCSPDQLVNVHDFRSDEIEHLVVEELIRKREECLDALESIMTTKSVSFRRLSNLRKLVPGFGKAYTIFNKTLMEADAHYKSVRTWNEIIPSRGCLKVGGRCHPHVNGVFFNGIILGPDGHILIPEMQSSLLQQHMELLESSVIPLIHPLADPSTVFKDGDEAEDFVEVHLPDVHQQVSGVDLGLPDWGKYVLMSAGALATVMLTIFLITCCRRVKRTESVQQGLGESGRKVSVAPQNGKVMSSWEYYKSGGGTRL

SEQ ID NO: 31297 - protein, 524 aa, Artificial Sequence
  derived and/or modified protein sequence (wt) from glycoprotein__RABV__JQ685926.1
MIPQALLYVPLLIPSLCLGGFPIYTIPDKLGPWSPIDIHHLSCPNNLVVEDEGCTSLSGFSYMELKVGYISAIKVNGFTCTGVVTEAETYTNFVGYVTTTFKRKHFRPMPDACRAAYNWKVAGDPRYEESLQNPYPDYSWLRTVMTTKESLIIISPSVADLDPYDKSLHSRVFPGGKCLGITIFSTYCSTNHDYTIWMPEEARLGTSCDIFTNSRGKRASKGGKTCGFVDERGLYKSLKGACKLKLCGVPGLRLMDGTWVTIQTSDETKWCPSDQLVNLHDFHSDEIEHLVVEELVKKREECLDALESIMTTKSVSFRRLSHLRKLVPGFGKAYTIFNKTLMEADAHYKSIRTWNEIIPSKGCLKVGGRCHPHVDGVFFNGIILGPDGNVLIPEMQSSLLQQHVELLESSVIPLMHPLADPSTVFKDGDEAEDFVEVHLPDIHKQVSGVDLGLPNWGKYLLMSAGALATLMLTIFLMTCCRRANRTESIQRDPGESGKKVSVTSQDGKVISSWELYKSGGETRL

SEQ ID NO: 31298 - protein, 524 aa, Artificial Sequence; identical to SEQ ID NO: 31268
  derived and/or modified protein sequence (wt) from glycoprotein__RABV__JQ685928.1

SEQ ID NO: 31299 - protein, 524 aa, Artificial Sequence
  derived and/or modified protein sequence (wt) from glycoprotein__RABV__JQ685929.1
MVPQALLFVPLLIPPVCLGKFPIYTIPDKLGPWSPIDIHHLSCPNNLVVEDEGCSNLSGFSYMELKVGYISAIKVDGFTCTGVVTEAETYTNFIGYVTTTFKRKHFRPMPDACRSAYNWKIAGDPRYEESLHTPYPDYHWLRTVKTTKESLVIISPSVADLDPYDKSLHSMVFPNGKCSGITVYSTYCSTNHDYTIWMPEKAGLGTSCDIFTNSRGKRASKGGRTCGFVDERGLYKSLRGACKLKLCGVPGLRLMDGTWATIQTPEETKWCSPDQLVNLHDFHSDEIEHLVVEDLVKKREECLDTLESIMTTKSVSFRRLSHLRKLVPGFGKAYTIFNKTLMEADAHYKSVRTWNEIIPSKGCLRVGGRCHPHVNGVFFNGVIMGPDGHVLIPEMQSSLLQQHMELLESSVIPLIHPLADPSTVFKDNDEAEDFVEVHLPDVHKQVSGIDLGLPSWGRYLVMIAGALMTLTLVIFLMICCRRVNKAGSIQQDPEKSEKRRSVTPQNGKVISSWESYKSGSETRL

SEQ ID NO: 31300 - protein, 524 aa, Artificial Sequence
  derived and/or modified protein sequence (wt) from glycoprotein__RABV__JQ685931.1
MIPQALLFVPLLISSLCFGGFPIYTIPDKLGPWSPIDIHHLSCPNNLVVEDEGCTSLSGFSYMELKVGYISAIKVNGFTCTGVVTEAETYTNFVGYVTTTFKRKHFRPMPDACRAAYNWKTAGDPRYEESLQNPYPDYHWLRTVKTTKESLIIISPSVADLDPYDKSLHSRVFPGGKCLGITVSSTYCSTNHDYTIWMPEEARLGTSCDIFTNSRGKRASKGGRTCGFVDERGLYKSLKGACKLKLCGVLGLRLMDGTWVTIQTSNETKWCPSDQLVNLHDFHSDEIEHLVVEELVKKREECLDALESIMTTKSVSFRRLSHLRKLVPGFGKAYTIFNKTLMEADAHYKSIRTWNEIIPSKGCLKVGGRCHPHVDGVFFNGIILGPDGNVLIPEMQSSLLQQHVELLESSVIPLMHPLADPSTVFKDGDEAEDFVEVHLPDVHKQVSGVDLGLPNWGKYLLMSAGALATLMLTIFLITCCRRVDRTESIQRGPGELGREVSVTSQNGKVISSWELYKSGGETRL

SEQ ID NO: 31301 - protein, 524 aa, Artificial Sequence; identical to SEQ ID NO: 31269
  derived and/or modified protein sequence (wt) from glycoprotein__RABV__JQ685932.1

SEQ ID NO: 31302 - protein, 524 aa, Artificial Sequence
  derived and/or modified protein sequence (wt) from glycoprotein__RABV__JQ685933.1
MIPQALLYVPLLIPSLCFGGFPIYTIPDKLGPWSPIDIHHLSCPNNLVVEDEGCTSLSGFSYMELKVGYISAIKVNGFTCTGVVTEAETYTNFVGYVTTTFKRKHFRPMPDACRAAYNWKMAGDPRYEESLQNPYPDYSWLRTVKTTKESLIIISPSVADLDPYDKSLHSRVFPGGKCLGITISSTYCSTNHDYTIWMPEEARLGTSCDIFTNSRGKRASKGGKTCGFVDERGLYKSLKGACKLKLCGVPGLRLMDGTWVTIQTSDETKWCPSDQLVNLHDFHSDEIEHLVVEELVKKREECLDALESIMTTKSVSFRRLSHLRKLVPGFGKAYTIFNKTLMEADAHYKSIRTWNEIIPSKGCLKVGGRCHPHVDGVFFNGIILGPDGNVLIPEMQSSLLQQHVELLESSVIPLMHPLADPSTVFKDGDEAEDFVEVHLPDIHKQVSGVDLGLPNWGKYLLMSAGALATLMLIILLMTCCRRANRTESIQRDPGESGRKVSITSPDGKVISSWELYKSGGETRL

SEQ ID NO: 31303 - protein, 524 aa, Artificial Sequence
  derived and/or modified protein sequence (wt) from glycoprotein__RABV__JQ685934.1
MIPQALLYVPLLISSLCFGGFPIYTIPDKLGPWSPIDIHHLSCPNNLVVEDEGCTSLSGFSYMELKVGYISAIKVNGFTCTGVVTEAETYTNFVGYVTTTFKRKHFRPMPDACRAAYNWKMAGDPRYEESLQNPYPDYSWLRTVKTTKESLIIISPSVADLDPYDKSLHSRVFPGGKCLGITISSTYCSTNHDYTIWMPEEARLGTSCDIFTNSRGKRASKGGKTCGFVDERGLYKSLKGACKLKLCGVPGLRLMDGTWVTIQTSDETKWCPSDQLVNLHDFHSDEIEHLVVEELVKKREECLDALESIMTTKSVSFKRLSHLRKLVPGFGKAYTIFNKTLMEADAHYKSIRTWNEIIPSKGCLKVGGRCHPHVDGVFFNGIILGPDGNVLIPEMQSSLLQQHVELLESSVIPLMHPLADPSTVFKDGDEAEDFVEVHLPDIHKQVSGVDLGLPNWGKYLLMSAGALATLMLIIFLMACCRRANRTESIQRDPGESGRKVSIPSQDGKVISSWELYKSGGETRL

SEQ ID NO: 31304 - protein, 524 aa, Artificial Sequence
  derived and/or modified protein sequence (wt) from glycoprotein__RABV__JQ685936.1
MILQALLFVPLLISPLCLGKFPIYTIPDKLGPWSPIDIHHLSCPNNLVVEDEGCTNLSGFSYMELKVGYISAIKVNGFTCTGVVTEAETYTNFVGYVTTTFKRKHFRPIPDACRAAYNWKMAGDPRYEESLQNPYPEYHWLRTVKTTKESLIIISPSVADLDPYDKSLHSRVFPGGKCLGITVSSTYCSTNHDYTIWMPEEPRLGTSCDIFTSSKGKKASKGGKTCGFVDERGLYKSLKGACKLKLCGVLGLRLMDGTWVSIQTSDDTKWCPPDQLVNLHDFHSDEIEHLVVEELVKKREECLDALESIMTTKSVSFRRLSYLRKLVPGFGKAYTIFNKTLMEADAHYKSVRTWNEIIPSKGCLKVRERCHPPVDGVFFNGIILGPDGNVLIPEMQSSLLQQHMELLESSVIPLMHPLADPSTVFKEGDEAEDFVEVHLPDVHKQISGVDLGLPSWGKYLLMIAGGLVTLVLIICSIACCRRAKRTESRRRGSGESGKKVNATPQTRKVVSSWELYKREGDARL

SEQ ID NO: 31305 - protein, 524 aa, Artificial Sequence
  derived and/or modified protein sequence (wt) from glycoprotein__RABV__JQ685938.1
MVLQALLFAPFLISSLCLGKFPIYTIPDKLGPWSPIDIHHLSCPNNLVVEDEGCNSLSGISYMELKVGYISAIKVNGFTCTGVVTEAETYTNFVGYVTTTFKRKHFHPMPDACRSAYNWKLAGDPRYEESLQNPYPDYHWLRTVKTTKESLIIISPSVADLDPYDKSLHSRIFPSGKCSGMTISSTYCSTNHEYTIWMPEKAGLGTSCDIFTTSKGKRASKGGKTCGFVDERGLYKSLKGACKLKLCGVSGLRLMDGTWVAIQTSEETKWCPPDQLVNLHDLHSDEIEHLVVEELVKKREECLDALESIMTTKSVSFRRLSHLRKLVPGFGKAYTIFNKTLMEADAHYKSIRTWNEIIPSKGCLRVGGKCHPHVNGVFFNGIILGPDGHVLIPEMQSSLLQQHMELLESSVIPLMHPLADLSTVFKDGDEAEDFVEVHLPDVHKQISGVDLGLPSWGKYVLMSAGALAILMLVISLMKCFWGVNRTKPIQQGPRESERKVSIAPQSRKVISSWESYKSGGETEL

SEQ ID NO: 31306 - protein, 524 aa, Artificial Sequence
  derived and/or modified protein sequence (wt) from glycoprotein__RABV__JQ685940.1
MIPQALLYVPLLIPSLCFGGFPIYTIPDKLGPWSPIDIHHLSCPNNLVVEDEGCTSLSGFSYMELKVGYISAIKVNGFTCTGVVTEAETYTNFVGYVTTTFKRKHFRPMPDACRAAYNWKVAGDPRYEESLQNPYPDYSWLRTVKTTKESLIIISPSVADLDPYDKSLHSRVFPGGKCLGITISSTYCSTNHDYTIWMPEEARLGTSCDIFTNSRGKRASKGGKTCGFVDERGLYKSLKGACKLKLCGVPGLRLMDGTWVTIQTSDETKWCPSDQLVNLHDFHSDEIEHLVVEELVKKREECLDALESIMTTKSVSFRRLSHLRKLVPGFGKAYTIFNKTLMEADAHYKSIRTWNEIIPSKGCLKVGGRCHPHVDGVFFNGIILGPDGNVLIPEMQSSLLQQHVELLESSVIPLMHPLADPSTVFKDGDEAEDFVEVHLPDIHKQVSGVDLGLPNWGKYLLMSAGALATLMLTIFLITCCRRSNRTESIQRDPGESGKKVSITSQDGKVISSWELYKSGGETRL

SEQ ID NO: 31307 - protein, 524 aa, Artificial Sequence; identical to SEQ ID NO: 31268
  derived and/or modified protein sequence (wt) from glycoprotein__RABV__JQ685941.1

SEQ ID NO: 31308 - protein, 524 aa, Artificial Sequence
  derived and/or modified protein sequence (wt) from glycoprotein__RABV__JQ685942.1
MIPQALLLVPLLISSLCFGGFPIYTIPDKLGPWSPIDIHHLSCPNNLVVEDEGCTSLSGFSYMELKVGYISAIKVNGFTCTGVVTEAETYTNFVGYVTTTFKRKHFRPTPDACRAAYNWKMAGDPRYEESLQNPYPDYHWLRTVKTTKESLIIISPSVADLDPYDKSLHSRVFPGGKCLGITVSSTYCSTNHDYTIWMPEEARLGTSCDIFTNSRGKRASKGGKTCGFVDERGLYKSLKGACKLKLCGVPGLRLMDGTWVTIQTSDETKWCPSDQLVNLHDFHSDEIEHLVVEELVKKREECLDALESIMTTKSVSFRRLSHLRKLVPGFGKAYTIFNKTLMEADAHYKSIRTWNEIIPSKGCLKVGGRCHPHVDGVFFNGIILGPDGNVLIPEMQSSLLQQHVELLESSVIPLMHPLADPSTVFKDGDEAEDFVEVHLPDIHKQVSGVDLGLPNWGKYLLMSAGALATLILTIFLVTCCRRVDRTRSIQRGSGESGRKVSVTSQNGKVISSWELYKSGGETRL

SEQ ID NO: 31309 - protein, 524 aa, Artificial Sequence
  derived and/or modified protein sequence (wt) from glycoprotein__RABV__JQ685943.1
MVLQALLFVPLLVFPSCFGKFPIYTIPDKLGPWSPIDIHHLSCPNNLVVEDEGCNNLSGFSYMELKVGYISAIKVNGFTCTGVVTEAETYTNFVGYVTTTFKRKHFRPTPDACRAAYNWKMAGDPRYEESLHNPYPDYHWLRTVKTTKESLVIISPSVADLDPYDKSLHSRVFPSGKCSGMTVSSTCCSTNHDYTIWMPENPRLGTSCDIFTNSRGKRASKGSKTCGFVDERGLYKSLKGACKLKLCGVLGLRLMDGTWVAMQTSDEIKWCPPDQLVNLHDFRSDEIEHLVVEELVKKREECLDALESIMTTKSVSFRRLSHLRKLVPGFGKAYTIFNRTLMEADAHYKSVRTWNEVIPSKGCLRVGGRCHPHVNGVFFNGIILGPDGHVLIPEMQSSLLQQHMELLESSVIPLMHPLANPSTVFKEGDEAEDFVEVHLPDVHKQVSGVDLGLPNWGKYVLMSAGALIALMLIIFLMTCCRRVNRPESTQRILGGTGKKVSAASQSGKVISSWESYKSGGETQL

SEQ ID NO: 31310 - protein, 524 aa, Artificial Sequence
  derived and/or modified protein sequence (wt) from glycoprotein__RABV__JQ685944.1
MVPQALLVVPLLGFSLCFGKFPIYTIPDKLGPWSPIDIHHLSCPNNLVVEDEGCTNLSGFSYMELKVGYISAIKVNGFTCTGVVTEAETYTNFVGYVTTTFKRKHFHPTPDECRAAYNWKMAGDPRYEESLHNPYPDYHWLRTVKTTKESLVIISPSVADLDPYDKSLHSRVFPSGKCSGITVSSTYCSTNHDYTIWMPENPRLGTSCDIFTNSRGKRASKGSKTCGFVDERGLYKSLKGACKLKLCGVPGLKLIDGTWIAMQTSDETKWCPPDQLVNLHDFRSDEIEHLVVEDLVKKREECLDALESIMTTKSVSFRRLSHLRKLVPGFGKAYTIFNKTLMEADAHYKSVRTWNEIIPSKGCLKVGGRCHPHVNGVFFNGVILGPDGHVLIPEMQSSLLQQHMELLESSVIPLMHPLADPSTVFKDGDEAEDFVEIHLPNVHKQVSGVDLGLPNWGKYVSLSAGALTALMLIIFLMACCRKVNRPEPTQRSLEGKGRKVSITSQSGKVISSWESYKSGGETRL

SEQ ID NO: 31311 - protein, 524 aa, Artificial Sequence; identical to SEQ ID NO: 31272
  derived and/or modified protein sequence (wt) from glycoprotein__RABV__JQ685945.1

SEQ ID NO: 31312 - protein, 524 aa, Artificial Sequence
  derived and/or modified protein sequence (wt) from glycoprotein__RABV__JQ685946.1
MIPQALLYVPLLIPSLCFGGFPIYTIPDKLGPWSPIDIHHLSCPNNLVVEDEGCTSLSGFSYMELKVGYISAIKVNGFTCTGVVTEAETYTNFVGYVTTTFKRKHFRPMPDACRAAYNWKMAGDPRYEESLQNPYPDYSWLRTVKTTKESLIIISPSVADLDPYDKSLHSRVFPGGKCLGITISSTYCSTNHDYTIWMPEEARLGTSCDIFTNSRGKRASKGGKTCGFVDERGLYKSLKGACKLKLCGVPGLRLMDGTWVTIQTSDETKWCPSDQLVNLHDFHSDEIEHLVVEELVKKREECLDALESIMTTKSVSFRRLSHLRKLVPGFGKAYTIFNKTLMEADAHYKSIRTWNEIIPSKGCLKVGGRCHPHVDGVFFNGIILGPDGNVLIPEMQSSLLQQHVELLESSVIPLMHPLADPSTVFKDGDEAEDFVEVHLPDVHKQVSGVDLGLPNWGKYLLMSAGALATLMLTIFLMTYCRRANRAESIQRDPGESGRKVSITSQDGKVISSWELYKSGGEARL

SEQ ID NO: 31313 - protein, 524 aa, Artificial Sequence
  derived and/or modified protein sequence (wt) from glycoprotein__RABV__JQ685947.1
MIPQALLFVSLLIPSLCLGEFPIYTIPDKLGPWTPIDIHHLSCPNNLVAENDGCTSLSGFSYMELKVGYISAIKVNGFTCTGVVTEAETYTNFVGYVTTTFKRKHFRPMPDACRAAHDWKMAGDPRYEDSLQNPYPDYHWLRTVKTTKESLVIISPSVADLDPYDKSLHSRVFPSGKCLGITVSSTYCSTNHDYTIWMPVEPRLGTSCDIFTNSRGKRASKGGRVCGFVDERGLYKSLKGACKLKLCGVPGIRLMDGTWVSIQTSEDIKWCPPDRLVNLHDFHSDELEHLVVEELIKRRENCLDALESIMTTKSVSFRRLSHLRKLVPGFGKAYTIFNKTLMEADAHYKSVKTWNEVIPSKGCLEVGGKCHPPVNGVFFNGIILGPDGNVLIPEMQSSLLQQHMELLESSVIPLMHPLADPSTVFKEGDEAEDFVEVHLPDVHKQVSDVDLGLPSWGKYLLMSAGALAILILAIVLIICCRRVNKTRSTQRGQRESRGKMSVAPQNGKIISSWELYKRESETGL

SEQ ID NO: 31314 - protein, 524 aa, Artificial Sequence; identical to SEQ ID NO: 31312
  derived and/or modified protein sequence (wt) from glycoprotein__RABV__JQ685951.1

SEQ ID NO: 31315 - protein, 524 aa, Artificial Sequence
  derived and/or modified protein sequence (wt) from glycoprotein__RABV__JQ685952.1
MIPQAILSVPLLISSLCFGKFPIYTIPEKLGPWSPIDIHHLSCPNNLVVEDEGCTTLSGFSYIELKVGYISAIKVNGFTCTGVVTEAETYTNFVGYVTTTFKRKHFRPMPDACRAAYNWKMAGDPRYEESLHNPYPDYHWLRTVKTTKESLVIISPSVADLDPYDKSLHSRVFPGGKCLGITISSTYCSTNHDYTIWMPEEARLGTSCDIFINSRGKRASKGGRTCGFVDERGLYKSLKGACKLKLCGVPGLRLMDGTWVSIPASDETKWCSPDQLVNVHDFHSDEIEHLVVEELVKRREECLDALESIVTTKSISFRRLSHLRKLVPGFGKAYTIFNKTLMEADAHYKSVRTWNEIIPSKGCLSVGGRCHPHVNGVFFNGIILGPDGNVLIPEMQSSLLQQHMELLESSVIPLMHPLADPSTVFKDGDEAEDFVEVHLPDVQEQVSGVDLGLPNWGKYVLMSAGALAILILTIFLITCCRRADKTKSIQQGLGGSGRKVSVSPQNGKVISSWESYKNGGETRL

SEQ ID NO: 31316 - protein, 524 aa, Artificial Sequence
  derived and/or modified protein sequence (wt) from glycoprotein__RABV__JQ685953.1
MIFQALPFVPLLISSLCLGKFPIYTIPDKLGPWSPIDIHHLSCPNNLVVEDEGCTSLSGFSYMELKVGYISAIKVNGFTCTGVVTEAETYTNFVGYVTTTFKRKHFRPIPDACRAAYNWKMAGDPRYEESLQNPYPEYHWLRTVKTTKESLIIISPSVADLDPYNKSLHSRVFPGGKCLGITISSTYCSTNHDYTIWMPEEPRLGTSCDIFTSSKGKKASKGGKTCGFVDERGLYKSLKGACKLKLCGVLGLRLMDGTWVSIQTSDDTKWCPPDQLVNLHDFHSDEIEHLVVEELVKKREECLDALESIMTTKSVSFRRLSYLRKLVPGFGKAYTIFNKTLMEADAHYKSVRTWNEIIPSKGCLKVRERCHPPVDGVFFNGIILGPDGNVLIPEMQSSLLQQHMELLESSVIPLMHPLADPSTVFKDGDEAEDFVEVHLPDVHKQISGVDLGLPSWGKYLLMIAGGLATLALIIFSMACCRRAKRTEPGRRGSGESGKRVPATPQTRKVVSSWELYKSEGDARL

SEQ ID NO: 31317 - protein, 524 aa, Artificial Sequence
  derived and/or modified protein sequence (wt) from glycoprotein__RABV__JQ685954.1
MVPQALLFVPLLIPSVCLGKFPIYTIPDKLGPWSPIDIHHLSCPNNLVVEDEGCSNLSGFSYMELKVGYISAIKVDGFTCTGVVTEAETYTNFIGYVTTTFKRKHFRPMPDACRSAYNWKIAGDPRYEESLHTPYPDYHWLRTVKTTKESLVIISPSVADLDPYDKSLHSMVFPNGKCSGITVYSTYCSTNHDYTIWMPEKAGLGTSCDIFTNSKGKRASKGGRTCGFVDERGLYKSLRGACKLKLCGVPGLRLMDGTWATIQTPEETKWCSPDQLVNLHDFHSDEIEHLVVEDLVKKREECLDTLESIMTTKSVSFRRLSHLRKLVPGFGKAYTIFNKTLMEADAHYKSVRTWNEIIPSKGCLRVGGRCHPHVNGVFFNGVIMGPDGHVLIPEMQSSLLQQHMELLESSVIPLIHPLADPSTVFKDNDEAEDFVEVHLPDVHKQVSGIDLGLPSWGRYLLMIAGALMTLTLVIFLMICCRRVNKAGSIQQDPEKSERRRSVTPQNGKVISSWESYKSGSETRL

SEQ ID NO: 31318 - protein, 524 aa, Artificial Sequence
  derived and/or modified protein sequence (wt) from glycoprotein__RABV__JQ685955.1
MISQAFLYVPLLISSLCFGKFPIYTIPDKIGPWSPIDIHHLSCPNNLVVEDEGCTSLSGFSYMELKVGYISAIKVNGFTCTGVVTEAETYTNFVGYVTTTFKRKHFRPMPDACRSAYNWKTAGDPRYEESLQNPYPDYSWLRTVKTTKESLVIISPSVADLDPYDKSLHSRVFPNGKCLGITISSTYCSTNHDYTIWMPEEARLGTSCDIFTNSKGKRASKGGRTCGFVDERGLYKSLRGACKLKLCGVPGLRLMDGTWVSIQTSDETKWCPPDQLVNVHDFHSDEIEHLVVEELVKKREECLDALESIMTTKSVSFRRLSHLRKLVPGFGKAYTIFNKTLMEADAHYKSVQTWNEIIPSKGCLKVGGMCHPHVDGVFFNGIILGPDGNVLIPEMQSSLLQQHMELLESSVIPLMHPLADPSTVFKDGDEAEDFVEVHLPDIHKQVSGIDLGLPDWGKYLLMSAGALAILLLTIFLMTCCRRVNRTESAQRDPGELGRKVSATPQNRKVISSWELYKSGGDTRL

SEQ ID NO: 31319 - protein, 524 aa, Artificial Sequence
  derived and/or modified protein sequence (wt) from glycoprotein__RABV__JQ685956.1
MIPQALLYVPLLISSLCFGGFPIYTIPDKLGPWSPIDIHHLSCPNNLVVEDEGCTSLSGFSYMELKVGYISAIKVNGFTCTGVVTEAETYTNFVGYVTTTFKRKHFRPMPDACRAAYNWKVAGDPRYEESLQNPYPDYSWLRTVKTTKESLIIISPSVADLDPYDKSLHSRVFPGGKCLGITISSTYCSTNHDYTIWMPEEARLGTSCDIFTNSRGKRASKGGKTCGFVDERGLYKSLKGACKLKLCGVPGLRLMDGTWVTIQTSDETKWCPSDQLVNLHDFHSDEIEHLVVEELVKKREECLDALESIMTTKSVSFRRLSHLRKLVPGFGKAYTIFNKTLMEADAHYKSIRTWNEIIPSKGCLKVGGRCHPHVDGVFFNGIILGPDGNVLIPEMQSSLLQQHVELLESSVIPLMHPLADPSTVFKDGDEAEDFVEVHLPDIHKQVSGVDLGLPNWGKYLLMSAGALATLMLTIFLMTCCRRANRTESIQRDPGESGKKVSITSQDGKVISSWELYKSGGETRL

SEQ ID NO: 31320 - protein, 524 aa, Artificial Sequence
  derived and/or modified protein sequence (wt) from glycoprotein__RABV__JQ685957.1
MISQALLFVPLLISSLCLGEFPIYTIPEKLGPWSPIDIHHLSCPNNLVVEDEGCNSLSGFSYMELKVGYISSIKVNGFTCTGVVTEAETYTNFVGYVTTTFKRKHFRPMPDACRAAYNWKMSGDPRYEESLHNPYPDYHWLRTVKTTKESLVIISPSVADLDPYDKSLHSRVFSGGKCLGITISSTYCSTNHDYTIWMPEEARLGTSCDIFTNSKGKKASKGGRTCGFVDERGLYKSLKGACKLKLCGVPGLRLMDGTWVSIQTSDETKWCPPDQLVNIHDFRSDEIEHLVVEELVKKREECLDALESIMTTKSVSFRRLSHLRKLVPGFGKAYTIFNKTLMEADAHYKSVRTWNEIIPSKGCLSVGGRCHPHVDGVFFNGIILGPDGSVLIPEMQSSLLQQHMELLESSVIPLMHPLANPSTVFKDGDEAEDFVEVHLPDIQEQVSGVDLGLPNWGKYVLMSAGALAILLLTIFLMTCCIRTNRTKSIQQGPGESGRKVSVPPQNGRVISSWESFKSGGETGL

SEQ ID NO: 31321 - protein, 524 aa, Artificial Sequence; identical to SEQ ID NO: 31284
  derived and/or modified protein sequence (wt) from glycoprotein__RABV__JQ685959.1

SEQ ID NO: 31322 - protein, 524 aa, Artificial Sequence
  derived and/or modified protein sequence (wt) from glycoprotein__RABV__JQ685960.1
MIPQALLYVPLLISSLCFGGFPIYTIPDKLGPWSPIDIHHLSCPNNLVVEDEGCTSLSGFSYMELKVGYISAIKVNGFTCTGVVTEAETYTNFVGYVTTTFKRKHFRPMPDACRAAYNWKVAGDPRYEESLQNPYPDYSWLRTVKTTKESLIIISPSVADLDPYDKSLHSRVFPGGKCLGITISSTYCSTNHDYTIWMPEEARLGTSCDIFTNSRGKRASKGGKTCGFVDERGLYKSLKGACKLKLCGVPGLRLMDGTWVTIQTSDETKWCPSDQLVNLHDFHSDEIEHLVVEELVKKREECLDALESIMTTKSVSFRRLSHLRKLVPGFGKAYTIFNKTLMEADAHYKSIRTWNEIIPSKGCLKVGGRCHPHVDGVFFNGIILGPDGNVLIPEMQSSLLQQHVELLESSVIPLMHPLADPSTVFKDGDEAEDFVEVHLPDIHKQVSGVDLGLPNWGKYLLMSAGALATLMLTIFLMTCCRRANRTESIQRDPGESGKKVSITSQDGKVISSWELYKRGGETRL

SEQ ID NO: 31323 - protein, 524 aa, Artificial Sequence
  derived and/or modified protein sequence (wt) from glycoprotein__RABV__JQ685961.1
MIPQALLYVPLLISPLCFGGFPIYTIPDKLGPWSPIDIHHLSCPNNLVVEDEGCTSLSGFSYMELKVGYISAIKVNGFTCTGVVTEAETYTNFVGYVTTTFKRKHFRPMPDACRAAYNWKVAGDPRYEESLQNPYPDYSWLRTVKTTKESLIIISPSVADLDPYDKSLHSRVFPGGKCLGITISSTYCSTNHDYTIWMPEEARLGTSCDIFTNSRGKRASKGGKTCGFVDERGLYKSLKGACKLKLCGVPGLRLMDGTWVTIQTSDETKWCPSDQLVNLHDFHSDEIEHLVVEELVKKREECLDALESIMTTKSVSFRRLSHLRKLVPGFGKAYTIFNKTLMEADAHYKSIRTWNEIIPSKGCLKVGGRCHPHVDGVFFNGIILGPDGNVLIPEMQSSLLQQHVELLESSVIPLMHPLADPSTVFKDGDEAEDFVEVHLPDIHKQVSGVDLGLPNWGKYLLISAGALATLMLTIFLMTCCRRANRTESIQRDPGEPGKKVSITSQDGKVISSWELYKSGGETRL

SEQ ID NO: 31324 - protein, 524 aa, Artificial Sequence
  derived and/or modified protein sequence (wt) from glycoprotein__RABV__JQ685962.1
MIPQALLYVPLLIPSLCFGGFPIYTIPDKLGPWSPIDIHHLSCPNNLVVEDEGCTSLSGFSYMELKVGYISAIKVNGFTCTGVVTEAETYTNFVGYVTTTFKRKHFRPMPDACRAAYNWKVAGDPRYEESLQNPYPDYSWLRTVKTTKESLIIISPSVADLDPYDKSLHSRVFPGGKCLGITISSTYCSTNHDYTIWMPEEARLGTSCDIFTNSRGKRASKGGKTCGFVDERGLYKSLKGACKLKLCGVPGLRLMDGTWVTIQTSDETKWCPSDQLVNLHDFHSDEIEHLVVEELVKKREECLDALESIMTTKSVSFRRLSHLRKLVPGFGKAYTIFNKTLMEADAHYKSIRTWNEIIPSKGCLKVRGRCHPHVDGVFFNGIILGPDGNVLIPEMQSSLLQQHVELLESSVIPLMHPLADPSTVFKDGDEAEDFVEVHLPDIHKQVSGVDLGLPNWGKYLLMSAGALATLMLTIFLMTCCRRSNRTESIQRDPGESGKKVSITSQDGKVISSWELYKSGGETRL

SEQ ID NO: 31325 - protein, 524 aa, Artificial Sequence
  derived and/or modified protein sequence (wt) from glycoprotein__RABV__JQ685963.1
MILQALLFVPLLISSLCLGKFPIYTIPDKLGPWSPIDIHHLSCPNNLVVEDEGCTSLSGFSYMELKVGYISSIKVNGFTCTGVVTEAETYTNFVGYVTTTFKRKHFRPIPDACRAAYNWKMAGDPRYEESLQNPYPDYHWLRTVKTTKESLIIISPSVADLDPYDKSLHSRVFPGGKCLGITISSTYCSTNHDYTVWMPEEPRLGTFCDIFTNSKGKKASKGGKVCGFVDERGLYKSLKGACKLKLCGVPGLRLMDGTWVTIQTSEEVKWCPADQLVNLHDFHSDEIEHLVVEELVKKREECLDALESIMTTKSVSFRRLSYLRKLVPGFGKAYTIFNKTLMEADAHYKSVRTWNEIIPSKGCLKVKERCHPHVDGVFFNGIILGPDGNVLIPEMQSSLLQQHMELLESSVIPLMHPLADPSTVFKDGDEAEDFVEVHLPDVHKQISGVDLGLPSWGKYLLMIAGGLAALVLIIFLMVCCRRTKRTESRRRGSGESGKKVSVTPQTRKVVSSWELYKSEGDARL

SEQ ID NO: 31326 - protein, 524 aa, Artificial Sequence
  derived and/or modified protein sequence (wt) from glycoprotein__RABV__JQ685964.1
MIPQALLYVPLLISSLCFGGFPIYTIPDKLGPWSPIDIHHLSCPNNLVVEDEGCTSLSGFSYMELKVGYISAIKVNGFTCTGVVTEAETYTNFVGYVTTTFKRKHFRPMPDACRAAYNWKMAGDPRYEESLQNPYPDYSWLRTVKTTKESLIIISPSVADLDPYDKSLHSRVFPGGKCLGITISSTYCSTNHDYTIWMPEEARLGTSCDIFTNSRGKRASKGGKTCGFVDERGLYKSLKGACKLKLCGVPGLRLMDGTWVTIQTSDETKWCPSDQLVNLHDFHSDEIEHLVVEELVKKREECLDALESIMTTKSVSFRRLSHLRKLVPGFGKAYTIFNKTLMEADAHYKSIRTWNEIIPSKGCLKVGGRCHPHVDGVFFNGIILGPDGNVLIPEMQSSLLQQHVELLESSVIPLMHPLADPSTVFKDGDEAEDFVEVHLPDIHKQVSGVDLGLPNWGKYLLMSAGALATLMLIIFLMACCRRANRTESIQRDPGESGKKVSIPSQDGKVISSWELYKSGGETRL

SEQ ID NO: 31327 - protein, 524 aa, Artificial Sequence
  derived and/or modified protein sequence (wt) from glycoprotein__RABV__JQ685965.1
MIPQAILSVPLLISSLCFGKFPIYTIPEKLGPWSPIDIHHLSCPNNLVVEDEGCTTLSGFSYIELKVGYISAIKVNGFTCTGVVTEAETYTNFVGYVTTTFKRKHFRPMPDACRAAYNWKMAGDPRYEESLHNPYPDYHWLRTVKTTKESLVIISPSVADLDPYDKSLHSRVFPGGKCLGITISSTYCSTNHDYTIWMPEEARLGTSCDIFTNSRGKRASKGGRTCGFVDERGLYKSLKGACKLKLCGVPGLRLMDGTWVSIQASDETKWCSPDQLVNVHDFHSDEIEHLVVEELVKRREECLDALESIVTTKSISFRRLSHLRKLVPGFGKAYTIFNKTLMEADAHYKSVRTWNEIIPSKGCLSVGGRCHPHVNGVFFNGIILGPDGNVLIPEMQSSLLQQHMELLESSVIPLMHPLADPSTVFKDGDEAEDFVEVHLPDVQEQVSGVDLGLPNWGKYVLMSAGALAILILTIFLITCCRRANKTKSIQQGLGGSGRKVSVSPQNGKVISSWESYKSGGETRL

SEQ ID NO: 31328 - protein, 524 aa, Artificial Sequence
  derived and/or modified protein sequence (wt) from glycoprotein__RABV__JQ685967.1
MVPQALLVVPLLGFSLCFGKFPIYTIPDKLGPWSPIDIHHLSCPNNLVVEDEGCTNLSGFSYMELKVGYISAIKVNGFTCTGVVTEAETYTNFVGYVTTTFKRKHFRPTPDECRAAYNWKMAGDPRYEESLHNPYPDYHWLRTVKTTKESLVIISPSVADLDPYDKSLHSRVFPSGKCSGITVSSTYCSTNHDYTIWMLENPRLGTSCDIFTNSRGKRASKGSKTCGFVDERGLYKSLKGACKLKLCGVLGLKLMDGTWVAMQTSDETKWCPPDQLVNLHDLRSDEIEHLVVEELVKKREECLDALESIMTTKSVSFRRLSHLRKLVPGFGKAYTIFNKTLMEADAHYKSVRTWNEIIPSKGCLKVGGRCHPHVNGVFFNGVILGPDGHVLIPEMQSSLLQQHMELLESSVIPLMHPLADPSTVFKDGDEAEDFVEVHLPDVHKQVSGVDLGLPNWGKYVSLSAGALIALMLIILLITCCRKVNRPEPTQRSLEGKERKVSVTSQSGKVISSWESYKSGGETRL

SEQ ID NO: 31329 - protein, 524 aa, Artificial Sequence
  derived and/or modified protein sequence (wt) from glycoprotein__RABV__JQ685968.1
MVLQALLFAPFLISSLCLGKFPIYTIPDKLGPWSPIDIHHLSCPNNLVVEDEGCNSLSGISYMELKVGYISAIKVNGFTCTGVVTEAETYTNFVGYVTTTFKRKHFHPMPDACRSAYNWKLAGDPRYEESLHNPYPDYHWLRTVKTTKESLIIISPSVADLDPYDKSLHSRIFPRGKCSGMTISSTYCSTNHEYTIWMPEKAGLGTSCDIFTTSKGKRASKGGKTCGFVDERGLYKSLKGACKLKLCGVSGLRLMDGTWVAIQTSEETKWCPPDQLVNLHDLHSDEIEHLVVEELVKKREECLNALKSIMTTKSVSFRRLSHLRKLVPGFGKAYTIFNKTLMEADAHYKSIRTWNEIIPSKGCLRVGGKCHPHVDGVFFNGIILGPDGHVLIPEMQSSLLQQHMELLESSVIPLMHPLADLSTVFKDGDEAEDFVEVHLPDVHKQISGVDLGLPSWGKYVLMSAGALAILMLVISLMKCFWGVNRTKPIQQGPRESERKVSIAPQSRKVISSWESYKNGGETEL

SEQ ID NO: 31330 - protein, 524 aa, Artificial Sequence
  derived and/or modified protein sequence (wt) from glycoprotein__RABV__JQ685970.1
MVSQALLFVSPLILSLCSGEFPIYTIPDKLGPWSPIDIHHLSCPNNLVVEDEGCTNLSGFSYMELKVGYISAIKVNGFTCTGVVTEAETYTNFVGYVTTTFKRKHFRPTPDACRAAYNWKMAGDPRYEESLHNPYPDYHWLRTVKTTKESLVIISPSVADLDPYDKSLHSRVFPSGKCSGITVSSTYCLTNHDYTIWMPENLRLGTSCDIFTNSRGKRASRGSKTCGFVDERGLYKSLKGACKLKLCGVLGLRLMDGTWVAMQTSDETKWCPSDQLVNLHDFRSDEIEHLVVEELVKKREECLDAIESIMTTKSVSFRRLSHLRKLVPGFGKAYTIFNKTLMEADAHYKSVRTWNEIIPSKGCLRVGGRCHPHVNGVFFNGIILGPDGHVLIPEMQSSLLQQHVELLESSVIPLMHPLADPSTVFKDGEEAEDFVEVHLPDVHKQVSGVDLGLPNWGKYALVSAGALTALMLIAFLMTCCRGVNLPKSTQRSPGGTRRKVSVASQSGKVIASWEAYKSGCETKM

SEQ ID NO: 31331 - protein, 524 aa, Artificial Sequence
  derived and/or modified protein sequence (wt) from glycoprotein__RABV__JQ685971.1
MIPQALLFVPLLISSLCFGKFPIYTIPEKLGPWSPIDIHHLSCPNNLVAEDEGCNSLSGFSYMELKVGYISAIKVNGFTCTGVVTEAETYTNFVGYVTTTFKRKHFRPTPDACRAAYNWKMAGDPRYEESLHNPYPDYHWLRTVKTTKESLVIISPSVADLDPYDKSLHSRVFPDGKCLGITISSTYCSTNHDYTIWMPEEARLGTSCDIFTTSKGKRASKGDKICGFVDERGLYKSLKGACKLKLCGVLGLRLMDGTWVSIQTPGETKWCSPDQLVNLHDFHSDEIEHLVAEELVKKREECLDALESIMTTKSVSFRRLSHLRKLVPGFGKAYTIFNKTLMEADAHYKSVRTWNEVIPSKGCLSVGGRCHPHVNGVFFNGIILGPDGSVLIPEMQSSLLQQHMELLESSVIPLMHPLADPSTVFKDGDEAENFVEVHLPDVHKQVSGVDLGLPNWGKYLLMIAGALATLMLTIFLMTCCRRTKRAESIQYGLGESGRKVSVTPQSGKVISSWESYKSGGETRL

SEQ ID NO: 31332 - protein, 524 aa, Artificial Sequence; identical to SEQ ID NO: 31268
  derived and/or modified protein sequence (wt) from glycoprotein__RABV__JQ685974.1

SEQ ID NO: 31333 - protein, 524 aa, Artificial Sequence
  derived and/or modified protein sequence (wt) from glycoprotein__RABV__JQ685975.1
MVPQALLFVPLLVFSLCFGKFPIYTIPDKLGPWSPIDIHHLSCPNNLVVEDEGCTNLSGFSYMELKVGYISAIKVNGFTCTGVVTEAETYTNFVGYVTTTFKRKHFRPIPDACRAAYNWKMAGDPRYEESLHNPYPDYHWLRTVKTTKESLVIISPSVADLDPYDKSLHSRVFPGGKCSGMTVFSTYCSTNHDYTIWMPENPRLGTSCDIFANSRGKRASRGSKTCGFVDERGLYKSLKGACKLKLCGVLGLRLVDGTWVAMQTSDDTKWCPPDQLVNLHDFRSDEIEYLVVEELVKKREECLDALESIMTTKSVSFRRLSHLRKLVPGFGKAYTIFNKTLMEADAHYKSVRTWNEIIPSKGCLRVGGRCHPHVNGVFFNGIILGPDGHVLIPEMQSSLLQQHMELLESSVIPLMHPLADPSTVFKEGDEAEDFVEVHLPDVHKQVSEVDLGLPNWGKYILMIAGALIALMLIIFLMTCCGRVNRSESKQRSLGGTGRKVSVTSQSGKVISSWESYKSGGETRL

SEQ ID NO: 31334 - protein, 524 aa, Artificial Sequence
  derived and/or modified protein sequence (wt) from glycoprotein__RABV__JQ685978.1
MISQALLFVPLLISSLCFGEFPIYTIPEKLGPWSPIDIHHLSCPNNLVVEDEGCNSLSGFSYMELKVGYISSIKVNGFTCTGVVTEAETYTNFVGYVTTTFKRKHFRPMPDACRAAYNWKMSGDPRYEESLHNPYPDYHWLRTVKTTKESLVIISPSVADLDPYDKSLHSRVFSGGKCLGITISSTYCSTNHDYTIWMPEEARLGTSCDIFTNSKGKKASKGGRTCGFVDERGLYKSLKGACKLKLCGVPGLRLMDGTWVSIQTSDETKWCPPDQLVNIHDFRSDEIEHLVVEELVKKREECLDALESIMTTKSVSFRRLSHLRKLVPGFGKAYTIFNKTLMEADAHYKSVRTWNEIIPSKGCLSVGGRCHPHVDGVFFNGIILGPDGSVLIPEMQSSLLQQHMELLESSVIPLMHPLANPSTVFKDGDEAEDFVEVHLPDVQEQVSGVDLGLPNWGKYVLMSAGALAILLLTIFLMTCCRRANRTKSIRQGPGESGRKVSVPPQNGRVISSWESFKSGDETGL

SEQ ID NO: 31335 - protein, 524 aa, Artificial Sequence; identical to SEQ ID NO: 31334
  derived and/or modified protein sequence (wt) from glycoprotein__RABV__JQ685979.1

SEQ ID NO: 31336 - protein, 524 aa, Artificial Sequence
  derived and/or modified protein sequence (wt) from glycoprotein__RABV__JQ685980.1
MVPQALLFVPLLAFPMCFGKFPIYTIPDKLGPWSPIDIHHLSCPNNLVVEDEGCTNLSGFSYMELKVGYISAIKVNGFTCTGVVTEAETYTNFVGYVTTTFRRKHFRPTPDACRAAYNWKMAGDPRYEESLHNPYPDYHWLRTVKTTKESLIIISPSVADLDPYDKSLHSRVFPSGKCLGITISSTYCSTNHDYTIWMPENLRLGTSCDIFTNSRGKRASKGSRTCGFVDERGLYKSLKGACKLKLCGVLGLRLMDGTWVAMQTSDETKWCPPDQLVNLHDFRSDEIEHLVVEELVKKREECLDALESIMTTKSVSFRRLSHLRKLVPGFGKAYTIFNKTLMEADAHYKSVRTWNEIIPSKGCLRVGGRCHPHVNGVFFNGIILGPDGHVLIPEMQSSLLQQHMELLESSVIPLMHPLADPSTVFKDGDEAEDFVEVHLPDVHKQISGVDLGLPNWGKYVLIIAGVLIAMILTIFLMTCCGRGNRPKSTQHSLGGIGRKVSATSQSGKVISSWESYKNGGETRL

SEQ ID NO: 31337 - protein, 524 aa, Artificial Sequence
  derived and/or modified protein sequence (wt) from glycoprotein__RABV__JQ685981.1
MVPQVLLFVPLLVFSMCFGKFPIYTIPDKLGPWSPIDIHHLSCPNNLVVEDEGCTNLSGFSYMELKVGYISAIKVNGFTCTGVVTEAETYTNFVGYVTTTFKRKHFRPTPDACRAAYNWKMAGDPRYEESLHNPYPDYHWLRTVKTTKESLVIISPSVADLDPYDKSLHSRVFPSGKCSGITISSTYCSTNHDYTIWMPENPRLGTSCDIFTNSRGKRASKGGKTCGFVDERGLYKSLKGACKLKLCGVLGLRLMDGTWVAMQTSDETKWCPPDQLVNLHDFRSDEIEHLVVEELVKKREECLDALESIMTTKSVSFRRLSHLRKLVPGFGKAYTIFNKTLMEADAHYKSVRTWNEIIPSKGCLRVGGRCHPHVKGVFFNGIILGPDGHVLIPEMQSSLLQQHMELLESSVIPLMHPLADPSTVFKDGDEAEDFVEVHLPDVHKQISGVDLGLPSWGRYVLVSAGVLVVLMLTIFIITCCGRVHRPKSTQHGLGGTGRKVSVTSQSGKVISSWESYKSGGETRL

SEQ ID NO: 31338 - protein, 524 aa, Artificial Sequence
  derived and/or modified protein sequence (wt) from glycoprotein__RABV__JQ685982.1
MVPQALLFVPLLAFPMCFGKFPIYTIPDKLGPWSPIDIHHLSCPNNLVVEDEGCTNLSGFSYMELKVGYISAIKVNGFTCTGVVTEAETYTNFVGYVTTTFKRKHFRPTPDACRAAYNWKMAGDPRYEESLHNPYPDYHWLRTVKTTKESLIIISPSVADLDPYDKSLHSRVFPSGKCLGITISSTYCSTNHDYTIWMPENLRLGTSCDIFTNSRGKRASKGSKTCGFVDERGLYKSLKGACKLKLCGVLGLRLMDGTWVAMQTSDETKWCPPDQLVNLHDFRSDEIEHLVVEELVKKREECLDALESIMTTKSVSFRRLSHLRKLVPGFGKAYTIFNKTLMEADAHYKSVRTWNEIIPSKGCLRVGGRCHPHVNGVFFNGIILGPDGHVLIPEMQSSLLQQHMELLESSVIPLMHPLADPSTVFKDGDEAEDFVEVHLPDVHKQISGVDLGLPNWGKYVLIIAGVLIAMILTIFLMTCCGRGNRPKSTQHSLGGIGRKVSATSQSGKVISSWESYKSGGETRL

SEQ ID NO: 31339 - protein, 524 aa, Artificial Sequence
  derived and/or modified protein sequence (wt) from glycoprotein__RABV__JQ685983.1
MVPQALLFVPLLVFPMCFGKFPIYTIPDKLGPWSPIDIHHLSCPNNLVVEDEGCTNLSGFSYMELKVGYISAIKVNGFTCTGVVTEAETYTNFVGYVTTTFKRKHFRPTPDACRAAYNWKMAGDPRYEESLHNPYPDYHWLRTVKTTKESLVIISPSVADLDPYDKSLHSRVFPDGKCSGITISSTYCPTNHDYTIWLPENPRLGTSCDIFTNSRGKRASKGSKTCGFVDERGLYKSLKGACKLKLCGVLGLRLMDGTWVAMQTSDETKWCPPDQLVNLHDFRSDEIEHLVVEELVKKREECLDALESIMTTKSVSFRRLSHLRKLVPGFGKAYTIFNKTLMEADAHYKSVRTWNEIIPSKGCLRVGGRCHPHVNGVFFNGIILGPDGHVLIPEMQSSLLQQHMELLESSVIPLMHPLADPSTVFKDGDEAEDFVEVHLPDVHKQISGVDLGLPNWGKYVLVSAGVLIALMLIIFLMTCCGRIHRPKSTQCDLGGTGRKVSVTSQSGKVISSWESYKSGGETRL

SEQ ID NO: 31340 - protein, 524 aa, Artificial Sequence
  derived and/or modified protein sequence (wt) from glycoprotein__RABV__JQ685984.1
MVPQVLLFVPLLVFSLCFGKFPIYTIPDKLGPWSPIDIHHLSCPNNLVVEDEGCTNLSGFSYMELKVGYISAIKVNGFTCTGVVTEAETYTNFVGYVTTTFKRKHFRPTPDACRAAYNWKMAGDPRYEESLHNPYPDYHWLRTVKTTKESLVIISPSVTDLDPYDKSLHSRVFPGGKCSGITVSSTYCSTNHDYTIWMPENPRLGTSCDIFTNSRGKRASKGSKTCGFVDERGLYKSLKGACKLKLCGVLGLRLMDGTWVAMQTSDETKWCPPDQLVNLHDFRSDEIEHLVVEELVKKREECLDALESIMTTKSVSFRRLSHLRKLVPGFGKAYTIFNKTLMEADAHYKSVRTWNEIIPSKGCLRVGGRCHPHVNGVFFNGIILGPDGHVLIPEMQSSLLQQHMELLESSVIPLMHPLADPSTVFKDGDEAEDFVEVHLPDVHKQVSGVDLGLPNWGKYVLMIAGALIALMLIIFLMTCCRRVNRPESTQRSLGGTGRKVSITSQSGKVISSWESYKSGGETRL

SEQ ID NO: 31341 - protein, 524 aa, Artificial Sequence
  derived and/or modified protein sequence (wt) from glycoprotein__RABV__JQ685985.1
MVPQALLFVPILVFSLCFGKFPIYTIPDKLGPWSPIDIHHLSCPNNLVVEDEGCTNLSGFSYMELKVGYISAIKVNGFTCTGVVTEAETYTNFVGYVTTTFRRKHFRPTPDACRAAYNWKMAGDPRYEESLHNPYPDYHWLRTVRTTKESLVIISPSVADLDPYDKSLHSRVFPSGKCSGITVSSTYCSTNHDYTIWMPENPRLGTSCDIFINSRGKRASKGSKTCGFVDERGLYKSLKGACKLKLCGVLGLRLMDGTWVAMQTSEETKWCPPDQLVNLHDFRSDEIEHLVVEELVKKREECLDALESIMTTKSVSFRRLSHLRKLVPGFGKAYTIFNKTLMEADAHYKSVRTWNEIIPSKGCLRVGGRCHPHVNGVFFNGIILGPDGHVLIPEMQSSLLQQHMELLESSVIPLMHPLADPSTVFKEGDEAEDFVEVHLPDVHKQVSGVDLGLPNWGKYVLMSAGVLISRMLLIFLMTCCRRVNRPESTQRSPGGAGRKVSVTSQSGKVISSWESYKSGGETRL

SEQ ID NO: 31342 - protein, 524 aa, Artificial Sequence
  derived and/or modified protein sequence (wt) from glycoprotein__RABV__JQ685986.1
MVLQVLLFAPFLISSLCLGKFPIYTIPDKLGPWSPIDIHHLSCPNNLVVEDEGCNSLSGFSYMELKVGYISAIKVNGFTCTGVVTEAETYTNFVGYVTTTFKRKHFRPVPDACRSAYNWKLAGDPRYEESLHNPYPEYHWLRTVKTTKESLIVISPSVADLDPYDKSLHSRIFPSGKCSGMTVSSTYCSTNHEYTIWMPEKASLGTSCDIFTTSKGKRASKGGRTCGFVDERGLYKSLKGACKLKLCGVSGLRLMDGTWVAIQTSDEAKWCSPDQLVNLHDLHSDEIEHLVVEELVRKREECLDALESIMTTKSVSFRRLSHLRKLVPGFGKAYTIFNKTLMEADAHYKSVRTWNEIIPSKGCLRVGGKCHPHVNGVFFNGIILGPDGHVLIPEMQSSLLQQHIELLESSVIPLMHPLADLSTVFKDGDEAEDFVEVHLPDVHKQISGVDLGLPSWGKYVLMSAGALATLVLVISLMKCCRWVNKTKSIQQGPRESERKVSVTPQNGKVISSWESYKIGGETGL

SEQ ID NO: 31343 - protein, 524 aa, Artificial Sequence
  derived and/or modified protein sequence (wt) from glycoprotein__RABV__JQ685987.1
MAPQALWVVPLLGFSLCFGKFPIYTIPDKLGPWSPIDIHHLSCPNNLVVEDEGCTNLSGFSYMELKVGYISAIKVNGFTCTGVVTEAETYTNFVGYVTTTFKRKHFRPTPDACRTAYNWKMAGDPRYEESLHNPYPDYHWLRTVKTTKESLVIISPSVADLDPYDKSLHSRVFPSGKCSGITVSSTYCLTNHDYTIWMPENPRLGTSCDIFTNSRGKRASKGSKTCGFVDERGLYKSLKGACKLKLCGVLGLKLMDGTWVAMQTSDETKWCPSDQLVNLHDFRSDEIEHLVVEELVKKREECLDALESIMTTKSVSFRRLSHLRKLVPGFGKAYTIFNKTLMEADAHYKSVRTWNEIIPSKGCLRVGGRCHPHVNGVFFNGIILGPDGHILIPEMQSSLLQQHMELLESSVIPLMHPLADPSTVFKDGDEAEDFVEVHLPDVHKQVSGVDLGLPNWGRYVSLGAGALIALMLIIFLMTCCRRVNRPEPTQRSLEGKGRKVSVTSQSGKVISSWESYKSGGETRL

SEQ ID NO: 31344 - protein, 524 aa, Artificial Sequence
  derived and/or modified protein sequence (wt) from glycoprotein__RABV__JQ685988.1
MVPQALLLVPLLAFPMCFGKFPIYTIPDKLGPWSPIDIHHLSCPNNLVVEDEGCTNLSGFSYMELKVGYISAIKVNGFTCTGVVTEAETYTNFVGYVTTTFKRKHFRPTPDACRAAYNWKMAGDPRYEESLHNPYPDYHWLRTVKTTKESLIIISPSVADLDPYDKSLHSRVFPSGKCLGITISSTYCSTNHDYTIWMPENLRLGTSCDIFTNSRGKRASKGSKTCGFVDERGLYKSLKGACKLKLCGVLGLRLMDGTWVAMQTSNETKWCPPDQLVNLHDFRSDEIEHLVVEELVKKREECLDALESIMTTKSVSFRRLSHLRKLVPGFGKAYTIFNKTLMEADAHYKSVRTWNEIIPSKGCLRVGGRCHPHVNGVFFNGIILGPDGHVLIPEMQSSLLQQHMELLESSVIPLMHPLADPSTVFKDGDEAEDFVEVHLPDVHKQISGVDLGLPNWGKYVLIIAGVLIAMILTIFLMTCCGRGNRPKSTQHSLGGIGRKVSATSQSGKVISSWESYKSGSETRL

SEQ ID NO: 31345 - protein, 524 aa, Artificial Sequence
  derived and/or modified protein sequence (wt) from glycoprotein__RABV__JQ685989.1
MVPQALLFVPILVFSLCFGKFPIYTIPDKLGPWSPIDIHHLSCPNNLVVEDEGCTNLSGFSYMELKVGYISAIKVNGFTCTGVVTEAETYTNFVGYVTTTFRRKHFRPTPDACRAAYNWKMAGDPRYEESLHNPYPDYHWLRTVRTTKESLVIISPSVADLDPYDKSLHSRVFPSGKCSGITVSSTYCSTNHDYTIWMPENPRLGTSCDIFINSRGKRASKGSKTCGFVDERGLYKSLKGACKLKLCGVLGLRLMDGTWVAMQTSEETKWCPPDQLVNLHDFRSDEIEHLVVEELVKKREECLDALESIMTTKSVSFRRLSHLRKLVPGFGKAYTIFNKTLMEADAHYKSVRTWNEIIPSKGCLRVGGRCHPHVNGVFFNGIILGPDGHVLIPEMQSSLLQQHMELLESSVIPLMHPLADPSTVFKEGDEAEDFVEVHLPDVHKQVSGVDLGLPNWGKYVLMSAGVLISLMLLIFLMTCCRRVNRPESTQRSPGGAGRKVSVTSQSGKVISSWESYKSGGETRL

SEQ ID NO: 31346 - protein, 524 aa, Artificial Sequence; identical to SEQ ID NO: 31344
  derived and/or modified protein sequence (wt) from glycoprotein__RABV__JQ685990.1

SEQ ID NO: 31347 - protein, 524 aa, Artificial Sequence
  derived and/or modified protein sequence (wt) from glycoprotein__RABV__JQ685991.1
MVLQALLFAPFLISSFCLGKFPIYTIPDKLGPWSPIDIHHLSCPNNLVIEDEGCNSLSGFSYMELKVGYISAIKVNGFTCTGVVTEAETYTNFVGYVTTTFKRKHFRPMPDACRSAYNWKLAGDPRYEESLHNPYPEYHWLRTVKTTKESLIVISPSVADLDPYDKSLHSRIFPSGKCSGMTVSSTYCSTNHEYTIWMPEKVGLGTSCDIFITSKGKRASKGGRTCGFVDERGLYKSLKGACKLKLCGVSGLRLMDGTWVAIQTSDETKWCSPDQLVNLHDLHSDEIEHLVVEELVRKREECLDALESIMTTKSVSFRRLSHLRKLVPGFGKAYTIFNKTLMEADAHYKSVRTWNEIIPSKGCLRVGGKCHPHVNGVFFNGIILGPDGHVLIPEMQSSLLQQHIELLESSVIPLMHPLADLSTVFKDGDEAEDFVEVHLPDVHKQISGVDLGLPSWGKYVLISAGALATLILVISLMKCCRWVNRTKSIQQGPRESERKVSVAPQSGKVISSWESYKIGGETGL

SEQ ID NO: 31348 - protein, 524 aa, Artificial Sequence
  derived and/or modified protein sequence (wt) from glycoprotein__RABV__JQ685992.1
MVPQALLFVPLLVFSLCFGKFPIYTIPDKLGPWSPIDIHHLSCPNNLVVEDEGCTNLSGFSYMELKVGYISAIKVNGFTCTGVVTEAETYTNFVGYVTTTFRRKHFRPTPDACRAAYNWKMAGDPRYEESLHNPYPDYHWLRTVKTTKESLVIISPSVADLDPYDKSLHSRVFPGGKCSGITVSSTYCSTNHDYTIWMPENPRLGTSCDIFVNSRGKRASKGGKTCGFVDERGLYKSLKGACKLKLCGVPGLRLMDGTWVAIQTSDETKWCPPDQLVNLHDFRSDEIEHLVVEELVKKREECLDALESIMTTKSVSFRRLSHLRKLVPGFGKAYTIFNKTLMEADAHYKSVRTWNEIIPSKGCLRVGGRCHPHVNGVFFNGIILGPDGHVLIPEMQSSLLQQHMELLESSVIPLMHPLADPSTVFKDGDEAEDFVEVHLPDVHKLISGVDLGLPSWGKYVLMSAGILTTLMLMIFLMTCCRRVNQVGSKQHGLEGAGRKVSVTSQNGRVISSWESYKSGGETRL

SEQ ID NO: 31349 - protein, 524 aa, Artificial Sequence
  derived and/or modified protein sequence (wt) from glycoprotein__RABV__JQ685993.1
MVLQALLFAPFLISSLCLGKFPIYTIPDKLGPWSPIDIHHLSCPNNLVVEDEGCNSLSGFSYMELKVGYISAIKVNGFTCTGVVTEAETYTNFVGYVTTTFKRKHFRPMPDACRSAYNWKLAGDPRYEESLHNPYPDYHWLRTVKTTKESLIVISPSVADLDPYDKSLHSRIFPGGKCSGMTVSSTYCSTNHEYTIWMPEKAGLGTSCDIFTTSKGKRATKGGKTCGFVDERGLYKSLKGACKLKLCGVSGLRLMDGTWVAIQTSDETKWCSPDQLVNLHDLHSDEIEHLVVEELVRKREECLDALESIMTTKSVSFRRLSHLRKLVPGFGKAYTIFNKTLMEADAHYKSVRTWNEIIPSKGCLRVGGKCHPHVNGVFFNGIILGPDGHVLIPEMQSSLLQQHMELLESSVIPLMHPLADPSTVFKDDDEAEDFVEVHLPDVHKQVSGVDLGLPSWGRYVLMSAGALATLMVVISLMKCCKGVNRTKSIKQGSRESERKVSITPQSGKVISSWESYKSGGETGL

SEQ ID NO: 31350 - protein, 524 aa, Artificial Sequence
  derived and/or modified protein sequence (wt) from glycoprotein__RABV__JQ685994.1
MVPWALLFVPFLISSLCFGKFPIYTIPDKLGPWSPIDIHHLSCPNNLVVEDEGCNSLSGFSYMELKVGYISAIKVNGFTCTGVVTEAETYTNFVGYVTTTFKRKHFRPMPDACRSAYNWKMAGDPRYEESLHNPYPDYHWLRTVKTTKESLIIISPSVADLDPYDRSLHSRIFPGGKCTGLTVSSTYCSTNHDYTIWMPEKAGLGTSCDIFTNSKGKRASKGGKTCGFVDERGLYKSLKGACKLKLCGVSGLRLMDGTWVAIQTLDETKWCSPDQLVNLHDFHSDELEHLVVEELVRKREECLDALESIMTTKSVSFRRLSHLRKLVPGFGKAYTIFNKTLMEADAHYKSVRTWSEIIPSKGCLRVGGRCHPHVNGVFFNGIILGPDGHVLIPEMQSSLLQQHVELLESSVIPLMHPLADPSAVFKDGDEAEDFVEVHLPDVHKQISGVDLGLPSWGKYMLMIAGALTTLMLFIFLMTCCKRVNKKESIRQSPRELESKVSVTPQNRKVISSWESYKSGGETKL

SEQ ID NO: 31351 - protein, 524 aa, Artificial Sequence
  derived and/or modified protein sequence (wt) from glycoprotein__RABV__JQ685995.1
MVPQVLLFVPLLVFSLCFGKFPLYTIPDKLGPWSPIDIHHLSCPNNLVVEDEGCTNLSGFSYMELKVGYISAIKVSGFTCTGVVTEAETYTNFVGYVTTTFKRRHFRPTPDACRAAYNWKMAGDPRYEESLHNPYPDYHWLRTVKTTKESLVIISPSVTDLDPYDKSLHSRVFPGGKCSGITVSSTYCSTNHDYTIWMPESPRLGTSCDIFTNSRGKRASKGSKTCGFVDERGLYKSLKGACKLKLCGVLGLRLMDGTWVAMQTSDETKWCLPDQLVNLHDFRSDEIEHLVVEELVRKREECLDALESIMTTKSVSFRRLSHLRKLVPGFGKAYTIFNKTLMEADAHYKSIRTWNEIVPSKGCLRVGGRCHPHVNGVFFNGIILGPDGQVLIPEMQSSLLQQHMELLESSVIPLMHPLADPSTVFKEGDEAEDFVEVHLPDVHKQVSGVDLGLPNWGKYVLMIAGALIALMLIIFLMTCCRRVNRSESTQHRLRGTGRKVSVTSQTGKVISSWESYKSGGETRL

SEQ ID NO: 31352 - protein, 524 aa, Artificial Sequence
  derived and/or modified protein sequence (wt) from glycoprotein__RABV__JQ685996.1
MIPQALLSVPLLISSLCFGKFPIYTIPEKLGPWSPIDIHHLSCPNNLVVEDEGCNSLSGFSYMELKVGYISAIKVNGFTCTGVVTEAETYTNFVGYVTTTFKRKHFRPMPDACRAAYNWKTAGDPRYEESLHNPYPDYHWLRTVKTTKESLIIISPSVADLDPYDKSLHSRIFPGGKCLGITISSTYCSTNHDYTIWMPEEARLGTSCDIFTNSKGKRASKGGRTCGFVDERGLYKSLKGACKLKLCGVLGLRLMDGTWVAIQTPNETKWCSPDQLVNVHDFRSDEIEHLVVEELIRKREECLDALESIMTTKSVSFRRLSNLRKLVPGFGKAYTIFNKTLMEADAHYKSVRTWNEIIPSRGCLKVGGRCHPHVNGVFFNGIILGPDGHILIPEMQSSLLQQHMELLESSVIPLIHPLADPSTVFKDGDEAEDFVEVHLPDVHQQVSGVDLGLPDWGKYVLMSAGALATVMLTIFLITCCRRVKRTESIQQGLGESGRKVSVTPQNGKVMSSWEYYKSGGGTRL

SEQ ID NO: 31353 - protein, 524 aa, Artificial Sequence
  derived and/or modified protein sequence (wt) from glycoprotein__RABV__JQ685997.1
MISQTLLFVPLLISSVCFGEFPIYTIPEKLGPWSPIDIHHLSCPNNLVVEDEGCNSLSGFSYMELKVGYISSIKVNGFTCTGVVTEAETYTNFVGYVTTTFKRKHFRPMPDACRAAYNWKMSGDPRYEESLHNPYPDYHWLRTVKTTKESLVIISPSVGDLDPYDKSLHSRVFSGGKCLGITISSTYCSTNHDYTLWMPEEARLGTSCDIFTNSKGKRASKGGRTCGFVDERGLYKSLKGACKLKLCGVPGLRLMDGTWVSIQTSDETKWCPPDQLVNIHDFRSDEIEHLVVEELVKKREECLDALESIMTTKSVSFRRLSHLRKLVPGFGKAYTIFNKTLMEADAHYKSVRTWNEVIPSKGCLSVGGRCHPHVDGVFFNGIILGPDGSVLIPEMQSSLLQQHMELLESSVIPLMHPLANPSTVFKDGDEAEDFVEVHLPDVQEQVSGVDLGLPNWGKYVLMSAGALAILLLTIFLMTCCRRANRTKSIRQGPEESGRKVSVPPQSGKVISSWESFKSGGETRL

SEQ ID NO: 31354 - protein, 524 aa, Artificial Sequence
  derived and/or modified protein sequence (wt) from glycoprotein__RABV__JQ685998.1
MIPQALLFLPLLISSLCSGKFPIYTIPEKLGPWSPIDIHHLSCPNNLVVEDEGCNSLSGFSYMELKVGYISAIKVNGFTCTGVVTEAETYTNFVGYVTTTFKRKHFRPMPDACRAAYNWKMAGDPRYEESLHNPYPDYHWLRTVKTTKESLVIISPSVADLDPYDKSLHSRVFPGGKCLGITISSTYCSTNHDYTIWMPEEARLGTSCDIFTNSKGKRASKGGRTCGFVDERGLYKSLKGACKLKLCGVPGLRLMDGTWVSIQTSEETKWCSSDQLVNIHDFRSDEIEHLVVEELVKKREECLDALESIMTTKSVSFRRLSHLRKLVPGFGKAYTIFNNTLMEADAHYKSVKTWNEIIPSKGCLSVGGRCHPNVNGVFFNGIILGPDGSVLIPEMQSSLLQQHMELLESSVIPLMHPLANPSTVFKDGDEAEEFVEVHLPDVKEQVSGVDLGLPNWGRYVLMSAGALAILVLTIFLMTCCRRANRTKSIQQGLGESVRKVSVPLQNGKVISSWESYKSGGETRL

SEQ ID NO: 31355 - protein, 524 aa, Artificial Sequence
  derived and/or modified protein sequence (wt) from glycoprotein__RABV__JQ685999.1
MIPQALLFVPLLIPSLCLGEFPIYTIPDKLGPWTPIDIHHLSCPNNLVAENDGCTSLSGFSYMELKVGYISAIKVNGFTCTGVVTEAETYTNFVGYVTTTFKRKHFRPMPDACRAAHDWKMAGDPRYEDSLQNPYPDYHWLRTVKTTKESLVIISPSVADLDPYDKSLHSRVFPSGKCLGITVSSTYCSTNHDYTIWMPVEPRLGTSCDIFTNSRGKRASKGGRVCGFVDERGLYKSLKGACKLKLCGVPGIRLMDGTWVSIQTSEDIKWCPPDRLVNLHDFHSDELEHLVVEELIKRRENCLDALESIMTTKSVSFRRLSHLRKLVPGFGKAYTIFNKTLMEADAHYKSVKTWNEVIPSKGCLEVGGRCHPPVNGVFFNGIILGPDGNVLIPEMQSSLLQQHMELLESSVIPLMHPLADPSTVFKEGDEAEDFVEVHLPDVHKQVSDVDLGLPSWGKYLLMSAGALAILILAIVLIICCRRVNKTGSTQRGHRESRGKMSVAPQNGKIISSWELYKRESETGL

SEQ ID NO: 31356 - protein, 524 aa, Artificial Sequence
  derived and/or modified protein sequence (wt) from glycoprotein__RABV__JQ686000.1
MIPQALLFVPLLIPSLCLGKFPIYTIPDKLGPWSPIDIHHLSCPNNLVVEDEGCTSLSGFSYMELKVGYISAIKVNGFTCTGVVTEAETYTNFVGYVTTTFKRKHFRPMPDACRAAHDWKIAGDPRYEDSLQNPYPDYHWLRTVKTTKESLVIISPSVAELDPYDKSLHSRVFPSGKCLGITVSSTYCSTNHDYTIWMPVEARLGTSCDIFTNSRGKKASKGGRTCGFVDERGLYKSLKGACKLKLCGVPGLRLMDGTWVSIQTSDDIKWCPPDQLVNLHDFHSDEIEHLVVEELIKKREGCLDALESIMTTKSVSFRRLSHLRKLVPGFGKAYTIFNNTLMEADAHYKSVRTWNEVIPSKGCLKVGGRCHPPVNGVFFNGIILGPDGNVLIPEMQSSLLQQHMELLESSVIPLMHPLADPSTVFKDGDEAEDFVEVHLPDVHKQVSDVDLGLPSWGKYLLMSAGALATLSLAIFLITCCRRANRTESTQRGHRESGGKVSVAPQNGKIISSWELYKSESETGM

SEQ ID NO: 31357 - protein, 524 aa, Artificial Sequence
  derived and/or modified protein sequence (wt) from glycoprotein__RABV__JQ686001.1
MIPQALLFVPLLIPSLCLGKFPIYTIPDKLGPWSPIDIHHLSCPNNLVAEDEGCTSLSGFSYMELKVGYISAIKVNGFTCTGVVTEAETYTNFVGYVTTTFKRKHFRPMPDACRAAHDWKMAGDPRYEDSLQNPYPDYHWLRTVKTTKESLVIISPSVADLDPYDKSLHSRVFPSGKCLGITVSSTYCSTNHDYTIWMPVEARLGTSCDIFTNSKGKKASKGGRTCGFVDERGLYKSLKGACKLKLCGVPGLRLMDGTWVSIQTSDDIKWCPPDQLVNLHDFHSDEIEHLVVEELIKKREGCLDALESIMTTKSVSFRRLSHLRKLVPGFGKAYTIFNNTLMEADAHYKSVRTWNEVIPSKGCLKVGGRCHPPVNGVFFNGIILGPDGNVLIPEMQSSLLQQHMELLESSVIPLMHPLADPSTVFKDGDEAEDFVEVHLPDVHKQVSEIDLGLPSWGKYLLMSAGVLATLILAIFLITCCRRANRTESTQRGRRESGGKVSVAPQNGKIISSWELYKSESETGL

SEQ ID NO: 31358 - protein, 524 aa, Artificial Sequence
  derived and/or modified protein sequence (wt) from glycoprotein__RABV__JQ686002.1
MIPQALLFLPFLFPSLCLGKFPIYTIPEKLGPWSPIDIHHLSCPNNLVVEDEGCDSLSGFSYMELKVGYISAIKVNGFTCTGVVTEAETYTNFVGYVTTTFKRKHFRPMPDACRAAYNWKTAGDPRYEESLHNPYPDYHWLRTVKTTKESLIIISPSVADLDPYDKSLHSRVFPGGKCLGITVSSTYCSTNHDYTIWMPEEARLGTSCDIFTNSKGKRASKGGRTCGFVDERGLYKSLKGACKLKLCGVPGLRLMDGTWVAIQTPGETKWCSPDQLVNLHDFRSDEIEHLVVEELIKKREECLDALESIMTTKSVSFRRLSNLRKLVPGFGKAYTIFNKTLMEADAHYKSVRTWDEIIPSKGCLRVGGRCHPHVNGVFFNGIILGPDGHVLIPEMQSSLLQQHMELLESSVIPLIHPLADPSTVFKDGDEAEDFVEVHLPDVHKQVSGVDLGLPNWGKYVLMGAGVLATVILTILLLTCCRRVNRTKPKQQSLEESGRKVSVTPQNGKVMSSWEYYKSEGRTSL

SEQ ID NO: 31359 - protein, 524 aa, Artificial Sequence; identical to SEQ ID NO: 31294
  derived and/or modified protein sequence (wt) from glycoprotein__RABV__JQ686003.1

SEQ ID NO: 31360 - protein, 524 aa, Artificial Sequence
  derived and/or modified protein sequence (wt) from glycoprotein__RABV__JQ686004.1
MIPQALLFVPLLIPSLCLGKFPIYTIPDKLGPWSPIDIHHLSCPNNLVAEDEGCTSLSGFSYMELKVGYISAIKVNGFTCTGVVTEAETYTNFVGYVTTTFKRKHFRPMPDACRAAHDWKMAGDPRYEDSLQNPYPDYHWLRTVKTTKESLVIISPSVADLDPYDKSLHSRVFPSGKCLGITVSSTYCSTNHDYTIWMPVEARLGTSCDIFTNSKGKKASKGGRTCGFVDERGLYKSLKGACKLKLCGVPGLRLMDGTWASIQTSDDIKWCPPDQLVNLHDFHSDEIEHLVVEELIKKREGCLDALESIMTTKSVSFRRLSHLRKLVPGFGKAYTIFNNTLMEADAHYKSVRTWNEVIPSKGCLKVGGRCHPPVNGVFFNGIILGPDGNVLIPEMQSSLLQQHMELLESSVIPLMHPLADPSTVFKDGDEAEDFVEVHLPDVHKQVSEIDLGLPSWGKYLLMSAGVLATLILAIFLITCCRRANRTESTQRGRRESGGKVSVAPQNGKIISSWELYKSERETGL

SEQ ID NO: 31361 - protein, 524 aa, Artificial Sequence
  derived and/or modified protein sequence (wt) from glycoprotein__RABV__JQ686005.1
MIPQALLSLLLLISSLCLGKFPIYTIPDKLGPWSPIDIHHLSCPNNLVVEDEGCTSLSGFSYMELKVGYISAIKVNGFTCTGVVTEAETYTNFVGYVTTTFKRKHFRPMPDACRAAHEWKMAGDPRYEDSLQNPYPDYHWLRTVKTTKESLIIISPSVADLDPYDKSLHSRVFPGGNCLGITISSTYCSTNHDYTIWMPEEARLGTSCDIFTNSRGKRASKGGKICGFVDERGLYKSLKGACKLKLCGVPGLRLMDGTWVSIQTSDETKWCPPDQLVNVHDFHSDEIEHLIVEELVKKREECLDALESIMTTKSVSFRRLSHLRKLVPGFGKAYTIFNKTLMEADAHYKSVRTWNEIIPSKGCLKVGGMCHPHVGGVFFNGIILGPDGTVLIPEMQSSLLQQHMELLESSVIPLMHPLADPSTVFKEGDEAEDFVEIHLPDVHKQISGVDLGLPSWGKYLLISAGALATLILTIFLITCCRKVNRTESVQRGHRESERKVPVSPQNGRVISSWELYKSGGETNL

SEQ ID NO: 31362 - protein, 524 aa, Artificial Sequence
  derived and/or modified protein sequence (wt) from glycoprotein__RABV__JQ686006.1
MIPQALLFVPLLISSLCFGKFPIYTIPEKLGPWSPIDIHHLSCPNNLVAEDEGCNSLSGFSYMELKVGYISAIKVNGFTCTGVVTEAETYTNFVGYVTTTFKRKHFRPTPDACRAAYNWKMAGDPRYEESLHNPYPDYHWLRTVKTTKESLVIISPSVADLDPYDKSLHSRVFPDGKCLGITISSTYCSTNHDYTIWMPEEARLGTSCDIFTTSKGKRASKGDKICGFVDERGLYKSLKGACKLKLCGVLGLRLMDGTWVSIQTPGETKWCSPDQLVNLHDFHSDEIEHLVAEELVKKREECLDALESIMTTKSVSFRRLSHLRKLVPGFGKAYTIFNKTLMEADAHYKSVRTWNEVIPSKGCLSVGGRCHPHVNGVFFNGIILGPDGSVLIPEMQSSLLQQHMELLESSVIPLMHPLADPSTVFKDGDEAENFVEVHLPDVHKQVSGVDLGLPNWGKYLLMIAGALATLMLTIFLMTCCRRTKRAESIQHGLGESGRKVSVTPQSGKVISSWESYKSGGETRL

SEQ ID NO: 31363 - protein, 524 aa, Artificial Sequence
  derived and/or modified protein sequence (wt) from glycoprotein__RABV__JQ686007.1
MIPRALLFVPLLIPSLCLGEFPIYTIPDKLGPWSPIDIHHLSCPNNLVAENDGCTSLSGFSYMELKVGYISAIKVNGFTCTGVVTEAETYTNFVGYVTTTFKRKHFRPTPDACRAAHDWKMAGDPRYEASLQNPYPDYHWLRTVKTTKESLVIISPSVADLDPYDKSLHSRVFPSGKCLGITVSSTYCSTNHDYTIWMPVEPRLGTSCDIFTNSRGKRASKGGRVCGFVDERGLYKSLKGACRLKLCGVPGIRLLDGTWVSIQTSEDIKWCPPDRLVNLHDFHSDEIEHLVVAELIKRRENCLDALESIMTTKSVSFRRLSHLRKLVPGFGKAYTIFNKTLMEADAHYKSVKTWNEVIPSKGCLEVGGRCHPHVNGVFFNGIILGPDGNVLIPEMQSSLLQQHMELLESSVIPLMHPLADPSTVFKEGDEAEDFVEVHLPDVHKQVSDVDLGLPSWGKYLLISAGALAILILAIVLIICCRRVNKTRSTQRGHRESGGKMSVVPQNGKIISSWELYKSESETGL

SEQ ID NO: 31364 - protein, 524 aa, Artificial Sequence
  derived and/or modified protein sequence (wt) from glycoprotein__RABV__JQ686008.1
MISQAFLFVPFLISSLCFGKFPIYTIPDKIGPWSPIDIHHLSCPNNLVVEDEGCTSLSGFSYMELKVGYISAIKVNGFTCTGVVTEAETYTNFVGYVTTTFKRKHFRPMPDACRAAYNWKMAGDPRYEESLQNPYPDYNWLRTVKTTKESLIIISPSVADLDPYDKSLHSRVFPNGKCLGITVSSTYCSTNHDYTIWMPEEARLGTSCDIFTNSKGKRASKGGKTCGFVDERGLYKSLRGACKLKLCGVPGLRLMDGTWVSIQTSDETKWCPPDQLVNVHDFHSDEIEHLVVEELVRKREECLDALESIMTTKSVSFRRLSHLRKLVPGFGKAYTIFNKTLMEADAHYKSIQTWNEIIPSKGCLKVGGMCHPHLDGVFFNGIILGPDGNVLIPEMQSSLLQQHMELLESSVIPLMHPLADPSTVFKDGDEAEDFVEVHLPDIHKQVSGIDLGLPDWGKYLLMSAGALAILLLTIFLMTCCRRVNRTESAQRDPGESGRKVSVTPQNGKVISSWELYKSGGDTRL

SEQ ID NO: 31365 - protein, 524 aa, Artificial Sequence
  derived and/or modified protein sequence (wt) from glycoprotein__RABV__JQ686009.1
MIPQALLFVPLLIPSLCLGKFPIYTIPDKLGPWSPIDIHHLSCPNNLVVEDEGCTSLSGFSYMELKVGYISAIKVNGFTCTGVVTEAETYTNFVGYVTTTFKRKHFRPMPDACRAAHDWKIAGDPRYEDSLQNPYPDYHWLRTVKTTKESLVIISPSVADLDPYDKSLHSRVFPSGKCLGITVSSTYCSTNHDYTIWMPVEARLGTSCDIFTNSRGKKASKGGRTCGFVDERGLYKSLKGACKLKLCGVPGLRLMDGTWVSIQTSDDIKWCPPDQLVNLHDFHSDEIEHLVVEELIKKREGCLDALESIMTTKSVSFRRLSHLRKLVPGFGKAYTIFNNTLMEADAHYKSVRTWNEVIPSKGCLKVGGRCHPPVNGVFFNGIILGPDGNVLIPEMQSSLLQQHMELLESSVIPLMHPLADPSTVFKDGDEAEDFVEVHLPDVHKQVSDVDLGLPSWGKYLLMSAGALATLILAIFLITCCRRANRTESTQRGHRESGGKVSVAPQNGKIISSWELYKSESETGM

SEQ ID NO: 31366 - protein, 524 aa, Artificial Sequence; identical to SEQ ID NO: 31334
  derived and/or modified protein sequence (wt) from glycoprotein__RABV__JQ686011.1

SEQ ID NO: 31367 - protein, 524 aa, Artificial Sequence
  derived and/or modified protein sequence (wt) from glycoprotein__RABV__JQ699230.1
MVPQVLLFVPLLVFSSCFGKFPIYTIPDKLGPWSPIDIRHLSCPNNLVVEDEGCTNLSGFSYMELKVGYISAIKVNGFTCTGVVTEAETYTNFVGYVTTTFKRKHFRPMPDACRAAYNWKMAGDPRYEESLHNPYPDYHWLRTVKTTKESLVIISPSVADLDPYDKSLHSRVFPGGKCSGITVSSTCCSTNHDYTIWMPENPRLGTSCDIFTNSRGKRASKGGKTCGFVDERGLYKSLKGACKLKLCGVLGLRLMDGTWVAIQTSDEIKWCSPDQLVNLHDFHSDEIEHLVVEELVKKREECLDALETIMTTKSVSFRRLSHLRKLVPGFGKAYTIFNKTLMEADAHYKSIRTWNEIIPSKGCLRVGGRCHPHVNGVFFNGIILGPDGHVLIPEMQSSLLHQHMELLESSVIPLMHPLADPSTVFKDGDEAEDFVEVHLPDVHKQISGVDLGLPNWGKYVLISAGALTALMLMIFLMTCCRKANRAESIQHNPGETGRKVSVTSHNGRVISSWESYKSGGETKL

SEQ ID NO: 31368 - protein, 524 aa, Artificial Sequence
  derived and/or modified protein sequence (wt) from glycoprotein__RABV__JQ699231.1
MVPQVLLFVPLLVFSSCFGKFPIYTIPDKLGPWSPIDIHHLSCPNNLVVEDEGCTNLSGFSYMELKVGYISAIKVNGFTCTGVVTEAETYTNFVGYVTTTFKRKHFRPMPDACRAAYNWKMAGDPRYEESLHNPYPDYHWLRTVKTTKESLVIISPSVADLDPYDKSLHSRVFPGGKCSGITVSSTCCSTNHDYTIWMPENPRLGTSCDIFTNSRGKRASKGGKTCGFVDERGLYKSLKGACKLKLCGVLGLRLMDGTWVAIQTSDEIKWCSPDQLVNLHDFHSDEIEHLVVEELVKKREECLDALETIMTTKSVSFRRLSHLRKLVPGFGKAYTIFNKTLMEADAHYKSIRTWNEIIPSKGCLRVGGRCHPHVNGVFFNGIILGPDGHVLIPEMQSSLLHQHMELLESSVIPLMHPLADPSTVFKDGDEAEDFVEVHLPDVHKLISGVDLGLPNWGKYVLISAGALTALMLMIFLMTCCRKANRAESIQHNPGETGRKVSVTSHNGRVISSWESYKSGGETKL

SEQ ID NO: 31369 - protein, 524 aa, Artificial Sequence; identical to SEQ ID NO: 30846
  derived and/or modified protein sequence (wt) from glycoprotein__RABV__JQ699255.1

SEQ ID NO: 31370 - protein, 524 aa, Artificial Sequence; identical to SEQ ID NO: 30846
  derived and/or modified protein sequence (wt) from glycoprotein__RABV__JQ699257.1

SEQ ID NO: 31371 - protein, 524 aa, Artificial Sequence
  derived and/or modified protein sequence (wt) from glycoprotein__RABV__JQ699258.1
MIPQVLLFVTLLVFSSCFGKFPIYTIPDKLGPWSPIDIHHLSCPNNLVVEDEGCTNLSGFSYMELKVGYISAIKVNGFTCTGVVTEAETYTNFVGYVTTTFKRKHFRPMPDACRAAYNWKMAGDPRYEESLHNPYPDYHWLRTVKTTKESLVIISPSVADLDPYDKSLHSRVFPGGKCSGITVSSTCCSTNHDYTIWMPESPRLGTSCDIFTNSRGKRASKGGKTCGFVDERGLYKSLKGACKLKLCGVLGLRLMDGTWVAIQTSDEIKWCPPDQLVNLHDFHSDEIEHLVVEELVKKREECLDALETIMTTKSVSFRRLSHLRKLVPGFGKAYTIFNKTLMEADAHYKSIRTWNEIIPSKGCLRVGGRCHPHVNGVFFNGIILGPDGHVLIPEMQSSLLHQHMELLESSVIPLMHPLADPSTVFKDGDEAEDFVEVHLPDVHKQISGVDLGLPNWGKYVLISAGALTALMLTIFLMTCCRKTNGAGSIQHSPGETGRKVSVTSHNGRVISSWESYKSGSETKL

SEQ ID NO: 31372 - protein, 524 aa, Artificial Sequence
  derived and/or modified protein sequence (wt) from glycoprotein__RABV__JQ699259.1
MIPQALLFVPLLVFSSCFGKFPIYTIPDKLGPWSPIDIHHLSCPNNLVVEDEGCTNLSGFSYMELKVGYISAIKVNGFTCTGVVTEAETYTNFVGYVTTTFKRKHFRPMPDACRSAYNWKMAGDPRYEESLHNPYPDYHWLRTVKTTKESLVIISPSVADLDPYDKSLHSRVFPRGKCSGITVSSTCCSTNHDYTIWMPENPRLGTSCDIFTNSRGKRASKGSKTCGFVDERGLYKSLKGACKLKLCGVLGLRLMDGTWVAIQTSNEIKWCPPDQLVNLHDFHSDEIEHLVVEELVKKREECLDALETIMTTKSVSFRRLSHLRKLVPGFGKAYTIFNKTLMEADAHYKSIRTWNEIIPSKGCLRVGGRCHPHVNGVFFNGIILGPDGHVLIPEMQSSLLHQHMELLESSVIPLMHPLADPSTVFKDGDEAEDFVEVHLPDVHKQISGVDLGLPNWGKYVLISAGALTALMLTIFLITCCRKTNRAGSIQHSPGETGRKVSVTSHNGRVISSWESYKSGSETKL

SEQ ID NO: 31373 - protein, 524 aa, Artificial Sequence
  derived and/or modified protein sequence (wt) from glycoprotein__RABV__JQ699260.1
MVPQAFLFVPFLAVPLCFGKFPIYTIPDKLGPWSPIDIHHLSCPNNLVVEDEGCTNLSGFSYMELKVGYISAIKVTGFTCTGVVTEAETYTNFVGYVTTTFKRKHFRPTPDACRSAYNWKIAGDPRYEESLHNPYPDYHWLRTVKTTKESFVIISPSVADLDPYDKSLHSRVFPRGKCSGITVSSTYCSTNHDYTIWMPENPRLGTSCDIFTNSRGKRASKGSKTCGFVDERGLYKSLKGACKLKLCGVLGLRLMDGTWVAIQTSDETKWCPPDQLVNLHDFHSDEIEHLVVEELVKKREECLDALESIMTTKSVSFRRLSHLRKLVPGFGKAYTIFNKTLMEADAHYKSVRTWNEIIPSKGCLRVGGRCHPHVNGVFFNGIILGPDGHVLIPEMQSSLLQQHMELLESSVIPLMHPLADPSTVFKDGDEAEDFVEVHLPDVHKQVSGVDLGLPSWGKYVLMSAGILTALMLMIFLMTCCRRTNRAESIQHSLGETGRKVSVTSQNGRVISSWESYKSGGETKL

SEQ ID NO: 31374 - protein, 524 aa, Artificial Sequence
  derived and/or modified protein sequence (wt) from glycoprotein__RABV__JQ699262.1
MVPQALLFVPLLAVPLCFGKFPIYTIPDKLGPWSPIDIHHLSCPNNLVVEDEGCTNLSGFSYMELKVGYISAIKVTGFTCTGVVTEAETYTNFVGYVTTTFKRKHFRPTPDACRSAYNWKIAGDPRYEESLHNPYPDYHWLRTVKTTKESFVIISPSVADLDPYDKSLHSRVFPRGKCSGITVSSTYCSTNHDYTIWMPENPRLGTSCDIFTNSRGKRASKGSKTCGFVDERGLYKSLKGACKLKLCGVLGLRLMDGTWVAIQTSDETKWCPPDQLVNLHDFHSDEIEHLVVEELVKKREECLDALESIMTTKSVSFRRLSHLRKLVPGFGKAYTIFNKTLMEADAHYKSVRTWNEIIPSKGCLRVGGRCHPHVNGVFFNGIILGPDGHVLIPEMQSSLLQQHMELLESSVIPLMHPLADPSTVFKDGDEAEDFVEVHLPDVHKQVSGVDLGLPSWGKYVLMSAGILTALMLMIFLMTCCRRTNRAESIQHSLGETGRKVSVTSQNGRVISSWESYKSGGETKL

SEQ ID NO: 31375 - protein, 524 aa, Artificial Sequence
  derived and/or modified protein sequence (wt) from glycoprotein__RABV__JQ699264.1
MVPQALLFVPLLAVPLCFGKFPIYTIPDKLGPWSPIDIHHLSCPNNLVVEDEGCTNLSGFSYMELKVGYISAIKVNGFTCTGVVTEAETYTNFVGYVTTTFKRKHFRPTPDACRSAYNWKMAGDPRYEESLHNPYPDYHWLRTVKTTKESFVIISPSVADLDPYDKSLHSRVFPRGKCSGITVSSTYCSTNHDYTIWMPENPRLGTSCDIFTNSRGKRASKGSKTCGFVDERGLYKSLKGACKLKLCGVLGLRLMDGTWVAIQTSDETKWCPPDQLVNLHDFHSDEIEHLVVEELVKKREECLDALESIMTTKSVSFRRLSHLRKLVPGFGKAYTIFNKTLMEADAHYKSIRTWNEIIPSKGCLRVGGRCHPHVNGVFFNGIILGPDGHVLIPEMQSSLLQQHMELLESSVIPLMHPLADPSTVFKDGDEAEDFVEVHLPDVHKQVSGVDLGLPSWGKYVLMSAGILTALMLMIFLMTCCRRTNRAESIQHSLGETGRKVSVTSQNGRVISSWESYKSGGETKL

SEQ ID NO: 31376 - protein, 524 aa, Artificial Sequence; identical to SEQ ID NO: 31053
  derived and/or modified protein sequence (wt) from glycoprotein__RABV__JQ699267.1

SEQ ID NO: 31377 - protein, 524 aa, Artificial Sequence; identical to SEQ ID NO: 30527
  derived and/or modified protein sequence (wt) from glycoprotein__RABV__JQ699272.1

SEQ ID NO: 31378 - protein, 524 aa, Artificial Sequence
  derived and/or modified protein sequence (wt) from glycoprotein__RABV__JQ730682.1
MIPQTLLFVPLLVFSLCFGKFPIYTIPDKLGPWSPIDIHHLSCPNNLVVEDEGCTNLSGFSYMELKVGYISAIKVNGFTCTGVVTEAETYTNFVGYVTTTFKRKHFRPTPDACRAAYNWKMAGDPRYEESLHNPYPDYHWLRTVKTTKESLVIISPSVSDLDPYDKSLHSRVFPSGKCSGITVSSTYCPTNHDYTIWMPENPRLGTSCDIFTNSRGKRASKGSKTCGFVDERGLYKSLKGACKLKLCGVLGLRLMDGTWAAIQTSDEAKWCPPDQLVNIHDFRSDEIEHLVVEELVKKREECLDALESIMTTKSVSFRRLSHLRKLVPGFGKAYTIFNKTLMEADAHYKSVRTWNEIIPSKGCLRVGGRCHPHVNGVFFNGIILGPDGHVLIPEMQSSLLQQHMELLESSVIPLMHPLADPSTVFKDGDEAEDFVEVHLPDVHKQVSGVDLGLPSWGKYVLMSVGTLIALMLMILLTTCCRKANGAESIQHRLGETGRKVSVTSQNGRVISSWESYKSGGETKL

SEQ ID NO: 31379 - protein, 524 aa, Artificial Sequence
  derived and/or modified protein sequence (wt) from glycoprotein__RABV__JQ824889.1
MIPHALLSVPLLISSLCFGKFPIYTIPEKLGPWSPIDIHHLSCPNNLVVEDEGCNSLSGFSYMELKVGYISAIKVNGFTCTGVVTEAETYTNFVGYVTTTFKRKHFRPMPDACRAAYNWKTAGDPRYEESLHNPYPDYHWLRTVKTTKESLIIISPSVADLDPYDKSLHSRIFPGGKCLGITISSTYCSTNHDYTIWMPEEARLGTSCDIFTNSKGKRASKGGRTCGFVDERGLYKSLKGACKLKLCGVPGLRLMDGTWVAIQTPNETKWCSPDQLVNVHDFRSDEIEHLVVEELIRKREECLDALESIMTTKSVSFRRLSNLRKLVPGFGKAYTIFNKTLMEADAHYKSVRTWNEIIPSRGCLKVGGRCHPHVNGVFFNGIILGPDGHILIPEMQSSLLQQHMELLESSVIPLIHPLADPSTVFKDGDEAEDFVEVHLPDVHQQVSGVDLGLPDWGKYVLMSAGALATVMLTIFLITCCRRVKRTESVQQGLGESGRKVSVAPQNGKVMSSWEYYKSGGGTRL

SEQ ID NO: 31380 - protein, 524 aa, Artificial Sequence
  derived and/or modified protein sequence (wt) from glycoprotein__RABV__JQ944704.1
MDPQALLLVPLLGFSLCFGKFPIYTIPDKLGPWIPIDIHHLSCPNNLVVEDEGCTNLSGFSYMELKVGYISSIKVNGFTCTGVVTEAETYTNFVGYVTTTFRRKHFRPTPDACRAAYNWKMAGDPRYEESLHNPYPDYHWLRTVKTTKESLVIISPSVADLDPYDKSLHSRVFPSGKCSGITVSSTYCSTNHDYTIWMPENLRLGTSCDIFTNSRGKRASKGSKTCGFVDERGLYKSLKGACKLKLCGVLGLRLMDGTWVAMQTSDETKWCPPDQLVNLHDFRSDEIEHLVVEELVKKREECLDALESIMTTKSVSFRRLSHLRKLVPGFGKAYTIFNKTLMEADAHYKSVRTWNEVIPSRGCLRVGGRCHPHVNGVFFNGIILGPDGHVLIPEMQSSLLQQHIELLESSVIPLMHPLADPSTVFKDGDEAEDFVEVHLPDVHKQVSGVDLGLPNWGKYVLLSAGALIALMLIIFLITCCRRVNRPESTQRSLRGAGRKVSITSQSGKVISSWESYKSGGETRL

SEQ ID NO: 31381 - protein, 524 aa, Artificial Sequence
  derived and/or modified protein sequence (wt) from glycoprotein__RABV__JQ944705.1
MVPQVFLFVPLLVFPLCSGKFPIYTIPDKLGPWSPIDIHHLSCPNNLVVEDEGCTNLSGFSYMELKVGYISAIKVNGFTCTGVVTEAETYTNFVGYVTTTFRRKHFRPTPDACRAAYNWKMAGDPRYEESLHNPYPDYHWLRTVKTTKESLVIISPSVADLDPYDKSLHSRVFPSGKCLGITVSSTHCSTNHDYTIWMPENPRPGTSCDIFTNSRGKRASKGSKTCGFVDERGLYKSLKGACKLKLCGVLGLRLMDGTWVAMQTSDETKWCPPDQLVNLHDFRSDEIEHLVVEELVKKREECLDALESIMTTKSVSFRRLSHLRKLVPGFGKAYTIFNKTLMEADAHYKSVRTWNEIIPSKGCLRVGGRCHPHVNGVFFNGIILGPDGHVLIPEMQSSLLQQHMELLESSVIPLMHPLADPSTVFKDGDEAEDFVEVHLPDVHKQVSGVDLGLPNWGKYVLLSAGALIALMLMIFLMTCCRKVNRPESTQRSLGGTGRKVSITSQSGKVISSWESYKSGGETRL

SEQ ID NO: 31382 - protein, 524 aa, Artificial Sequence
  derived and/or modified protein sequence (wt) from glycoprotein__RABV__JQ944706.1
MAPQALLFVPLLVFPLCFGKFPIYTIPDKLGPWSPIDIHHLSCPNNLVVEDEGCTNLSGFSYMELKVGYISAIKVNGFTCTGVVTEAETYTNFVGYVTTTFKRKHFRPIPDACRAAYNWKMAGDPRYEESLHNPYPDYHWLRTVKTTKESLVIISPSVADLDPYDKSLHSRVFPSGKCSGITVSSTYCSTNHDYTIWMPENPRLGTSCDIFANSRGKRASKGSKTCGFVDERGLYKSLKGACKLKLCGVLGLRLMDGTWVAMQTSDETKWCPPDQLVNLHDFRSDEIEHLVVEELVKKREECLDALESIMTTKSVSFRRLSHLRKLVPGFGKAYTIFNKTLMEADAHYKSVRTWNEIIPSKGCLRVGGRCHPHVNGVFFNGIILGPDGHVLIPEMQSSLLQQHMELLESSVIPLMHPLADPSTVFKDGDEAEDFVEVHLPDVHKQVSGVDLGLPNWGKYVLLSAGALIALMLIIFLMTCCRRVNRPESTQRCLGGTGRKVSVTSQSGKVISSWESYKSGGETRL

SEQ ID NO: 31383 - protein, 524 aa, Artificial Sequence
  derived and/or modified protein sequence (wt) from glycoprotein__RABV__JQ944707.1
MIPQALLFVPLLAFPMCFGKFPIYTIPDKLGPWSPIDIHHLSCPNNLVVEDEGCTNLSGFSYMELKVGYISAIKVNGFTCTGVITEAETYTNFVGYVTTTFKRKHFRPTPDACRAAYNWKMAGDPRYEESLHNPYPDYHWLRTVKTTKESLIIISPSVADLDPYDKSLHSRVFPSGKCLGITISSTYCSTNHDYTIWMPENLRLGTSCDIFTNSRGKRASKGSKTCGFVDERGLYKSLKGACKLKLCGVLGLRLMDGTWVAMQTSDETKWCPPDQLVNLHDFRSDEIEHLVVEELVKKREECLDALESIMTTKSVSFRRLSHLRKLVPGFGKAYTIFNKTLMEADAHYKSVRTWNEIIPSKGCLRVGGRCHPHVNGVFFNGIILGPDGHVLIPEMQSSLLQQHMELLESSVIPLMHPLADPSTVFKDGDEAEDFVEVHLPDVHKQISGVDLGLPNWGKYVLIIAGVLIAMILTIFLMTCCGRGNRPKSTQHSLGGIGRKVSATSQSGKVISSWESYKSGGETRL

SEQ ID NO: 31384 - protein, 524 aa, Artificial Sequence
  derived and/or modified protein sequence (wt) from glycoprotein__RABV__JQ944708.1
MVPQALLFVPLLVFPLCFGKFPIYTIPDKLGPWSPIDIHHLSCPNNLVVEDEGCTNLSGFSYMELKVGYISAIKVNGFTCTGVVTEAETYTNFVGYVTTTFKRKHFRPTPDACRAAYNWKTAGDPRYEESLHNPYPDYHWLRTVKTTKESLVIISPSVADLDPYDKSLHSRVFPSGKCSGITVSSTYCSTNHDYTIWMPENLRLGTSCDIFINSRGKRASKGSQTCGFIDERGLYKSLKGACKLKLCGVLGLRLMDGTWVAMQTSHETKWCPPDQLVNLHDFRSDEIEHLVVEELVKKREECLDALESIMTTKSVSFRRLSHLRKLVPGFGKAYTIFNKTLMEADAHYKSVRTWNEIIPSKGCLRVGGRCHPHVNGVFFNGIILGPEGHVLIPEMQSSLLQQHMELLESSVIPLMHPLADPSTVFKEGDEAENFVEVHLPDVHKQVSGVDLGLPNWGKYVLLSSGALIALMLIIFLLTCCRRVNRPESTQHSLGGKRRKVSITSQSGKVISSWESYKSGGETRL

SEQ ID NO: 31385 - protein, 524 aa, Artificial Sequence
  derived and/or modified protein sequence (wt) from glycoprotein__RABV__JQ944709.1
MVPQVLLFVPLLGFSLCFGKFPIYTIPDELGPWSPIDIHHLSCPNNLVVEDEGCTNLSEFSYMELKVGYISAIKVNGFTCTGVVTEAETYTNFVGYVTTTFKRKHFRPTPDACRAAYNWKMAGDPRYEESLHNPYPDYHWLQTVRTTKESLIIISPSVTDLDPYDKSLHSRVFPGGKCSGITVSSTYCSTNHDYTIWMPENPRPRTPCDIFTNSRGKRASKGNKTCGFVDERGLYKSLKGACRLKLCGVLGLRLMDGTWVAMQTSDETKWCPPDQLVNLHDFRSDEIEHLVVEELVKKREECLDALESIMTTKSVSFRRLSHLRKLVPGFGKAYTIFNKTLMEADAHYKSVRTWNEIIPSKGCLKVGGRCHPHVNGVFFNGIILGPDGHVLIPEMQSSLLQQHMELLESSVIPLMHPLADPSTVFKEGDEAEDFVEVHLPDVYKQISGVDLGLPNWGKYVLMTAGAMIGLVLIFSLMTWCRRANRPESKQRSFGGTGRNVSVTSQSGKVIPSWESYKSGGEIRL

SEQ ID NO: 31386 - protein, 524 aa, Artificial Sequence
  derived and/or modified protein sequence (wt) from glycoprotein__RABV__JQ950447.1
MIPQAFLFVPLLVVPLCFGKFPIYTIPDKLGPWSPIDIHHLSCPNNLVVEDEGCTNLSGFSYMELKVGYISAIKVNGFTCTGVVTEAETYTNFVGYVTTTFKRKHFRPTPDACRSAYNWKMAGDPRYEESLHNPYPDYHWLRTVKTTKESFVIISPSVADLDPYDKSLHSRVFPRGKCSGITVSSTYCPTNHDYTIWMPENPRLGTSCDIFTNSRGKRAFKGSKTCGFVDERGLYKSLKGACKLKLCGVLGLRLMDGTWVAIQTSDETKWCPPDQLVNLHDFHSDEIEHLVVEELVKKREECLDALESIMTTKSVSFRRLSHLRKLVPGFGKAYTIFNKTLMEADAHYKSVRTWNEIIPSKGCLRVGGRCHPHVNGVFFNGIILGPDGHVLIPEMQSSLLQQHMELLESSVIPLMHPLADPSTVFKNGDEAEDFVEVHLPDVHKQVSGVDLGLPSWGKYVLMSAGILTALMLMIFLMTCCRRTNRSESIQHSLGETGRKVSVTSQSGRVISSWESYKSGGETKL

SEQ ID NO: 31387 - protein, 524 aa, Artificial Sequence
  derived and/or modified protein sequence (wt) from glycoprotein__RABV__JQ950449.1
MIPQAFLFVPLLVVPLCFGKFPIYTIPDKLGPWSPIDIHHLSCPNNLVVEDEGCTNLSGFSYMELKVGYISAIKVNGFTCTGVVTEAETYTNFVGYVTTTFKRKHFRPTPDACRSAYNWKMAGDPRYEESLHNPYPDYHWLRTVKTTKESFVIISPSVADLDPYDKSLHSRVFPRGKCSGMTVSSTYCPTNHDYTIWMPENPRLGTSCDIFTNSRGKRAFKGSKTCGFVDERGLYKSLKGACKLKLCGVLGLRLMDGTWVAIQTSDETKWCPPDQLVNLHDFHSDEIEHLVVEELVKKREECLDALESIMTTKSVSFRRLSHLRKLVPGFGKAYTIFNKTLMEADAHYKSVRTWNEIIPSKGCLRVGGRCHPHVNGVFFNGIILGPDGHVLIPEMQSSLLQQHMELLESSVIPLMHPLADPSTVFKNGDEAEDFVEVHLPDVHKQVSGVDLGLPSWGKYVLMSAGILTALMLMIFLMTCCRRTNRSESIQHSLGETGRKVSVTSQSGRVISSWESYKSGGETKL

SEQ ID NO: 31388 - protein, 524 aa, Artificial Sequence
  derived and/or modified protein sequence (wt) from glycoprotein__RABV__JX088694.1
MVPQALLFVPLLAVPLCFGKFPIYTIPDKLGPWSPIDIHHLSCPNNLVVEDEGCTNLSGFSYMELKVGYISAIKVNGFTCTGVVTEAETYTNFVGYVTTAFKRKHFRPTPDACRSAYNWKMAGDPRYEESLHNPYPDYHWLRTVKTTKESFVIISPSVADLDPYDKSLHSRVFPRGKCSGITVSSTYCSTNHDYTIWMPENPRLGTSCDIFTNSRGKRASKGSKTCGFVDERGLYKSLKGACKLKLCGVLGLRLMDGTWVAIQTSDETKWCPPDQLVNLHDFHSDEIEHLVVEELVKKREECLDALESIMTTKSVSFRRLSHLRKLVPGFGKAYTIFNKTLMEADAHYKSVRTWNEIIPSKGCLRVGGRCHPHVNGVFFNGIILGPDGHVLIPEMQSSLLQQHMELLESSVIPLMHPLADPSTVFKDGDEAEDFVEVHLPDVHKQVSGVDLGLPSWGKYVLMSAGILTALMLMIFLMTCCRRTNRAESIQHSLGETGRKVSVTSQNGRVISSWESYKSGGETKL

SEQ ID NO: 31389 - protein, 524 aa, Artificial Sequence
  derived and/or modified protein sequence (wt) from glycoprotein__RABV__JX473838.1
MVPQALLFIPLLVFPLCLGKFPIYTIPDKLGPWSPIDIHHLSCPNNLVVEDEGCTNLSGFSYMELKVGYISAIKVNGFTCTGVVTEAETYTNFVGYVTTTFKRKHFRPIPDACRAAYNWKMAGDPRYEESLHNPYPDYHWLRTVKTTKESLVIISPSVADLDPYDKSLHSRIFPSGKCSGITVSSTYCSTNHDYTIWMPENPRLGTSCDIFANSRGKRASKGGKTCGLVDERGLYKSLKGACKLKLCGVLGLRLMDGTWVAMQTSDETKWCPPDQLVNMHDFRSDEIEHLVVEELVKKREECLDALESIMTTKSVSFRRLSHLRKLVPGFGKAYTIFNKTLMEADAHYKSVRTWNEIIPSKGCLRVGGRCHPHVNGVFFNGIILGPDGHVLIPEMQSSLLQQHMELLESSVIPLMHPLADPSTVFKDGDEAEDFVEVHLPDVHKQVSGVDLGLPNWGKYVLLSAGTLIALMLIIFLMTCCRRVNRPESTQRSLGGAGRRVSVTSQSGKVISSWESYKSGGETRL

SEQ ID NO: 31390 - protein, 524 aa, Artificial Sequence; identical to SEQ ID NO: 31389
  derived and/or modified protein sequence (wt) from glycoprotein__RABV__JX473839.1

SEQ ID NO: 31391 - protein, 524 aa, Artificial Sequence
  derived and/or modified protein sequence (wt) from glycoprotein__RABV__JX473840.1
MVPRALLFIPLLVFSLCFGKFPIYTIPDKLGPWNPIDIHHLSCPNNLVVEDEGCTNLSGFSYMELKVGYISAIKVNGFTCTGVVTEAETYTNFVGYVTTTFKRKHFRPIPDTCRAAYNWKMAGDPRYEESLHNPYPDYHWLRTVKTTKESLVIISPSVADLDPYDKSLHSRIFPSGKCSGITVSSTYCSTSHDYTIWMPENPRLGTSCDIFANSRGKRASKGGKTCGLVDERGLYKSLKGACKLKLCGVLGLRLMDGTWVAMQTSDETKWCPPDQLVNMHDFRSDEIEHLVVEELVKKREECLDALESIMTTKSVSFRRLSHLRKLVPGFGKAYTIFNKTLMEADAHYKSVRTWNEIIPSKGCLRVGGRCHPHVNGVFFNGIILGPDGHVLIPEMQSSLLQQHMELLESSVIPLMHPLADPSTVFKDGDEAEDFVEVHLPDVHKQVSGVDLGLPNWGKYVLLSAGTLIALMLMIFLMTCCRRVNRPESTQRSLGGAGRRVSVTSQSGKVISSWESYKSGGETRL

SEQ ID NO: 31392 - protein, 524 aa, Artificial Sequence
  derived and/or modified protein sequence (wt) from glycoprotein__RABV__JX473841.1
MVPQALLFIPLLVFSLCFGKFPIYTIPDKLGPWNPIDIHHLSCPNNLVVEDEGCTNLSGFSYMELKVGYISAIKVNGFTCTGVVTEAETYTNFVGYVTTTFKRKHFRPIPDTCRAAYNWKMAGDPRYEESLHNPYPDYHWLRTVKTTKESLVIISPSVADLDPYDKSLHSRIFPSGKCSGITVSSTYCSTSHDYTIWMPENPRLGTSCDIFANSRGKRASKGGKTCGLVDERGLYKSLKGACKLKLCGVLGLRLMDGTWVAMQTSDETKWCPPDQLVNMHDFRSDEIEHLVVEELVKKREECLDALESIMTTKSVSFRRLSHLRKLVPGFGKAYTIFNKTLMEADAHYKSVRTWNEIIPSKGCLRVGGRCHPHVNGVFFNGIILGPDGHVLIPEMQSSLLQQHMELLESSVIPLMHPLADPSTVFKDGDEAEDFVEVHLPDVHKQVSGVDLGLPNWGKYVLLSAGTLIALMLMIFLMTCCRRVNRPESTQRSLGGAGRRVSVTSQSGKVISSWESYKSGGETRL

SEQ ID NO: 31393 - protein, 524 aa, Artificial Sequence
  derived and/or modified protein sequence (wt) from glycoprotein__RABV__JX871837.1
MIPQALLFVPLLIPSLCLGKFPIYTIPDKLGPWSPIDIHHLSCPNNLVVEDEGCTSLSGFSYMELKVGYISAIKVNGFTCTGVVTEAETYTNFVGYVTTTFKRKHFRPMPDACRAAHDWKIAGDPRYEDSLQNPYPDYHWLRTVKTTKESLVIISPSVAELDPYDKSLHSRVFPSGKCLGITVSSTYCSTNHDYTIWMPVEARLGTSCDIFTNSRGKKASKGGRTCGFVDERGLYKSLKGACKLKLCGVPGLRLMDGTWVSIQTSDDIKWCPPDQLVNLHDFHSDEIEHLVVEELIKKREGCLDALESIMTTKSVSFRRLSHLRKLVPGFGKAYTIFNNTLMEADAHYKSVRTWNEVIPSKGCLKVGGRCHPPVNGVFFNGIILGPDGNVLIPEMQSSLLQQHMELLESSVIPLMHPLADPSTVFKDGDEAEDFVEVHLPDVHKQVSDVDLGLPSWGKYLLMSAGVLATLILAIFLITCCRRANRTESTQRGHRESGGKVSVAPQNGKIISSWELYKSESETGM

SEQ ID NO: 31394 - protein, 524 aa, Artificial Sequence; identical to SEQ ID NO: 31249
  derived and/or modified protein sequence (wt) from glycoprotein__RABV__JX871838.1

SEQ ID NO: 31395 - protein, 524 aa, Artificial Sequence; identical to SEQ ID NO: 31249
  derived and/or modified protein sequence (wt) from glycoprotein__RABV__JX871839.1

SEQ ID NO: 31396 - protein, 524 aa, Artificial Sequence
  derived and/or modified protein sequence (wt) from glycoprotein__RABV__JX871840.1
MISQTLLFVPLLISSLCFGEFPIYTIPEKLGPWSPIDIHHLSCPNNLVVEDEGCNSLSGFSYMELKVGYISSIKVNGFTCTGVVTEAETYTNFVGYVTTTFKRKHFRPMPDACRAAYNWKMSGDPRYEESLHNPYPDYHWLRTVKTTKESLVIISPSVADLDPYDKSLHSRVFSGGKCLGITISSTYCSTNHDYTLWMPEEARLGTSCDIFINSKGKRASKGGRTCGFVDERGLYKSLKGACKLKLCGVPGLRLMDGTWVSIQTSDETKWCPPDQLVNIHDFRSDEIEHLVVEELVKKREECLDALDSIMTTKSVSFRRLSHLRKLVPGFGKAYTIFNKTLMEADAHYKSVRTWNEVIPSKGCLSVGGRCHPHVDGVFFNGIILGPDGSVLIPEMQSSLLQQHMELLESSVIPLMHPLANPSTVFKDGDEAEDFVEVHLPDVQEQVSGVDLGLPNWGKYMLMSAGALAILLLTIFLMTCCRRANRTKSIRQGPEESRRKVSVPPQSGKVISSWESFKSGGETGL

SEQ ID NO: 31397 - protein, 524 aa, Artificial Sequence
  derived and/or modified protein sequence (wt) from glycoprotein__RABV__JX871841.1
MIPQALLFVPLLIPSLCLGEFPIYTIPDKLGPWSPIDIHHLSCPNNLVAENDGCTSLSGFSYMELKVGYISAIKVNGFTCTGVVTEAETYTNFVGYVTTTFKRKHFRPTPDACRAAHDWKMAGDPRYEASLQNPYPDYHWLRTVKTTKESLVIISPSVADLDPYDKSLHSRVFPSGKCLGITVSSTYCSTNHDYTIWMPVEPRLGTSCDIFTNSRGKRASKGGRVCGFVDERGLYKSLKGACRLKLCGVPGIRLLDGTWVSIQTSEDIKWCPPDRLVNLHDFHSDEIEHLVVAELIKRRENCLDALESIMTTKSVSFRRLSHLRKLVPGFGKAYTIFNKTLMEADAHYKSVKTWNEVIPSKGCLEVGGRCHPHVNGVFFNGIILGPDGNVLIPEMQSSLLQQHMELLESSVIPLMHPLADPSTVFKEGDEAEDFVEVHLPDVHKQVSDVDLGLPSWGKYLLISAGALAILILAIVLIICCRKVNKTGSTQRGHRESGGKMSVVPQNGKIISSWELYKSESETGL

SEQ ID NO: 31398 - protein, 524 aa, Artificial Sequence
  derived and/or modified protein sequence (wt) from glycoprotein__RABV__JX871842.1
MIPQALLFVPFLFPSLCLGKFPIYTIPEKLGPWSPIDIHHLSCPNNLVVEDEGCDSLSGFSYMELKVGYISAIKVNGFTCTGVVTEAETYTNFVGYVTTTFKRKHFRPMPDACRAAYNWKTAGDPRYEESLHNPYPDYHWLRTVKTTKESLIIISPSVADLDPYDKSLHSRVFPGGKCLGITVSSTYCSTNHDYTIWMPEEARLGTSCDIFTNSKGKRASKGGRTCGFVDERGLYKSLKGACKLKLCGVPGLRLMDGTWVAIQTPGETKWCSPDQLVNLHDFRSDEIEHLVVEELIKKREECLDALDSIMTTKSLSFGRLSNLRKLVPGFGKAYTIFNKTLMEADAHYKSFRTWDEIIPSKGCLRVGGRCHPHVNGVFFNGIILGPDGHVLIPEMQSSLLQQHMELLESSVIPLIHPLADPSTVFKDGDEAEDFVEVHLPDVHKQVSGVDLGLPNWGKYVLMGAGVLATVILTIFLLTCCRRVNRTKPKQQSLEESGRKVSVTPQNGKVMSSWEYYKSEGRTSL

SEQ ID NO: 31399 - protein, 524 aa, Artificial Sequence
  derived and/or modified protein sequence (wt) from glycoprotein__RABV__JX871844.1
MIPQALLFVPLLIPSLCLGKFPIYTIPDKLGPWSPIDIHHLSCPNNLVVEDEGCTSLSGFSYMELKVGYISAIKVNGFTCTGVVTEAETYTNFVGYVTTTFKRKHFRPMPDACRAAHDWKIAGDPRYEDSLQNPYPDYHWLRTVKTTKESLVIISPSVADLDPYDKSLHSRVFPSGKCLGITVSSTYCSTNHDYTIWMPVEARLGTSCDIFTNSRGKKASKGGRTCGFVDERGLYKSLKGACKLKLCGVPGLRLMDGTWVSIQTSDDIKWCPPDQLVNLHDFHSDEIEHLVVEELIKKREGCLDALESIMTTKSVSFRRLSHLRKLVPGFGKAYTIFNNTLMEADAHYKSVRTWNEVIPSKGCLKVGGRCHPPVNGVFFNGIILGPDGNVLIPEMQSSLLQQHMELLESSVIPLMHPSADPSTVFKDGDEAEDFVEVHLPDVHKQVSDVDLGLPSWGKYLLMSAGALATLILAIFLITCCRRANRTESTQRGHRESGGKVSVAPQNGKIISSWELYKSESETGM

SEQ ID NO: 31400 - protein, 524 aa, Artificial Sequence; identical to SEQ ID NO: 31279
  derived and/or modified protein sequence (wt) from glycoprotein__RABV__JX871846.1

SEQ ID NO: 31401 - protein, 524 aa, Artificial Sequence
  derived and/or modified protein sequence (wt) from glycoprotein__RABV__JX871847.1
MIPQALLFVPLLIPSLCLGEFPIYTIPDKLGPWTPIDIHHLSCPNNLVAENDGCTSLSGFSYMELKVGYISAIKVNGFTCTGVVTEAETYTNFLGYVTTTFKRKHFRPMPDACRAAHDWKMAGDPRYEDSLQNPYPDYHWLRTVKTTKESLVIISPSVADLDPYDKSLHSRVFPSGKCLGITVSSTYCSTNHDYTIWMPVEPRLGTSCDIFTNSRGKRASKGGRVCGFVDERGLYKSLKGACKLKLCGVPGIRLMDGTWVSIQTSEDIKWCPPDRLVNLHDFHSDELEHLVVEELIKRRENCLDALESIMTTKSVSFRRLSHLRKLVPGFGKAYTIFNKTLMEADAHYKSVKTWNEVIPSKGCLEVGGKCHPPVNGVFFNGIILGPDGNVLIPEMQSSLLQQHMELLESSVIPLMHPLADPSTVFKEGDEAEDFVEVHLPDVHKQVSDVDLGLPSWGKYLLMSAGALAILILAIVLIICCGRVNKTGSTQRGHRESRGKMSVAPQNGKIISSWELYKSESETGL

SEQ ID NO: 31402 - protein, 524 aa, Artificial Sequence
  derived and/or modified protein sequence (wt) from glycoprotein__RABV__JX871848.1
MIPQALLFVPLLISSLCLGEFPIYTIPEKLGPWSPIDIHHLSCPNNLVVEDEGCNSLSGFSYMELKVGYISSIKVNGFTCTGVVTEAETYTNFVGYVTTTFKRKHFRPMPDACRAAYNWKMSGDPRYEESLHNPYPDYHWLRTVKTTKESLVIISPSVADLDPYDKSLHSRVFSGGKCLGITVSSTYCSTNHDYTIWMPEEARLGTSCDIFTNSKGKRASKGGKTCGFVDERGLYKSLKGACKLKLCGVPGLRLMDGTWVSIQTSDETKWCPPDQLVNIHDFRSDEIEHLVVEELVKKREECLDALESIMTTKSVSFRRLSHLRKLVPGFGKAYTIFNKTLMEADAHYKSVRTWNEVIPSKGCLSVGGRCHPHVDGVFFNGIILGPDGSVLIPEMQSSLLQQHMELLESSVIPLMHPLANPSTVFKDGDEAEDFVEVHLPDVQEQVSGVDLGLPNWGKYVLMSAGALAVLLLTIFLMTCRRRANRTNSIQQGPGESGRKISVPPQNGKVISSWESFKSGGETGL

SEQ ID NO: 31403 - protein, 524 aa, Artificial Sequence
  derived and/or modified protein sequence (wt) from glycoprotein__RABV__JX871849.1
MIPQALLSVPLLISSLCFGKFPIYTIPEKLGPWSPIDIHHLSCPNNLVVEDEGCNSLSGFSYMELKVGYISAIKVNGFTCTGVVTEAETYTNFVGYVTTTFKRKHFRPMSDACRAAYNWKTAGDPRYEESLHNPYPDYHWLRTVKTTKESLIIISPSVADLDPYDKSLHSRIFPGGKCLGITISSTYCSTNHDYTIWMPEEARLGTSCDIFTNSKGKRASKGGRTCGFVDERGLYKSLKGACKLKLCGVPGLRLMDGTWVAIQTPNETKWCSPDQLVNVHDFRSDEIEHLVVEELIRKREECLDALESIMTTKSVSFRRLSNLRKLVPGFGKAYTIFNKTLMEADAHYKSVRTWNEIIPSRGCLKVGGRCHPHVNGVFFNGIILGPDGHILIPEMQSSLLQQHMELLESSVIPLIHPLADPSTVFKDGDEAEDFVEVHLPDVHQQVSGVDLGLPDWGKYVLMSAGALATVMLTIFLITCCRRVKRTESIQQGLGESGRKVSVTPQNGKVMSSWEYYKSGGGTRL

SEQ ID NO: 31404 - protein, 524 aa, Artificial Sequence
  derived and/or modified protein sequence (wt) from glycoprotein__RABV__JX871853.1
MISQALLFVPLLIPSLCLGKFPIYTIPDKLGPWSPIDIHHLSCPNNLVVEDEGCTSLSGFSYMELKVGYISAIKVNGFTCTGVVTEAETYTNFVGYVTTTFKRKHFRPMPDACRAAHDWKIAGDPRYEDSLQTPYPDYHWLRTVKTTKESLVIISPSVADLDPYDKSLHSRVFPSGKCLGITVSSTYCSTNHDYTIWMPVEARLGTSCDIFTNSRGKKASKGGRTCGFVDERGLYKSLKGACKLKLCGVPGLRLMDGTWVSIQTSDDIKWCPPDQLVNLHDFHSDEIEHLVVEELIKKREGCLDALESIMTTKSVSFRRLSHLRKLVPGFGKAYTIFNNTLMEADAHYKSVRTWNEVIPSKGCLKVGGRCHPPVNGVFFNGIILGPDGNVLIPEMQSSLLQQHMELLESSVIPLMHPLADPSTVFKDGDEAEDFVEVHLPDVHKQVSDVDLGLPSWGKYLLMSAGALATLILAIFLITCCRRANRTESTQRGHRESGGKVSVAPQNGKIISSWELYKSESETGM

SEQ ID NO: 31405 - protein, 524 aa, Artificial Sequence
  derived and/or modified protein sequence (wt) from glycoprotein__RABV__JX871854.1
MIPQALLFVPFLFPSLCLGKFPIYTIPEKLGPWSPIDIHHLSCPNNLVVEDEGCDSLSGFSYMELKVGYISAIKVNGFTCTGVVTEAETYTNFVGYVTTTFKRKHFRPMPDACRAAYNWKTAGDPRYEESLHNPYPDYHWLRTVKTTKESLIIISPSVADLDPYDKSLHSRVFPGGKCLGITISSTYCSTNHDYTIWMPEEARLGTSCDIFTNSKGKRASKGGRTCGFVDERGLYKSLKGACKLKLCGVPGLRLMDGTWVAIQTPGETKWCSPDQLVNLHDFRSDEIEHLVVEELIKKREECLDALESIMTTKSVSFRRLSNLRKLVPGFGKAYTIFNKTLMEADAHYKSIRTWDEIIPSKGCLRVGGRCHPHVNGVFFNGIILGPDGHVLIPEMQSSLLQQHMELLESSVIPLIHPLADPSTVFKDGDEAEDFVEVHLPDVHEQVSGVDLGLPNWGKYVLISAGVLATVILTIFLLTCCRRVNRTKPKQQSLGESGRKVSVTPQNGKVMSSWEYYKSEGRTSL

SEQ ID NO: 31406 - protein, 524 aa, Artificial Sequence; identical to SEQ ID NO: 31249
  derived and/or modified protein sequence (wt) from glycoprotein__RABV__JX871855.1

SEQ ID NO: 31407 - protein, 524 aa, Artificial Sequence
  derived and/or modified protein sequence (wt) from glycoprotein__RABV__JX871856.1
MIPQALLFVPFLFPSLCLGKFPIYTIPEKLGPWSPIDIHHLSCPNNLVVEDEGCDSLSGFSYMELKVGYISAIKVNGFTCTGVVTEAETYTNFVGYVTTTFKRKHFRPMPDACRAAYNWKTAGDPRYEESLHNPYPDYHWLRTVKTTKESLIIISPSVADLDPYDKSLHSRVFPGGKCLGITVSSTYCSTNHDYTIWMPEEARLGTSCDIFTNSKGKRASKGGRTCGFVDERGLYKSLKGACKLKLCGVPGLRLMDGTWVAIQTPGETKWCSPDQLVNLHDFRSDEIEHLVVEELIKKREECLDALESIMTTKSVSFRRLSNLRKLVPGFGKAYTIFNKTLMEADAHYKSVRTWDEIIPSKGCLRVGGRCHPHVNGVFFNGIILGPDGHVLIPEMQSSLLQQHMELLESSVIPLIHPLADPSTVFKDGDEAEDFVEVHLPDVHKQVSGVDLGLPNWGKYVLMSAGVLATVILTIFLLTCCRRVNRTKPKQQSLGESGRKVSVTPQNGKVMSSWEYYKSEGRTSL

SEQ ID NO: 31408 - protein, 524 aa, Artificial Sequence; identical to SEQ ID NO: 31249
  derived and/or modified protein sequence (wt) from glycoprotein__RABV__JX871857.1

SEQ ID NO: 31409 - protein, 524 aa, Artificial Sequence
  derived and/or modified protein sequence (wt) from glycoprotein__RABV__JX871858.1
MIPQALLFVPLLIPSLCLGKFPIYTIPDKLGPWSPIDIHHLSCPNNLVVEDEGCTSLSGFSYMELKVGYISAIKVNGFTCTGVVTEAETYTNFVGYVTTTFKRKHFRPMPDACRAAHDWKIAGDPRYEDSLQNPYPDYHWLRTVKTTKESLVIISPSVAELDPYDKSLHSRVFPGGKCLGITVSSTYCSTNHDYTIWMPVEARLGTSCDIFTNSRGKKASKGGRTCGFVDERGLYKSLKGACKLKLCGVPGLRLMDGTWVSIQTSDDIKWCPPDQLVNLHDFHSDEIEHLVVEELIKKREGCLDALESIMTTKSVSFRRLSHLRKLVPGFGKAYTIFNNTLMEADAHYKSVRTWNEVIPSKGCLKVGGRCHPPVNGVFFNGIILGPDGNVLIPEMQSSLLQQHMELLESSVIPLMHPLADPSTVFKDGDEAEDFVEVHLPDVHKQVSDVDLGLPSWGKYLLMSAGALATLILAIFLITCCRRANRTESTQRGHRESGGKVSVAPQNGKIISSWELYKSESETGM

SEQ ID NO: 31410 - protein, 524 aa, Artificial Sequence
  derived and/or modified protein sequence (wt) from glycoprotein__RABV__JX871859.1
MIPQALLSVPLLISSLCFGKFPIYTIPEKLGPWSPIDIHHLSCPNNLVVEDEGCNSLSGFSYMELKVGYISAIKVNGFTCTGVVTEAETYTNFVGYVTTTFKRKHFRPMPDACRAAYNWKTAGDPRYEESLHNPYPDYHWLRTVKTTKESLIIISPSVADLDPYDKSLHSRIFPGGKCLGITISSTYCSTNHDYTIWMPEEARLGTSCDIFTNSKGKRASKGGRTCGFVDERGLYKSLKGACKLKLCGVPGLRLMDGTWVAIQTPNETKWCSPDQLVNVHDFRSDEIEHLVVEELIRKREECLDALESIMTTKSVSFRRLSNLRKLVPGFGKAYTIFNKTLMEADAHYKSVRTWNEIIPSRGCLKVGGRCHPHVNGVFFNGIILGPDGHILIPEMQSSLLQQHMELLESSVIPLIHPLADPSTVFKDGDEAEDFVEVHLPDVHQQVSGVDLGLPDWGKYVLMSAGALATVMLTIFLITCCRRVKRTESIQQGLGESGRKVSVTPQNGKVMSSWEYYKSGGGTRL

SEQ ID NO: 31411 - protein, 524 aa, Artificial Sequence; identical to SEQ ID NO: 31357
  derived and/or modified protein sequence (wt) from glycoprotein__RABV__JX871860.1

SEQ ID NO: 31412 - protein, 524 aa, Artificial Sequence; identical to SEQ ID NO: 31272
  derived and/or modified protein sequence (wt) from glycoprotein__RABV__JX871862.1

SEQ ID NO: 31413 - protein, 524 aa, Artificial Sequence
  derived and/or modified protein sequence (wt) from glycoprotein__RABV__JX871863.1
MIPQALLFVPLLISSLCFGKFPIYTIPEKLGPWSPIDIHHLSCPNNLVAEDEGCNSLSGFSYMELKVGYISAIKVNGFTCTGVVTEAETYTNFVGYVTTTFKRKHFRPTPDACRAAYNWKMAGDPRYEESLHNPYPDYHWLRTVKTTKESLVIISPSVADLDPYDKSLHSRVFPDGKCLGITISSTYCSTNHDYTIWMPEEARLGTSCDIFTTSKGKRASKGDKICGFVDERGLYKSLKGACKLKLCGVLGLRLMDGTWVSIQTPGETKWCSPDQLVNLHDFHSDEIEHLVAEELVKKREECLDALESIMTTKSVSFRRLSHLRKLVPGFGKAYTIFNKTLMEADAHYKSVRTWNEVIPSKGCLSVGGRCHPHVNGVFFNGIILGPDGSVLIPEMQSSLLQQHMELLESSVIPLMHPLADPSTVFKDDDEAENFVEVHLPDVHKQVSGVDLGLPNWGKYLLMIAGALATLMLTIFLMTCCRRTKRTESIQQGLGESGRKVSVTPQSGKVISSWESYKSGGETRL

SEQ ID NO: 31414 - protein, 524 aa, Artificial Sequence
  derived and/or modified protein sequence (wt) from glycoprotein__RABV__JX871864.1
MIPQALLFVPLLIPSLCLGEFPIYTIPDKLGPWSPIDIHHLSCPNNLVAENDGCTSLSGFSYMELKVGYISAIKVNGFTCTGVVTEAETYTNFVGYVTTTFKRKHFRPTPDACRAAHDWKMAGDPRYEASLQNPYPDYHWLRTVKTTKESLVIISPSVADLDPYDKSLHSRVFPSGKCLGITVSSTYCSTNHDYTIWMPVEPRLGTSCDIFTNSRGKRASKGGRVCGFVDERGLYKSLKGACRLKLCGVPGIRLLDGTWVSIQTSEDIKWCPPDRLVNLHDFHSDEIEHLVVAELIKRRENCLDALESIMTTKSVSFRRLSHLRKLVPGFGKAYTIFNKTLMEADAHYKLVKTWNEFIPSKGCLEVGGRCHPHVNGVFFNGIILGPDGNVLIPEMQSSLLQQHMELLESSVIPLMHPLADPSTVFKEGDEAEDFVEVHLPDVHKQVSDVDLGLPSWGKYLLISAGALAILILAIVLIICCRRVNKTGSTQRGHRESGGKMSVVPQNGKIISSWELYKSESETGL

SEQ ID NO: 31415 - protein, 524 aa, Artificial Sequence
  derived and/or modified protein sequence (wt) from glycoprotein__RABV__JX871865.1
MIPQALLSVPLLISSLCFGKFPIYTIPEKLGPWSPIDIHHLSCPNNLVVEDEGCNSLSGFSYMELKVGYISAIKVNGFTCTGVVTEAETYTNFVGYVTTTFKRKHFRPMADACRAAYNWKTAGDPRYEESLHNPYPDYHWLRTVKTTKESLIIISPSVADLDPYDKSLHSRIFPGGKCLGITISSTYCSTNHDYTIWMPEEARLGTSCDIFTNSKGKRASKGGRTCGFVDERGLYKSLKGACKLKLCGVPGLRLMDGTWVAIQTPNETKWCSPDQLVNVHDFRSDEIEHLVVEELIRKREECLDALESIMTTKSVSFRRLSNLRKLVPGFGKAYTIFNKTLMEADAHYKSVRTWNEIIPSRGCLKVGGRCHPHVNGVFFNGIILGPDGHILIPEMQSSLLQQHMELLESSVIPLIHPLADPSTVFKDGDEAEDFVEVHLPDVHQQVSGVDLGLPDWGKYVLMSAGALATVMLTIFLITCCRRVKRTESIQQGPGESGRKVSVTPQNGKVMSSWEYYKSGGGTRL

SEQ ID NO: 31416 - protein, 524 aa, Artificial Sequence
  derived and/or modified protein sequence (wt) from glycoprotein__RABV__JX871866.1
MIPQAILFVPLLIPSLCLGEFPIYTIPDKLGPWSPIDIHHLSCPNNLVAENDGCTSLSGFSYMELKVGYISAIKVNGFTCTGVVTEAETYTNFVGYVTTTFKRKHFRPTPDACRAAHDWKMAGDPRYEASLQNPYPDYHWLRTVKTTKESLVIISPSVADLDPYDKSLHSRVFPSGKCLGITVSSTYCSTNHDYTIWMPVEPRLGTSCDIFTNSRGKRASKGGRVCGFVDERGLYKSLKGACRLKLCGVPGIRLLDGTWVSIQTSEDIKWCPPDRLVNLHDFHSDEIEHLVVAELIKRRENCLDALESIMTTKSVSFRRLSHLRKLVPGFGKAYTIFNKTLMEADAHYKSVKTWNEVIPSKGCLEVGGRCHPHVNGVFFNGIILGPDGNVLIPEMQSSLLQQHMELLESSVIPLMHPLADPSTVFKEGDEAEDFVEVHLPDVHKQVSDVDLGLPSWGKYLLISAGALAILILAIVLIICCRRVNKTGSTQRGHRESGGKMSVVPQNGKIISSWELYKSESETGL

SEQ ID NO: 31417 - protein, 524 aa, Artificial Sequence; identical to SEQ ID NO: 31249
  derived and/or modified protein sequence (wt) from glycoprotein__RABV__JX871867.1

SEQ ID NO: 31418 - protein, 524 aa, Artificial Sequence
  derived and/or modified protein sequence (wt) from glycoprotein__RABV__JX871868.1
MIPQAFLFVPLLIPSLCLGKFPIYTIPDKLGPWSPIDIHHLSCPNNLVVEDEGCTSLSGFSYMELKVGYISAIKVNGFTCTGVVTEAETYTNFVGYVTTTFKRKHFRPMPDACRAAHDWKIAGDPRYEDSLQNPYPDYHWLRTVKTTKESLVIISPSVADLDPYDKSLHSRVFPSGKCLGITVSSTYCPTNHDYTIWMPVEARLGTSCDIFTNSRGKKASKGGRTCGFVDERGLYKSLKGACKLKLCGVPGLRLMDGTWVSIQTSDDVKWCPPDQLVNLHDFHSDEIEHLVVEELIKKREGCLDALESIMTTKSVSFRRLSHLRKLVPGFGKAYTIFNNTLMEADAHYKSVRTWNEVIPSKGCLKVGGRCHPPVNGVFFNGIILGPDGNVLIPEMQSSLLQQHMELLESSVIPLMHPLADPSTVFKDGDEAEDFVEVHLPDVHKQVSDVDLGLPSWGKYLLMSAGALATLILAIFLITCCRRANRTKSTQRGHRESGGKVSVAPQNGKIISSWELYKSESETGM

SEQ ID NO: 31419 - protein, 524 aa, Artificial Sequence; identical to SEQ ID NO: 31410
  derived and/or modified protein sequence (wt) from glycoprotein__RABV__JX871869.1

SEQ ID NO: 31420 - protein, 524 aa, Artificial Sequence
  derived and/or modified protein sequence (wt) from glycoprotein__RABV__JX871870.1
MIFQALLFVPLLISSLCLGKFPIYTIPDKLGPWSPIDIHHLSCPNNLVVEDEGCTSLSGFSYMELKVGYISAIKVNGFTCTGVVTEAETYTNFVGYVTTTFKRKHFRPIPDACRAAYNWKIAGDPRYEESLQNPYPDYHWLRTVKTTKESLIIISPSVADLDPYDKSLHSRLFPGGKCLGITISSTYCSTNHDYTIWMPEEPRLGTSCDIFTNSKGKKASKGGKVCGFVDERGLYKSLKGACKLKLCGVSGLRLMDGTWVTIQTSDEIKWCPPDQLVNLHDFHSDEIEHLVVEELVKKREECLDALESIMTTKSVSFRRLSYLRKLVPGFGKAYTIFNKTLMEADAHYKSVRTWNEIIPSKGCLKVSDRCHPHVDGVFFNGIILGPDGNVLIPEMQSSLLQQHMELLESSVIPLMHPLADPSTVFKDGDEAEDFVEVHLPDVHKQISGVDLGLPSWGKYLLMIAGGLATLVLIIFLMACCRRTKRTESRRRGSGESGEKVLATPQPKKVVSSWELYKREGDARL

SEQ ID NO: 31421 - protein, 524 aa, Artificial Sequence
  derived and/or modified protein sequence (wt) from glycoprotein__RABV__JX871871.1
MIPQALLFVPLLIPSLCLGEFPIYTIPDKLGPWSPIDIHHLSCPNNLVAENDGCTSLSGFSYMELKVGYISAIKVNGFTCTGVVTEAETYTNFVGYVTTTFKRKHFRPTPDACRAAHDWKMAGDPRYEASLQNPYPDYHWLRTVKTTKESLVIISPSVADLDPYDKSLHSRVFPSGKCLGITVSSTYCSTNHDYTIWMPVEPRLGTSCDIFTNSRGKRASKGGRVCGFVDERGLYKSLKGACRLKLCGVPGIRLLDGTWVSIQTSEDIKWCPPDRLVNLHDFHSDEIEHLVVAELIKRRENCLDALESIMTTKSVSFRRLSHLRKLVPGFGKAYTIFNKTLMEADAHYKSVKTWNEVIPSKGCLEVGGRCHPHVNGVFFNGIILGPDGNVLIPEMQSSLLQQHMELLESSVIPLMHPLADPSTVFKEGDEAEDFVEVHLPDVHKQVSDVDLGLPSWGKYLLISAGALAILILAIVLIICCRRVNKTRSTQRGHRESGGKMSVVPQNGKIISSWELYKSESETGL

SEQ ID NO: 31422 - protein, 524 aa, Artificial Sequence; identical to SEQ ID NO: 31249
  derived and/or modified protein sequence (wt) from glycoprotein__RABV__JX871872.1

SEQ ID NO: 31423 - protein, 524 aa, Artificial Sequence; identical to SEQ ID NO: 31421
  derived and/or modified protein sequence (wt) from glycoprotein__RABV__JX871873.1

SEQ ID NO: 31424 - protein, 524 aa, Artificial Sequence
  derived and/or modified protein sequence (wt) from glycoprotein__RABV__JX871874.1
MILQALLFVPFLFPSLCLGKFPIYTIPEKLGPWSPIDIHHLSCPNNLVVEDEGCDSLSGFSYMELKVGYISAIKVNGFTCTGVVTEAETYTNFVGYVTTTFKRKHFRPMPDACRAAYNWKTAGDPRYEESLHNPYPDYHWLRTVKTTKESLIIISPSVADLDPYDKSLHSRVFPGGKCLGITVSSTYCSTNHDYTIWMPEEARLGTSCDIFTNSKGKRASKGGRTCGFVDERGLYKSLKGACKLKLCGVPGLRLMDGTWVAIQTPGETKWCSPDQLVNLHDFRSDEIEHLVVEELIKKREECLDALESIMTTKSVSFRRLSNLRKLVPGFGKAYTIFNKTLMEADAHYKSVRTWDEIIPSKGCLRVGGRCHPHVNGVFFNGIILGPDGHVLIPEMQSSLLQQHMELLESSVIPLIHPLADPSTVFKDGDEAEDFVEVHLPDVHKQVSGVDLGLPNWGKYVLMGAGVLATVILTIFLLTCCRRVNRTKPNQQSLGESGRKVSVTPQNGKVMSSWEYYKSEGRTSL

SEQ ID NO: 31425 - protein, 524 aa, Artificial Sequence
  derived and/or modified protein sequence (wt) from glycoprotein__RABV__JX871875.1
MIPQALLYVPLLIPSLCFGGFPIYTIPDKLGPWSPIDIHHLSCPNNLVVEDEGCTSLSGFSYMELKVGYISAIKVNGFTCTGVVTEAETYTNFVGYVTTTFKRKHFRPMPDACRAAYNWKMAGDPRYEESLQNPYPDYSWLRTVKTTKESLIIISPSVADLDPYDKSLHSRVFPGGKCLGITISSTYCSTNHDYTIWMPEEARLGTSCDIFTNSRGKRASKGGKTCGFMDERGLYKSLKGACKLKLCGVPGLRLMDGTWVTIQTSDETKWCPSDQLVNLHDFHSDEIEHLVVEELVKKREECLDALESIMTTKSVSFRRLSHLRKLVPGFGKAYTIFNKTLMEADAHYKSIRTWNEIIPSKGCLKVGGRCHPHVDGVFFNGIILGPDGNVLIPEMQSSLLQQHVELLESSVIPLMHPLADPSTVFKDGDEAEDFVEVHLPDIHKQVSGVDLGLPNWGKYLLMSAGALATLMLIILLMTCCRRANRTESIQRDPGESGRKVSITSPDGKVISSWELYKSGGETRL

SEQ ID NO: 31426 - protein, 524 aa, Artificial Sequence; identical to SEQ ID NO: 31268
  derived and/or modified protein sequence (wt) from glycoprotein__RABV__JX871876.1

SEQ ID NO: 31427 - protein, 524 aa, Artificial Sequence; identical to SEQ ID NO: 31420
  derived and/or modified protein sequence (wt) from glycoprotein__RABV__JX871877.1

SEQ ID NO: 31428 - protein, 524 aa, Artificial Sequence; identical to SEQ ID NO: 31249
  derived and/or modified protein sequence (wt) from glycoprotein__RABV__JX871879.1

SEQ ID NO: 31429 - protein, 524 aa, Artificial Sequence
  derived and/or modified protein sequence (wt) from glycoprotein__RABV__JX871880.1
MIPQALLFVPFLFPSLCLGKFPIYTIPEKLGPWSPIDIHHLSCPNNLVVEDEGCDSLSGFSYMELKVGYISAIKVNGFTCTGVVTEAETYTNFVGYVTTTFKRKHFRPMPDACRAAYNWKTAGDPRYEESLHNPYPDYHWLRTVKTTKESLIIISPSVADLDPYDKSLHSRVFPGGKCLGITISSTYCSTNHDYTIWMPEEARLGTSCDIFTNSKGKRASKGGRTCGFVDERGLYKSLKGACKLKLCGVPGLRLMDGTWVAIQTPGETKWCSPDQLVNLHDFRSDEIEHLVVEELIKKREECLDALESIMTTKSVSFRRLSNLRKLVPGFGKAYTIFNKTLMEADAHYKSIRTWDEIIPSKGCLRVGGRCHPHVNGVFFNGIILGPDGHVLIPEMQSSLLQQHMELLESSVIPLIHPLADPSTVFKDGDEAEDFVEVHLPDVHEQISGVDLGLPNWGKYVLMSAGVLATVILTIFLLTCCRRVNRTKPKQQSLGESGRKVSVTPQNGKVMSSWEYYKSEGRTSL

SEQ ID NO: 31430 - protein, 524 aa, Artificial Sequence
  derived and/or modified protein sequence (wt) from glycoprotein__RABV__JX871881.1
MIPQALLSVPLLISSLCFGKFPIYTIPEKLGPWSPIDIHHLSCPNNLVVEDEGCNSLSGFSYMELKVGYISAIKVNGFTCTGVVTEAETYTNFVGYVTTTFKRKHFRPMPDACRAAYNWKTAGDPRYEESLHNPYPDYHWLRTVKTTKESLIIISPSVADLDPYDKSLHSRIFPGGKCLGITISSTYCSTNHDYTIWMPEEARLGTSCDIFTNSKGKRASKGGRTCGFVDERGLYKSLKGACKLKLCGVPGLRLMDGTWVAIQTPNETKWCSPDQLVNVHDFRSDEIEHLVVEELIRKREECLDALESIMTTKSVSFRRLSNLRKLVPGFGKAYTIFNKTLMEADAHYKSVRTWNEIIPSRGCLKVGGRCHPHVNGVFFNGIILGPDGHILIPEMQSSLLQQHMELLESSVIPLIHPLADPSTVFKDGDEAEDFVEVHLPDVHQQVSGVDLGLPDWGKYVLMSAGALATVMLTIFLITCCRRVKRTESIQQDLGESGRKVSVTPQNGKVMSSWEYYKSGGGTRL

SEQ ID NO: 31431 - protein, 524 aa, Artificial Sequence
  derived and/or modified protein sequence (wt) from glycoprotein__RABV__JX944575.1
MVPQALLFVPLLVFPLCFGKFPIYTIPDKLGPWSPIDIHHLSCPNNLVVEDEGCTNLSGFSYMELKVGYISAIKMNGFTCTGVVTEAETYTNFVGYVTTTFKRKHFRPTPDACRAAYNWKMAGDPRYEESLHNPYPDYHWLRTVKTTKESLVIISPSVADLDPYDRSLHSRVFPGGNCSGVAVSSTYCSTNHDYTIWMPENPRLGMSCDIFTNSRGKRASKGSETCGFVDERGLYKSLKGACKLKLCGVLGLRLMDGTWVAMQTSNETKWCPPGQLVNLHDFRSDEIEHLVVEELVKKREECLDALESIMTTKSVSFRRLSHLRKLVPGFGKAYTIFNKTLMEADAHYKSVRTWNEIIPSKGCLRVGGRCHPHVNGVFFNGIILGPDGNVLIPEMQSSLLQQHMELLVSSVIPLMHPLADPSTVFKNGDEAEDFVEVHLPDVHERISGVDLGLPNWGKYVLLSAGALTALMLIIFLMTCWRRVNRSEPTQHNLRGTGREVSVTPQSGKIISSWESYKSGGETGL

SEQ ID NO: 31432 - protein, 524 aa, Artificial Sequence
  derived and/or modified protein sequence (wt) from glycoprotein__RABV__JX944576.1
MVHQVLLFVPLLVFSLCFGKFPIYTIPDKLGPWSPIDIHHLSCPNNLVVEDEGCTNLSGFSYMELKVGYISAIKVNGFTCTGVVTEAETYTNFVGYVTTTFRRKHFRPTPDACRAAYNWKLAGDPRYEESLHNPYPDYHWLRTVKTTKESLVIISPSVADLDPYDKSLHSRVFPGGKCSGITVSSTYCSTNHDYTIWMPENPRLGTSCDIFVNSRGKRASKGGKTCGFVDERGLYKSLKGACKLKLCGVPGLRLMDGTWAAIQTSDETKWCPPDQLVNLHDYRSDEIEHLVVEELVKKREECLDALESIMTTKSVSFRRLSHLRKLVPGFGKAYTIFNKTLMEADAHYKSVRTWNEIIPSKGCLRVGGRCHPHVNGVFFNGIILGPDGHVLIPEMQSSLLQQHMELLESSVIPLMHPLADPSTVFKDGDEAEDFVEVHLPDVHKLISGVDLGLPSWGKYVLMSACVLTALMLMIFLMTCCRRGNQAGSKQHGLEGTGRKVSVTSQNGKVISSWESYKSGGETRL

SEQ ID NO: 31433 - protein, 524 aa, Artificial Sequence; identical to SEQ ID NO: 30899
  derived and/or modified protein sequence (wt) from glycoprotein__RABV__JX944577.1

SEQ ID NO: 31434 - protein, 524 aa, Artificial Sequence
  derived and/or modified protein sequence (wt) from glycoprotein__RABV__JX944578.1
MVPQVLLFVPLLVFSLCFGKFPIYTIPDKLGPWSPIDIHHLSCPNNLVVEDEGCTNLSGFSYMELKVGYISAIKVNGFTCTGVVTEAETYTNFVGYVTTTFRRKHFRPTPDACRAAYNWKLAGDPRYEESLHNPYPDYHWLRTVKTTKESLVIISPSVADLDPYDKSLHSRVFPGGKCSGITISSTYCSTNHDYTIWMPENPRLGTSCDIFVNSRGKRASKGGKTCGFVDERGLYKSLKGACKLKLCGVPGLRLMDGTWAAIQTSDETKWCPPDQLVNLHDFRSDEIEHLVVEELVKKREECLDALESIMTTKSVSFRRLSHLRKLVPGFGKAYTIFNKTLMEADAHYKSVRTWNEIIPSKGCLRVGGRCHPHVNGVFFNGIILGPDGHVLIPEMQSSLLQQHMELLESSVIPLMHPLADPSTVFKDGDEAEDFVEVHLPDVHKLISGVDLGLPSWGKYVLMSAGVLTALMLMIFLMTCCRRGNQAGSKQHGLEGTGRKVSVTSQNGKVISSWESYKSGGETRL

SEQ ID NO: 31435 - protein, 524 aa, Artificial Sequence; identical to SEQ ID NO: 30899
  derived and/or modified protein sequence (wt) from glycoprotein__RABV__JX944579.1

SEQ ID NO: 31436 - protein, 524 aa, Artificial Sequence; identical to SEQ ID NO: 30899
  derived and/or modified protein sequence (wt) from glycoprotein__RABV__JX944580.1

SEQ ID NO: 31437 - protein, 524 aa, Artificial Sequence; identical to SEQ ID NO: 30899
  derived and/or modified protein sequence (wt) from glycoprotein__RABV__JX944581.1

SEQ ID NO: 31438 - protein, 524 aa, Artificial Sequence
  derived and/or modified protein sequence (wt) from glycoprotein__RABV__JX944582.1
MVPQVLWFVPLLVFSMCFGKFPIYTIPDKLGPWSPIDIHHLSCPNNLVVEDEGCTNLSGFSYMELKVGYISAIKVNGFTCTGVVTEAETYTNLVGYVTTTFKRKHFRPTPDACRAAYNWKMAGDPRYEESLHNPYPDYHWLRTVKTTKESLVIISPSVADLDPYDKSLHSRVFPSGKCSGITISSTYCSTNHDYTIWMPENPRLGTSCDIFTNSRGKRASKGSKTCGFVDERGLYKSLKGACKLKLCGVLGLRLMDGTWVAMQTSDETKWCPPDQLVNLHDFRSDEIEHLVVEELVKKREECLDALESIMTTKSVSFRRLSHLRKLVPGFGKAYTIFNKTLMEADAHYKSVRTWNEIIPSKGCLRVGGRCHPHVNGVFFNGIILGPDGHVLIPEMQSSLLQQHMELLESSVIPLMHPLADPSTVFKDGDEAEDFVEVHLPDVHKQISGVDLGLPNWGKYVLVSAGVLVVLMLAILIMTCCGRVNRPKSTQHSLEGTGRKVSVTSQSGKVISSWESYKSGGETRL

SEQ ID NO: 31439 - protein, 524 aa, Artificial Sequence
  derived and/or modified protein sequence (wt) from glycoprotein__RABV__JX944583.1
MIPQVLWFVPLLVFSMCFGKFPIYTIPDKLGPWSPIDIHHLSCPNNLVVEDEGCTNLSGFSYMELKVGYISAIKVNGFTCTGVVTEAETYTNFVGYVTTTFKRKHFRPTPDACRAAYNWKMAGDPRYEESLHNPYPDYHWLRTVKTTKESLVIISPSVADLDPYDKSLHSRVFPSGKCSGITISSTYCSTNHDYTIWMPENPRLGTSCDIFTNSRGKRASKGSKTCGFVDERGLYKSLKGACKLKLCGVLGLRLMDGTWVAMQTSDETKWCPPDQLVNLHDFRSDEIEHLVVEELVKKREECLDALESIMTTKSVSFRRLSHLRKLVPGFGKAYTIFNKTLMEADAHYKSVRTWNEIIPSKGCLRVGGRCHPHVNGVFFNGIILGPDGHVLIPEMQSSLLQQHMELLESSVIPLMHPLADPSTVFKDGDEAEDFVEVHLPDVHKQISGVDLGLPNWGKYVLVSAGVLVVLMLAIFIMTCCGRVNRPKSTQHSLEGTGRKVSVTSQSGKVISSWESYKSGGETRL

SEQ ID NO: 31440 - protein, 524 aa, Artificial Sequence; identical to SEQ ID NO: 30899
  derived and/or modified protein sequence (wt) from glycoprotein__RABV__JX944584.1

SEQ ID NO: 31441 - protein, 524 aa, Artificial Sequence
  derived and/or modified protein sequence (wt) from glycoprotein__RABV__JX944586.1
MVPQVLLFVPLLVFSMCFGKFPIYTIPDKLGPWSPIDIHHLSCPNNLVVEDEGCTNLSGFSYMELKVGYISAIKVNGFTCTGVVTEAETYTNFVGYVTTTFKRKHFRPTPDACRAAYNWKMAGDPRYEESLHNPYPDYHWLRTVKTTKESLVIISPSVADLDPYDKSLHSRVFPSGKCSGITISSTYCSTNHDYTIWMPENPRLGTSCDIFTNSRGKRASKGGKTCGFVDERGLYKSLKGACKLKLCGVLGLRLMDGTWVAMQTSDETKWCPPDQLVNLHDFRSDEIEHLVVEELVKKREECLDALESIMTTKSVSFRRLSHLRKLVPGFGKAYTIFNKTLMEADAHYKSIRTWNEIIPSKGCLRVGGRCHPHVNGVFFNGIILGPDGHVLIPEMQSSLLQQHMELLESSVIPLMHPLADPSTVFKDGDEAEDFVEVHLPDVHKQISGVDLGLPSWGKYVLVSAGVLVVLMLTIFIMTCCGRVRRPKSTQHSLGETGRKVSVTSQSGKVISSWESYKSGGETRL

SEQ ID NO: 31442 - protein, 524 aa, Artificial Sequence; identical to SEQ ID NO: 30899
  derived and/or modified protein sequence (wt) from glycoprotein__RABV__JX944587.1

SEQ ID NO: 31443 - protein, 524 aa, Artificial Sequence
  derived and/or modified protein sequence (wt) from glycoprotein__RABV__JX944588.1
MVPQVLLFVPLLVFSLCFGKFPIYTIPDKLGPWSPIDIHHLSCPNNLVVEDEGCTNLSGFSYMELKVGYISAIKVNGFTCTGVVTEAETYTNFVGYVTTTFRRKHFRPTPDACRAAYNWKLAGDPRYEESLHNPYPDYHWLRTVKTTKESLVIISPSVADLDPYDKSLHSRVFPGGKCSGITISSTYCSTNHDYTIWMPENPRLGTSCDIFVNSRGKRASKGGKTCGFVDERGLYKSLKGACKLKLCGVPGLRLMDGTWAAIQTSDETKWCPPNQLVNLHDFRSDEIEHLVVEELVKKREECLDALESIMTTKSVSFRRLSHLRKLVPGFGKAYTIFNKTLMEADAHYKSVRTWNEIIPSKGCLRVGGRCHPHVNGVFFNGIILGPDGHVLIPEMQSSLLQQHMELLESSVIPLMHPLADPSTVFKDGDEAEDFVEVHLPDVHKLISGVDLGLPSWGKYVLMSAGVLTALMLMIFLMTCCRRGNQAGSKQHGLEGTGRKVSVTSQNGKVISSWESYKSGGETRL

SEQ ID NO: 31444 - protein, 524 aa, Artificial Sequence
  derived and/or modified protein sequence (wt) from glycoprotein__RABV__JX944593.1
MVPQVLLFVPLLAFSMCFGKFPIYTIPDKLGPWSPIDIHHLSCPNNLVVEDEGCTNLSGFSYMELKVGYISAIKVNGFTCTGVVTEAETYTNFVGYVTTTFKRKHFRPTPDACRAAYNWKMAGDPRYEESLHNPYPDYHWLRTVKTTKESLVIISPSVADLDPYDKSLHSRVFPSGKCSGITISSTYCSTNHDYTIWMPENPRLGTSCDIFTNSRGKRASKGGKTCGFVDERGLYKSLKGACKLKLCGVLGLRLMDGTWVAMQTSDETKWCPPDQLVNLHDFRSDEIEHLVVEELVKKREECLDALESIMTTKSVSFRRLSHLRKLVPGFGKAYTIFNKTLMEADAHYKSVRTWNEIIPSKGCLRVGGRCHPHVKGVFFNGIILGPDGHVLIPEMQSSLLQQHMELLESSVIPLMHPLADPSTVFKDGDEAEDFVEVHLPDVHKQISGVDLGLPSWGKYVLVSAGVLVVLMLTIFIITCCGRVHRPKSTQHGLGGTGRKVSVTSQSGKVISSWESYKSGGETRL

SEQ ID NO: 31445 - protein, 524 aa, Artificial Sequence
  derived and/or modified protein sequence (wt) from glycoprotein__RABV__JX987718.1
MVPQVLLFVPLLVFSMCFGKFPIYTIPDKLGPWSPIDIHHLSCPNNLVVEDEGCTNLSGFSYMELKVGYISAIKVNGFTCTGVVTEAETYTNFVGYVTTTFKRKHFRPTPDACRAAYNWKMAGDPRYEESLHNPYPDYHWLRTVKTTKESLVIISPSVADLDPYDKSLHSRVFPSGKCLGITISSTYCSTNHDYTIWMPENPRLGTSCDIFTNSRGKRASKGSKTCGFVDERGLYKSLKGACKLKLCGVLGLRLMDGTWVAMQTSDETKWCPPDQLVNLHDFRSDEIEHLVVEELVKKREECLDALESIMTTKSVSFRRLSHLRKLVPGFGKAYTIFNKTLMEADAHYKSVRTWNEIIPSKGCLRVGGRCHPHVNGVFFNGIILGPDGHVLIPEMQSSLLQQHMELLESSVIPLMHPLADPSTVFKEGDEAEDFVEVHLPDVHKQISGVDLGLPSWGKYVLVSAGVLVVLMLTIFIMTCCGRVHRPKSTQHSLGGTGRKVSVTSQSGKVISSWESYKSGGETRL

SEQ ID NO: 31446 - protein, 524 aa, Artificial Sequence
  derived and/or modified protein sequence (wt) from glycoprotein__RABV__JX987719.1
MVPQVLLFVPLLVFSMCFGKFPIYTIPDKLGPWSPIDIHHLSCPNNLVVEDEGCTNLSGFSYMELKVGYISAIKVNGFTCTGVVTEAETYTNFVGYVTTTFKRKHFRPTPDACRAAYNWKLAGDPRYEESLHNPYPDYHWLRTVKTTKESLVIISPSVADLDPYDKSLHSRVFPSGKCLGITISSTYCSTNHDYTIWMPENPRLGTSCDIFTNSRGKRASKGSKTCGFVDERGLYKSLKGACKLKLCGVLGLRLMDGTWVAMQTSDETKWCPPDQLVNLHDFRSDEIEHLVVEELVKKREECLDALESIMTTKSVSFRRLSHLRKLVPGFGKAYTIFNKTLMEADAHYKSIRTWNEIIPSKGCLRVGGRCHPHVNGVFFNGIILGPDGHVLIPEMQSSLLQQHMELLESSVIPLMHPLADPSTVFKDGDEAEDFVEVHLPDVHKQISGVDLGLPSWGKYVLVSAGVLVVLMLTIFIMTCCGRVRRPKSTQHSLGGTGRKVSVTSQSGKVISSWESYKSGGETRL

SEQ ID NO: 31447 - protein, 524 aa, Artificial Sequence; identical to SEQ ID NO: 31445
  derived and/or modified protein sequence (wt) from glycoprotein__RABV__JX987720.1

SEQ ID NO: 31448 - protein, 524 aa, Artificial Sequence
  derived and/or modified protein sequence (wt) from glycoprotein__RABV__JX987721.1
MVPQVLLFVPLLVFSLCFGKFPIYTIPDKLGPWSPIDIHHLSCPNNLVVEDEGCTNLSGFSYMELKVGYISAIKVNGFTCTGVVTEAETYTNFVGYVTTTFRRRHFRPTPDTCRAAYNWKLAGDPRYEESLHNPYPDYHWLRTVKTTKESLVIISPSVADLDPYDKSLHSRVFPGGKCSGITVSSTYCSTNHDYTIWMPENPRLGTSCDIFVNSRGKRASKGGKTCGFVDERGLYKSLKGACKLKLCGVPGLRLMDGTWAAIQTSDETKWCPPDQLVNLHDFRSDEIEHLVVEELVKKREECLDALESIMTTKSVSFRRLSHLRKLVPGFGKAYTIFNKTLMEADAHYKSVRTWNEIIPSKGCLRVGGRCHPHVNGVFFNGIILGPDGHVLIPEMQSSLLQQHMELLESSVIPLMHPLADPSTVFKDGGEAEDFVEVHLPDVHKLISGVDLGLPSWGKYVLMSAGVLTALMLMIFLMTCCRRGNQAGSKQHGLEGTGRKVSVTSQNGKVISSWESYKSGGETRL

SEQ ID NO: 31449 - protein, 524 aa, Artificial Sequence; identical to SEQ ID NO: 31445
  derived and/or modified protein sequence (wt) from glycoprotein__RABV__JX987723.1

SEQ ID NO: 31450 - protein, 524 aa, Artificial Sequence
  derived and/or modified protein sequence (wt) from glycoprotein__RABV__JX987724.1
MVPQVLLFVPLLVFSLCFGKFPIYTIPDKLGPWSPIDIHHLSCPNNLVVEDEGCTNLSGFSYMELKVGYISAIKVNGFTCTGVVTEAETYTNFVGYVTTTFRRKHFRPTPDACRAAYNWKLAGDPRYEESLHNPYPDYHWLRTVKTTKESLVIISPSVADLDPYDKSLHSRVFPGGKCSGITVSSTYCSTNHDYTIWMPENPRLGTSCDIFVNSRGKRASKGGKTCGFVDERGLYKSLKGACKLKLCGVPGLRLMDGTWAAIQTSDETKWCPPDQLVNLHDFRSDEIEHLVVEELVKKREECLDALESIMTTKSVSFRRLSHLRKLVPGFGKAYTIFNKTLMEADAHYKSVRTWNEIIPSKGCLRVGGRCHPHVNGVFFNGIILGPDGHVLIPEMQSSLLQQHMELLESSVIPLMHPLADPSTVFKDGDEAEDFVEVHLPDVHKLISGVDLGLPSWGKYVLMSAGVLTALMLMIFLMTCCRRGNQAGSKQHGLERTGRKVSVTSQNGKVISSWESYKSGGETRL

SEQ ID NO: 31451 - protein, 524 aa, Artificial Sequence
  derived and/or modified protein sequence (wt) from glycoprotein__RABV__JX987725.1
MVPQVLWFVPLLVFSMCFGKFPIYTIPDKLGPWSPIDLHHLSCPNNLVVEDEGCTNLSGFSYMELKVGYISAIKVNGFTCTGVVTEAETYTNFVGYVTTTFKRKHFRPTPDACRAAYNWKMAGDPRYEESLHNPYPDYHWLRTVKTTKESLVIISPSVADLDPYDKSLHSRVFPSGKCSGITISSTYCSTNHDYTIWMPENPRLGTSCDIFTNSRGKRASKGSKTCGFVDERGLYKSLKGACKLKLCGVLGLRLMDGTWVAMQTSDETKWCPPDQLVNLHDFRSDEIEHLVVEELVKKREECLDALESIMTTKSVSFRRLSHLRKLVPGFGKAYTIFNKTLMEADAHYKSVRTWNEIIPSKGCLRVGGRCHPHVNGVFFNGIILGPDGHVLIPEMQSSLLQQHMELLESSVIPLMHPLADPSTVFKDGDEAEDFVEVHLPDVHKQISGVDLGLPNWGKYVLVSAGVLVVLMLAIFIMTCCGRVNRPKSTQHSLEGTGRKVSVTSQSGKVISSWESYKSGGETRL

SEQ ID NO: 31452 - protein, 524 aa, Artificial Sequence; identical to SEQ ID NO: 30899
  derived and/or modified protein sequence (wt) from glycoprotein__RABV__JX987727.1

SEQ ID NO: 31453 - protein, 524 aa, Artificial Sequence
  derived and/or modified protein sequence (wt) from glycoprotein__RABV__JX987728.1
MVPQALLFVPLLVFSLCFGKFPIYTIPDKLGPWSPIDIHHLSCPNNLVVEDEGCTNLSGFSYMELKVGYISAIKVNGFTCTGVVTEAETYTNFVGYVTTTFKRKHFRPTPDACRAAYNWKMAGDPRYEESLHNPYPDYHWLRTVKTTKESLVIISPSVADLDPYDKSLHSRVFPSGKCSGITVSSTYCSTNHDYTIWMPENPRLGTSCDIFTNSRGKRASKGSKTCGFVDERGLYKSLKGACKLKLCGVLGLRLMDGTWVAMQTSDETKWCPPDQLVNLHDFRSDEIEHLVVEELVKKREECLDALESIMTTKSVSFRRLSHLRKLVPGFGKAYTIFNKTLMEADAHYKSVRTWNEIIPSKGCLRVGGRCHPHVNGVFFNGIILGPDGHVLIPEMQSSLLQQHMELLESSVIPLMHPLADPSTVFKDGDEAEDFVEVHLPDVHKQVSGVDLGLPNWGKYVLLSAGALIALMLMIFLMTCCRRVNRPESTQPSLGGTGRKVSITSQSGKVISSWESYKSGGETRL

SEQ ID NO: 31454 - protein, 524 aa, Artificial Sequence
  derived and/or modified protein sequence (wt) from glycoprotein__RABV__JX987729.1
MVPQVLLFVPLLVFPLCSGKFPIYTIPDKLGPWSPIDIHHLSCPNNLVVEDEGCTNLSGFSYMELKVGYISAIKVNGFTCTGVVTEAETYTNFVGYVTTTFRRKHFRPTPDACRAAYNWKMAGDPRYEESLHNPYPDYHWLRTVKTTKESLVIISPSVADLDPYDKSLHSRVFPSGKCSGITVSSTYCSTNHDYTIWMPENPRLGTSCDIFTNSRGKRASKGSKTCGFVDERGLYKSLKGACKLKLCGVLGLRLMDGTWIAMQTSDETKWCPPDQLVNLHDFRSDEIEHLVVEELVKKREECLDALESIMTTKSVSFRRLSHLRKLVPGFGKAYTIFNKTLMEADAHYKSVRTWNEIIPSKGCLRVGGRCHPHVNGVFFNGIILGPDGHVLIPEMQSSLLQQHMELLESSVIPLMHPLADPSTVFKDGDEAEDFVEVHLPDVHKQVSGVDLGLPNWGKYVLLSAGALIALMLMIFLMTCCRKVNRPESTQRSLGGTGRKVSITSQSGKVISSWESYKSGGETRL

SEQ ID NO: 31455 - protein, 524 aa, Artificial Sequence
  derived and/or modified protein sequence (wt) from glycoprotein__RABV__JX987730.1
MVPQALLFVPLLAFPMCFGKFPIYTIPDKLGPWSPIDIHHLSCPNNLVVEDEGCTNLSGFSYMELKVGYISAIKVNGFTCTGVVTEAETYTNFVGYVTTTFKRKHFRPTPDACRAAYNWKMAGDPRYEESLHNPYPDYHWLRTVKTTKESLIIISPSVADLDPYDKSLHSRVFPSGKCLGITISSTYCSTNHDYTIWMPENLRLGTSCDIFTNSRGKRASKGSKTCGFVDERGLYKSLKGACKLKLCGVLGLRLMDGTWVAMPTSDETKWCPPDQLVNLHDFRSDEIEHLVVEELVKKREECLDALESIMTTKSVSFRRLSHLRKLVPGFGKAYTIFNKTLMEADAHYKSVRTWNEIIPSKGCLRVGGRCHPHVNGVFFNGIILGPDGHVLIPEMQSSLLQQHMELLESSVIPLMHPLADPSTVFKDGDEAEDFVEVHLPDVHKQISGVDLGLPNWGKYVLIIAGVLIAMILTIFLMTCCGRGNRPKSTQHSLGGIGRKVSSTSQSGKVISSWESYKSGGETRL

SEQ ID NO: 31456 - protein, 524 aa, Artificial Sequence; identical to SEQ ID NO: 31455
  derived and/or modified protein sequence (wt) from glycoprotein__RABV__JX987731.1

SEQ ID NO: 31457 - protein, 524 aa, Artificial Sequence
  derived and/or modified protein sequence (wt) from glycoprotein__RABV__JX987732.1
MVPQALLFVPLLVFPLCFGKFPIYTIPDKLGPWSPIDIHHLSCPNNLVVEDEGCTNLSGFSYMELKVGYISAIKVNGFTCTGVVTEAETYTNFVGYVTTTFKRKHFRPTPDACRAAYNWKMAGDPRYEESLHNPYPDYHWLRTVKTTKESLVIISPSVADLDPYDKSLHSRVFPSGKCSGITVSSTYCSTNHDYTIWMPENPRLGTSCDIFTNSRGKRASKGSKTCGFVDERGLYKSLKGACKLKLCGVLGLRLMDGTWVAMQTSDETKWCPPDQLVNLHDFRSDEIEHLVVEELVKKREECLDALESIMTTKSVSFRRLSHLRKLVPGFGKAYTIFNKTLMEADAHYKSVRTWNEIIPSKGCLRVGGRCHPHVNGVFFNGIILGPDGHVLIPEMQSSLLQQHMELLESSVIPLMHPLADPSTVFKDGDEAEDFVEVHLPDVHKQVSGVDLGLPNWGKYVLLSAGALIALMLIIFLMTCCRRVNRPESTQRSLGGTGRKVSVTSQSGKVISSWESYKSGGETRL

SEQ ID NO: 31458 - protein, 524 aa, Artificial Sequence
  derived and/or modified protein sequence (wt) from glycoprotein__RABV__JX987733.1
MVPQALLFVPLLAFPMCFGKFPIYTIPDKLGPWSPIDIHHLSCPNNLVVEDEGCTNLSGFSYMELKVGYISAIKVNGFTCTGVVTEAETYTNFVGYVTTTFKRKHFRPTPDACRAAYNWKMAGDPRYEESLHNPYPDYHWLRTVKTTKESLIIISPSVADLDPYDKSLHSRVFPSGKCLGITISSTYCSTNHDYTIWMPENLRLGTSCDIFTNSRGKRASKGSKTCGFVDERGLYKSLKGACKLKLCGVLGLRLMDGTWVAMQTSDETKWCPPDQLVNLHDFRSDEIEHLVVEELVKKREECLDALESIMTTKSVSFRRLSHLRKLVPGFGKAYTIFNKTLMEADAHYKSVRTWNEIIPSKGCLRVGGRCHPHVNGVFFNGIILGPDGHVLIPEMQSSLLQQHMELLESSVIPLMHPLADPSTVFKDGDEAEDFVEVHLPDVHKQISGVDLGLPNWGKYVLIIAGVLIAMILTIFLMTCCGRGNRPESTQHSLGGIGRKVSATSQSGKVISSWESYKSGGETRL

SEQ ID NO: 31459 - protein, 524 aa, Artificial Sequence
  derived and/or modified protein sequence (wt) from glycoprotein__RABV__JX987734.1
MVPQALSFVPLLVFPLCFGKFPIYTIPDKLGPWSPIDIHHLSCPNNLVVEDEGCTNLSGFSYMELKVGYISAIKVNGFTCTGVVTEAETYTNFVGYVTTTFKRKHFRPTPDACRAAYNWKMAGDPRYEESLHNPYPDYHWLRTVKTTKESLVIISPSVADLDPYDKSLHSRVFPSGKCLGITVSSTYCSTNHDYTIWMPENPRLGTSCDIFTNSRGKRASKGSKTCGFVDERGLYKSLKGACKLKLCGVLGLRLMDGTWVAMQTSDETKWCPPDQLVNIHDFRSDEIEHLVVEELVKKREECLDALESIMTTKSVSFRRLSHLRKLVPGFGKAYTIFNKTLMEADAHYKSVRTWNEIIPSKGCLRVGGRCHPHVNGVFFNGIILGPDGHVLIPEMQSSLLQQHMELLESSVIPLMHPLADPSTVFKDGDEAEDFVEVHLPNVHKQVSGVDLGLPNWGKYVLLSAGALIALMLIIFLMTCCRRVNRSESTQRSLGGAGRKVSITSQGGKVISSWESYKSGGETRL

SEQ ID NO: 31460 - protein, 524 aa, Artificial Sequence; identical to SEQ ID NO: 31338
  derived and/or modified protein sequence (wt) from glycoprotein__RABV__JX987749.1

SEQ ID NO: 31461 - protein, 524 aa, Artificial Sequence
  derived and/or modified protein sequence (wt) from glycoprotein__RABV__KC169986.1
MIPQVLLFVPLLVFSSCFGKFPIYTIPDKLGPWSPIDIHHLSCPNNLVVEDEGCTNLSGFSYMELKVGYISAIKVNGFTCTGVVTEAETYTNFVGYVTTTFKRKHFRPMPGACRAAYNWKMAGDPRYEESLHNPYPDYHWLRTVKTTKESLVIISQSVADLDPYDKSLHSRVFPGGKCSGITVSSTCCSTNHDYTIWMPENPRLGTSCDIFTNSRGKRASKGGKTCGFVDERGLYKSLKGACKLKLCGVLGLRLMDGTWVAIQTSDEIKWCSPDQLVNLHDFHSDEIEHLVVEELVKKREECLDALETIMTTKSVSFRRLSHLRKLVPGFGKAYTIFNKTLMEADAHYKSIRTWDEIIPSKGCLRVGGRCHPHVNGVFFNGIILGPDGHVLIPEMQSSLLHQHMELLESSVIPLMHPLADPSAVFKDGDEAEDFVEVHLPDVHKQISGVDLGLPNWGKYVLISAGALTASMLMIFLMTCCRKANRAESIQHNPGETGRKVSVTSHNGRVISSWESYKSGGETKL

SEQ ID NO: 31462 - protein, 524 aa, Artificial Sequence
  derived and/or modified protein sequence (wt) from glycoprotein__RABV__KC171643.1
MVPQALLFVPLLVFSMCFGKFPIYTIPDKLGPWSPIDIHHLSCPNNLVVEDEGCTNLSGFSYMELKVGYISAIKVNGFTCTGVVTEAETYTNFVGYVTTTFKRKHFRPTPDACRAAYNWKMAGDPRYEESLHNPYPDYHWLRTVKTTKESLVIISPSVADLDPYDKSLHSRVFPNGKCSGITISSTYCPTNHDYTIWLPENPRLGTSCDIFTNSRGKRASKGSKTCGFVDERGLYKSLKGACKLKLCGVLGLRLMDGTWVAMQASDETKWCPPDQLVNLHDFRSDEIEHLVVEELVKKREECLDALESIMTTKSVSFRRLSHLRKLVPGFGKAYTIFNKTLMEADAHYKSVRTWNEIIPSKGCLRVGGRCHPHVNGVFFNGIILGPDGHVLIPEMQSSLLQQHMELLESSVVPLMHPLADPSTVLKDGDEAENFVEVHLPDVHKQISGVDLGLPNWGKYVLVSAGVLIALMLIIFLMTCCGRVNRPKSTQHNLGGTGRKVSVTPQSGKVISSWESYKSGGGTRL

SEQ ID NO: 31463 - protein, 524 aa, Artificial Sequence; identical to SEQ ID NO: 30814
  derived and/or modified protein sequence (wt) from glycoprotein__RABV__KC171644.1

SEQ ID NO: 31464 - protein, 524 aa, Artificial Sequence; identical to SEQ ID NO: 30819
  derived and/or modified protein sequence (wt) from glycoprotein__RABV__KC171645.1

SEQ ID NO: 31465 - protein, 524 aa, Artificial Sequence
  derived and/or modified protein sequence (wt) from glycoprotein__RABV__KC252633.1
MVPLVLLFVPLLVFPLCSGKFPIYTIPDKLGPWSPIDIHHLSCPNNLVVEDEGCANLSGFSYMELKVGYISAIKVNGFTCTGVVTEAETYTNFVGYVTTTFRRKHFRPTPDACRAAYNWKMAGDPRYEESLHNPYPDYHWLRTVKTTKESLVIISPSVADLDPYDKSLHSRVFPSGKCSGITVSSTYCSTNHDYTIWMPENLRLGTSCDIFTNSRGKRASKGSKTCGFVDERGLYKSLKGACKLKLCGVLGLRLMDGTWVAMQTSGETKWCPPDQLVNLHDFRSDEIEHLVVEELVKKREECLDALESIMTTKSVSFRRLSHLRKLVPGFGKAYTIFNKTLMEADAHYKSVRTWNEIIPSKGCLRVGGRCHPHVNGVFFNGIILGPDGHVLIPEMQSSLLQQHMELLESSVIPLMHPLADPSTVFKDGDEAEDFVEVHLPDVHKQVSGVDLGLPNWGKYILLSAGALIALMLMIFLMTCCRKFNRPESTQRSLGGTGRKVSITSQGGKVISSWESYKSGGETRL

SEQ ID NO: 31466 - protein, 524 aa, Artificial Sequence
  derived and/or modified protein sequence (wt) from glycoprotein__RABV__KC737850.1
MVPQALLFVPLLAVSFCFGKFPIYTIPDKLGPWSPIDIHHLSCPNNLVVEDEGCTNLSGFSYMELKVGYISAIKVNGFTCTGVVTEAETYTNFVGYVTTTFKRKHFRPTPDACRSAYNWKMAGDPRYEESLHNPYPDYHWLRTVKTTKESLVIISPSVADLDPYDKSLHSRVFPSGKCSGITVSSTYCSTNHDYTIWLPENPRLGTSCDIFTNSRGKRASKGSKTCGFVDERGLYKSLKGACKLKLCGVLGLRLMDGTWVAMQTSDETKWCPPDQLVNLHDFRSDEIEHLVVEELVKKREECLDALESIMTTKSVSFRRLSHLRKLVPGFGKAYTIFNKTLMEADAHYKSVRTWNEIIPSKGCLRVGGRCHPHVNGVFFNGIILGPDGHVLIPEMQSSLLQQHMELLESSVIPLMHPLADPSTVFKDGDEAEDFVEVHLPDVHKQVSGVDLGLPNWGKYVLTSAGVLIALMLIIFLMTCCRRVNRSDSTQRSLGRTGRKVSVTSQSGKVISSWESYKSGGETRL

SEQ ID NO: 31467 - protein, 524 aa, Artificial Sequence
  derived and/or modified protein sequence (wt) from glycoprotein__RABV__KC762941.1
MILQILLFVPLLVFSSCFGKFPIYTIPDKLGPWSPIDIHHLSCPNNLVVEDEGCTNLSGFSYMELKVGYISAIKVNGFTCTGVVTEAETYTNFVGYVTTTFKRKHFHPMPDACRAAYNWKMAGDPRYEESLHNPYPDYHWLRTVKTTKESLVIISPSVADLDPYDKSLHSRVFPGGKCSGITVSSTCCSTNHDYTIWMPENPRLGTSCDIFTNSRGKRASKGGKTCGFVDERGLYKSLKGACKMKLCGVLGLRLMDGTWVAIQTSDEVKWCSPDQLVNLHDFHSDEIEHLVVEELVKKREECLDALETIMTTKSVSFRRLSHLRKLVPGFGKAYTIFNKTLMEADAHYKSIQTWNEIIPSKGCLRVGGRCHPHVNGVFFNGIILGPDGHVLIPEMQSSLLHQHMELLESSVIPLMHPLADPSTVFKDGDEAEDFVEVHLPEVHKQISGVDLGLPNWGKYVLISAGALTALMLMIFLMTCCRKTNRPESIQHSPGETERKVSVTSHNGRVISSWESYKSGGETKL

SEQ ID NO: 31468 - protein, 524 aa, Artificial Sequence
  derived and/or modified protein sequence (wt) from glycoprotein__RABV__KC792172.1
MVPQALLFVPLLAFPMCFGKFPIYTIPDKLGPWSPIDIHHLSCPNNLVVEDEGCTNLSGFSYMELKVGYISAIKVNGFTCTGVVTEAETYTNFVGYVTTTFKRKHFRPTPDACRAAYNWKMAGDPRYEESLHNPYPDYHWLRTVKTTKESLIIISPSVADLDPYDKSLHSRVFPSGKCLGITISSTYCSTNHDYTIWMPENVRLGTSCDIFTNSRGKKASKGSKTCGFVDERGLYKSLKGACKLKLCGVLGLRLMDGTWVAMPTSDETKWCPPDQLVNLHDFRSDEIEHLVVEELVRKREECLDALESIMTTKSVSFRRLSHLRKLVPGFGKAYTIFNKTLMEADAHYKSVRTWNEIIPSKGCLRVGGRCHPHVNGVFFNGIILGPDGHVLIPEMQSSLLQQHMELLESSVIPLMHPLADPSTVFKDGDEAEDFVEVHLPDVHKQISGVDLGLPNWGKYVLIIAGVLIAMILTIFLMTCCGRGNRPKSTQHSLGGIGRKVSSTSQSGKVISSWESYKSGGETRL

SEQ ID NO: 31469 - protein, 524 aa, Artificial Sequence
  derived and/or modified protein sequence (wt) from glycoprotein__RABV__KC792173.1
MVPQALLFVPLLAFPMCFGKFPIYTIPDKLGPWSPIDIHHLSCPNNLVVEDEGCTNLSGFSYMELKVGYISAIKVNGFTCTGVVTEAETYTNFVGYVTTTFKRKHFRPTPDACRAAYNWKMAGDPRYEESLHNPYPDYHWLRTVKTTKESLIIISPSVADLDPYDKSLHSRVFPSGKCLGITISSTYCSTNHDYTIWMPENLRLGTSCDIFTNSRGKRASKGSKTCGFVDERGLYKSLKGSCKLKLCGVLGLRLMDGTWVAMQTSDETKWCPPDQLVNLHDFRSDEIEHLVVEELVKKREECLDALESIMTTKSVSFRRLSHLRKLVPGFGKAYTIFNKTLMEADAHYKSVRTWNEIIPSKGCLRVGGRCHPHVNGVFFNGIILGPDGHVLIPEMQSSLLQQHMELLESSVIPLMHPLADPSTVFKDGDEAEDFVEVHLPDVHKQISGVDLGLPNWGKYVLIIAGVLIAMILTILLMTCCGRGNRPKSTQHSLGGIGRKVSATSQSGKVISSWESYKSGGETRL

SEQ ID NO: 31470 - protein, 524 aa, Artificial Sequence
  derived and/or modified protein sequence (wt) from glycoprotein__RABV__KC792174.1
MVPQALLFVPLLAFPMCFGKFPIYTIPDKLGPWSPIDIHHLSCPNNLVVEDEGCTNLSGFSYMELKVGYISAIKVNGFTCTGVVTEAETYTNFVGYVTTTFKRKHFRPTPDACRAAYNWKMAGDPRYEESLHNPYPDYHWLRTVKTTKESLIIISPSVADLDPYDKSLHSRVFPSGKCLGITISSTYCSTNHDYTIWMPENLRLGTSCDIFTNSRGKRASKGSKTCGFVDERGLYKSLKGSCKLKLCGVLGLRLMDGTWVAMQTSDETKWCPPDQLVNLHDFRSDEIEHLVVEELVRKREECLDALESIMTTKSVSFRRLSHLRKLVPGFGKAYTIFNKTLMEADAHYKSVRTWNEIIPSKGCLRVGGRCHPHVNGVFFNGIILGPDGHVLIPEMQSSLLQQHMELLESSVIPLMHPLADPSTVFKDGDEAEDFVEVHLPDVHKQISGVDLGLPNWGKYVLIIAGVLIAMILTIFLMTCCGRGNRPKSTQHSLGGIGRKVSATSQSGKVISSWESYKSGGETRL

SEQ ID NO: 31471 - protein, 524 aa, Artificial Sequence
  derived and/or modified protein sequence (wt) from glycoprotein__RABV__KC792175.1
MVPQALLFVPLLAFPMCFGKFPIYTIPDKLGPWSPIDIHHLSCPNNLVVEDEGCTNLSGFSYMELKVGYISAIKVNGFTCTGVVTEAETYTNFVGYVTTTFKRKHFRPTPDACRAAYNWKMAGDPRYEESLHNPYPDYHWLRTVKTTKESLIIISPSVADLDPYDKSLHSRVFPSGKCLGITISSTYCSTNHDYTIWMPENLRLGTSCDIFTNSRGKRASKGSKTCGFVDERGLYKSLKGSCKLKLCGVLGLRLMDGTWVAMQTSDETKWCPPDQLVNLHDFRSDEIEHLVVEELVKKREECLDALESIMTTKSVSFRRLSHLRKLVPGFGKAYTIFNKTLMEADAHYKSVRTWNEIIPSKGCLRVGGRCHPHVNGVFFNGIILGPDGHVLIPEMQSSLLQQHMELLESSVIPLMHPLADPSTVFKDGDEAEDFVEVHLPDVHKQISGVDLGLPNWGKYVLIIAGVLIAMILTIFLMTCCRRGNRPKSTQHSLGGIGRKVSATSQSGKVISSWESYKSGGETRL

SEQ ID NO: 31472 - protein, 524 aa, Artificial Sequence
  derived and/or modified protein sequence (wt) from glycoprotein__RABV__KC792176.1
MVPQALLFVPLLAFPMCFGKFPIYTIPDKLGPWSPIDIHHLSCPNNLVVEDEGCTNLSGFSYMELKVGYISAIKVNGFTCTGVVTEAETYTNFVGYVTTTFKRKHFRPTPDACRAAYNWKMAGDPRYEESLHNPYPDYHWLRTVKTTKESLIIISPSVADLDPYDKSLHSKVFPSGKCLGITISSTYCSTNHDYTIWMPENVRLGTSCDIFTNSRGKRASKGSKTCGFVDERGLYKSLKGACKLKLCGVLGLRLMDGTWVAMPTSDETKWCPPDQLVNLHDFRSDEIEHIVVEELVRKREECLDALESIMTTKSVSFRRLSHLRKLVPGFGKAYTIFNKTLMEADAHYKSVRTWNEIIPSKGCLRVGGRCHPHVNGVFFNGIILGPDGHVLIPEMQSSLLQQHMELLESSVIPLMHPLADPSTVFKDGDEAEDFVEVHLPDVHKQISGVDLGLPNWGKYVLIIAGVLIAMILTIFLMTCCGRGNRPKSTQHSLGGIGRKVSSTSQSGKVISSWESYKSGGETRL

SEQ ID NO: 31473 - protein, 524 aa, Artificial Sequence
  derived and/or modified protein sequence (wt) from glycoprotein__RABV__KC792177.1
MVPQALLFVPLLAFPMCFGKFPIYTIPDKLGPWSPIDIHHLSCPNNLVVEDEGCTNLSGFSYMELKVGYISAIKVNGFTCTGVVTEAETYTNFVGYVTTTFKRKHFRPTPDACRAAYNWKMAGDPRYEESLHNPYPDYHWLRTVKTTKESLIIISPSVADLDPYDKSLHSRVFPSGKCLGITISSTYCSTNHDYTIWMPENVRLGTSCDIFTNSRGKRASKGSKTCGFVDERGLYKSLKGACKLKLCGVLGLRLMDGTWVAMPTSDETKWCPPDQLVNLHDFRSDEIEHLVVEELVRKREECLDALESIMTTKSVSFRRLSHLRKLVPGFGKAYTIFNKTLMEADAHYKSVRTWNEIIPSKGCLRVGGRCHPHVNGVFFNGIILGPDGHVLIPEMQSSLLQQHMELLESSVIPLMHPLADPSTVFKDGDEAEDFVEVHLPDVHKQISGVDLGLPNWGKYVLIIAGVLIAMILTIFLMTCCGRGNQPRSTQHSLGGIGRKVSSTSQSGKVISSWESYKSGGETRL

SEQ ID NO: 31474 - protein, 524 aa, Artificial Sequence
  derived and/or modified protein sequence (wt) from glycoprotein__RABV__KC792178.1
MVPQALLFVPLLAFPMCFGKFPIYTIPDKLGPWSPIDIHHLSCPNNLVVEDEGCTNLSGFSYMELKVGYISAIKVNGFTCTGVVTEAETYTNFVGYVTTTFKRKHFRPTPDACRAAYNWKMAGDPRYEESLHNPYPDYHWLRTVKTTKESLIIISPSVADLDPYDKSLHSRVFPSGKCLGITISSTYCSTNHDYTIWMPENVRLGTSCDIFTNSRGKRASKGSKTCGFVDERGLYKSLKGACKLKLCGVLGLRLMDGTWVAMPTSDETKWCPPDQLVNLHDFRSDEIEHLVVEELVRKREECLDALESIMTTKSVSFRRLSHLRKLVPGFGKAYTIFNKTLMEADAHYKSVRTWNEIIPSKGCLRVGGRCHPHVNGVFFNGIILGPDGHVLIPEMQSSLLQQHMELLESSVIPLMHPLADPSTVFKDGDEAEDFVEVHLPDVHKQISGVDLGLPNWGKYVLIIAGVLIAMILTIFLMTCCGRGNRPKSTQHSLGGIGRKVSSTSQSGKVISSWESYKSGGETRL

SEQ ID NO: 31475 - protein, 524 aa, Artificial Sequence
  derived and/or modified protein sequence (wt) from glycoprotein__RABV__KC792179.1
MVPQALLFVPLLAFPMCFGKFPIYTIPDKLGPWSPIDIHHLSCPNNLVVEDEGCTNLSGFSYMELKVGYISAIKVNGFTCTGVVTEAETYTNFVGYVTTTFRRKHFRPTPDACRAAYNWKIAGDPRYEESLHNPYPDYHWLRTVKTTKESLIIISPSVADLDPYDKSLHSRVFPSGKCLGITISSTYCSTNHDYTIWMPENLRLGTSCDIFTNSRGKRASKGSRTCGFVDERGLYKSLKGACKLKLCGVLGLRLMDGTWVAMQTSDETKWCPPDQLVNLHDFRSDEIEHLVVEELVKKREECLDALESIMTTKSVSFRRLSHLRKLVPGFGKAYTIFNKTLMEADAHYKSVRTWNEIIPSKGCLRVGGRCHPHVNGVFFNGIILGPDGHVLIPEMQSSLLQQHMELLESSVIPLMHPLADPSTVFKDGDEAEDFVEVHLPDVHKQISGVDLGLPNWGKYVLIIAGVLIAMILTIFLMTCCGRGNRPKSTQHSLGGIGRKVSATSQSGKVISSWESYKNGGETRL

SEQ ID NO: 31476 - protein, 524 aa, Artificial Sequence; identical to SEQ ID NO: 31472
  derived and/or modified protein sequence (wt) from glycoprotein__RABV__KC792180.1

SEQ ID NO: 31477 - protein, 524 aa, Artificial Sequence; identical to SEQ ID NO: 31474
  derived and/or modified protein sequence (wt) from glycoprotein__RABV__KC792181.1

SEQ ID NO: 31478 - protein, 524 aa, Artificial Sequence; identical to SEQ ID NO: 31475
  derived and/or modified protein sequence (wt) from glycoprotein__RABV__KC792182.1

SEQ ID NO: 31479 - protein, 524 aa, Artificial Sequence; identical to SEQ ID NO: 31474
  derived and/or modified protein sequence (wt) from glycoprotein__RABV__KC792183.1

SEQ ID NO: 31480 - protein, 524 aa, Artificial Sequence; identical to SEQ ID NO: 31469
  derived and/or modified protein sequence (wt) from glycoprotein__RABV__KC792184.1

SEQ ID NO: 31481 - protein, 524 aa, Artificial Sequence
  derived and/or modified protein sequence (wt) from glycoprotein__RABV__KC792185.1
MVPQALLFVPLLAFPMCFGKFPIYTIPDKLGPWSPIDIHHLSCPNNLVVEDEGCTNLSGFSYMELKVGYISAIKVNGFTCTGVVTEAETYTNFVGYVTTTFKRKHFRPTPDACRAAYNWKMAGDPRYEESLHNPYPDYHWLRTVKTTKESLIIISPSVADLDPYDKSLHSRVFPSGKCLGITISSTYCSTNHDYTIWMPENLRLGTSCDIFTNSRGKRASKGSKTCGFVDERGLYKSLKGSCKLKLCGVLGLRLMDGTWVAMQTSDETKWCPPDQLVNLHDFRSDEIEHLVVEELVKKREECLDALESIMTTKSVSFRRLSHLRKLVPGFGKAYTIFNKTLMEADAHYKSVRTWNEIIPSKGCLRVGGRCHPHVNGVFFNGIILGPDGHVLIPEMQSSLLQQHMELLESSVIPLMHPLADPSTVFKDGDEAEDFVEVHLPDVHKQISGVDLGLPNWGKYVLIIAGVLIAMILTIFLMTCCGRGNRPKSTQHSLGGIGRKVSATSQSGKVISSWESYKSGGETRL

SEQ ID NO: 31482 - protein, 524 aa, Artificial Sequence; identical to SEQ ID NO: 31474
  derived and/or modified protein sequence (wt) from glycoprotein__RABV__KC792186.1

SEQ ID NO: 31483 - protein, 524 aa, Artificial Sequence; identical to SEQ ID NO: 31475
  derived and/or modified protein sequence (wt) from glycoprotein__RABV__KC792187.1

SEQ ID NO: 31484 - protein, 524 aa, Artificial Sequence
  derived and/or modified protein sequence (wt) from glycoprotein__RABV__KC792188.1
MVPQALLFVPLLAFPMCFGKFPIYTIPDKLGPWSPIDIHHLSCPNNLVVEDEGCTNLSGFSYMELKVGYISAIKVNGFTCTGVVTEAETYTNFVGYVTTTFKRKHFRPTPDACRAAYNWKMAGDPRYEESLHNPYPDYHWLRTVKTTKESLIIISPSVADLDPYDKSLHSRVFPSGKCLGITISSTYCSTNHDYTIWMPENVRLGTSCDIFTNSRGKRASKGSKTCGFVDERGLYKSLKGACKLKLCGVLGLRLMDGTWVAMPTSDETKWCPPDQLVNLHDFRSDEIEHLVVEELVRKREECLDALESIMTTKSVSFRRLSHLRKLVPGFGKAYTIFNKTLMEADAHYKSVRTWSEIIPSKGCLRVGGRCHPHVNGVFFNGIILGPDGHVLIPEMQSSLLQQHMELLESSVIPLMHPLADPSTVFKDGDEAEDFVEVHLPDVHKQISGVDLGLPNWGKYVLIIAGVLIAMILTIFLMTCCGRGNRPKSTQHSLGGIGRKVSSTSQSGKVISSWESYKSGGETRL

SEQ ID NO: 31485 - protein, 524 aa, Artificial Sequence
  derived and/or modified protein sequence (wt) from glycoprotein__RABV__KC977995.1
MIPQVLLFVPLLVFSSCFGKFPIYTIPDKLGPWSPIDIHHLSCPNNLVVEDEGCTNLSGFSYMELKVGYISAIKVNGFTCTGVVTEAETYTNFVGYVTTTFKRKHFRPMPDACRAAYNWKMAGDPRYEESLHNPYPDYHWLRTVKTTKESLVIISPSVADLDPYDKSLHSRVFPGGKCSGITVSSTCCSTNHDYTIWMPENPRLGTSCDIFTNSRGKRASKGGKTCGFVDERGLYKSLRGACKLKLCGVLGLRLMDGTWVAIQTSDEIKWCSPDQLVNLHDFHSDEIEHLVVEELVKKREECLDALETIMTTKSVSFRRLSHLRKLVPGFGKAYTIFNKTLMEADAHYKSIRTWNEIIPSKGCLRVGGRCHPHVNGVFFNGIILGPDGHVLIPEMQSSLLHQHMELLESSVIPLMHPLADPSTVFKDGDEAEDFVEVHLPDVHKQISGVDLGLPNWGKYVLISAGALTALMLMIFLMTCCRKTNRAESIQHSPGETGRKVSVTSHNGRVTSSWESYKSGSETKL

SEQ ID NO: 31486 - protein, 524 aa, Artificial Sequence
  derived and/or modified protein sequence (wt) from glycoprotein__RABV__KF154996.1
MVPQVLLFVPLLVFSMCFGKFPIYTIPDKLGPWSPIDIHHLSCPNNLVVEDEGCTNLSGFSYMELKVGYTSAIKVNGFTCTGVVTEAETYTNFVGYVTTTFKRKHFRPTPDACRAAYNWKMAGDPRYEESLHNPYPDYHWLRTVKTTKESLVIISPSVADLDPYDKSLHSRVFPSGKCSGITISSTYCSTNHDYTIWMPENPRLGTSCDIFTNSRGKRASKGGKTCGFVDERGLYKSLKGACKLKLCGVLGLRLMDGTWVAMQTSDETKWCPPDQLVNLHDFRSDEIEHLVVEELVKKREECLDALESIMTTKSVSFRRLSHLRKLVPGFGKAYTIFNKTLMEADAHYKSVRTWNEIIPSKGCLRVGGRCHPHVKGVFFNGIILGPDGHVLIPEMQSSLLQQHMELLESSVIPLMHPLADPSTVFKDGDEAEDFVEVHLPDVHKQISGVDLGLPSWGRYVLVSAGVLVVLMLTILIITCCGRVHRPKSTQHGLGGTGRKVSVTSQSGKVISSWESYKSGGETRL

SEQ ID NO: 31487 - protein, 524 aa, Artificial Sequence
  derived and/or modified protein sequence (wt) from glycoprotein__RABV__KF154997.1
MVPQALLLVPLLGFSLCFGKFPIYTIPDKLGPWSPIDIHHLSCPNNLVVEDEGCTNLSGFSYMELKVGYISSIKVNGFTCTGVVTEAETYTNFVGYVTTTFRRKHFRPTPDACRAAYNWKMAGDPRYEESLHNPYPDYHWLRTVKTTKESLVIISPSVADLDPYDKSLHSRVFPSGKCSGITVSSTYCSTNHDYTIWMPENLRLGTSCDIFTNSRGKRASKGSKTCGFVDERGLYKSLKGACKLKLCGVLGLRLMDGTWVAMQTSDETKWCPPDQLVNLHDFRSDEIEHLVVEELVKKREECLDALESIMTTKSVSFRRLSHLRKLVPGFGKAYTIFNKTLMEADAHYKSVRTWNEVIPSRGCLRVGGRCHPHVNGVFFNGIILGPDGHVLIPEMQSSLLQQHIELLESSVIPLMHPLADPSTVFKDGDEAEDFVEVHLPDVHKQVSGVDLGLPNWGKYVLLSAGALIALMLIVFLITCCRRVNRPESTQRSLRGAGRKVSITSQSGKVISSWESYKSGGETRL

SEQ ID NO: 31488 - protein, 524 aa, Artificial Sequence
  derived and/or modified protein sequence (wt) from glycoprotein__RABV__KF154998.1
MVPQALLFVPLLAFSLCFGKFPIYTIPDKLGPWSPIDIHHLSCPNNLVVEDEGCTNLSEFSYMELKMGYISAIKVNGFTCTGVVTEAETYTNFVGYVTTTFKRKHFRPTPDACRAAYNWKMAGDPRYEESLHNPYPDYHWLRTVKTTKESLIIISPSVADLDPYDKSLHSRVFPSGKCSGITVSSTYCSTNHDYTIWMPENPRPGTSCDIFASSRGKRASKGGKTCGFVDERGLYKSLKGACKLKLCGVLGLRLMDGTWVAMQTSDETKWCPPDQLVNLHDFRSDEIEHLVVEELVKKREECLDALESIMTTKSVSFRRLSHLRKLVPGFGKAYTIFNKTLMEADAHYKSVQTWNEIIPSKGCLRVGERCHPHVNGVFFNGIILGPDGHVLIPEMQSSLLQQHMELLESSVIPLMHPLADPSTVFKDGDEAEDFVEVHLPDVHKQVSGVDLGLPNWGKYVLVSAGALIALMLIIFLITCCRRVNRPEYTQRSLGGTGRKVSVTSQSGKVISSWESYKSGGETRL

SEQ ID NO: 31489 - protein, 524 aa, Artificial Sequence; identical to SEQ ID NO: 30757
  derived and/or modified protein sequence (wt) from glycoprotein__RABV__KF154999.1

SEQ ID NO: 31490 - protein, 524 aa, Artificial Sequence
  derived and/or modified protein sequence (wt) from glycoprotein__RABV__KF155000.1
MVPQALLFVPLLVFSLCFGKFPIYTIPDKLGPWSPIDIHHLTCPNNLVVEDEGCTNLSGFSYMELKVGYISAIKVNGFTCTGVVTEAETYTNFVGYVTTTFKRKHFRPTPDACRAAYNWKMAGDPRYEESLHNPYPDYHWLRTVKTTKESLVIISPSVANLDPYDKSLHSRVFPSGKCSGITVSSTYCSTNHDYTIWMPENPRLGTSCDIFTNSRGKRASKGSKTCGFVDERGLYKSLKGACKLKLCGVLGLRLMDGTWVAMQTSDETKWCPPDQLVNLHDFRSDEIEHLVVEELVKKREECLDALESIMTTKSVSFRRLSHLRKLVPGFGKAYTIFNKTLMEADAHYKSVRTWNEIIPSKGCLRVGGRCHPHVNGVFFNGIILGPDGHVLIPEMQSSLLQQHMELLESSVIPLMHPLADPSTVFKDGDEAEDFVEVHLPDVHKQVSGVDLGLPNWGKYVLLSAGALIALMLIIFLMTCCRRVNRPESTQRSLGGTGRKVSVTSQSGKVISSWESYKSGGETRL

SEQ ID NO: 31491 - protein, 524 aa, Artificial Sequence
  derived and/or modified protein sequence (wt) from glycoprotein__RABV__KF155001.1
MVPQALLFVPLLVFSLCFGKFPIYTIPDKLGPWSPIDIHHLSCPNNLVVEDEGCTNLSGFSYMELKVGYISAIKVNGFTCTGVVTEAETYTNFVGYVTTTFKRKHFRPTPDACRAAYNWKMAGDPRYEESLHNPYPDYHWLRTVKTTKESLVIISPSVADLDPYDKSLHSRVFPSGKCSGITVSSTYCSTNHDYTIWMPENPRLGTSCDIFTNSRGKRASKGSKTCGFVDERGLYKSLKGACKLKLCGVLGLRLMDGTWVAMQTSDETKWCPPDQLVNLHDFRSDEIEHLVVEELVKKREECLDALESIMTTKSVSFRRLSHLRKLVPGFGKAYTIFNKTLMEADAHYKSVRTWNEIIPSKGCLRVGGRCHPHVNGVFFNGIILGPDGHVLIPEMQSSLLQQHMELLESSVIPLMHPLADPSTVFKDGDEAEDFVEVHLPDVHKQVSGVDLGLPNWGKYVLLSAGTLIALMLIIFLMTCCRRVNRPKSMQRSLGETGRKVSVTSQSGKVISSWESYKSGGETRL

SEQ ID NO: 31492 - protein, 524 aa, Artificial Sequence
  derived and/or modified protein sequence (wt) from glycoprotein__RABV__KF155002.1
MVPQARLFVPLLVFPLCFGKFPIYTIPDKLGPWSPIDIHHLSCPNNLVVEDEGCTNLSGFSYMELKVGYISAIKVNGFTCTGVVTEAETYTNFVGYVTTTFKRKHFRPIPDACRAAYNWKMAGDPRYEESLHNPYPDYHWLRTVKTTKESLVIISPSVADLDPYDRSLHSRVFTGGKCSGITVSSTYCSTNHDYTIWMPENPRLGTSCNIFANSKGKRASKGGKTCGFVDERGLYKSLKGACKLKLCGVLGLRLMDGTWVAMQTSDETKWCPPDQLVNMHDFRSDEIEHLVVEELVKKREECLDALESIMTTKSVSFRRLSHLRKLVPGFGKAYTIFNKTLMEADAHYKSVRTWNEIIPSKGCLRVGGRCHPHVNGVFFNGIILGPDGHVLIPEMQSSLLQQHMELLESSVIPLMHPLADPSTVFKDGDEAEDFVEVHLPDVHKQVSGVDLGLPNWGKYVLLSAGTLIALMLIIFLMTCCRRVSRPESTQRSLGRTGRKVSVTSQSGKVISSWESYKSGGETRL

SEQ ID NO: 31493 - protein, 524 aa, Artificial Sequence
  derived and/or modified protein sequence (wt) from glycoprotein__RABV__KF437644.1
MVPQALLFVPLLVFSMCFGKFPIYTIPDKLGPWSPIDIHHLSCPNNLVVEDEGCTNLSGFSYMELKVGYISAIKVNGFTCTGVVTEAETYTNFVGYVTTTFKRKHFRPTPDACRAAYNWKMAGDPRYEESLHNPYPDYHWLRTVKTTKESLVIISPSVADLDPYDKSLHSRVFPNGKCSGITISSTYCPTNHDYTIWLPENPRLGTSCDIFTNSRGKRASKGSKTCGFVDERGLYKSLKGACKLKLCGVLGLRLMDGTWVAMQASDETKWCPPDQLVNLHDFRSDEIEHLVVEELVKKREECLDALESIMTTKSVSFRRLSHLRKLVPGFGKAYTIFNKTLMEADAHYKSVRTWNEIIPSKGCLRVGGRCHPHVNGVFFNGIILGPDGHVLIPEMQSSLLQQHMELLESSVIPLMHPLADPSTVFKDGDEAENFVEVHLPDVHKQISGVDLGLPNWGKYVLVSAGVLIALMLIIFLMTCCGRVNRPESTQHNLGGTGREVSVTPQSGKVISSWESYKSGGGTRL

SEQ ID NO: 31494 - protein, 524 aa, Artificial Sequence; identical to SEQ ID NO: 31493
  derived and/or modified protein sequence (wt) from glycoprotein__RABV__KF437645.1

SEQ ID NO: 31495 - protein, 524 aa, Artificial Sequence; identical to SEQ ID NO: 31493
  derived and/or modified protein sequence (wt) from glycoprotein__RABV__KF437646.1

SEQ ID NO: 31496 - protein, 524 aa, Artificial Sequence
  derived and/or modified protein sequence (wt) from glycoprotein__RABV__KF437648.1
MVPQALLFVPLLVFSMCFGKFPIYTIPDKLGPWSPIDIHHLSCPNNLVVEDEGCTNLSGFSYMELKVGYISAIKVNGFTCTGVVTEAETYTNFVGYVTTTFKRKHFRPTPDACRAAYNWKMAGDPRYEESLHNPYPDYHWLRTVKTTKESLVIISPSVADLDPYDKSLHSRVLPNGKCSGTTTSSTYCPTNHDYTIWLPENPRLGTSCDIFTNSRGKRASKGGKTCGFVDERGLYKSLKGACKLKLCGVLGLRLMDGTWVAMQASDETKWCPPDQLVNLHDFRSDEIEHLVVEELVKKREECLDALESIMTTKSVSFRRLSHLRKLVPGFGKAYTIFNKTLMEADAHYKSVRTWNEIIPSKGCLRVGGRCHPHVNGVFFNGIILGPDGHVLIPEMQSSLLQQHMELLESSVIPLMHPLADPSTVFKDGDEAENFVEVHLPDVHKQISGVDLGLPNWGKYVLVSAGVLIALMLIIFLMTCCGRVNRPESTQHNLGGTGREVSVTPQSGKVISSWESYKSGGETRL

SEQ ID NO: 31497 - protein, 524 aa, Artificial Sequence
  derived and/or modified protein sequence (wt) from glycoprotein__RABV__KF437649.1
MVPQALLFVPLLVFSMCFGKFPIYTIPDKLGPWSPIDIHHLSCPNNLVVEDEGCTNLSGFSYMELKVGYISAIKVNGFTCTGVVTEAETYTNFVGYVTTTFKRKHFRPTPDACRAAYNWKMAGDPRYEESLHNPYPDYHWLRTVKTTKESLVIISPSVADLDPYDKSLHSRVFPNGKCSGITISSTYCPTNHDYTIWLPENPRLGTSCDIFTNSRGKRASKGSKTCGFVDERGLYKSLKGACKLKLCGVLGLRLMDGTWVAMQASDETKWCPPDQLVNLHDFRSDEIEHLVVEELVKKREECLDALESIMTTKSVSFRRLSHLRKLVPGFGKAYTIFNKTLMEADAHYKSVRTWNEIIPSKGCLRVGGRCHPHVNGVFFNGIILGPDGHVLIPEMQSSLLQQHMELLESSVIPLMHPLADPSTVFKDGDEAENFVEVHLPDVHKQISGVDLGLPNWGKYVLVSAGVLIALMLIIFLMTCCGRVNRPESTQHNLGGTGREVSVTPQSGKVISSWESCKSGGGTRL

SEQ ID NO: 31498 - protein, 524 aa, Artificial Sequence; identical to SEQ ID NO: 31493
  derived and/or modified protein sequence (wt) from glycoprotein__RABV__KF437650.1

SEQ ID NO: 31499 - protein, 524 aa, Artificial Sequence
  derived and/or modified protein sequence (wt) from glycoprotein__RABV__KF437652.1
MVPQALLFVPLLVFSMCFGKFPIYTIPDKLGPWSPIDIHHLSCPNNLVVEDEGCTNLSGFSYMELKVGYISAIKVNGFTCTGVVTEAETYTNFVGYVTTTFKRKHFRPTPDACRAAYNWKMAGDPRYEESLHNPYPDYHWLRTVKTTKESLVIISPSVADLDPYDKSLHSRVFPNGKCSGITISSTYCPTNHDYTIWLPENPRLGTSCDIFTNSRGKRASKGSKTCGFVDERGLYKSLKGACKLKLCGVLGLRLMDGTWVAMQASDETKWCPPDQLVNLHDFRSDEIEHLVVEELVKKREKCLDALESIMTTKSVSFRRLSHLRKLVPGFGKAYTIFNKTLMEADAHYKSVRTWNEIIPSKGCLRVGGRCHPHVNGVFFNGIILGPDGHVLIPEMQSSLLQQHMELLESSVIPLMHPLADPSTVFKDGDEAENFVEVHLPDVHKQISGVDLGLPNWGKYVLVSAGVLIALMLIIFLMTCCGRVNRPESTQHNLGGTGREVSVTPQSGKVISSWESYKSGGGTRL

SEQ ID NO: 31500 - protein, 524 aa, Artificial Sequence
  derived and/or modified protein sequence (wt) from glycoprotein__RABV__KF437653.1
MVPQALLFVPLLVFSMCFGKFPIYTIPDKLGPWSPIDIHHLSCPNNLVVEDEGCTNLSGFSYMELKVGYISAIKVNGFTCTGVVTEAETYTNFVGYVTTTFKGKHFRPTPDACRAAYNWKMAGDPRYEESLHNPYPDYHWLRTVKTTKESLVIISPSVADLDPYDKSLHSRVFPNGKCSGITISSTYCPTNHDYTIWLPENPRLGTSCDIFTNSRGKRASKGSKTCGFVDERGLYKSLKGACKLKLCGVLGLRLTDGTWVAMQASDETKWCPPDQLVNLHDFRSDEIEHLVVEELVKKREECLDALESIMTTKSVSFRRLSHLRKLVPGFGKAYTIFNKTLMEADAHYKSVRTWNEIIPSKGCLRVGGRCHPHVNGVFFNGIILGPDGHVLIPEMQSSLLQQHMELLESSVIPLMHPLADPSTVFKDGDEAENFVEVHLPDVHKQISGVDLGLPNWGKYVLVSAGVLIALMLIIFLMTCCGRVNRPESTQHNLGGTGREVSVTPQSGKVISSWESYKSGGGTRL

SEQ ID NO: 31501 - protein, 524 aa, Artificial Sequence
  derived and/or modified protein sequence (wt) from glycoprotein__RABV__KF437654.1
MVPQALLFVPLLVFSMCSGKFPIYTIPDKLGPWSPIDIHHLSCPNNLVVEDEGCTNLSGFSYMELKVGYISAIKVNGFTCTGVVTEAETYTNFVGYVTTTFKRKHFRPTPDACRAAYNWKMAGDPRYEESLHNPYPDYHWLRTVKATKESLVIISPSVADLDPYDKSLHSRVFPNGKCSGITISSTCCPTNHDYTIWLPENPRLGTSCDIFTNSRGKRASKGSKTCGFVDERGLYKSLKGACKLKLCGVLGLRLMDGAWVAMQASDETKWCPPDQLVNLHDFRSDEIEHLVVEELVKKREECLDALESIMTTKSVSFRRLSHLRKLVPGFGKAYTIFNKTLMEADAHYKSVRTWNEIIPSKGCLRVGGRCHPHVNGVFFNGIILGPDGHVLIPEMQSSLLQQHMELLESSVIPLMHPLADPSTVFKDGDEAENFVEVHLPDVHKQISGVDLGLPNWGKYVLVSAGVLIALMLIIFLMTCCGRVNRPESTQHNLGGTGREVSVTPQSGKVISSWESYKSGGGTRL

SEQ ID NO: 31502 - protein, 524 aa, Artificial Sequence
  derived and/or modified protein sequence (wt) from glycoprotein__RABV__KF484518.1
MVLQALLFAPFLISSLCFGKFPIYTIPDKLGPWSPIDIHHLSCPNNLVVEDEGCNSLSGFSYMELKVGYISAIKVNGFTCTGVVTEAETYTNFVGYVTTTFKRKHFRPMPDACRSAYNWKVAGDPRYEESLHNPYPDYHWLRTVKTTKESLIIISPSVADLDPYDKSLHSRIFPGGKCSGMTISSTYCSTNHDYTIWMPEKTGLGTSCDIFITSKGKRASKGGRTCGFVDERGLYKSLKGACKLKLCGVSGLRLMDGTWAAIQTSDETKWCSPDQLVNLHDLHSDEIEHLVVEELVRRREECLDALESIMTTKSVSFRRLSHLRKLVPGFGKAYTIFNKTLMEADAHYKSVRTWNEIIPSKGCLRVGGKCHPHVNGVFFNGIILGPDGHVLIPEMQSSLLQQHMELLESSVIPLMHPLADLSTVFKDGDEAEDFVEVHLPDVHKHVSGVDLGLPSWGKYMLMSAGALATLMLVIPLMKCCRRVNRTKSIQQGPRESDRKVSVTPQNGKVISSWESYKSGGGTGL

SEQ ID NO: 31503 - protein, 524 aa, Artificial Sequence
  derived and/or modified protein sequence (wt) from glycoprotein__RABV__KF484519.1
MVLQALLFAPFLISSLCLGKFPIYTIPDKLGPWSPIDIHHLSCPNNLVIEDEGCNSLSGFSYMELKVGYISAIKVNGFTCTGVVTEAETYTNFVGYVTTTFKRKHFRPMPDACRSAYNWKLAGDPRYEESLHNPYPEYHWLRTVKTTKESLIVISPSVADLDPYDKSLHSRIFPSGKCSGMTVSSTYCSTNHEYTIWMPEKVGLGTSCDIFITSKGKRASKGGKTCGFVDERGLYKSLKGACKLKLCGVSGLRLMDGTWVAIQTSDETKWCSPDQLVNLHDLHSDEIEHLVVEELVRKREECLDALESIMTTKSVSFRRLSHLRKLVPGFGKAYTIFNKTLMEADAHYKSVRTWNEIIPSKGCLRVGGKCHPHVNGVFFNGIILGPDGHVLIPEMQSSLLQQHIELLESSVIPLMHPLADLSTVFKDGDEAEDFVEVHLPDVHKQISGVDLGLPSWGKYVLMSAGALATLILVTSLMKCCRWVNRTKSIQQGPRESERKVSVTPQSGKVISSWESYKIGGETGL

SEQ ID NO: 31504 - protein, 524 aa, Artificial Sequence
  derived and/or modified protein sequence (wt) from glycoprotein__RABV__KF484520.1
MVLQALLFAPFLISSLCLGKFPIYTIPDKLGPWSPIDIHHLSCPNNLVVEDEGCNSLSGISYMELKVGYISAIKVNGFTCTGVVTEAETYTNFVGYVTTTFKRKHFHPMPDACRSAYNWKLAGDPRYEESLHNPYPDYHWLRTVKTTKESLIIISPSVADLDPYDKSLHSRIFPSGKCSGMTISSTYCSTNHEYTIWMPEKAGLGTSCDIFTTSKGKRASKGGKTCGFVDERGLYKSLKGACKLKLCGVSGLRLMDGTWVAIQTSEETKWCPPDQLVNLHDLHSDEIEHLVVEELVKKREECLDALESIMTTKSVSFRRLSHLRKLVPGFGKAYTIFNKTLMEADAHYKSIRTWNEIIPSKGCLRVGGKCHPHVNGVFFNGIILGPDGHVLIPEMQSSLLQQHMELLESSVIPLMHPLADLSTVFKDGDEAEDFVEVHLPDVHKQISGVDLGLPSWGKYVLMSAGALAILMLVISLMKCFWGVNRTKPIQQGPRESERKVSIAPQSRKVISSWESYKSGGETEL

SEQ ID NO: 31505 - protein, 524 aa, Artificial Sequence
  derived and/or modified protein sequence (wt) from glycoprotein__RABV__KF484521.1
MVLQALLFAPFLISSLCLGKFPIYTIPDKLGPWSPIDIHHLSCPNNLVVEDEGCNSLSGFSYMELKVGYISAIKVNGFTCTGVVTEAETYTNFVGYVTTTFKRKHFRPMPDACRSAYNWKLAGDPRYEESLHNPYPDYHWLRTVKTTKESLIVISPSVADLDPYDKSLHSRIFPGGKCSGMTVSSTYCSTNHEYTIWMPEKAGLGTSCDIFTTSKGKRATKGGKTCGFVDERGLYKSLKGACKLKLCGVSGLRLMDGTWVAIQTSDETKWCSPDQLVNLHDLHSDEIEHLVVEELVRKREECLDALESIMTTKSVSFRRLSHLRKLVPGFGKAYTIFNKTLMEADAHYKSVRTWNEIIPSKGCLRVGGKCHPHVNGVFFNGIILGPDGHVLIPEMQSSLLQQHMELLESSVIPLMHPLADPSTVFKDDDEAEDFVEVHLPDVHKQVSGVDLGLPSWGRYVLMSAGALATLMLVISLMKCCKGVNRTKSIKQGSRESERKVSITPQSGKVISSWESYKSGGETGL

SEQ ID NO: 31506 - protein, 524 aa, Artificial Sequence
  derived and/or modified protein sequence (wt) from glycoprotein__RABV__KF484522.1
MVLQALLFAPFLISSLCLGKFPIYTIPDKLGPWSPIDIHHLSCPNNLVIEDEGCNSLSGFSYMELKVGYISAIKVNGFTCTGVVTEAETYTNFVGYVTTTFKRKHFRPMPDACRSAYNWKLAGDPRYEESLHNPYPEYHWLRTVKTTKESLIVISPSVADLDPYDKSLHSRIFPSGKCSGMTVSSTYCSTNHEYTIWMPEKVGLGTSCDIFITSKGKRASKGGKTCGFVDERGLYKSLKGACKLKLCGVSGLRLMDGTWVAIQTSDETKWCSPDQLVNLHDLHSDEIEHLVVEELVRKREECLDALESIMTTKSVSFRRLSHLRKLVPGFGKAYTIFNKTLMEADAHYKSVRTWNEIIPSKGCLRVGGKCHPHVNGVFFNGIILGPDGHVLIPEMQSSLLQQHIELLESSVIPLMHPLADLSTVFKDGDEAEDFVEVHLPDVHKQISGVDLGLPSWGKYVLMSAGALATLILVISLMKCCRWVNRTKSIQQGPRESERKVSVTPQSGKVISSWESYKIGGETGL

SEQ ID NO: 31507 - protein, 524 aa, Artificial Sequence
  derived and/or modified protein sequence (wt) from glycoprotein__RABV__KF484523.1
MILHALLFAPFLISPLCLGKFPIYTIPDKLGPWSPIDIHHLSCPNNLVVEDEGCNSLSGFSYMELKVGYISAIKVNGFTCTGVVTEAETYTNFVGYVTTTFKRKHFRPMPDACRSAYNWKLAGDPRYEESLHNPYPEYHWLRTVKTTKESLIVISPSVADLDPYDKSLHSRIFPSGKCSGMTVSSTYCSTNHEYTIWMPEKVGLGTSCDIFTTSKGKRASKGGRICGFVDERGLYKSLKGACKLKLCGVSGLRLMDGTGFAIQTSDETKWCSPDQLVNLHDLHSDEIEHLVVEELVRKREECLDALESIMTTKSVSFRRLSHLRKLVPGFGKAYTIFNKTLMEADAHYKSVRTWNEIIPSKGCLRVGGKCHPHVNGVFFNGIILGPDGHVLIPEMQSSLLQQHMELLESSVIPLMHPLADLSTVFKDDGEAEDFVEVHLPDVHKQISGVDLGLPSWGKYALMSAGALATLILMIFLMKCCRWVNRTESIQQGPRESERKVSVTPQNGKVISSWESYKIGGETGL

SEQ ID NO: 31508 - protein, 524 aa, Artificial Sequence
  derived and/or modified protein sequence (wt) from glycoprotein__RABV__KF484524.1
MVLQALLFAPFLISSLCLGKFPIYTIPDKLGPWSPIDIHHLSCPNNLVIEDEGCNSLSGFSYMELKVGYISAIKVNGFTCTGVVTEAETYTNFVGYVTTTFKRKHFRPMPDACRSAYNWKLAGDPRYEESLHNPYPEYHWLRTVKTTKESLIVISPSVADLDPYDKSLHSRIFPSGKCSGMTVSSTYCSTNHEYTIWMPEKVGLGTSCDIFITSKGKRASKGGKTCGFVDERGLYKSLKGACKLKLCGVSGLRLMDGTWVAIQTSDETKWCSPDQLVNLHDLHSDEIEHLVVEELVRKREECLDALESIMTTKSVSFRRLSHLRKLVPGFGKAYTIFNKTLMEADAHYKSVRTWNEIIPSKGCLRVGGKCHPHVNGVFFNGIILGPDGHVLIPEMQSSLLQQHMELLESSVIPLMHPLADLSTVFKEGDEAEDFVEVHLPDVHKQISGVDLGLPSWGKYVLMSAGALATLILVISLMKCCRWVNRTKSIQQGPRESERKVSVTPQSGKVISSWEPYKIGGETGL

SEQ ID NO: 31509 - protein, 524 aa, Artificial Sequence
  derived and/or modified protein sequence (wt) from glycoprotein__RABV__KF484525.1
MVLQALLFAPFLISSLCLGKFPIYTIPDKLGPWSPIDIHHLSCPNNLVVEDEGCNSLSGISYMELKVGYISAIKVNGFTCTGVVTEAETYTNFVGYVTTTFKRKHFHPMPDACRSAYNWKLAGDPRYEESLHNPYPDYHWLRTVKTTKESLIIISPSVADLDPYDKSLHSRIFPSGKCSGMTISSTYCSTNHEYTIWMPEKAGLGTSCDIFTTSKGKRASKGGKTCGFVDERGLYKSLKGACKLKLCGVSGLRLMDGTWVAIQTSEETKWCPPDQLVNLHDLHSDEIEHLVVEELVKKREECLDALESIMTTKSVSFRRLSHLRKLVPGFGKAYTIFNKTLMEADAHYKSIRTWNEIIPSKGCLRVGGKCHPHVDGVFFNGIILGPDGHVLIPEMQSSLLQQHMELLESSVIPLMHPLADLSTVFKDGDEAEDFVEVHLPDVHKQISGVDLGLPSWGKYVLMSAGALAILMLVISLMKCFWGVNRTKPIQQGPRESERKVSIAPQSRKVISSWESYKNGGETEL

SEQ ID NO: 31510 - protein, 524 aa, Artificial Sequence
  derived and/or modified protein sequence (wt) from glycoprotein__RABV__KF484526.1
MVLQALLFAPFLISSLCLGKFPIYTIPDKLGPWSPIDIHHLSCPNNLVVEDEGCNSLSGFSYMELKVGYISAIKVNGFTCTGVVTEAETYTNFVGYVTTTFKRKHFRPMPDACRSAYNWKLAGDPRYEESLHNPYPEYHWLRTVKTTKESLIIISPSVADLDPYDKSLHSRIFPGGKCSGMTVSSTYCSTNHEYTIWMPEKVGLGTSCDIFTTSKGKRASKGGKTCGFVDERGLYKSLKGACKLKLCGVSGLRLMDGTWVAMQTSDETKWCSPDQLVNLHDLHSDEIEHLVVEELVRKREECLDALESIMTTKSVSFRRLSHLRKLVPGFGKAYTIFNKTLMEADAHYKSVRTWNEIIPSKGCLRVGGKCHPHVNGVFFNGIILGPDGHVLIPEMQSSLLQQHMELLESSVIPLMHPLADLSAVFKEGDEAEDFVEVHLPDVHKQISEVDLGLPSWGKYVLMSAGALATLILVISLMKCCRWVNRTKSIQQGPRESERKVSVTPQNGKVISSWESYKIRGETGL

SEQ ID NO: 31511 - protein, 524 aa, Artificial Sequence
  derived and/or modified protein sequence (wt) from glycoprotein__RABV__KF484527.1
MVLQALLFAPFLISSLCLGKFPIYTIPDKLGPWSPIDIHHLSCPNNLVVEDEGCNSLSGFSYMELKVGYISAIKVNGFTCTGVVTEAETYTNFVGYVTTTFKRKHFRPMPDACRSAYNWKLAGDPRYEESLHNPYPEYHWLRTVKTTKESLIVISPSVADLDPYDKSLHSRIFPGGKCSGMTVSSTYCSTNHEYTIWMPEKVGLGTSCDIFTTSKGKRASKGGRTCGFVDERGLYKSLKGACKLKLCGVSGLRLMDGTWVAMQTSDETKWCSPDQLVNLHDLHSDEIEHLVVEELVRKREECLDALESIMTTKSVSFRRLSHLRKLVPGFGKAYTIFNKTLMEADAHYKSVRTWNEIIPSKGCLRVGGKCHPHVNGVFFNGIILGPDGHVLIPEMQSSLLQQHMELLESSVIPLMHPLADLSTVFKEGDEAEDFVEVHLPDVHKQISGVDLGLPSWGKYVLMGAGALATLILVISLMKCCRWVNRTKSIQQGPRGSERKVSVTPQNGKVISSWESYKIGGETGL

SEQ ID NO: 31512 - protein, 524 aa, Artificial Sequence
  derived and/or modified protein sequence (wt) from glycoprotein__RABV__KF484528.1
MVLQALLFAPFLISSLCLGKFPIYTIPDKLGPWSPIDIHHLSCPNNLVVEDEGCNSLSGFSYMELKVGYISAIKVNGFTCTGVVTEAETYTNFVGYVTTTFKRKHFRPMPDACRSAYNWKLAGDPRYEESLHNPYPEYHWLRTVKTTKESLIIISPSVADLDPYDKSLHSRIFPGGKCSGMTVSSTYCSTNHEYTIWMPEKVGLGTSCDIFTTSKGKRASKGGKTCGFVDERGLYKSLKGACKLKLCGVSGLRLMDGTWVAMQTSDETKWCSPDQLVNLHDLHSDEIEHLVVEELVRKREECLDALESIMTTKSVSFRRLSHLRKLVPGFGKAYTIFNKTLMEADAHYKSVRTWNEIIPSKGCLRVGGKCHPHVNGVFFNGIILGPDGHVLIPEMQSSLLQQHMELLESSVIPLMHPLADLSTVFKEGDEAEDFVEVHLPDVHKQISEVDLGLPSWGKYVLMSAGALATLILVISLMKCCRWVNRTKSIQQGPRESERKVSVTPQNGKVISSWESYKIGGETGL

SEQ ID NO: 31513 - protein, 524 aa, Artificial Sequence
  derived and/or modified protein sequence (wt) from glycoprotein__RABV__KF484529.1
MVLQALLFAPFLISSLCLGKFPIYTIPDKLGPWSPIDIHHLSCPNNLVVEDEGCNSLSGFSYMELKVGYISAIKVNGFTCTGVVTEAETYTNFVGYVTTTFKRKHFRPMPDACRSAYNWKLAGDPRYEESLHNPYPEYHWLRTVKTTKESLIVISPSVADLDPYDKSLHSRIFPGGKCSGMTVSSTYCSTNHEYTIWMPEKVGLGTSCDIFTTSKGKRASKGGRTCGFVDERGLYKSLKGACKLKLCGVSGLRLMDGTWVAMQTSDETKWCSPDQLVNLHDLHSDEIEHLVVEELVRKREECLDALESIMTTKSVSFRRLSHLRKLVPGFGKAYTIFNKTLMEADAHYKSVRTWNEIIPSKGCLRVGGKCHPHVNGVFFNGIILGPDGHVLIPEMQSSLLQQHMELLESSVIPLMHPLADLSTVFKEDDEAEDFVEVHLPDVHKQISGVDLGLPSWGKYVLMGAGALATLTLVISLIKCCRWVNRTKSIQQGPRESERKVSVTPQNGKVISSWESYKIGGETGL

SEQ ID NO: 31514 - protein, 524 aa, Artificial Sequence
  derived and/or modified protein sequence (wt) from glycoprotein__RABV__KF484530.1
MVLQALLFAPFLISSLCFGKFPIYTIPDKLGPWSPIDVHHLSCPNNLVIEDEGCNSLSGFSYMELKVGYISAIKVNGFTCTGVVTEAETYTNFVGYVTTTFKRKHFRPMPDACRSAYNWKVAGDPRYEESLHNPYPDYHWLRTVKTTKESLIIISPSVADLDPYDKSLHSRIFPGGKCSGMTISSTYCSTNHDYTIWMPEKTGLGTSCDIFTTSKGKRASKGGRTCGFVDERGLYKSLKGACKLKLCGVSGLRLMDGTWAAIQTSDETKWCSPDQLVNLHDLHSDEIEHLVVEELVRRREECLDALESIMTTKSVSFRRLSHLRKLVPGFGKAYTIFNKTLMEADAHYKSVRTWNEIIPSKGCLRVGGKCHPHVNGVFFNGIILGPDGHVLIPEMQSSLLQQHMELLESSVIPLMHPLADLSTVFKDGDEAEDFVEVHLPDVHKQVSGVDLGLPSWGKYMLMSAGALATLMLVIPLMKCCRRVNRTKSTQQGPRESDRKVSVTPQNGKVISSWESYKSGGGTGL

SEQ ID NO: 31515 - protein, 524 aa, Artificial Sequence
  derived and/or modified protein sequence (wt) from glycoprotein__RABV__KF484531.1
MVLQALLFAPFLISSLCLGKFPIYTIPDKLGPWSPIDIHHLSCPNNLVVEDEGCNSLSGFSYMELKVGYISAIKVNGFTCTGVVTEAETYTNFVGYVTTTFKRKHFRPMPDACRSAYNWKLAGDPRYEESLHNPYPEYHWLRTVKTTKESLIVISPSVADLDPYDKSLHSRIFPGGKCSGMTVSSTYCSTNHEYTIWMPEKVGLGTSCDIFTTSKGKRASKGGRTCGFVDERGLYKSLKGACKLKLCGVSGLRLMDGTWVAMQTSDETKWCSPDQLVNLHDLHSDEIEHLVVEELVRKREECLDALESIMTTKSVSFRRLSHLRKLVPGFGKAYTIFNKTLMEADAHYKSVRTWNEIIPSKGCLRVGGKCHPHVNGVFFNGIILGPDGHVLIPEMQSSLLQQHMELLESSVIPLMHPLADLSTVFKEDDEAEDFVEVHLPDVHKQISGVDLGLPSWGKYVLMGAGALATLILVISLIKCCRWVNRTKSIQQGPRESERKVSATPQNGKVISSWESYKIGGETGL

SEQ ID NO: 31516 - protein, 524 aa, Artificial Sequence
  derived and/or modified protein sequence (wt) from glycoprotein__RABV__KF484532.1
MILHALLFAPFLISSLCLGKFPIYTIPDKLGPWSPIDIHHLSCPNNLVVEDEGCNSLSGFSYMELKVGYISAIKVNGFTCTGVVTEAETYTNFVGYVTTTFKRKHFRPMPDACRSAYNWKLAGDPRYEESLHNPYPEYHWLRTVKTTKESLIVISPSVADLDPYDKSLHSRIFPSGKCSGMTVSSTYCSTNHEYTIWMPEKVGLGTSCDIFTTSKGKRASKGGRICGFVDERGLYKSLKGACKLKLCGVSGLRLMDGTWVAIQTSDETKWCSPDQLVNLHDLHSDEIEHLVVEELVRKREECLDALESIMTTKSVSFRRLSHLRKLVPGFGKAYTIFNKTLMEADAHYKSVRTWNEIIPSKGCLRVGGKCHPHVNGVFCNGIILGPDGHVLIPEMQSSLLQQHMELLESSVIPLMHPLADLSTVFKDDGEAEDFVEVHLPDVHKQISGVDLGLPSWGKYALMSAGALATLILMISLMKCCRWVNRTESIRQGPRESERKVSVTPQNGKVISSWESYKIGGETGL

SEQ ID NO: 31517 - protein, 524 aa, Artificial Sequence
  derived and/or modified protein sequence (wt) from glycoprotein__RABV__KF484533.1
MVLKALLFAPFLISSLCLGKFPIYTIPDKLGPWSPIDIHHLSCPNNLVVEDEGCNSLSGFSYMELKVGYISAIKVNGFTCTGVVTEAETYTNFVGYVTTTFKRKHFRPMPDACRSAYNWKLAGDPRYEESLHNPYPDYHWLRTVRTTKESLIVISPSVADLDPYDKSLHSRIFPGGKCSGMTVSSTYCSTNHEYTIWMPEKAGLGTSCDIFTTSKGKRASKGGRTCGFVDERGLYKSLKGACKLKLCGVSGLRLMDGTWVAIQTSDETKWCSPDQLVNLHDLHSDEIEHLVVEELVRKREECLDALESIMTTKSVSFRRLSHLRKLVPGFGKAYTIFNKTLMEADAHYKSVRTWNEIIPSKGCLRVGGKCHPHVSGVFFNGIILGPDGHVLIPEMQSSLLQQHMELLESSVIPLMHPLADPSTVFKDDDEAEDFVEVHLPDVHKQVSGVDLGLPSWGKYVLMSAGALATLMLVISLMKCCRGFNRTKSIRQGSRESEQKVSVTPQNGKVISSWESYKSGGETGL

SEQ ID NO: 31518 - protein, 524 aa, Artificial Sequence
  derived and/or modified protein sequence (wt) from glycoprotein__RABV__KF484534.1
MVLQALLFAPFLISSLCLGKFPIYTIPDKLGPWSPIDIHHLSCPNNLVVEDEGCNSLSGISYMELKVGYISAIKVNGFTCTGVVTEAETYTNFVGYVTTTFKRKHFRPMADACRSAYNWKLTGDPRYEESLHNPYPDYHWLRTVKTTKESLIVISPSVADLDPYDKSLHSRIFPSGKCSGMTISSTYCSTNHEYTIWMPEKAGLGTSCDIFTTSKGKRASKGGKTCGFVDERGLYKSLKGACKLKLCGVSGLRLMDGTWVAIQTSDETKWCSPDQLVNLHDLHSDEIEHLVVEELVKKREECLDALESIMTTKSVSFRRLSHLRKLVPGFGKAYTIFNKTLMEADAHYKSIRTWNEIIPSKGCLRVGGKCHPHVNGVFFNGIILGPDGHVLIPEMQSSLLQQHMELLESSVIPLMHPLADLSTVFKDGDEAEDFVEVHLPDIHKQISGVDLGLPSWGKYVLMSAGALAILMLVFSLMKCFWGVNRTKPIQRSPRESERKVSVAPQSGKVISSWESYKSGGETGL

SEQ ID NO: 31519 - protein, 524 aa, Artificial Sequence
  derived and/or modified protein sequence (wt) from glycoprotein__RABV__KF484535.1
MVLQALLFAPFLISSLCLGKFPIYTIPDKLGPWSPIDIHHLSCPNNLVVEDEGCNSLSGISYMELKVGYISAIKVNGFTCTGVVTEAETYTNFVGYVTTTFKRKHFHPMPDACRSAYNWKLAGDPRYEESLHNPYPDYHWLRTVKTTKESLIIISPSVADLDPYDKSLHSRIFPSGKCSGMTISSTYCSTNHEYTIWMPEKAGLGTSCDIFTTSKGKRASKGGKTCGFVDERGLYKSLKGACKLKLCGVSGLRLMDGTWVAIQTSDETKWCPPDQLVNLHDLHSDEIEHLVVEELVKKREECLDALESIMTTKSVSFRRLSHLRKLVPGFGKAYTIFNKTLMEADAHYKSIRTWNEIIPSKGCLRVGGKCHPHVNGVFFNGIILGPDGHVLIPEMQSSLLQQHMELLESSVIPLMHPLADLSTVFKDGDEAEDFVEVHLPDVHKQISGVDLGLPSWGKYVLMSAGALAILMLVISLMKCFWGVNRTKPIQQGPRESERKVSIAPQSRKVISSWESYKSGGETEL

SEQ ID NO: 31520 - protein, 524 aa, Artificial Sequence
  derived and/or modified protein sequence (wt) from glycoprotein__RABV__KF484536.1
MVLQALLFAPFLISSLCLGKFPIYTIPDKLGPWSPIDIHHLSCPNNLVVEDEGCNSLSGFSYMELKVGYISAIRVNGFTCTGVVTEAETYTNFVGYVTTTFKRKHFRPMPDACRSAYNWKLAGDPRYEESLHNPYPDYHWLRTVKTTKESLIVISPSVADLDPYDKSLHSRIFPGGKCSGITVSSTYCSTNHEYTIWMPEKAGLGTSCDIFTTSKGKRASKGGRTCGFVDERGLYKSLKGACKLKLCGVSGLRLMDGTWVAIQTPDETKWCSPDQLVNLHDLHSDEIEHLVAEELVRKREECLDALESIMTTKSVSFRRLSHLRKLVPGFGKAYTIFNKTLMEADAHYKSVRTWNEIIPSKGCLRVGGKCHPHVNGVFFNGIILGPDGHVLIPEMQSSLLQQHMELLESSLIPLMHPLADLSTVFKDGDEAEDFVEVHLPDVHKQVSGVDLGLPSWGKYVLMSAGALATLMLVISLIKCCRGVNRTRSIQRGPRESERKVSVTPQNGKVISSWESYKSGGETRL

SEQ ID NO: 31521 - protein, 524 aa, Artificial Sequence
  derived and/or modified protein sequence (wt) from glycoprotein__RABV__KF484537.1
MVLQALLFAPFLISSLCLGKFPIYTIPDKLGPWSPIDIHHLSCPNNLVVEDEGCNSLSGFSYMELKVGYISAIRVNGFTCTGVVTEAETYTNFVGYVTTTFKRKHFRPMPDACRSAYNWKLAGDPRYEESLHNPYPDYHWLRTVKTTKESLIVISPSVADLDPYDKSLHSRIFPGGKCSGITVSSTYCSTNHEYTIWMPEKAGLGTSCDIFTTSKGKRASKGGRTCGFVDERGLYKSLKGACKLKLCGVSGLRLMDGTWVAIQTPDETKWCSPDRLVNLHDLHSDEIEHLVAEELVRKREECLDALESIMTTKSVSFRRLSHLRKLVPGFGKAYTIFNKTLMEADAHYKSVRTWNEIIPSKGCLRVGGKCHPHVNGVFFNGIILGPDGHVLIPEMQSSLLQQHMELLESSVIPLMHPLADLSTVFKDGDEAEDFVEVHLPDVHKQVSGVDLGLPSWGKYVLMSAGALATLMLVISLIKCCRGVNRTRSIQRGPRESERKVSVTPQNGKVISSWESYKSGGETRL

SEQ ID NO: 31522 - protein, 524 aa, Artificial Sequence
  derived and/or modified protein sequence (wt) from glycoprotein__RABV__KF484538.1
MVLQALLFAPFLISSLCFGKFPIYTIPDKLGPWSPIDIHHLSCPNNLVVEDEGCNSLSGFSYMELKVGYISAIKVNGFTCTGVVTEAETYTNFVGYVTTTFKRKHFRPMPDACRSAYNWKLAGDPRYEESLHNPYPEYHWLRTVKTTKESLIVISPSVADLDPYDKSLHSRIFPNGKCSGMTVSSTYCSTNHEYTIWMPEKVGLGTSCDIFTTSKGKRASKGGRTCGFVDERGLYKSLKGACKLKLCGVSGLRLMDGTWVAIQTSDETKWCSPDQLVNLHDLHSDEIEHLVVEELVRKREECLDALESIMTTKSVSFRRLSHLRKLVPGFGKAYTIFNKTLMEADAHYKSVRTWNEIIPSKGCLRVGGKCHPHVNGVFFNGIILGPDGHVLIPEMQSSLLQQHIELLESSVIPLMHPLADLSTVFKDGDEAEDFVEVHLPDVHKQISGVDLGLPSWGKYVLMSAGALATLILVISLMKCCRWVNRTKSIQQGPRESERKVSVTPQNGRVISSWESYKIGGETGL

SEQ ID NO: 31523 - protein, 524 aa, Artificial Sequence
  derived and/or modified protein sequence (wt) from glycoprotein__RABV__KF484539.1
MVLQALLFAPFLISSLCLGKFPIYTIPDKLGPWSPIDIHHLSCPNNLVVEDEGCNSLSGFSYMELKVGYISAIKVNGFTCTGVVTEAETYTNFVGYVTTTFKRKHFRPMPDACRSAYNWKLAGDPRYEESLHNPYPDYHWLRTVKTTKESLIVISPSVADLDPYDKSLHSRIFPGGKCSGMTVSSTYCSTNHEYTIWMPEKAGLGTSCDIFTTSKGKRATKGGKTCGFVDERGLYKSLKGACKLKLCGVSGLRLMDGTWVAIQTSDETKWCSPDQLVNLHDLHSDEIEHLVVEELVRKREECLDALESIMTTKSVSFRRLSHLRKLVPGFGKAYTIFNKTLMEADAHYKSVRTWNEIIPSKGCLRVGGKCHPHVNGVFFNGIILGPDGHVLIPEMQSSLLQQHMELLESSVIPLMHPLADPSTVFKDDDEAEDFVEVHLPDVHKQVSGVDLGLPSWGRYVLMSAGALAILMLVISLMKCCTGVNRTKSIKQGSRESERKVSITPQNGKVISSWESYKSGGETGL

SEQ ID NO: 31524 - protein, 524 aa, Artificial Sequence
  derived and/or modified protein sequence (wt) from glycoprotein__RABV__KF484540.1
MVLQALLFAPFLISSLCLGKFPIYTIPDKLGPWSPIDIHHLSCPNNLVVEDEGCNSLSGFSYMELKVGYISAIRVNGFTCTGVVTEAETYTNFVGYVTTTFKRKHFRPMPDACRSAYNWKLAGDPRYEESLHNPYPDYHWLRTVKTTKESLIVISPSVADLDPYDKSLHSRIFPGGKCSGITVSSTYCSTNHEYTIWMPEKAGLGTSCDIFTTSKGKRASKGGRTCGFVDERGLYKSLKGACKLKLCGVSGLRLMDGTWVAIQTPDEIKWCSPDQLVNLHDLHSDEIEHLVAEELVRKREECLDALESIMTTKSVSFRRLSHLRKLVPGFGKAYTIFNKTLMEADAHYKSVRTWNEIIPSKGCLRVGGKCHPHVNGVFFNGIILGPDGHVLIPEMQSSLLQQHMELLESSVIPLMHPLADLSTVFKDGDEAEDFIEVHLPDVHKQVSGVDLGLPSWGKYVLMSAGALATLMLVISLIKCCKGVNRTKSIQWGPRESERKVSVTPQNGKVISSWESYKSGGETRL

SEQ ID NO: 31525 - protein, 524 aa, Artificial Sequence
  derived and/or modified protein sequence (wt) from glycoprotein__RABV__KF484541.1
MILKALLFAPFLISSLCLGKFPIYTIPDKLGPWSPIDIHHLSCPNNLVVEDEGCNSLSGFSYMELKVGYISAIKVNGFTCTGVVTEAETYTNFVGYVTTTFKRKHFRPMPDACRSAYNWKLAGDPRYEESLHNPYPDYHWLRTVKTTKESLIIISPSVADLDPYDKSLHSRIFPGGKCSGMTVSSTYCPTNHEYTIWMPEKASLGTSCDIFTTSKGKRASRGGRTCGFVDERGLYKSLKGACKLKLCGVSGLRLMDGTWVAIQTSDETKWCSPDQLVNLHDLHSDEIEHLVVEELVRKREECLDALESIMTTKSVSFRRLSHLRKLVPGFGKAYTIFNKTLMEADAHYKSVRTWNEIIPSKGCLRVGGKCHPHVNGVFFNGIILGPDGHVLIPEMQSSLLQQHMELLESSVIPLMHPLADPSTVFKDDDEAEDFVEVHLPDVHKQVSGVDLGLPSWGKYVLMSAGTLATLMLVISLMKCCRGFNRTKSIRQDSGESGRKVSVTPQNGKVISSWESYKSGGETGL

SEQ ID NO: 31526 - protein, 524 aa, Artificial Sequence
  derived and/or modified protein sequence (wt) from glycoprotein__RABV__KF484542.1
MVLQVLLFALFLISSLCLGKFPIYTIPDKLGPWSPIDIHHLSCPNNLVVEDEGCNSLSGFSYMELKVGYISAIKVNGFTCTGVVTEAETYTNFVGYVTTTFKRKHFRPMPDACRSAYNWKLAGDPRYEESLHNPYPEYHWLRTVKTTKESLIVISPSVADLDPYDKSLHSRIFPSGKCSGMTVSSTYCSTNHEYTIWMPEKVSLGTSCDIFTTSKGKRASKGGRTCGFVDERGLYKSLKGACKLKLCGVSGLRLMDGTWVAIQTSDEAKWCSPDQLVNLHDLHSDEIEHLVVEELVRKREECLDALESIMTTKSVSFRRLSHLRKLVPGFGKAYTIFNKTLMEADAHYKSVRTWNEIIPSKGCLRVGGKCHPHVNGVFFNGIILGPDGHVLIPEMQSSLLQQHIELLESSVIPLMHPLADLSTVFKDGDEAEDFVEVHLPDVHKQISGVDLGLPSWGKYVLMSAGALATLVLVISLMKCCRWVNRTKSIQQGPRESERRVSVTPQNGKVISSWESYKIGGETGL

SEQ ID NO: 31527 - protein, 524 aa, Artificial Sequence
  derived and/or modified protein sequence (wt) from glycoprotein__RABV__KF484543.1
MVLQALLFAPFLISSLCLGKFPIYTIPDKLGPWSPIDIHHLSCPNNLVVEDEGCNSLSGFSYMELKVGYISAIKVNGFTCTGVVTEAETYTNFVGYVTTTFKRKHFRPMPDACRSAYNWKLAGDPRYEESLHNPYPEYHWLRTVKTTKESLIVISPSVADLDPYDKSLHSRIFPSGKCSGMTVSSTYCSTNHEYTIWMPEKVGLGTSCDIFTTSKGKRASKGGRTCGFVDERGLYKSLKGACKLKLCGVSGLRLMDGTWVAMQTSDETKWCSPDQLVNLHDLHSDEIEHLVVEELVRKREECLDALESIMTTKSVSFRRLSHLRKLVPGFGKAYTIFNKTLMEADAHYKSVRTWSEIIPSKGCLRVGGKCHPHVNGVFFNGIILGPDGHVLIPEMQSSLLQQHMELLESSVIPLMHPLADLSTVFKDGDEAEDFVEVHLPDVHKQISGVDLGLPSWGKYVLMSAGALATLILVISLMKCCRWVNKTKSIQQGPRESERKVSVTPQNGKVISSWESYKIGGETGL

SEQ ID NO: 31528 - protein, 524 aa, Artificial Sequence
  derived and/or modified protein sequence (wt) from glycoprotein__RABV__KF484544.1
MVLQALLFAPFLISSLCLGKFPIYTIPDKLGPWSPIDIHHLSCPNNLVVEDEGCNSLSGFSYMELKVGYISAIKVNGFTCTGVVTEAETYTNFVGYVTTTFKRKHFRPMPDACRSAYNWKLAGDPRYEESLHNPYPEYHWLRTVKTTKESLIVISPSVADLDPYDKSLHSRIFPSGKCSGMTVSSTYCSTNHEYTIWMPEKVGLGTSCDIFTTSKGKKASKGGRTCGFVDERGLYKSLKGACKLKLCGVSGLRLMDGTWVAMQTSDETKWCSPDQLVNLHDLHSDEIEHLVVEELVRKREECLDALESIMTTKSVSFRRLSHLRKLVPGFGKAYTIFNKTLMEADAHYKSVRTWNEIIPSKGCLRVGGKCHPHVNGVFFNGIILGPDGHVLIPEMQSFLLQQHMELLESSVIPLMHPLADLSTVFKDGDEAEDFVEVHLPDVHKQISGVDLGLPSWGKYVLMSAGALATLILVISLMKCCRWVNRTKSIQQGPRESERKVSVTPQNGKVISSWESYKIGGETGL

SEQ ID NO: 31529 - protein, 524 aa, Artificial Sequence
  derived and/or modified protein sequence (wt) from glycoprotein__RABV__KF484545.1
MVLQALLFAPFLISSLCLGKFPIYTIPDKLGPWSPIDIHHLSCPNNLVVEDEGCNSLSGFSYMELKVGYISAIKVNGFTCTGVVTEAETYTNFVGYVTTTFKRKHFRPMPDACRSAYNWKLAGDPRYEESLHNPYPEYHWLRTVKTTKESLIVISPSVADLDPYDKSLHSRIFPSGKCSGMTVSSTYCSTNHEYTIWMPEKVGLGTSCDIFTTSKGKKASKGGRTCGFVDERGLYKSLKGACKLKLCGVSGLRLMDGTWVAMQTSDETKWCSPDQLVNLHDLHSDEIEHLVVEELVRKREECLDALESIMTTKSVSFRRLSHLRKLVPGFGKAYTIFNKTLMEADAHYKSVRTWNEIIPSKGCLRVGGKCHPHVNGVFFNGIILGPDGHVLIPEMQSSLLQQHMELLESSVIPLMHPLADLSTVFKDGDEAEDFVEVHLPDVHKQISGVDLGLPSWGKYVLMSAGALATLILVISLMKCCRWVNRTKSIQQGPRESERKVSVTPQNGKVISSWESYKIGGETGL

SEQ ID NO: 31530 - protein, 524 aa, Artificial Sequence
  derived and/or modified protein sequence (wt) from glycoprotein__RABV__KF484546.1
MVLQALLFAPFLISSLCLGKFPIYTIPDKLGPWSPIDIHHLSCPNNLVVEDEGCNSLSGFSYMELKVGYISAIKVNGFTCTGVVTEAETYTNFVGYVTTTFKRKHFRPMPDACRSAYNWKLAGDPRYEESLHNPYPEYHWLRTVKTTKESLIVISPSVADLDPYDKSLHSRIFPSGKCSGMTVSSTYCSTNHEYTIWMPEKVGLGTSCDIFTTSKGKRASKGGRTCGFVDERGLYKSLKGACKLKLCGVSGLRLMDGTWVAMQTSDETKWCSPDQLVNLHDLHSDEIEHLVVEELVRKREECLDALESIMTTKSVSFRRLSHLRKLVPGFGKAYTIFNKTLMEADAHYKSVRTWNEIIPSKGCLRVGGKCHPHVNGVFFNGIILGPDGHVLIPEMQSSLLQQHMELLESSVIPLMHPLADLSTVFKDGDEAEDFVEVHLPDVHKQISGVDLGLPSWGKYVLMSAGALATLILVISLMKCCRWVNRTKSIQQGPRESERKVSVTPQNGKVISSWESYKIGGETGL

SEQ ID NO: 31531 - protein, 524 aa, Artificial Sequence
  derived and/or modified protein sequence (wt) from glycoprotein__RABV__KF484547.1
MVLQALLFAPFLISSLCLGKFPIYTIPDKLGPWSPIDIHHLSCPNNLVVEDEGCNSLSGFSYMELKVGYISAIKVNGFTCTGVVTEAETYTNFVGYVTTTFKRKHFRPMPDACRSAYNWKLAGDPRYEESLHNPYPDYHWLRTVKTTKESLIVISPSVADLDPYDKSLHSRIFPSGKCSGMTVSSTYCSTNHEYTIWMPEKAGLGTSCDIFTTSKGKRASKGGRTCGFVDERGLYKSLKGACKLKLCGVSGLRLMDGTWVAIQTSDETKWCSSDQLVNLHDLHSDEIEHLVVEELVRKREECLDALESIMTTKSVSFRRLSHLRKLVPGFGKAYTIFNKTLMEADAHYKSVRTWNEVIPSKGCLRVGGKCHPHVNGVFFNGIILGPDGHVLIPEMQSSLLQQHMELLESSVIPLMHPLADISTVFKDGDEAEDFVEVHLPDVHKQISGVDLGLPSWGKYVLMSAGALAILMLMISLMKCCRGVNRTKSIQQGPRESERKVSVTPQNGKVISSWESYKSGGETGL

SEQ ID NO: 31532 - protein, 524 aa, Artificial Sequence
  derived and/or modified protein sequence (wt) from glycoprotein__RABV__KF484548.1
MVLQVLLFALFLISSLCLGKFPIYTIPDKLGPWSPIDIHHLSCPNNLVVEDEGCNSLSGFSYMELKVGYISAIKVNGFTCTGVVTEAETYTNFVGYVTTTFKRKHFRPMPDACRSAYNWKLAGDPRYEESLHNPYPEYHWLRTVKTTKESLIVISPSVADLDPYDKSLHSRIFPSGKCSGMTVSSTYCSTNHEYTIWMPEKVSLGTSCDIFTTSKGKRASKGGRTCGFVDERGLYKSLKGACKLKLCGVSGLRLMDGTWVAIQTSDEAKWCSPDQLVNLHDLHSDEIEHLVVEELVRKREECLDALESIMTTKSISFRRLSHLRKLVPGFGKAYTIFNKTLMEADAHYKSVRTWNEIIPSKGCLRVGGKCHPHVNGVFFNGIILGPDGHVLIPEMQSSLLQQHIELLESSVIPLMHPLADLSTVFKDGDEAEDFVEVHLPDVHKQISGVDLGLPSWGKYVLMSAGALATLVLVISLMKWCRWVNKTKSIQQGPRESERKVSVTPQNGKVISSWESYKIGGETGL

SEQ ID NO: 31533 - protein, 524 aa, Artificial Sequence
  derived and/or modified protein sequence (wt) from glycoprotein__RABV__KF484549.1
MVLQALLFAPFLISSLCLGKFPIYTIPDKLGPWSPIDIHHLSCPNNLVVEDEGCNSLSGFSYMELKVGYISAIKVNGFTCTGVVTEAETYTNFVGYVTTTFKRKHFRPMPDACRSAYNWKLAGDPRYEESLHNPYPDYHWLRTVKTTKESLIVISPSVADLDPYDKSLHSRIFPGGKCSGMTVSSTYCPTNHEYTIWMPEKAGLGTSCDIFTTSKGKRASKGGRTCGFVDERGLYKSLKGACKLKLCGVSGLRLMDGTWVAIQTSDETKWCSPDQLVNLHDLHSDEIEHLVVEELVRKREECLDALESIMTTKSVSFRRLSHLRKLVPGFGKAYTIFNKTLMEADAHYKSVRTWNEIIPSKGCLRVGGKCHPHVNGVFFNGIILGPDGHVLIPEMQSSLLQQHVELLESSVIPLMHPLADPSTVFKDDDEAEDFVEVHLPDVHRQVSGVDLGLPSWGKYVLMSAGALATLMLVISLMKCCRGFNRTKSTRQGSRESERKVSVTPQNGKVISSWESYKSGGETGL

SEQ ID NO: 31534 - protein, 524 aa, Artificial Sequence
  derived and/or modified protein sequence (wt) from glycoprotein__RABV__KF484550.1
MVLQALLFAPFLISSLCFGKFPIYTIPDKLGPWSPIDIHHLSCPNNLVVEDEGCNSLSGFSYMELKVGYISAIKVNGFTCTGVVTEAETYTNFVGYVTTTFKRKHFRPMPDACRSAYNWKVAGDPRYEESLHNPYPDYHWLRTVKTTKESLIIISPSVADLDPYDKSLHSRIFPGGKCSGMTISSTYCSTNHDYTIWMPEKTGLGTSCDIFTTSKGKRASKGGRTCGFVDERGLYKSLKGACKLKLCGVSGLRLMDGTWAAIQTSDETKWCSPDQLVNLHDLHSDEIEHLVVEELVRRREECLDALESIMTTKSVSFRRLSHLRKLVPGFGKAYTIFNKTLMEADAHYKSVRTWNEIIPSKGCLRVGGKCHPHVNGVFFNGIILGPDGHVLIPEMQSSLLQQHMELLESSVIPLMHPLADLSTVFKDGDEAEDFVEVHLPDVHKQVSGVDLGLPSWGKYMLMSAGALATLMLVVPLMKCCRRVNRTKSIQQGPRESDRKVSVTPQSGKVISSWESYKSGGGTGL

SEQ ID NO: 31535 - protein, 524 aa, Artificial Sequence
  derived and/or modified protein sequence (wt) from glycoprotein__RABV__KF484551.1
MVLQALLFAPFLISSLCLGKFPIYTIPDKLGPWSPIDIHHLSCPNNLVVEDEGCNSLSGFSYMELKVGYISAIKVNGFTCTGVVTEAETYTNFVGYVTTTFKRKHFRPMPDACRSAYNWKLAGDPRYEESLHNPYPEYHWLRTVKTTKESLIVISPSVADLDPYDKSLHSRIFPSGKCSGMTVSSTYCSTNHEYTIWMPEKVGLGTSCDIFTTSKGKRASKGGRTCGFVDERGLYKSLKGACKLKLCGVSGLRLMDGTWVAMQTSDETKWCSPDQLVNLHDLHSDEIEHLVVEELVRKREECLDALESIMTTKSVSFRRLSHLRKLVPGFGKAYTIFNKTLMEADAHYKSVRTWNEIIPSKGCLRVGGRCHPHVNGVFFNGIILGPDGHVLIPEMQSSLLQQHMELLESSVIPLMHPLADLSTVFKDGDEAEDFVEVHLPDVHKQISGVDLGLPSWGKYVLMSAGALATLILVISLMKCCRWVNRTKSIQQGPRESERKVSVTPQNGKVISSWESYKIGGETGL

SEQ ID NO: 31536 - protein, 524 aa, Artificial Sequence
  derived and/or modified protein sequence (wt) from glycoprotein__RABV__KF484552.1
MVLQALLFAPFLISSLCLGKFPIYTIPDKLGPWSPIDIHHLSCPNNLVVEDEGCNNLSGFSYMELKVGYISAIKVNGFTCTGVVTEAETYTNFVGYVTTTFKRKHFRPMPDACRSAYNWKLAGDPRYEESLHNPYPEYHWLRTVKTTKESLIVISPSVADLDPYDKSLHSRIFPSGKCSGMTVSSTYCSTNHEYTIWMPEKAGLGTSCDIFTTSKGKRASKGGRTCGFVDERGLYKSLKGACKLKLCGVSGLRLMDGTWVAIQTSDETKWCSPDQLVNLHDLHSDEIEHLVVEELVRKREECLDALESIMTTKSVSFRRLSHLRKLVPGFGKAYTIFNKTLMEADAHYKSVRTWNEIIPSKGCLRVGGKCHPHVNGVFFNGIILGPDGHVLIPEMQSSLLQQHMELLESSVIPLMHPLADLSTVFKDGDEAEDFVEVHLPDVHKQISGVDLGLPSWGKYVMMSAGAFATLILVISLMKCCRWVNRTKSIQQGPRESERKVSVTPQNGKVISSWESYKIGGETGL

SEQ ID NO: 31537 - protein, 524 aa, Artificial Sequence
  derived and/or modified protein sequence (wt) from glycoprotein__RABV__KF484553.1
MVLQALLFAPFLISSLCLGKFPIYTIPDKLGPWSPIDIHHLSCPNNLVVEDEGCNSLSGFSYMELKVGYISAIKVNGFTCTGVVTEAETYTNFVGYVTTTFKRKHFRPMPDACRSAYNWKLAGDPRYEESLHNPYPEYHWLRTVKTTKESLIVISPSVADLDPYDKSLHSRIFPSGKCSGMTVSSTYCSTNHEYTIWMPEKVSLGTSCDIFTTSKGKRASKGGRTCGFVDERGLYKSLKGACKLKLCGVSGLRLMDGTWVAIQTSDETKWCSPDQLVNLHDLHSDEIEHLVVEELVRKREECLDALESIMTTKSVSFRRLSHLRKLVPGFGKAYTIFNKTLMEADAHYKSVRTWNEIIPSKGCLRVGGKCHPHVNGVFFNGIILGPDGHVLIPEMQSSLLQQHIELLESSVIPLMHPLADLSTVFKDGDEAEDFVEVHLPDVHKQISGVDLGLPSWGKYVLMSAGALATLVLVISLMKCCRWVNRTKSIQQGPRESERKVSVTPQNGKVISSWESYKIGGETGL

SEQ ID NO: 31538 - protein, 524 aa, Artificial Sequence
  derived and/or modified protein sequence (wt) from glycoprotein__RABV__KF484554.1
MVLQALLFAPFLISSLCLGKFPIYTIPDKLGPWSPIDIHHLSCPNNLVVEDEGCNNLSGFSYMELKVGYISAIKVNGFTCTGVVTEAETYTNFVGYVTTTFKRKHFRPMPDACRSAYNWKLAGDPRYEESLHNPYPEYHWLRTVKTTKESLIVISPSVADLDPYDKSLHSRIFPSGKCSGMTVSSTYCSTNHEYTIWMPEKAGLGTSCDIFTTSKGKRASKGGRTCGFVDERGLYKSLKGACKLKLCGVSGLRLMDGTWVAIQTSDETKWCSPDQLVNLHDLHSDEIEHLVVEELVRKREECLDALESIMTTKSVSFRRLSYLRKLVPGFGKAYTIFNKTLMEADAHYKSVRTWNEIIPSKGCLRVGGKCHPHVNGVFFNGIILGPDGHVLIPEMQSSLLQQHMELLESSVIPLMHPLADLSTVFKDGDEAEDFVEVHLPDVHKQISGVDLGLPSWGKYVMMSAGALATLILVISLMKCCRWVNRTKSIQQGPRESERKVSVTPQNGKVISSWESYKIGGETGL

SEQ ID NO: 31539 - protein, 524 aa, Artificial Sequence
  derived and/or modified protein sequence (wt) from glycoprotein__RABV__KF484555.1
MVLQALLFAPLLISSLCLGKFPIYTIPEKLGPWSPIDIHHLSCPNNLVVEDEGCNSLSGFSYMELKVGYISAIKVNGFTCTGVVTEAETYTNFVGYVTTTFKRKHFSPMPDACRSAYNWKLAGDPRYEESLHNPYPDYHWLRTVKTTKESLIVISPSVADLDPYDKSLHSRIFPGGKCSGMTVSSTYCSTNHEYTIWMPEKPGLGTSCDIFTTSKGKRASKEGRTCGFVDERGLYKSLKGACKLKLCGVSGLRLMDGTWVAIQTSDEIKWCSPDQLVNLHDLHSDEIEHLVVEELVRKREECLDALESIMTTKSVSFRRLSHLRKLVPGFGKAYTIFNKTLMEADAHYKSVRTWNEIIPSKGCLRVGGKCHPHVNGVFFNGIILGPDGHVLIPEMQSSLLQQHVELLESSVIPLMHPLADPSTVFKDDDEAEDFVEVHLPDVQKQVSGVDLGLPSWGKYVLMSAGALATLVLVISLMKCCRGINRTKLIKQGSRESERKVSVTPQNGKVISSWESYKSGGETGL

SEQ ID NO: 31540 - protein, 524 aa, Artificial Sequence
  derived and/or modified protein sequence (wt) from glycoprotein__RABV__KF484556.1
MVLQALLFAPFLISSLCLGKFPIYTIPDKLGPWSPIDIHHLSCPNNLVVEDEGCNNLSGFSYMELKVGYISAIKVNGFTCTGVVTEAETYTNFVGYVTTTFRRKHFRPMPDACRSAYNWKLAGDPRYEESLHNPYPEYHWLRTVKTTKESLIVISPSVADLDPYDKSLHSRIFPSGKCSGMTVSSTYCSTNHEYTIWMPEKAGLGTSCDIFTTSKGKRASKGGRTCGFVDERGLYKSLKGACKLKLCGVSGLRLMDGTWVAIQTSDETKWCSPDQLVNLHDLHSDEIEHLVVEELVRKREECLDALESIMTTKSVSFRRLSHLRKLVPGFGKAYTIFNKTLMEADAHYKSVRTWNEIIPSKGCLRVGGKCHPHVNGVFFNGIILGPDGHVLIPEMQSSLLQQHMELLESSVIPLMHPLADLSTVFKDGDEAEDFVEVHLPDVHKQISGVDLGLPSWGKYVMMSAGALATLILVISLMKCCRWVNRTKSIQQGPRESERKVSVTPQNGKVISSWESYKIGGETGL

SEQ ID NO: 31541 - protein, 524 aa, Artificial Sequence
  derived and/or modified protein sequence (wt) from glycoprotein__RABV__KF484557.1
MVLQALLFAPFLISSLCFGKFPIYTIPDKLGPWSPIDIHHLSCPNNLVVEDEGCNSLSGFSYMELKVGYISAIKVNGFTCTGVVTEAETYTNFVGYVTTTFKRKHFRPMPDACRSAYNWKVAGDPRYEESLHNPYPDYHWLRTVKTTKESLIIISPSVADLDPYDKSLHSRIFPGGKCSGMTISSTYCSTNHDYTIWMPEKAGLGTSCDIFTTSKGKRASKGGRTCGFVDERGLYKSLKGACKLKLCGVSGLRLMDGTWAAIQTSDETKWCSPDQLVNLHDLHSDEIEHLVVEELVRRREECLDALESIMTTKSVSFRRLSHLRKLVPGFGKAYTIFNKTLMEADAHYKSVRTWNEIIPSKGCLRVGGKCHPHVNGVFFNGIILGPDGHVLIPEMQSSLLQQHMELLESSVIPLMHPLADLSTVFKDGDEAEDFVEVHLPDVHKQVSGVDLGLPSWGKYMLMSAGALATLMLVIPLMRCCRRVNRTKSIQQGPRESDRKVSVTPQNGKVISSWESYKSGGETGL

SEQ ID NO: 31542 - protein, 524 aa, Artificial Sequence
  derived and/or modified protein sequence (wt) from glycoprotein__RABV__KF484558.1
MILHALLFAPFLISSLCLGKFPIYTIPDKLGPWSPIDIHHLSCPNNLVIEDEGCNSLSGFSYMELKVGYISAIKVNGFTCTGVVTEAETYTNFVGYVTTTFKRKHFRPMPDACRSAYNWKLAGDPRYEESLHNPYPEYHWLRTVKTTKESLVVISPSVADLDPYDKSLHSRIFPSGKCSGMTVSSTYCSTNHEYTIWMPEKVGLGTSCDIFTTSKGKRASKGGRTCGFVDERGLYKSLKGACKLKLCGVSGLRLMDGTWVAIQTSDETKWCSPDQLVNLHDLHSDEIEHLVVEELVRKREECLDALESIMTTKSVSFRRLSHLRKLVPGFGKAYTIFNKTLMEADAHYKSVRTWNEIIPSKGCLRVGGKCHPHVNGVFFNGIILGPDGHVLIPEMQSSLLQQHMELLESSVIPLMHPLADLSTVFKDGDEAEDFVEVHLPDVHKQISGVDLGLPSWGKYVLMSAGALATLILVISLMKCCRWVNRTESIQQGPRESERKVSVTPQNGKVISSWESYKIGGETGL

SEQ ID NO: 31543 - protein, 524 aa, Artificial Sequence
  derived and/or modified protein sequence (wt) from glycoprotein__RABV__KF484559.1
MVLQALLFAPFLISSLCFGKFPIYTIPDKLGPWSPIDIHHLSCPNNLVVEDEGCNSLSGFSYMELKVGYISAIKVNGFTCTGVVTEAETYTNFVGYVTTTFKRKHFRPMPDACRSAYNWKVAGDPRYEESLHNPYPDYHWLRTVKTTKESLIIISPSVADLDPYDKSLHSRIFPGGKCSGMTISSTYCSTNHDYTIWMPEKAGLGTSCDIFTTSKGKRASKGGRTCGFVDERGLYKSLKGACKLKLCGVSGLRLMDGTWAAIQTSDETKWCSPDQLVNLHDLHSDEIEHLVVEELVRRREECLDALESIMTTKSVSFRRLSHLRKLVPGFGKAYTIFNKTLMEADAHYKSVRTWNEIIPSKGCLRVGGKCHPHVNGVFFNGIILGPDGHVLIPEMQSSLLQQHMELLESSVIPLMHPLADLSTVFKDGDEAEDFVEVHLPDVHKQVSGVDLGLPSWGKYMLMSAGALATLMLVIPLMKCCRRVNRTKSIQQGPRESDRKVSVTPQNGKVISSWESYKSGGETGL

SEQ ID NO: 31544 - protein, 524 aa, Artificial Sequence
  derived and/or modified protein sequence (wt) from glycoprotein__RABV__KF620487.1
MIPQALLFVPFLGFPLCLGKFPIYTIPDKLGPWSPIDIHHLSCPNNMVVEDEGCTNLSGFSYMELKVGYISAIKVNGFTCTGVVTEAETYTNFVGYVTTTFKRKHFRPVPDACRDAHNWKMAGDPRYEESLHNPYPDYHWLRTVKTTKESLVIISPSVADLDPYDKSLHSSVFPGGKCSGITVSSTYCSTNHDYTIWMPENPRLGTSCDIFTYSKGKRASKESKTCGFVDERGLYKSLKGACKLKLCGVPGLRLMDGTWVAIQTSDEVKWCPPDQLVNLHDLHSDELEHLVVEELVKKREECLDALESIMTTKSVSFRRLSHLRKLVPGFGKAYTIFNKTLMEADAHYKSVRTWNEIIPSKGCLRVGGRCHPHVNGVFFNGIILGPDGHVLIPEMQSSLLQQHMELLESSVIPLMHPLADPSAVFKTGDEAEDFVEVHLPDVHKQVSGVDLGLPSWGKYVLMSAGVLIVLVLMIFLMTCCKRPNRAELIHHSPRETERKVSVTSQGGRVISSWESYKNGGETKL

SEQ ID NO: 31545 - protein, 524 aa, Artificial Sequence
  derived and/or modified protein sequence (wt) from glycoprotein__RABV__KF620488.1
MIPQALLFVPFLGFPLCLGKFPIYTIPDKLGPWSPIDIHHLSCPNNMVVEDEGCTNLSGFSYMELKVGYISAIKVNGFTCTGVVTEAETYTNFVGYVTTTFKRKHFRPMPDACRDAHNWKMAGDPRYEESLHNPYPDYHWLRTVKTTKESLVIISPSVADLDPYDKSLHSSVFPGGKCSGITVSSTYCSTNHDYTIWMPENPRLGTSCDIFTYSKGKRASKESKTCGFVDERGLYKSLKGACKLKLCGVLGLRLMDGTWVAIQTSDEVKWCPPDQLVNLHDFRSDELEHLVVEELVKKREECLDALESIMTTKSVSFRRLSHLRKLVPGFGKAYTIFNKTLMEADAHYKSVRTWNEIIPSKGCLKVGGRCHPHVNGVFFNGIILGPDGHVLIPEMQSSLLQQHMELLESSVIPLMHPLADPSAVFKTGDEAEDFVEVHLPDVHKQVSGVDLGLPSWGKYVLMSAGVLIVLVLMIFLMMCCKKPNRAEPIHHSPRETERKMSVTSQGGRVISSWESYKNGGETKL

SEQ ID NO: 31546 - protein, 524 aa, Artificial Sequence
  derived and/or modified protein sequence (wt) from glycoprotein__RABV__KF620489.1
MIPQALLFVPFLGFPLCLGKFPIYTIPDKLGPWSPIDIHHLSCPNNMVVEDEGCTNLSGFSYMELKVGYISAIKVNGFTCTGVVTEAETYTNFVGYVTTTFKRKHFRPVPDACRDAHNWKIAGDPRYEESLHNPYPDYHWLRTVKTTKESLVIISPSVADLDPYDKSLHSSVFPGGKCSGITVSSTYCSTNHDYTIWMPENPRLGTSCDIFTYSKGKRASKESKTCGFVDERGLYKSLKGACKLKLCGVPGLRLMDGTWVAIQTSDEVKWCPPDQLVNLHDLHSDELEHRVVEELVKKREECLDALESIMTTKSVSFRRLSHLRKLVPGFGKAYTIFNKTLMEADAHYKSVRTWNEIIPSKGCLRVGGRCHPHVNGVFFNGIILGPDGHVLIPEMQSSLLQQHMELLESSVIPLMHPLADPSAVFKTGDEAEDFVEVHLPDVHKQVSGVDLGLPSWGKYVLMSAGVLIVLVLMIFLMTCCKRPNRAEPIHHSPRETERKVSVTSQGGRVISSWESYKNGGETKL

SEQ ID NO: 31547 - protein, 524 aa, Artificial Sequence
  derived and/or modified protein sequence (wt) from glycoprotein__RABV__KF656698.1
MILQVLQFVPLLISPLCLGKFPIYTIPDKLGPWSPIDIHHLSCPNNLVVEDEGCTNLSGFSYMELKVGYISAIKVNGFTCTGVVTEAETYTNFVGYVTTTFKRKHFRPIPDACRAAYNWKMAGDPRYEESLQNPYPEYHWLRTVKTTKESLIIISPSVADLDPYDKSLHSRVFPGGSALGITVSSTYCSTNHDYTIWMPEEPRLGTSCDIFTSSKGKKASKGGKTCGFVDERGLYKSLKGACKLKLCGVLGLRLMDGTWVSIQTSDNTKWCSPDQLVNLHDFHSDEIEHLVVEELVKKREECLDALESIMTTKSVSFRRLTYLRKLVPGFGKAYTIFNKTLMEADAHYKSVRTWNEIIPSKGCLKVRERCHPPVDGVFFNGIILGPDGNVLIPEMQSSLLQQHMELLESSVIPLMHPLADPSTVFKEGDEAEDFVEVHLPDVHKQISGVDLGLPSWGKYLLMIAGGLATLVLIICSIACCRRAKRTESRRRGSGESGKKATATPRTRKVVSSWELYKREGDARL

SEQ ID NO: 31548 - protein, 524 aa, Artificial Sequence
  derived and/or modified protein sequence (wt) from glycoprotein__RABV__KF656699.1
MILQVLQFVPLLISPLCLGKFPIYTIPDKLGPWSPIDIHHLSCPNNLVVEDEGCTNLSGFSYMELKVGYISAIKVNGFTCTGVVTEAETYTNFVGYVTTTFKRKHFRPIPDACRAAYNWKMAGDPRYEESLQNPYPEYHWLRTVKTTKESLIIISPSVADLDPYDKSLHSRVFPGGSALGITVSSTYCSTNHDYTIWMPEEPRLGTSCDIFTSSKGKKASKGGKTCGFVDERGLYKSLKGACKLKLCGVLGLRLMDGTWVSIQTSDNTKWCSPDQLVNLHDFHSDEIEHLVVEELVKKREECLDALESIMTTKSVSFRRLSYLRKLVPGFGKAYTIFNKTLMEADAHYKSVRTWNEIIPSKGCLKVRERCHPPVDGVFFNGIILGPDGNVLIPEMQSSLLQQHMELLESSVIPLMHPLADPSTVFKEGDEAEDFVEVHLPDVHKQISGVDLGLPSWGKYLLMIAGGLATLVLIICSIACCRRAKRTESRRRGSGESGKKATATPRTRKVVSSWELYKREGDARL

SEQ ID NO: 31549 - protein, 524 aa, Artificial Sequence
  derived and/or modified protein sequence (wt) from glycoprotein__RABV__KF663531.1
MIPQVLLFVPLLVFSSCFGKFPIYTIPDKLGPWSPIDIHHLSCPNNLVVEDEGCTNLSGFSYMELKVGYISAIKVNGFTCTGVVTEAETYTNFVGYVTTTFKRKHFRPMPDACRAAYNWKVAGDPRYEESLHNPYPDYHWLRTVKTTKESLVIISPSVADLDPYDKSLHSRVFPGGKCSGITVSSTCCSTNHDYTIWMPENPRLGTSCDIFTNSRGKRASKGGKTCGFVDERGLCKSLKGACKLKLCGVLGLRLMDGTWVAIQTSDEIKWCPPDQLVNLHDFHSDEIEHFVVEELVKKREECLDALETIMTTKSVSFRRLSHLRKLVPGFGKAYTIFNKTLMEADAHYKSIRTWNEIIPSKGCLRVGGRCHPHVNGVFFNGIILGPDGHVLIPEMQSSLLHQHMELLESSVIPLMHPLADPSTVFKDGDEAEDFVEVHLPDVHKQISGVDLGLPNWGKYVLISAGALTALMLTIFLMTCCRKTNRAGSIQHSPGETGRKVSVTSHNGRVISLWESYKSGSETKL

SEQ ID NO: 31550 - protein, 524 aa, Artificial Sequence
  derived and/or modified protein sequence (wt) from glycoprotein__RABV__KF663532.1
MIPQVLLFVPLLAFSSCFGKFPIYTIPDKLGPWSPIDIHHLSCPNNLVVEDEGCTNLSGFSYMELKVGYISAIKVNGFTCTGVVTEAETYTNFVGYVTTTFKRKHFRPMPDACRAAYNWKVAGDPRYEESLHNPYPDYHWLRTVKTTKESLVIISPSVADLDPYDKSLHSRVFPGGKCSGITVSSTCCSTNHDYTIWMPENPRLGTSCDIFTNSRGKRASKGGKTCGFVDERGLYKSLKGACKLKLCGVLGLGLMDGTWVAIQTSDEIKWCPPDQLVNLHDFHSDEIEHLVVEELVKKREECLDALETIMTTKSVSFRRLSHLRKLVPGFGKAYTIFNKTLMEADAHYKSIRTWNEIIPSKGCLRVGGRCHPHVNGVFFNGIILGPDGHVLIPEMQSSLLHQHMELLESSVIPLMHPLADPSTVFKDGDEAEDFVEVHLPDVHKQISGVDLGLPNWGKYVLISAGALTALMLTIFLMTCCRKTNRAGSIQHSPGETGRKVSVTSHNGRVMILWESYKSGSETKL

SEQ ID NO: 31551 - protein, 524 aa, Artificial Sequence
  derived and/or modified protein sequence (wt) from glycoprotein__RABV__KF663533.1
MIPQVLLFVPLLDFSSCFGKFPIYTIPDKLGPWSPIDIHHLSCPNNLVVEDEGCTNLSGFSYMELKVGYISAIKVNGFTCTGVVTEAETYTNFVGYVTTTFKRKHFRPMPDACRAAYNWKVAGDPRYEESLHNPYPDYHWLRTVKTTKESLVIISPSVADLDPYDKSLHSRVFPGGKCSGITVSSTCCSTNHDYTIWMPENPRLGTSCDIFTNSRGKRASKGGKTCGFEDERGLYKSLIGACKLKLCGVLGLRRMDGTWVAIQTSDKIKRCPPDQLVNLHDFHSDEIEHLVVEELVKKREECLDALETIMTTKSVSFRRLSHLRKLVPGFGKAYTIFNKTLMEADAHYKSIRTWNEIIPSKGCLRVGGRCHPHVNGVFFNGIILGPDGHVLIPEMQSSLLHQHMELLESSVIPLMHPLADPSTVFKDGDEAEDFVEVHLPDVHKQISGVDLGLPNWGKYVLISAGALTALMLTIFLMTCCRKTNRAGSIQHSPGETGRKVSVTSHNGRVISLWESYKSESETKL

SEQ ID NO: 31552 - protein, 524 aa, Artificial Sequence
  derived and/or modified protein sequence (wt) from glycoprotein__RABV__KF663534.1
MIPQVLLFVPLLVFSSCFGKFPIYTIPDKLGPWSPIDIHHLSCPNNLVVEDEGCTNLSGFSYMELKVGYISAIKVNGFTCTGVVTEAETYTNFVGYVTTTFKRKHFRPMPDACRAAYNWKVAGDPRYEESLHNPYPDYHWLRTVKTTKESLVIISPSVADLDPYDKSLHSRVFPGGKCSGITVSSTCCSTNHDYTIWMPENPRLGTSCDIFTNSRGKRASKGGKTCGFGDERGLYKSLNGACKLKLCGVLGLRRMDGTWVAIQTSDEIKWCPPDQLVNLHDFHSDEIEHLVVEELVKKREECLDALETIMTTKSVSFRRLSHLRKLVPGFGKAYTIFNKTLMEADAHYKSIRTWNEIIPSKGCLRVGGRCHPHVNGVFFNGIILGPDGHVLIPEMQSSLLHQHMELLESSVIPLMHPLADPSTVFKDGDEAEDFVEVHLPDVHKQISGVDLGLPNWGKYVMISAGALTALMLTIFLMTCCRKTNRAGSIQHSPGETGRKVSVTSHNGRVISLWESYKSESETKL

SEQ ID NO: 31553 - protein, 524 aa, Artificial Sequence
  derived and/or modified protein sequence (wt) from glycoprotein__RABV__KF663535.1
MIPQVLLFVPLLVISSCFGKFPIYTIPDKLGPWSPIDIHHLSCPNNLVVEDEGCTNLSGFSYMELKVGYISAIKVNGFTCTGVVTEAETYTNFVGYVTTTFKRKHFRPMPDACRAAYNWKVAGDPRYEESLHNPYPDYHWLRTVKTTKESLVIISPSVADLDPYDKSLHSRVFPGGKCSGITVSSTCCSTNHDYTIWMPENPRLGTSCDIFTNSRGKRASKGGKTCGFVDERGLYKSLKGACKLKLCGVLGLRLMDGTWVAIQTSDEIKWCPPDQLVNLHDFHSDEIEHLVVEELVKKREECLDALETIMTTKSVSFRRLSHLRKLVPGFGKAYTIFNKTLMEADAHYKSIRTWNEIIPSKGCLRVGGRCHPHVNGVFFNGIILGPDGHVLIPEMQSSLLHQHMELLESSVIPLMHPLADPSTVFKDGDEAEDFVEVHLPDVHKQISGVDLGLPNWGKYVLISAGALTALMLTIFLMTCCRKTNRAGSIQHSPGETGRKVSVTSHNGRVIFLWESYKSGSETKL

SEQ ID NO: 31554 - protein, 524 aa, Artificial Sequence
  derived and/or modified protein sequence (wt) from glycoprotein__RABV__KF663536.1
MIPQVLLFVPLLVFSSCFGKFPIYTIPDKLGPWSPIDIHHLSCPNNLVVEDEGCTNLSGFSYMELKVGYISAIKVNGFTCTGVVTEAETYTNFVGYVTTTFKRKHFRPMPDACRAAYNWKVAGDPRYEESLHNPYPDYHWLRTVKTTKESLVIISPSVADLDPYDKSLHSRVFPGGKCSGITVSSTCCSTNHDYTIWMPENPRLGTSCDIFTNSRGKRASKGGKTCGFVDERGLCKSLKGACKLKLCGVLGLRLMDGTWVAIQTSDEIKWCPPDQLVNLHDFHSDEIEHLVVEELVKKREECLDALETIMTTKSVSFRRLSHLRKLVPGFGKAYTIFNKTLMEADAHYKSIRTWNEIIPSKGCLRVGGRCHPHVNGVFFNGIILGPDGHVLIPEMQSSLLHQHMELLESSVIPLMHPLADPSTVFKDGDEAEDFVEVHLPDVHKQISGVDLGLPNWGKYVLISAGALTALMLTIFLMTCCRKTNRAGSIQHSPGETGRKVSVTSHNGRVISLWESYKSGSETKL

SEQ ID NO: 31555 - protein, 524 aa, Artificial Sequence
  derived and/or modified protein sequence (wt) from glycoprotein__RABV__KF663537.1
MIPQVLLFVPLLDFSSCFGKFPIYTIPDKLGPWSPIDIHHLSCPNNLVVEDEGCTNLSGFSYMELKVGYISAIKVNGFTCTGVVTEAETYTNFVGYVTTTFKRKHFRPMPDACRAAYNWKVAGDPRYEESLHNPYPDYHWLRTVKTTKESLVIISPSVADLDPYDKSLHSRVFPGGKCSGITVSSTCCSTNHDYTIWMPENPRLGTSCDIFTNSRGKRASKGGKTCGFVDERGLYKSLNGACKLKLCGVLGLRRMDGTWVAIQTSDEIKWCPPDQLVNLHDFHSDEIEHLVVEELVKKREECLDALETIMTTKSVSFRRLSHLRKLVPGFGKAYTIFNKTLMEADAHYKSIRTWNEIIPSKGCLRVGGRCHPHVNGVFFNGIILGPDGHVLIPEMQSSLLHQHMELLESSVIPLMHPLADPSTVFKDGDEAEDFVEVHLPDVHKQISGVDLGLPNWGKYVLISAGALTALMLTIFLMTCCRKTNRAGSIQHSPGETGRKVSVTSHNGRVISLWESYKSESETKL

SEQ ID NO: 31556 - protein, 524 aa, Artificial Sequence
  derived and/or modified protein sequence (wt) from glycoprotein__RABV__KF663538.1
MIPQVLLFVPLLVFSSCFGKFPIYTIPDKLGPWSPIDIHHLSCPNNLVVEDEGCTNLSGFSYMELKVGYISAIKVNGFTCTGVVTEAETYTNFVGYVTTTFKRKHFRPMPDACRAAYNWKVAGDPRYEESLHNPYPDYHWLRTVKTTKESLVIISPSVADLDPYDKSLHSRVFPGGKCSGITVSSTCCSTNHDYTIWMPENPRLGTSCDIFTNSRGKRASKGGKTCGFVDERGLYKSLKGACKLKLCGVLGLRLMDGTWVAIQTSDEIIRCPPDQLVNLHDFHSDEIEHLVVEELVKKREECLDALETIMTTKSVSFRRLSHLRKLVPGFGKAYTIFNKTLMEADAHYKSIRTWNEIIPSKGCLRVGGRCHPHVNGVFFNGIILGPDGHVLIPEMQSSLLHQHMELLESSVIPLMHPLADPSTVFKDGDEAEDFVEVHLPDVHKQISGVDLGLPNWGKYVLISAGALTALMLTIFLMTCCRKTNRAGSIQHSPGETGRKVSVTSHNGRVISLWESYKSESETKL

SEQ ID NO: 31557 - protein, 524 aa, Artificial Sequence
  derived and/or modified protein sequence (wt) from glycoprotein__RABV__KF663539.1
MIPQVLLFVPLLVFSSCFGKFPIYTIPDKLGPWSPIDIHHLSCPNNLVVEDEGCTNLSGFSYMELKVGYISAIKVNGFTCTGVVTEAETYTNFVGYVTTTFKRKHFRPMPDACRAAYNWKMAGDPRYEESLHNPYPDYHWLRTVKTTKESLVIISPSVADLDPYDKSLHSRVFPGGKCSGITVSSTCCSTNHDYTIWMPENPRLGTSCDIFTNSRGKRASKGGKTCGFGDERGLYKSLRGACKLKLCGVLGLRLMDGTWVVIQTSDEIKWCSPDQLVNLHDFHSDEIEHLVVEELVKKREECLDALETIMTTKSVSFRRLSHLRKLVPGFGKAYTIFNKTLMEADAHYKSIRTWNEIIPSKGCLRVGGRCHPHVNGVFFNGIILGPDGHVLIPEMQSSLLHQHMELLESSVIPLMHPLADPSTVFKDGDEAEDFVEVHLPDVHKQISGVDLGLPNWGKYVLISAGALTALMLMIFLMTCCRKTNRAESIQHSPGETGRKVSVTSHNGRVISSWESYKSESETKL

SEQ ID NO: 31558 - protein, 524 aa, Artificial Sequence
  derived and/or modified protein sequence (wt) from glycoprotein__RABV__KF663540.1
MIPQVLLFVPLLVFSSCFGKFPIYTIPDKLGPWSPIDIHHLSCPNNLVVEDEGCTNLSGFSYMELKVGYISAIKVNGFTCTGVVTEAETYTNFVGYVTTTFKRKHFRPMPDACRAAYNWKMAGDPRYEESLHNPYPDYHWLRTVKTTKESLVIISPSVADLDPYDKSLHSRVFPGGKCSGITVSSTCCSTNHDYTIWMPENPRLGTSCDIFTNSRGKRASKGGKTCGFVDERGLYKSLTGACKLKLCGVLGLSLMDGTWVAIQTSDEIKWCSPDQLVNLHDFHSDEIEHLVVEELVKKREECLDALETIMTTKSVSFRRLSHLRKLVPGFGKAYTIFNKTLMEADAHYKSIRTWNEIIPSKGCLRVGGRCHPHVNGVFFNGIILGPDGHVLIPEMQSSLLHQHMELLESSVIPLMHPLADPSTVFKDGDEAEDFVEVHLPDVHKQISGVDLGLPNWGKYVLISAGALTALMLMIFLMTCCRKTNRAESIQHSPGETGRKVSVTSHNGRVISSWESYKSESETKL

SEQ ID NO: 31559 - protein, 524 aa, Artificial Sequence
  derived and/or modified protein sequence (wt) from glycoprotein__RABV__KF663541.1
MIPQVLLFVPLLVFSSCFGKFPIYTIPDKLGPWSPIDIHHLSCPNNLVVEDEGCTNLSGFSYMELKVGYISAIKVNGFTCTGVVTEAETYTNFVGYVTTTFKRKHFRPMPDACRAAYNWKMAGDPRYEESLHNPYPDYHWLRTVKTTKESLVIISPSVADLDPYDKSLHSRVFPGGKCSGITVSSTCCSTNHDYTIWMPENPRLGTSCDIFTNSRGKRASKGGKTCGFVDERGLYKSSKGACKLKLCGVLGLRLMDGTWVAIQTSDEIKWCSPDQLVNLHDFHSDEIEHLVVEELVKKREECLDALETIMTTKSVSFRRLSHLRKLVPGFGKAYTIFNKTLMEADAHYKSIRTWNEIIPSKGCLRVGGRCHPHVNGVFFNGIILGPDGHVLIPEMQSSLLHQHMELLESSVIPLMHPLADPSTVFKDGDEAEDFVEVHLPDVHKQISGVDLGLPNWGKYVLISAGALTALMLMIFLMTCCRKTNRAESIQHSPGETGRKVSVTSHNGRVISSWESYKSGSETKL

SEQ ID NO: 31560 - protein, 524 aa, Artificial Sequence
  derived and/or modified protein sequence (wt) from glycoprotein__RABV__KF663542.1
MFPPVLLFVPLLVFSSCFGKFPIYTIPDKLGPWSPIDIHHLSCPNNLVVEDEGCTNLSGFSYMELKVGYISAIKVNGFTCTGVVTEAETYTNFVGYVTTTFKRKHFRPMPDACRAAYNWKVAGDPRYEESLHNPYPDYHWLRTVKTTKESLVIISPSVADLDPYDKSLHSRVFPGGKCSGITVSSTCCSTNHDYTIWMPENPRLGTSCDIFTNSRGKRASKGGKTCGFRDERGLYKSLKGACKLKLCGVLGLRLMDGTWVATQTSNEIKWCPPDQLVNLHDFHSDEIEHLVVEELVKKREECLDALETIMTTKSVSFRRLSHLRKLVPGFGKAYTIFNKTLMEADAHYKSIRTWNEIIPSKGCLRVGGRCHPHVNGVFFNGIILGPDGHVLIPEMQSSLLHQHMELLESSVIPLMHPLADPSTVFKDGDEAEDFVEVHLPDVHKQISGVDLGLPNWGKYVLISAGALTALMLTIFLMTCCRKTNRAGSIQHSPGETGRKVSVTSHNGRVIFLWESHISGSETKL

SEQ ID NO: 31561 - protein, 524 aa, Artificial Sequence
  derived and/or modified protein sequence (wt) from glycoprotein__RABV__KF663543.1
MFPQVLLFVPLLVFSSCFGKFPIYTIPDKLGPWSPIDIHHLSCPNNLVVEDEGCTNLSGFSYMELKVGYISAIKVNGFTCTGVVTEAETYTNFVGYVTTTFKRKHFRPMPDACRAAYNWKVAGDPRYEESLHNPYPDYHWLRTVKTTKESLVIISPSVADLDPYDKSLHSRVFPGGKCSGITVSSTCCSTNHDYTIWMPENPRLGTSCDIFTNSRGKRASKGGKTCGFEDERGLYKSLTGACKLKLCGVLGLRLMDGTWVAIQTSDEIKWCPPDQLVNLHDFHSDEIEHLVVEELVKKREECLDALETIMTTKSVSFRRLSHLRKLVPGFGKAYTIFNKTLMEADAHYKSIRTWNEIIPSKGCLRVGGRCHPHVNGVFFNGIILGPDGHVLIPEMQSSLLHQHMELLESSVIPLMHPLADPSTVFKDGDEAEDFVEVHLPDVHKQISGVDLGLPNWGKYVLISAGALTALMLTIFLMTCCRKTNRAGSIQHSPGETGRKVSVTSHNGRVISLWESYKSGSETKL

SEQ ID NO: 31562 - protein, 524 aa, Artificial Sequence
  derived and/or modified protein sequence (wt) from glycoprotein__RABV__KF663544.1
MFPQVLLFVPLLVFSSCFGKFPIYTIPDKLGPWSPIDIHHLSCPNNLVVEDEGCTNLSGFSYMELKVGYISAIKVNGFTCTGVVTEAETYTNFVGYVTTTFKRKHFRPMPDACRAAYNWKVAGDPRYEESLHNPYPDYHWLRTVKTTKESLVIISPSVADLDPYDKSLHSRVFPGGKCSGITVSSTCCSTNHDYTIWMPENPRLGTSCDIFTNSRGKRASKGGKTCGFEDERGLYKSLKGACKLKLCGVLGLRRMDGTWVAIQTSDEIKWCPPDQLVNLHDFHSDEIEHLVVEELVKKREECLDALETIMTTKSVSFRRLSHLRKLVPGFGKAYTIFNKTLMEADAHYKSIRTWNEIIPSKGCLRVGGRCHPHVNGVFFNGIILGPDGHVLIPEMQSSLLHQHMELLESSVIPLMHPLADPSTVFKDGDEAEDFVEVHLPDVHKQISGVDLGLPNWGKYVLISAGALTALMLTIFLMTCCRKTNRAGSIQHSPGETGRKVSVTSHNGRVISLWESYKSGSETKL

SEQ ID NO: 31563 - protein, 524 aa, Artificial Sequence
  derived and/or modified protein sequence (wt) from glycoprotein__RABV__KF663545.1
MFPQVLLFVPLLVFSSCFGKFPIYTIPDKLGPWSPIDIHHLSCPNNLVVEDEGCTNLSGFSYMELKVGYISAIKVNGFTCTGVVTEAETYTNFVGYVTTTFKRKHFRPMPDACRAAYNWKVAGDPRYEESLHNPYPDYHWLRTVKTTKESLVIISPSVADLDPYDKSLHSRVFPGGKCSGITVSSTCCSTNHDYTIWMPENPRLGTSCDIFTNSRGKRASKGGKTCGFGDERGLYKSLKGACKLKLCGVLGLRLMDGTWVAIQTSDEIKWCPPDQLVNLHDFHSDEIEHLVVEELVKKREECLDALETIMTTKSVSFRRLSHLRKLVPGFGKAYTIFNKTLMEADAHYKSIRTWNEIIPSKGCLRVGGRCHPHVNGVFFNGIILGPDGHVLIPEMQSSLLHQHMELLESSVIPLMHPLADPSTVFKDGDEAEDFVEVHLPDVHKQISGVDLGLPNWGKYVLISAGALTALMLMIFLMTCCRKTNRAESIQHSPGETGRKVSVTSHNGRVISSWESYKSGSETKL

SEQ ID NO: 31564 - protein, 524 aa, Artificial Sequence
  derived and/or modified protein sequence (wt) from glycoprotein__RABV__KF663546.1
MFPQVLLFVPLLVFSSCFGKFPIYTIPDKLGPWSPIDIHHLSCPNNLVVEDEGCTNLSGFSYMELKVGYISAIKVNGFTCTGVVTEAETYTNFVGYVTTTFKRKHFRPMPDACRAAYNWKVAGDPRYEESLHNPYPDYHWLRTVKTTKESLVIISPSVADLDPYDKSLHSRVFPGGKCSGITVSSTCCSTNHDYTIWMPENPRLGTSCDIFTNSRGKRASKGGKTCGFVDERGLYKSLKGACKLKLCGVLGLRLMDGTWVAIQTSDEIKWCPPDQLVNLHDFHSDEIEHLVVEELVKKREECLDALETIMTTKSVSFRRLSHLRKLVPGFGKAYTIFNKTLMEADAHYKSIRTWNEIIPSKGCLRVGGRCHPHVNGVFFNGIILGPDGHVLIPEMQSSLLHQHMELLESSVIPLMHPLADPSTVFKDGDEAEDFVEVHLPDVHKQISGVDLGLPNWGKYVLISAGALTALMLPIFLMTCCRKTNRAGSIQPSPGETGRKVSVTSHNGRVISLWESYKSGSETKL

SEQ ID NO: 31565 - protein, 524 aa, Artificial Sequence
  derived and/or modified protein sequence (wt) from glycoprotein__RABV__KF709069.1
MVPQALLFVPLLVFSMCFGKFPIYTIPDKLGPWSPIDIHHLSCPNNLVVEDEGCTNLSGFSYMELKVGYISAIKVNGFTCTGVVTEAETYTNFVGYVTTMFKRKHFRPTPDACRAAYNWKMAGDPRYEESLHNPYPDYHWLRTVKTTKESLVIISPSVADLDPYDKSLHSRVFPNGKCSGITISSTYCPTNHDYTIWLPENPRLGTSCDIFTNSRGKRASKGSKTCGFVDERGLYKSLKGACKLKLCGVLGLRLMDGTWVAMQASDETKWCPPDQLVNLHDFRSDEIEHFVVEELVKKREECLDALESIMTTKSVSFRRLSHLRKLVPGFGKAYTIFNKTLMEADAHYKSVRTWNEIIPSKGCLRVGGRCHPHVNGVFFNGIILGPDGHVLIPEMQSSLLQQHMELLESSVIPLMHPLADPSTVFKDGDEAENFVEVHLPDVHKQISGVDLGLPNWGKYVLVSAGVLIALMLIIFLMTCCGRVNRPKSTQHNLGGTGREVSVTPQSGKVISSWESYKSGGETRL

SEQ ID NO: 31566 - protein, 524 aa, Artificial Sequence
  derived and/or modified protein sequence (wt) from glycoprotein__RABV__KF709070.1
MVPQALLFVPLLVFSMCFGKFPIYTIPDKLGPWSPIDIHHLSCPNNLVVEDEGCTNLSGFSYMELKVGYISAIKVNGFTCTGVVTEAETYTNFVGYVTTMFKRKHFRPTPDACRAAYNWKMAGDPRYEESLHNPYPDYHWLRTVKTTKESLVIISPSVADLDPYDKSLHSRVFPNGKCSGITISSTYCPTNHDYTIWLPENPRLGTSCDIFTNSRGKRASKGSKTCGFVDERGLYKSLKGACKLKLCGVLGLRLMDGTWVAMQASDETKWCPPDQLVNLHDFRSDEIEHLVVEELVKKREECLDALESIMTTKSVSFRRLSHLRKLVPGFGKAYTIFNKTLMEADAHYKSVRTWNEIIPSKGCLRVGGRCHPHVNGVFFNGIILGPDGHVLIPEMQSSLLQQHMELLESSVIPLMHPLADPSTVFKDGDEAENFVEVHLPDVHKQISGVDLGLPNWGKYVLVSAGVLIALMLIIFLMTCCGRVNRPKSTQHNLGGTGREVSVTPQSGKVISSWESYKSGGETRL

SEQ ID NO: 31567 - protein, 524 aa, Artificial Sequence; identical to SEQ ID NO: 31107
  derived and/or modified protein sequence (wt) from glycoprotein__RABV__KF709071.1

SEQ ID NO: 31568 - protein, 524 aa, Artificial Sequence; identical to SEQ ID NO: 31107
  derived and/or modified protein sequence (wt) from glycoprotein__RABV__KF709072.1

SEQ ID NO: 31569 - protein, 524 aa, Artificial Sequence
  derived and/or modified protein sequence (wt) from glycoprotein__RABV__KF709074.1
MVPQALLFVPLLVFPMCFGKFPIYTIPDKLGPWSPIDIHHLSCPNNLVVEDEGCTNLSGFSYMELKVGYISAIKVNGFTCTGVVTEAETYTNFVGYVTTTFKRKHFRPTPDACRAAYNWKMAGDPRYEESLHNPYPDYHWLRTVKTTKESLVIISPSVADLDPYDKSLHSRVFPNGKCSGITISSTYCPTNHDYTIWLPENPRLGTSCDIFTNSRGKRASKGSKTCGFVDERGLYKSLKGACKLKLCGVLGLRLMDGTWVAMQASDETKWCPPDQLVNLHDFRSDEIEHLVVEELVKKREECLDALESIMTTKSVSFRRLSHLRKLVPGFGKAYTIFNKTLMEADAHYKSVRTWNEIIPSKGCLRVGGRCYPHVNGVFFNGIILGPDGHVLIPEMQSSLLQQHMELLESSVIPLMHPLADPSTVFKDGDEAENFVEVHLPDVHKQISGVDLGLPNWGKYVLVSAGVLIALMLIIFLMTCCGRVNRPKSTQHNLGGTGREVSVTPQSGKVISSWESYKSGGETRL

SEQ ID NO: 31570 - protein, 524 aa, Artificial Sequence
  derived and/or modified protein sequence (wt) from glycoprotein__RABV__KF709075.1
MVPQALLFVPLLVFSMCFGKFPIYTIPDKLGPWSPIDIHHLSCPNNLVVEDEGCTNLSGFSYMELKVGYISAIKVNGFTCTGVVTEAETYTNFVGYVTTTFKRKHFRPTPDACRAAYNWKMAGDPRYEESLHNPYPDYHWLRTVKTTKESLVIISPSVADLDPYDKSLHSRVFPNGKCSGITISSTYCPTNHDYTIWLPENPRLGTSCDIFTNSRGKRASKGSKTCGFVDERGLYKSLKGACKLKLCGVLGLRLMDGTWVAMQASDETKWCPPDQLVNLHDFRSDEIEHLVVEELVKKREECLDALESIMTTKSVSFRRLSHLRKLVPGFGKAYTIFNKTLMEADAHYKSVRTWNEIIPSKGCLRVGGRCHPHVNGVFFNGIILGPDGHVLIPEMQSSLLQQHMELLESSVIPLMHPLADPSTVFKDGDEAENFVEVHLPDVHKQISGVDLGLPNWGKYVLVSAGVLIALMLIIFLMTCCGRVNRPESTQHNLGGTGREVSVTPQSGKVISSWESYKSGGETRL

SEQ ID NO: 31571 - protein, 524 aa, Artificial Sequence; identical to SEQ ID NO: 31570
  derived and/or modified protein sequence (wt) from glycoprotein__RABV__KF709076.1

SEQ ID NO: 31572 - protein, 524 aa, Artificial Sequence
  derived and/or modified protein sequence (wt) from glycoprotein__RABV__KF709077.1
MVPQALLFVPLLVFSMCFGKFPIYTIPDKPGPWSPIDIHHLSCPNNLVVEDEGCTNLSGFSYMELKVGYISAIKVNGFTCTGVVTEAETYTNFVGYVTTTFKRKHFRPTPDACRAAYNWKMAGDPRYEESLHNPYPDYHWLRTVKTTKESLVIISPSVADLDPYDKSLHSRVFPNEKCSGITISSTYCPTNHDYTIWLPENPRLGTSCDIFTNSRGKRASKGSKTCGFVDERGLYKSLKGACKLKLCGVLGLRLMDGTWVAMQASDETKWCPPDQLVNLHDFRSDEIEHLVVEELVKKREECLDALESIMTTKSVSFRRLSHLRKLVPGFGKAYTIFNKTLMEADAHYKSVRTWNEIIPSKGCLRVGGRCHPHVNGVFFNGIILGPDGHVLIPEMQSSLLQQHMELLESSVIPLMHPLADPSTVFKDGDEAENFVEVHLPDVHKQISGVDLGLPNWGKYVLVSAGVLIALMLIIFLMTCCGRVNRPESTQHNLGGTGREVSVTPQSGKVISSWESYKSGGETRL

SEQ ID NO: 31573 - protein, 524 aa, Artificial Sequence
  derived and/or modified protein sequence (wt) from glycoprotein__RABV__KF709078.1
MVPQALLFVPLLVFSMCFGKFPIYTIPDKLGPWSPIDIHHLSCPNNLVVEDEGCTNLSGFSYMELKVGYISAIKVNGFTCTGVVTEAETYTNFVGYVTTTFKRKHFRPTPDACRAAYNWKMAGDPRYEESLHNPYPDYHWLRTVKTTKESLVIISPSVADLDPYDKSLHSRVLPNGKCSGTTTSSTYCPTNHDYTIWLPENPRLGTSCDIFTNSRGKRASKGSKTCGFVDERGLYKSLKGACKLKLCGVLGLRLMDGTWVAMQASDETKWCPPDQLVNLHDFRSDEIEHLVVEELVKKREECLDALESIMTTKSVSFRRLSHLRKLVPGFGKAYTIFNKTLMEADAHYKSVRTWNEIIPSKGCLRVGGRCHPHVNGVFFNGIILGPDGHVLIPEMQSSLLQQHMELLESSVIPLMHPLADPSTVFKDGDEAENFVEVHLPDVHKQISGVDLGLPNWGKYVLVSAGVLIALMLIIFLMTCCGRVNRPESTQHNLGGTGREVSVTPQSGKVISSWESYKSGGETRL

SEQ ID NO: 31574 - protein, 524 aa, Artificial Sequence
  derived and/or modified protein sequence (wt) from glycoprotein__RABV__KF709080.1
MVPQALLFVPLLVFSMCFGKFPIYTIPDKLGPWSPIDIHHLSCPNNLVVEDEGCTNLSGFSYMELKVGYISAIKVNGFTCTGVVTEAETYTNFVGYVTTTFKRKHFRPTPDACRAAYNWKMAGDPRYEESLHNPYPDYHWLRTVKTTKESLVIISPSVADLDPYDKSLHSRVFPNGKCSGITISSTYCPTNHDYTIWLPENPRLGTSCDIFTNSRGKRASKGSKTCGFVDERGLYKSLKGACKLKLCGVLGLRLMDGTWVAMQASDETKWCPPDQLVNLHDFRSDEIEHLAVEELVKKREECLDALESIMTTKSVSFRRLSHLRKLVPGFGKAYTIFNKTLMEADAHYKSVRTWNEIIPSKGCLRVGGRCHPHVNGVFFNGIILGPDGHVLIPEMQSSLLQQHMELLESSVIPLMHPLADPSTVFKDGDEAENFVEVHLPDVHKQISGVDLGLPNWGKYVLVSAGVLIALMLIIFLMTCCGRVNRPESTQHNLGGTGREVSVTPQSGKVISSWESYKSGGETRL

SEQ ID NO: 31575 - protein, 524 aa, Artificial Sequence; identical to SEQ ID NO: 31386
  derived and/or modified protein sequence (wt) from glycoprotein__RABV__KF726852.1

SEQ ID NO: 31576 - protein, 524 aa, Artificial Sequence
  derived and/or modified protein sequence (wt) from glycoprotein__RABV__KF726853.1
MISQAFLFVPLLAFSPCFGKFPIYTIPDKLGPWSPIDIHHLSCPNNLVVEDEGCTNLSGFSYMELKVGYISAIKVNGFTCTGVVTEAETYTNFVGYVTTTFKRKHFRPMPDACRTAYSWKMAGDPRYEESLHNPYPDYHWLRTVKTTKESLVIISPSVADLDPYDKSLHSRVFPGGKCSGLTVSSTCCSTNHDYTIWMPENPRLGTSCDIFTNSRGKRASKGGKTCGFVDERGLYKSLKGACKLKLCGVSGLRLMDGTWVAIQTSDEIKWCSPDQLVNLHDLHSDEIEHLVVEELVKKREECLDALESIMTTKSVSFRRLSHLRKLVPGFGKAYTIFNKTLMEADAHYKSIRTWNEIIPSKGCLRVGGRCHPHVNGVFFNGIILGPDGHVLIPEMQSSLLHQHMELLESSVIPLMHPLADPSTVFKDGDEAEDFVEVHLPDAHKQISGVDLGLPNWGKYVLMSAGALTALMLMIFLMTCCRKTNRAESMPHSPGETGRKVSLTSHNGRVISSWESYKSGGETKL

SEQ ID NO: 31577 - protein, 524 aa, Artificial Sequence
  derived and/or modified protein sequence (wt) from glycoprotein__RABV__KJ004416.1
MIPQVLLFVPLLVFSSCFGKFPIYTIPDKLGPWSPIDIHHLSCPNNLVVEDEGCTNLSGFSYMELKVGYISAIKVNGFTCTGVVTEAETYTNFVGYVTTTFKRKHFRPMPDACRAAYNWKMAGDPRYEESLHNPYPDYHWLRTVKTTKESLVIISPSVADLDPYDKSLHSRVFPGGKCSGITVSSTCCSTNHDYTIWMPENPRLGTSCDIFTNSRGKRASKGGKTCGFVDERGLYKSLKGACKLKLCGVLGLRLMDGTWVAIQTSDETKWCSPDQLVNLHDFHSDEIEHLVVEELVKKREECLDALETIMTTKSVSFRRLSHLRKLVPGFGKAYTIFNKTLMEADAHYKSIRTWNEIIPSKGCLRVGGRCHPHVNGVFFNGIILGPDGHVLIPEMQSSLLHQHMELLESSVIPLMHPLADPSTVFKDGDEAEDFVEVHLPDVHKQISGVDLGLPNWGKYVLISAGALTALMFTIFLMTCCRKTNRAGSIQLSPGETGRKVSVTSHNGRVISSWESYKSGSETKL

SEQ ID NO: 31578 - protein, 524 aa, Artificial Sequence
  derived and/or modified protein sequence (wt) from glycoprotein__RABV__KJ174608.1
MIPQALLSVPLLISSLCFGKFPIYTIPEKLGPWSPIDIHHLSCPNNLVVEDEGCNSLSGFSYMELKVGYISAIKVNGFTCTGVVTEAETYTNFVGYVTTTFKRKHFRPMPDACRAAYNWKTAGDPRYEESLHNPYPDYHWLRTVKTTKESLIIISPSVADLDPYDKSLHSRIFPGGKCLGITISSTYCSTNHDYTIWMPEEARLGTSCDIFTNSKGKRASKGGRTCGFVDERGLYKSLKGACKLKLCGVPGLRLMDGTWVAIQTPNETKWCSPDQLVNVHDFRSDEIEHLVVEELIRKREECLDALESIMTTKSVSFRRLSNLRKLVPGFGKAYTIFNKTLMEADAHYKSVRTWNEIIPSRGCLKVGGRCHPHVNGVFFNGIILGPDGHILIPEMQSSLLQQHMELLESSVIPLIHPLADPSTVFKDGDEAEDFVEVHLPDVHQQVSGVDLGLPDWGKYVLMSAGALATVMLTIFLITCCRRVKRTESIQQSLGESGRKVSVTPQNGKVMSSWEYYKSGGGTRL

SEQ ID NO: 31579 - protein, 524 aa, Artificial Sequence; identical to SEQ ID NO: 31415
  derived and/or modified protein sequence (wt) from glycoprotein__RABV__KJ174609.1

SEQ ID NO: 31580 - protein, 524 aa, Artificial Sequence
  derived and/or modified protein sequence (wt) from glycoprotein__RABV__KJ174615.1
MIPQALLSVPLLISSLCFGKFPIYTIPEKLGPWSPIDIHHLSCPNNLVVEDEGCNSLSGFSYMELKVGYISAIKVNGFTCTGVVTEAETYTNFVGYVTTTFKRKHFRPMADACRAAYNWKTAGDPRYEESLHNPYPDYHWLRTVKTTKESLIIISPSVADLDPYDKSLHSRIFPGGKCLGITISSTYCSTNHDYTIWMPEEARLGTSCDIFTNSKGKRASKGGRTCGFVDERGLYKSLKGACKLKLCGVPGLRLMDGTWVAIQTPNETKWCSPDQLVNVHDFRSDEIEHLVVEELIRKREECLDALESIMTTKSVSFRRLSNLRKLVPGFGKAYTIFNKTLMEADAHYKSVRTWNEIIPSRGCLKVGGRCHPHVNGVFFNGIILGPDGHILIPEMQSSLLQQHMELLESSVIPLIHPLADPSTVFKDGDEAEDFVEVHLPDVHQQVSGVDLGLPDWGKYVLMSAGALATVMLTIFLITCCRRVKRTESIQQGPGESGRKLSVTPQNGKVMSSWEYYKSGGGTRL

SEQ ID NO: 31581 - protein, 524 aa, Artificial Sequence
  derived and/or modified protein sequence (wt) from glycoprotein__RABV__KJ174616.1
MIPQALLSVPLLISSLCFGKFPIYTIPEKLGPWSPIDIHHLSCPNNLVVEDEGCNSLSGFSYMELKVGYISAIKVNGFTCTGVVTEAETYTNFVGYVTTTFKRKHFRPMPDACRAAYNWKTAGDPRYEESLHNPYPDYHWLRTVKTTKESLIIISPSVADLDPYDKSLHSRIFPGGKCLGITISSTYCSTNHDYTIWMPEEARLGTSCDIFTNSKGKRASKGGRTCGFVDERGLYKSLKGACKLKLCGVPGLRLMDGTWVAIQTPNETKWCSPDQLVNVHDFRSDEIEHLVVEELIRKREECLDALESIMTTKSVSFRRLSNLRKLVPGFGKAYTIFNKTLMEADAHYKSVRTWNEIIPSKGCLKVGGRCHPHVNGVFFNGIILGPDGHILIPEMQSSLLQQHMELLESSVIPLIHPLADPSTVFKDGDEAEDFVEVHLPDVHQQVSGVDLGLPDWGKYVLMSAGALATVMLTIFLITCCRRVKRTESVQQGLGESGRKVSVAPQNGKVMSSWEYYKSGGGTRL

SEQ ID NO: 31582 - protein, 524 aa, Artificial Sequence
  derived and/or modified protein sequence (wt) from glycoprotein__RABV__KJ174617.1
MIPQALLSVPLLISSLCFGKFPIYTIPEKLGPWSPIDIHHLSCPNNLVVEDEGCNSLSGFSYMELKVGYISAIKVNGFTCTGVVTEAETYTNFVGYVTTTFKRKHFRPMPDACRAAYNWKTAGDPRYEESLHNPYPDYHWLRTVKTTKESLIIISPSVADLDPYDKSLHSRIFPGGKCLGITISSTYCSTNHDYTIWMPEEARLGTSCDIFTNSKGKRASKGGRTCGFVDERGLYKSLKGACKLKLCGVPGLRLMDGTWVAIQTPNETKWCSPDQLVNVHDFRSDEIEHLVVEELIRKREECLDALESIMTTKSVSFRRLSNLRKLVPGFGKAYTIFNKTLMEADAHYKSVRTWNEIIPSRGCLKVGGRCHPHVNGVFFNGIILGPDGHILIPEMQSSLLQQHMELLESSVIPLIHPLADPSTVFKDGDEAEDFVEVHLPDVHQQVSGVDLGLPDWGKYVLMSAGALATVMLTIFLITCCRRVKRTESIQQGLGESGRKVSVAPQNGKVMSSWEYYKSGGGTRL

SEQ ID NO: 31583 - protein, 524 aa, Artificial Sequence
  derived and/or modified protein sequence (wt) from glycoprotein__RABV__KJ174618.1
MIPQALLFVPFLFPSLCLGKFPIYTIPEKLGPWSPIDIHHLSCPNNLVVEDEGCDSLSGFSYMELKVGYISAIKVNGFTCTGVVTEAETYTNFVGYVTTTFKRKHFRPMPDACRAAYNWKTAGDPRYEESLHNPYPDYHWLRTVKTTKESLIIISPSVADLDPYDKSLHSRVFPGGKCLGITISSTYCSTNHDYTIWMPEEARLGTSCDIFTNSKGKRASKGGRTCGFVDERGLYKSLKGACKLKLCGVPGLRLMDGTWVAIQTPGETKWCSPDQLVNLHDFRSDEIEHLVVEELIKKREECLDALESIMTTKSVSFRRLSNLRKLVPGFGKAYTIFNKTLMEADAHYKSIRTWDEIIPSKGCLRVGGRCHPHVNGVFFNGIILGPDGHVLIPEMQSSLLQQHMELLESSVIPLIHPLADPSTVFKDGDEAEDFVEVHLPDVHEQVSGVDLGLPNWGKYVLISAGVLATVILTIFLLTCCRRVNRTKPKQQSLGDSGRKVSVTPQNGKVMSSWEYYKSEGRTSL

SEQ ID NO: 31584 - protein, 524 aa, Artificial Sequence
  derived and/or modified protein sequence (wt) from glycoprotein__RABV__KJ174619.1
MIPQAFLFVPFLFPSLCLGKFPIYTIPEKLGPWSPIDIHHLSCPNNLVVEDEGCDSLSGFSYMELKVGYISAIKVNGFTCTGVVTEAETYTNFVGYVTTTFKRKHFRPMPDACRAAYNWKTAGDPRYEESLHNPYPDYHWLRTVKTTKESLIIISPSVADLDPYDKSLHSRVFPGGKCLGITISSTYCSTNHDYTIWMPEEARLGTSCDIFTNSKGKRASKGGRTCGFVDERGLYKSLKGACKLKLCGVPGLRLMDGTWVAIQTPGETKWCSPDQLVNLHDFRSDEIEHLVVEELIKKREECLDALESIMTTKSVSFRRLSNLRKLVPGFGKAYTIFNKTLMEADAHYKSIRTWDEIIPSKGCLRVGGRCHPHVNGVFFNGIILGPDGHVLIPEMQSSLLQQHMELLESSVIPLIHPLADPSTVFKDGDEAEDFVEVHLPDVHEQVSGVDLGLPNWGKYVLISAGVLATVILTIFLLTCCRRVNRTKPKQQSLGESGRKVSVTPQNGKVMSSWEYYKSEGRTSL

SEQ ID NO: 31585 - protein, 524 aa, Artificial Sequence
  derived and/or modified protein sequence (wt) from glycoprotein__RABV__KJ174620.1
MIPQALLFVPFLFPSLCLGKFPIYTIPEKLGPWSPIDIHHLSCPNNLVVEDEGCDSLSGFSYMELKVGYISAIKVNGFTCTGVVTEAETYTNFVGYVTTTFKRKHFRPMPDACRAAYNWKTAGDPRYEESLHNPYPDYHWLRTVKTTKESLIIISPSVADLDPYDKSLHSRVFPGGKCLGITISSTYCSTNHDYTIWMPEEARLGTSCDIFTNSKGKRASKGGKTCGFVDERGLYKSLKGACKLKLCGVPGLRLMDGTWVAIQTPGETKWCSPDQLVNLHDFRSDEIEHLVVEELIKKREECLDALESIMTTKSVSFRRLSNLRKLVPGFGKAYTIFNKTLMEADAHYKSIRTWDEIIPSKGCLRVGGRCHPHVNGVFFNGIILGPDGHVLIPEMQSSLLQQHMELLESSVIPLIHPLADPSTVFKDGDEAEDFVEVHLPDVHEQVSGVDLGLPNWGKYVLISAGVLATVILTIFLLTCCRRVNRTKPKQQSLGESGRKVSVTPQNGKVMSSWEYYKSEGRTSL

SEQ ID NO: 31586 - protein, 524 aa, Artificial Sequence
  derived and/or modified protein sequence (wt) from glycoprotein__RABV__KJ174622.1
MIPQALLFVPFLFPSLCLGKFPIYTIPEKLGPWSPIDIHHLSCPNNLVVEDEGCDSLSGFSYMELKVGYISAIKVNGFTCTGVVTEAETYTNFVGYVTTTFKRKHFRPMPDACRAAYNWKTAGDPRYEESLHNPYPDYHWLRTVKTTKESLIIISPSVADLDPYDKSLHSRVFPGGKCLGITISSTYCSTNHDYTIWMPEEARLGTSCDIFTNSKGKRASKGGRTCGFVDERGLYKSLKGACKLKLCGVPGLRLMDGTWVAIQTPGETKWCSPDQLVNLHDFRSDEIEHLVVEELIKKREECLDALESIMTTKSVSFRRLSNLRKLVPGFGKAYTIFNKTLMEADAHYKSIRTWDEIIPSKGCLRVGGRCHPHVNGVFFNGIILGPDGHVLIPEMQSSLLQQHMELLESSVIPLIHPLADPSTVFKDGDEAEDFVEVHLPDVHEQVSGVDLGLPNWGKYVLISAGVLATVILTVFLLTCCRRVNRTKPKQQSLGESGRKVSVTPQNGKVMSSWEYYKSEGRTSL

SEQ ID NO: 31587 - protein, 524 aa, Artificial Sequence
  derived and/or modified protein sequence (wt) from glycoprotein__RABV__KJ174623.1
MIPQALLFVPFLFPSLCLGKFPIYTIPEKLGPWSPIDIHHLSCPNNLVVEDEGCDSLSGFSYMELKVGYISAIKVNGFTCTGVVTEAETYTNFVGYVTTTFKRKHFRPMPDACRAAYNWKTAGDPRYEESLHNPYPDYHWLRTVKTTKESLIIISPSVADLDPYDKSLHSRVFPGGKCLGITVSSTYCSTNHDYTIWMPEEARLGTSCDIFTNSKGKRASKGGRTCGFVDERGLYKSLKGACKLKLCGVPGLRLMDGTWVAIQTPGETKWCSPDQLVNLHDFRSDEIEHLVVEELIKKREECLDALESIMTTKSVSFRRLSNLRKLVPGFGKAYTIFNKTLMEADAHYKSVRTWDEIIPSKGCLRVGGRCHPHVNGVFFNGIILGPDGHVLIPEMQSSLLQQHMELLESSVIPLIHPLADPSTVFKDGDEAEDFVEVHLPDVHKQVSGVDLGLPNWGKYVLMGAGVLATVILTIFLLTCCRRVNRTKPKQQSLGESGRKVSVTPQNGKVMSSWEYYKSEGRTSL

SEQ ID NO: 31588 - protein, 524 aa, Artificial Sequence; identical to SEQ ID NO: 31407
  derived and/or modified protein sequence (wt) from glycoprotein__RABV__KJ174624.1

SEQ ID NO: 31589 - protein, 524 aa, Artificial Sequence
  derived and/or modified protein sequence (wt) from glycoprotein__RABV__KJ174625.1
MIPQALLFVPFLFPSLCLGKFPIYTIPEKLGPWSPIDIHHLSCPNNLVVEDEGCDSLSGFSYMELKVGYISAIKVNGFTCTGVVTEAETYTNFVGYVTTTFKRKHFRPMPDACRAAYNWKTAGDPRYEESLHNPYPDYHWLRTVKTTKESLIIISPSVADLDPYDKSLHSRVFPGGKCLGITVSSTYCSTNHDYTIWMPEEARLGTSCDIFTNSKGKRASKGGRTCGFVDERGLYKSLKGACKLKLCGVPGLRLMDGTWVAIQTPGETKWCSPDQLVNLHDFRSDEIEHLVVEELIKKREECLDALESIMTTKSVSFRRLSNLRKLVPGFGKAYTIFNKTLMEADAHYKSVRTWDEIIPSKGCLRVGGRCHPHVNGVFFNGIILGPDGHVLIPEMQSSLLQQHMELLESSVIPLIHPLADPSTVFKDGDEAEDFVEVHLPDVHKQVSGVDLGLPNWGKYVLMGAGVLATVILTIFLLTCCRRVNRTKPKQQSLEESGRKVSVTPQNGKVMSSWEYYKSEGRTSL

SEQ ID NO: 31590 - protein, 524 aa, Artificial Sequence; identical to SEQ ID NO: 31589
  derived and/or modified protein sequence (wt) from glycoprotein__RABV__KJ174626.1

SEQ ID NO: 31591 - protein, 524 aa, Artificial Sequence; identical to SEQ ID NO: 31421
  derived and/or modified protein sequence (wt) from glycoprotein__RABV__KJ174627.1

SEQ ID NO: 31592 - protein, 524 aa, Artificial Sequence; identical to SEQ ID NO: 31249
  derived and/or modified protein sequence (wt) from glycoprotein__RABV__KJ174628.1

SEQ ID NO: 31593 - protein, 524 aa, Artificial Sequence; identical to SEQ ID NO: 31421
  derived and/or modified protein sequence (wt) from glycoprotein__RABV__KJ174629.1

SEQ ID NO: 31594 - protein, 524 aa, Artificial Sequence; identical to SEQ ID NO: 31249
  derived and/or modified protein sequence (wt) from glycoprotein__RABV__KJ174630.1

SEQ ID NO: 31595 - protein, 524 aa, Artificial Sequence
  derived and/or modified protein sequence (wt) from glycoprotein__RABV__KJ174631.1
MIPQALLFVPLLIPSLCLGEFPIYTIPDKLGPWSPIDIHHLSCPNNLVAENDGCTSLSGFSYMELKVGYISAIKVNGFTCTGVVTEAETYTNFVGYVTTTFKRKHFRPTPDACRAAHDWKMAGDPRYEASLQNPYPDYHWLRTVKTTKESLVIISPSVADLDPYDKSLHSRVFPSGKCLGITVSSTYCSTNHDYTIWMPVEPRLGTSCDIFTNSRGKRASKGGRVCGFVDERGLYKSLKGACRLKLCGVPGIRLLDGTWVSIQTSEDIKWCPPDRLVNLHDFHSDEIEHLVVAELIKRRENCLDALESIMTTKSVSFRRLSHLRKLVPGFGKAYTIFNKTLMEADAHYKSVKTWNEVIPSKGCLEVGGRCHPHVNGVFFNGIILGPDGNVLIPEMQSSLLQQHMELLESSVIPLMHPLADPSTVFKEGDEAEDFVEVHLPDVHKQVSDVDLGLPSWGKYLLIGAGALAILILAIVLIICCRRVNKTRSTQRGHRESGGKMSVVPQNGKIISSWELYKSESETGL

SEQ ID NO: 31596 - protein, 524 aa, Artificial Sequence
  derived and/or modified protein sequence (wt) from glycoprotein__RABV__KJ174632.1
MIPQALLFVPLLIPSLCLGEFPIYTIPDKLGPWSPIDIHHLSCPNNLVAENDGCTSLSGFSYMELKVGYISAIKVNGFTCTGVVTEAETYTNFVGYVTTTFKRKHFRPTPDACRAAHDWKMAGDPRYEASLQNPYPDYHWLRTVKTTKESLVIISPSVADLDPYDKSLHSRVFPSGKCLGITVSSTYCSTNHDYTIWMPVEPRLGTSCDIFTNSRGKRASKGGRVCGFVDERGLYKSLKGACRLKLCGVPGIRLLDGTWVSIQTSEDIKWCPPDRLVNLHDFHSDEIEHLVVAELIKRRENCLDALESIMTTKSVSFRRLSHLRKLVPGFGKAYTIFNKTLMEADAHYKSVKTWNEVIPSKGCLEVGGRCHPHVNGVFFNGIILGPDGNVLIPEMQSSLLQQHMELLESSVIPLMHPLADPSTVFKEGDEAEDFVEVHLPDVHKQVSDVDLGLPSWGKYLLISAGALAILILAIVLIICCKRVKKTGSIQRGHRESGGKMSVVPQNGKIISSWELYKSESETGL

SEQ ID NO: 31597 - protein, 524 aa, Artificial Sequence
  derived and/or modified protein sequence (wt) from glycoprotein__RABV__KJ174633.1
MIPQALLFVPLLIPSLCLGEFPIYTIPDKLGPWSPIDIHHLSCPNNLVAENDGCTSLSGFSYMELKVGYISAIKVNGFTCTGVVTEAETYTNFVGYVTTTFKRKHFRPTPDACRAAHDWKMAGDPRYEASLQNPYPDYHWLRTVKTTKESLVIISPSVADLDPYDKSLHSRVFPSGKCLGITVSSTYCSTNHDYTIWMPVEPRLGTSCDIFTNSRGKRASKGGRVCGFVDERGLYKSLKGACRLKLCGVPGIRLLDGTWVSIQTSEDIKWCPPDRLVNLHDFHSDEIEHLVVAELIKRRENCLDALESIMTTKSVSFRRLSHLRKLVPGFGKAYTIFNKTLMEADAHYKSVKTWNEVIPSKGCLEVGGRCHPHVNGVFFNGIILGPDGNVLIPEMQPSLLQQHMELLESSVIPLMHPLADPSTVFKEGDEAEDFVEVHLPDVHKQVSDVDLGLPSWGKYLLISAGALAILILAIVLMICCRRVNKTGSTQRGHRESGGKMSVVPQNGKIISSWELYKSESETGL

SEQ ID NO: 31598 - protein, 524 aa, Artificial Sequence
  derived and/or modified protein sequence (wt) from glycoprotein__RABV__KJ174634.1
MIPQAILFVPLLIPSLCLGEFPIYTIPDKLGPWSPIDIHHLSCPNNLVAENDGCTSLSGFSYMELKVGYISAIKVNGFTCTGVVTEAETYTNFVGYVTTTFKRKHFRPTPDACRAAHDWKMAGDPRYEASLQNPYPDYHWLRTVKTTKESLVIISPSVADLDPYDKFLHSRVFPSGKCLGITVSSTYCSTNHDYTIWMPVEPRLGTSCDIFTNSRGKRASKGGRVCGFVDERGLYKSLKGACRLKLCGVPGIRLLDGTWVSIQTSEDIKWCPPDRLVNLHDFHSDEIEHLVVAELIKRRENCLDALESIMTTKSVSFRRLSHLRKLVPGFGKAYTIFNKTLMEADAHYKSVKTWNEVIPSKGCLEVGGRCHPHVNGVFFNGIILGPDGNVLIPEMQSSLLQQHMELLESSVIPLMHPLADPSTVFKEGDEAEEFVEVHLPDVHKQVSDVDLGLPSWGKYLLISAGALAILILAIVLIICCRRVNKTGSTQRGHRESGGKMSVVPQNGKIISSWELYKSESETGL

SEQ ID NO: 31599 - protein, 524 aa, Artificial Sequence
  derived and/or modified protein sequence (wt) from glycoprotein__RABV__KJ174635.1
MIPQALLFVPLLIPSLCLGEFPIYTIPDKLGPWSPIDIHHLSCPNNLVAENDGCTSLSGFSYMELKVGYISAIKVNGFTCTGVVTEAETYTNFVGYVTTTFKRKHFRPTPDACRAAHDWKMAGDPRYEASLQNPYPDYHWLRTVKTTKESLVIISPSVADLDPYDKSLHSRVFPSGKCLGITVSSTYCSTNHDYTIWMPVEPRLGTSCDIFTNSRGKRASKGGRVCGFVDERGLYKSLKGACRLKLCGVPGIRLLDGTWVSIQTSEDIKWCPPDRLVNLHDFHSDEIEHLVVAELIKRRENCLDALESIMTTKSVSFRRLSHLRKLVPGFGKAYTIFNKTLMEADAHYKSVKTWNEVIPSKGCLEVGGRCHPHVNGVFFNGIILGPDGNVLIPEMQSSLLQQHMELLESSVIPLMHPLADPSTVFKEGDEAEDFVEVHLPDVHKQVSDVDLGLPSWGKYLLISAGALAILILAVVLIICCRRVNKTRSTQRGHRESGGKMSVVPQNGKIISSWELYKSESETGL

SEQ ID NO: 31600 - protein, 524 aa, Artificial Sequence
  derived and/or modified protein sequence (wt) from glycoprotein__RABV__KJ174636.1
MIPQALLFVPLLIPSLCLGEFPIYTIPDKLGPWSPIDIHHLSCPNNLVAENDGCTSLSGFSYMELKVGYISAIKVNGFTCTGVVTEAETYTNFVGYVTTTFKRKHFRPTPDACRAAHDWKMAGDPRYEASLQNPYPDYHWLRTVKTIKESLVIISPSVADLDPYDKSLHSRVFPSGKCLGITVSSTYCSTNHDYTIWMPVEPRLGTSCDIFTNSRGKRASKGGRVCGFVDERGLYKSLKGACRLKLCGVPGIRLLDGTWVSIQTSEDIKWCPPDRLVNLHDFHSDEIEHLVVAELIKRRENCLDALESIMTTKSVSFRRLSHLRKLVPGFGKAYTIFNKTLMEADAHYKSVKTWNEVIPSKGCLEVGGRCHPHVNGVFFNGIILGPDGNVLIPEMQSSLLQQHMELLESSVIPLMHPLADPSTVFKEGDEAEDFVEVHLPDVHKQVSDVDLGLPSWGKYLLISAGALTILILAIVLIRCCRRVNKTRSTQRGHRESGGKMSVVPQNGKIISSWELYKSESETGL

SEQ ID NO: 31601 - protein, 524 aa, Artificial Sequence
  derived and/or modified protein sequence (wt) from glycoprotein__RABV__KJ174637.1
MIPQALLFMPLLIPSLCLGEFPIYTIPDKLGPWSPIDIHHLSCPNNLVAENDGCTSLSGFSYMELKVGYISAIKVNGFTCTGVVTEAETYTNFVGYVTTTFKRKHFRPTPDACRAAHDWKMAGDPRYEASLQNPYPDYHWLRTVKTTKESLVIISPSVADLDPYDKSLHSRVFPSGKCLGITVSSTYCSTNHDYTIWMPVEPRLGTSCDIFTNSRGKRASKGGRVCGFVDERGLYKSLKGACRLKLCGVPGIRLLDGTWVSIQTSEDIKWCPPDRLVNLHDFHSDEIEHLVVAELIKRRENCLDALESIMTTKSVSFRRLSHLRKLVPGFGKAYTIFNKTLMEADAHYKSVKTWNEVIPSKGCLEVGGRCHPHVNGVFFNGIILGPDGNVLIPEMQSSLLQQHMELLESSVIPLMHPLADPSTVFKEGDEAEDFVEVHLPDVHKQVSDVDLGLPSWGKYLLISAGALAILILAIVLIICCRRVNKTVSTQRGHRESGGKMSVVPQNGKIISSWELYKSESETGL

SEQ ID NO: 31602 - protein, 524 aa, Artificial Sequence
  derived and/or modified protein sequence (wt) from glycoprotein__RABV__KJ174638.1
MIPQALLFVPLLIPSLCLGEFPIYTIPDKLGPWSPIDIHHLSCPNNLVAENDGCTSLSGFSYMELKVGYISAIKVNGFTCTGVVTEAETYTNFVGYVTTTFKRKHFRPTPDACRAAHDWKMAGDPRYEASVQNPYPDYHWLRTVKTTKESLVIISPSVADLDPYDKSLHSRVFPSGKCLGITVSSTYCSTNHDYTIWMPVEPRLGTSCDIFTNSRGKRASKGGRVCGFVDERGLYKSLKGACRLKLCGVPGIRLLDGTWVSIQTSEDIKWCPPDRLVNLHDFHSDEIEHLVVAELIKRRENCLDALESIMTTKSVSFRRLSHLRKLVPGFGKAYTIFNKTLMEADAHYKSVKTWNEVIPSKGCLEVGGRCHPHVNGVFFNGIILGPDGNVLIPEMQSSLLQQHMELLESSVIPLMHPLADPSTVFKEGDEAEDFVEVHLPDVHKQVSDVDLGLPSWGKYLLISAGALAILILAIVLIICCRRVNKTGSTQRGHRESGGKMSVVPQNGKIISSWELYKSESETGL

SEQ ID NO: 31603 - protein, 524 aa, Artificial Sequence; identical to SEQ ID NO: 31421
  derived and/or modified protein sequence (wt) from glycoprotein__RABV__KJ174639.1

SEQ ID NO: 31604 - protein, 524 aa, Artificial Sequence
  derived and/or modified protein sequence (wt) from glycoprotein__RABV__KJ174640.1
MIPQALLFVPLLIPSLCLGEFPIYTIPDKLGPWSPIDIHHLSCPNNLVAENDGCTSLSGFSYMELKVGYISAIKVNGFTCTGVVTEAETYTNFVGYVTTTFKRKHFRPTPDACRAAHDWKMAGDPRYEASLQNPYPDYHWLRTVKTTKESLVIISPSVADLDPYDKSLHSRVFPSGKCLGITVSSTYCPTNHDYTIWMPVEPRLGTSCDIFTNSRGKRASKGGRVCGFVDERGLYKSLKGACRLKLCGVPGIRLLDGTWVSIQTSEDIKWCPPDRLVNLHDFHSDEIEHLVVAELIKRRENCLDALESIMTTKSVSFRRLSHLRKLVPGFGKAYTIFNKTLMEADAHYKSVKTWNEVIPSKGCLEVGGRCHPHVNGVFFNGIILGPDGNVLIPEMQSSLLQQHMELLESSVIPLMHPLADPSTVFKEGDEAEDFVEVHLPDVHKQVFGVDLGLPSWGKYLLISAGALAILILAIVLIICCRRVNKTESTPRGHRESGGKMSVVPQNGKIISSWELYKSESETGL

SEQ ID NO: 31605 - protein, 524 aa, Artificial Sequence; identical to SEQ ID NO: 31248
  derived and/or modified protein sequence (wt) from glycoprotein__RABV__KJ174641.1

SEQ ID NO: 31606 - protein, 524 aa, Artificial Sequence
  derived and/or modified protein sequence (wt) from glycoprotein__RABV__KJ174642.1
MVPQALLFVPLLIPSLCLGEFPIYTIPDKLGPWTPIDIHHLSCPNNLVAENDGCTSLSGFSYMELKVGYISAIKVNGFTCTGVVTEAETYTNFVGYVTTTFKRKHFRPMPDACRAAHDWKMAGDPRYEDSLQNPYPDYHWLRTVKTTKESLVIISPSVADLDPYDKSLHSRVFPSGKCLGITVSSTYCSTNHDYTIWMPVEPRLGTSCDIFTNSRGKRASKGGRVCGFVDERGLYKSLKGACKLKLCGVPGIRLLDGTWVSIQTSEDIKWCPPDRLVNLHDFHSDELEHLVVEELIKRRENCLDALESIMTTKSVSFRRLSHLRKLVPGFGKAYTIFNKTLMEADAHYKSVKTWNEVIPSKGCLEVGGKCHPPVNGVFFNGIILGPDGNVLIPEMQSSLLQQHMELLESSVIPLMHPLADPSTVFKEGDEAEDFVEVHLPDVHKQVSDVDLGLPSWGKYLLMSAGALAILILAIVLIICCRRVNKTGSTQRGHRESRGKMSVSPQNGKIISSWELYKRESETGL

SEQ ID NO: 31607 - protein, 524 aa, Artificial Sequence
  derived and/or modified protein sequence (wt) from glycoprotein__RABV__KJ174643.1
MIPQALLFVPLLIPSLCLGEFPIYTIPDKLGPWTPIDIHHLSCPNNLVAENDGCTSLSGFSYMELKVGYISAIKVNGFTCTGVVTEAETYTNFVGYVTTTFKRKHFRPMPDACRAAHDWKMAGDPRYEDSLQNPYPDYHWLRTVKTTKESLVIISPSVADLDPYDKSLHSRVFPSGKCLGITVSSTYCSTNHDYTIWMPVEPRLGTSCDIFTNSRGKRASKGGRVCGFVDERGLYKSLKGACKLKLCGVPGIRLLDGTWVSIQTSEDIKWCPPDRLVNLHDFHSDELEHLVVEELIKRRENCLDALESIMTTKSVSFRRLSHLRKLVPGFGKAYTIFNKTLMEADAHYKSVKTWNEVIPSKGCLEVGGKCHPPVNGVFFNGIILGPDGNVLIPEMQSSLLQQHMELLESSVIPLMHPLADPSTVFKEGDEAEDFVEVHLPDVHKQVSDVDLGLPSWGKYLLMSAGALAILILAIVLIICCRRVNKTGSTQRGHRESRGKMSVAPQNGKIISSWELYKRESETGL

SEQ ID NO: 31608 - protein, 524 aa, Artificial Sequence; identical to SEQ ID NO: 31607
  derived and/or modified protein sequence (wt) from glycoprotein__RABV__KJ174644.1

SEQ ID NO: 31609 - protein, 524 aa, Artificial Sequence
  derived and/or modified protein sequence (wt) from glycoprotein__RABV__KJ174645.1
MIPQALLSLLLLISSLCLGKFPIYTIPDKLGPWSPIDIHHLSCPNNLVVEDEGCTSLSGFSYMELKVGYISAIKVNGFTCTGVVTEAETYTNFVGYVTTTFKRKHFRPMPDACRAAHEWKMAGDPRYEDSLQNPYPDYHWLRTVKTTKESLIIISPSVADLDPYDKSLHSRVFPGGNCLGITISSTYCSTNHDYTIWMPEEARLGTSCDIFTSSRGKRASKGGKICGFVDERGLYKSLKGACKLKLCGVPGLRLMDGTWVSIQTSDETKWCPPDQLVNVHDFHSDEIEHLIVEELVKKREECLDALESIMTTKSVSFRRLSHLRKLVPGFGKAYTIFNKTLMEADAHYKSVRTWNEIIPSKGCLKVGGMCHPHVGGVFFNGIILGPDGTVLIPEMQSSLLQQHMELLESSVIPLMHPLADPSTVFKEGDEAEDFVEIHLPDVHKQISGVDLGLPSWGKYLLISAGALATLILTIFLITCCRKVNRTESIQRGHGESERKVSVSPQNGRVISSWELYKSGGETNL

SEQ ID NO: 31610 - protein, 524 aa, Artificial Sequence
  derived and/or modified protein sequence (wt) from glycoprotein__RABV__KJ174646.1
MIPQALLFVPLLIPSLCLGKFPIYTIPDKLGPWSPIDIHHLSCPNNLVAEDEGCTSLSGFSYMELKVGYISAIKVNGFTCTGVVTEAETYTNFVGYVTTTFKRKHFRPMPDACRAAHDWKMAGDPRYEDSLQNPYPDYHWLRTVKTTKESLVIISPSVADLDPYDKSLHSRVFPSGKCLGITVSSTYCSTNHDYTIWMPVEARLGTSCDIFTNSKGKKASKGGRTCGFVDERGLYKSLKGACKLKLCGVPGLRLMDGTWVSIQTSDDIKWCPPDQLVNLHDFHSDEIEHLVVEELIKKREGCLDALESIMTTKSVSFRRLSHLRKLVPGFGKAYTIFNNTLMEADAHYKSVRTWNEVIPSKGCLKVGGRCHPPVNGVFFNGIILGPDGNVLIPEMQSSLLQQHMELLESSVIPLMHPLADPSTVFKDGDEAEDFVEVHLPDVHKQVSEIDLGLPSWGKYLLMSAGVLATLILAIFLITCCRRANRTESTQRGRRESGGKVSVAPQNGKVISSWELYKSESETGL

SEQ ID NO: 31611 - protein, 524 aa, Artificial Sequence
  derived and/or modified protein sequence (wt) from glycoprotein__RABV__KJ174647.1
MIPQALLFVPLLIPSLCLGKFPIYTIPDKLGPWSPIDIHHLSCPNNLVAEDEGCTSLSGFSYMELKVGYISAIKVNGFTCTGVVTEAETYTNFVGYVTTTFKRKHFRPMPDACRAAHDWKMAGDPRYEDSLQNPYPDYHWLRTVKTTKESLVIISPSVADLDPYDKSLHSRVFPSGKCLGITVSSTYCSTNHDYTIWMPVEARLGTSCDIFTNSKGKKASKGGRTCGFVDERGLYKSLKGACKLKLCGVPGLRLMDGTWVSIQTSDDIKWCPPDQLVNLHDFHSDEIEHLVVEELIKKREGCLDALESIMTTKSVSFRRLSHLRKLVPGFGKAYTIFNNTLMEADAHYKSVRTWNEVIPSKGCLKVGGRCHPPVNGVFFNGIILGPDGNVLIPEMQSSLLQQHMELLESSVIPLMHPLADPSTVFKDGDEAEDFVEVHLPDVHKQVSEIDLGLPSWGKYLLMSAGVLATLILAIFLITCCRRTNRTESTQRGRRESGGKVSVAPQNGKIISSWELYKSESETGL

SEQ ID NO: 31612 - protein, 524 aa, Artificial Sequence; identical to SEQ ID NO: 31283
  derived and/or modified protein sequence (wt) from glycoprotein__RABV__KJ174648.1

SEQ ID NO: 31613 - protein, 524 aa, Artificial Sequence; identical to SEQ ID NO: 31283
  derived and/or modified protein sequence (wt) from glycoprotein__RABV__KJ174649.1

SEQ ID NO: 31614 - protein, 524 aa, Artificial Sequence
  derived and/or modified protein sequence (wt) from glycoprotein__RABV__KJ174650.1
MILQALLFVPLLISPLCLGKFPIYTIPDKIGPWSPIDIHHLSCPNNLVVEDEGCTTLSGFSYMELKVGYISAIKVNGFTCTGVVTEAETYTNFVGYVTTTFKRKHFRPTPDACRAAYNWKIAGDPRYEDSLQNPYPDYHWLRTVKTTKESLIIISPSVADLDPYDKSLHSRVFPSGKCLGITISSTYCSTNHDYTIWMPEEARLGTSCDIFANSKGKRASKGGKTCGFVDERGLYKSLRGACKLKLCGVPGLRLMDGTWVSIQTTDETKWCPPDQLVNLHDFHSDEIEHLVVEELVKKREECLDALESIMTTKSVSFRRLSHLRKLVPGFGKAYTIFNKTLMEADAHYKSVQTWNEIIPSKGCLKVGGRCHPHVDGVFFNGIILGPDGNVLIPEMQSSLLQQHMELLESSVIPLMHPLADPSTVFKDGDEAEDFVEVHLPDVHKQVSGVDLGLPDWGKYLLMSAGALATLLLTIFLMTCCRKVNKTESTHRDPGESGRKVSVAPRNGKVISSWELYKSGGETRL

SEQ ID NO: 31615 - protein, 524 aa, Artificial Sequence
  derived and/or modified protein sequence (wt) from glycoprotein__RABV__KJ174651.1
MILQALLFVPLLISPLCLGKFPIYTIPDKIGPWSPIDIHHLSCPNNLVVEDEGCTTLSGFSYMELKVGYISAIKVNGFTCTGVVTEAETYTNFVGYVTTTFKRKHFRPTPDACRAAYNWKIAGDPRYEDSLQNPYPDYHWLRTVKTTKESLIIISPSVADLDPYDKSLHSRVFPSGKCLGITISSTYCSTNHDYTIWMPEEARLGTSCDIFTNSKGKRASKGGKTCGFVDERGLYKSLRGACKLKLCGVPGLRLMDGTWVSIQTTDDTKWCPPDQLVNLHDFHSDEIEHLVVEELVKKREECLDALESIMTTKSVSFRRLSHLRKLVPGFGKAYTIFNKTLMEADAHYKSVQTWNEIIPSKGCLKVGGRCHPHVDGVFFNGIILGPDGNVLIPEMQSSLLQQHMELLESSVIPLMHPLADPSTVFKDGDEAEDFVEIHLPDVHKQVSGVDLGLPDWGKYLLMSAGALATLLLTIFLMTCCRKVNKTESTHRDPGESGRKVSVAPRNGKVISSWELYKSGGETRL

SEQ ID NO: 31616 - protein, 524 aa, Artificial Sequence
  derived and/or modified protein sequence (wt) from glycoprotein__RABV__KJ174653.1
MIPQALLFVPLLISSLCFGEFPIYTIPEKLGPWSPIDIHHLSCPNNLVVEDEGCNSLSGFSYMELKVGYISSIKVNGFTCTGVVTEAETYTNFVGYVTTTFKRKHFRPMPDACRAAYSWKIAGDPRYEESLHNPYPDYHWLRTVKTTKESLVIISPSVADLDPYDKSLHSRVFSGGKCLGITISSTYCSTNHDYTIWMPEEARLGTSCDIFTNSKGKRASKGGKTCGFVDERGLYKSLKGACKLKLCGVPGLRLMDGTWVSIQTSDETKWCPPDQLVNIHDFRSDEIEHLVVEELVKKREECLDALESIMTTKSVSFRRLSHLRKLVPGFGKAYTIFNKTLMEADAHYKSVRTWNEIIPSKGCLSVGGRCHPHVNGVFFNGIIMGPDGSVLIPEMQSSLLQQHMELLESSVIPLMHPLANPSTVFKDGDEAEDFIEVHLPDVQEQVSGVDLGLPNWGKYVLMSAGALAILMLTIFLMTFCRRTNRTKSIQQGPGESGRKVSVPPQNGKVISSWESFKSGGETGL

SEQ ID NO: 31617 - protein, 524 aa, Artificial Sequence; identical to SEQ ID NO: 31291
  derived and/or modified protein sequence (wt) from glycoprotein__RABV__KJ174654.1

SEQ ID NO: 31618 - protein, 524 aa, Artificial Sequence; identical to SEQ ID NO: 31334
  derived and/or modified protein sequence (wt) from glycoprotein__RABV__KJ174655.1

SEQ ID NO: 31619 - protein, 524 aa, Artificial Sequence
  derived and/or modified protein sequence (wt) from glycoprotein__RABV__KJ174656.1
MIPQTLLFVPLLILPSCLGKFPIYTIPDKIGPWSPIDIHHLSCPNNLVVEDEGCTSLSGFSYMELKVGYISAIKVNGFTCTGVVTEAETYTNFVGYVTTTFKRKHFRPTPDACRAAYNWKMAGDPRYEDSLQNPYPDYHWLRTVKTTKESLIIISPSVADLDPYDKSLHSRVFPSGKCLGITVSSTYCSTNHDYTIWMPEEARLGTSCDIFTNSKGKRASKGGKTCGFVDERGLYKSLRGACKLKLCGVPGLRLMDGTWVSIQTTDETKWCPSDQLVNLHDFHSDEIEHLVVEELVKKREECLDALESIMTTKSVSFRRLSHLRKLVPGFGKAYTIFNKTLMEADAHYKSVQTWNEIIPSKGCLKVGGRCHPHVDGVFFNGIILGPDGNVLIPEMQSSLLQQHMELLESSVIPLMHPLADPSTVFKDGDEAEDFVEVHLPDVHKQVSGVDLGLPDWGKYLLMSAGALATLLLTIFLMTCCRKVNKTESTQRDSGESGRKVSIAPRNGKVISSWELYKSGGDTRL

SEQ ID NO: 31620 - protein, 524 aa, Artificial Sequence; identical to SEQ ID NO: 31619
  derived and/or modified protein sequence (wt) from glycoprotein__RABV__KJ174657.1

SEQ ID NO: 31621 - protein, 524 aa, Artificial Sequence
  derived and/or modified protein sequence (wt) from glycoprotein__RABV__KJ174658.1
MISQTLLFVTLLISSLCFGEFPIYTIPEKLGPWSPIDIHHLSCPNNLVVEDEGCNSLSGFSYMELKVGYISSIKVNGFTCTGVVTEAETYTNFVGYVTTTFKRKHFRPMPDACRAAYNWKMSGDPRYEESLHNPYPDYHWLRTVKTTKESLVIISPSVADLDPYDKSLHSRVFSGGKCLGITISSTYCSTNHDYTLWMPEEARLGTSCDIFTNSKGKRASKGGRTCGFVDERGLYKSLKGACKLKLCGVPGLRLMDGTWVSIQTSDETKWCPPDQLVNIHDFRSDEIEHLVVEELVKKREECLDALESIMTTKSVSFRRLSHLRKLVPGFGKAYTIFNKTLMEADAHYKSVRTWNEVIPSKGCLSVGGRCHPHVDGVFFNGIILGPDGSVLIPEMQSSLLQQHMELLESSVIPLMHPLANPSTVFKDGDEAEDFVEVHLPDVQEQVSGVDLGLPNWGKYVLMSAGALAILLLTIFLMTCCRRANRTKSIRQGPEESGRRVSVPPQNGKVISSWESFKSGGETGL

SEQ ID NO: 31622 - protein, 524 aa, Artificial Sequence
  derived and/or modified protein sequence (wt) from glycoprotein__RABV__KJ174659.1
MISQTLLFVPLLISSLCLGEFPIYTIPEKLGPWSPIDIHHLSCPNNLVVEDEGCNSLSGFSYMELKVGYISSIKVNGFTCTGVVTEAETYTNFVGYVTTTFKRKHFRPMPDACRAAYNWKMSGDPRYEESLHNPYPDYHWLRTVKTTKESLVIISPSVADLDPYDKSLHSRVFSGGKCLGITISSTYCSTNHDYTLWMPEEARLGTSCDIFTNSKGKRASKGGKTCGFVDERGLYKSLKGACKLKLCGVPGLRLMDGTWVSIQTSDETKWCPPDQLVNIHDFHSDEIEHLVVEELVKKREECLDALESIMTTKSVSFRRLSHLRKLVPGFGKAYTIFNKTLMEADAHYKSVRTWNEVIPSKGCLSVGGRCHPHVDGVFFNGIILGPDGSVLIPEMQSSLLQQHMELLESSVIPLMHPLANPSTVFKDGDEAEDFVEVHLPDVQEQVSGVDLGLPNWGKYVLMSAGALAILLLTIFLMTCCRRANRTKSIRRGPEESGRKVSVPPQNGKVISSWESFKSGGETRL

SEQ ID NO: 31623 - protein, 524 aa, Artificial Sequence
  derived and/or modified protein sequence (wt) from glycoprotein__RABV__KJ174660.1
MIPQALLFVPLLISSLCLGKFPIYTIPEKLGPWSPIDIHHLGCPNNLVVEDEGCDSLSGFSYMELKVGYISAIKVNGFTCTGVVTEAETYTNFVGYVTTTFKRKHFRPMPDACRAAYNWKTAGDPRYEESLHNPYPDYHWLRTVKTTKESLIIISPSVADLDPYDKSLHSRVFPGGKCLGITVSSTYCSTNHDYTIWMPEETRLGTSCDIFTNSRGKRASKGGKTCGFVDERGLYKSLKGACKLKLCGVPGLRLMDGTWVSIQTPDETKWCSPDQLVNLHDFHSDEIEHLVVEELVKKREECLDALESIMTTKSVSFRRLSHLRKLVPGFGKAYTIFNKTLMEADAHYKSVRTWDEIIPSKGCLRVGGRCHPHVNGVFFNGIILGPDGHVLIPEMQSSLLQQHMELLESSVIPLMHPVANPSTVFKDGDEAEDFVEVHLPDVHEQVSGVDLGLPNWGKYMLMSAGALATIILTIFLIACCRRVNRKESRQQGLGESGRKVSVTPQNGKVLSSWEWYKSGGETRL

SEQ ID NO: 31624 - protein, 524 aa, Artificial Sequence
  derived and/or modified protein sequence (wt) from glycoprotein__RABV__KJ174661.1
MIPQALLLLPLMISSLCLGKFPIYTIPDKLGPWSPIDIHHLSCPNNLVVEDEGCTSLSGFSYMELKVGYISAIKVNGFTCTGVVTEAETYTNFVGYVTTTFKRKHFRPMPDACRAAYNWKVAGDPRYEESLQNPYPDYHWLRTVKTTKESLIIISPSVADLDPYDKSLRSRIFPGGKCLGITVSSTYCSTNHDYTIWMPEEARLGTSCDIFTNSKGKRASKGGKICGFVDERGLYKSLKGACKLKLCGVSGLRLMDGTWVAIQTSEETKWCPSDQLVNLHDFHSDEIEHLVVEELVKKREECLDALESIMTTKSVSFRRLSHLRKLVPGFGKAYTIFNKTLMEADAHYNSVRTWNEIIPSKGCLKVGGRCHPHVDGVFFNGIILGPDGNVLIPEMQSSLLQQHMELLESSVIPLMHPLADPSTVFKEGDEAENFVEVHLPDIHKQVSGIDLGLPNWGKYLLMSAGALAALILTIFLITCCRRVNTTKSIKQGPEESRRKVSVTPQSGRVVSSWELYKKGGETKL

SEQ ID NO: 31625 - protein, 524 aa, Artificial Sequence
  derived and/or modified protein sequence (wt) from glycoprotein__RABV__KJ174662.1
MIPQALLLLPLMISSLCLGKFPIYTIPDKLGPWSPIDIHHLSCPNNLVVEDEGCTSLSGFSYMELKVGYISAIKVNGFTCTGVVTEAETYTNFVGYVTTTFKRKHFRPMPDACRAAYNWKVAGDPRYEESLQNPYPDYHWLRTVKTTKESLIIISPSVADLDPYDKSLRSRIFPGGKCLGITVSSTYCSTNHDYTIWMPEEARLGTSCDIFTNSKGKRASKGGKICGFVDERGLYKSLKGACKLKLCGVSGLRLMDGTWVAIQTSEETKWCPSDQLVNLHDFHSDEIEHLVVEELVKKREECLDALESIMTTKSVSFRRLSHLRKLVPGFGKAYTIFNKTLMEADAHYNSVRTWNEIIPSKGCLKVGGRCHPHVDGVFFNGIILGPDGNVLIPEMQSSLLQQHMELLESSVIPLMHPLADPSTVFKEGDEAENFVEVHLPDIHKQVSGIDLGLPNWGKYLLMSAGALAALMLTIFLITCCRRVNTTKSIKQGPEESRRKVSVTPQSGRVVSSWELYKKGGETRL

SEQ ID NO: 31626 - protein, 524 aa, Artificial Sequence
  derived and/or modified protein sequence (wt) from glycoprotein__RABV__KJ174663.1
MIPQAILSVPLLISSLCFGKFPIYTIPEKLGPWSPIDIHHLSCPNNLVVEDEGCTTLSGFSYIELKVGYISAIKVNGFTCTGVVTEAETYTNFVGYVTTTFKRKHFRPMPDACRAAYNWKIAGDPRYEESLHNPYPDYHWLRTVKTTKESLVIISPSVADLDPYDKSLHSRVFPGGKCLGITISSTYCSTNHDYTIWMPEEARLGTSCDIFTNSRGKRASKGGRTCGFVDERGLYKSLKGACKLKLCGVPGLRLMDGTWVSIQASDETKWCSPDQLVNVHDFHSDEIEHLVVEELVKRREECLDALESIVTTKSISFRRLSHLRKLVPGFGKAYTIFNKTLMEADAHYKSVRTWNEIIPSKGCLSVGGRCHPHVNGVFFNGIILGPDGNVLIPEMQSSLLQQHMELLESSVIPLMHPLADPSTVFKDGDEAEDFVEVHLPDVQEQVSGVDLGLPNWGKYVLMSAGALAILILTIFLITCCRRANKTKSTQQGLGGSGRKVSVSPQNGKVISSWESYKNGGETRL

SEQ ID NO: 31627 - protein, 524 aa, Artificial Sequence
  derived and/or modified protein sequence (wt) from glycoprotein__RABV__KJ174664.1
MIPQAILSVPLLISSLCFGKFPIYTIPEKLGPWSPIDIHHLSCPNNLVVEDEGCTTLSGFSYIELKVGYISAIKVNGFTCTGVVTEAETYTNFVGYVTTTFKRKHFRPMPDACRAAYNWKIAGDPRYEESLHNPYPDYHWLRTVKTTKESLVIISPSVADLDPYDKSLHSRVFPGGKCLGITISSTYCSTNHDYTIWMPEEARLGTSCDIFTNSRGKRASKGGRTCGFVDERGLYKSLKGACKLKLCGVPGLRLMDGTWVSIQASDETKWCSPDQLVNVHDFHSDEIEHLVVEELVKRREECLDALESIVTTKSVSFRRLSHLRKLVPGFGKAYTIFNKTLMEADAHYKSVRTWNEIIPSKGCLSVGGRCHPHVNGVFFNGIILGPDGNVLIPEMQSSLLQQHMELLESSVIPLMHPLADPSTVFKDGDEAEDFVEVHLPDVQEQVSGVDLGLPNWGKYMLMSAGALAILILTIFLITCCRRANKTKSTQQGLGGSGRKVSVSPQNGKVISSWESYKNGGETRL

SEQ ID NO: 31628 - protein, 524 aa, Artificial Sequence
  derived and/or modified protein sequence (wt) from glycoprotein__RABV__KJ174665.1
MIPQAILSVPLLISSLCFGKFPIYTIPEKLGPWSPIDIHHLSCPNNLVVEDEGCTTLSGFSYIELKVGYISAIKVNGFTCTGVVTEAETYTNFVGYVTTTFKRKHFRPMPDACRAAYNWKIAGDPRYEESLHNPYPDYHWLRTVKTTKESLVIISPSVADLDPYDKSLHSRVFPGGKCLGITISSTYCSTNHDYTIWMPEEARLGTSCDIFTNSRGKRASKGGRTCGFVDERGLYKSLKGACKLKLCGVPGLRLMDGTWVSIQASDETKWCSPDQLVNVHDFHSDEIEHLVVEELVKRREECLDALESIVTTKSISFRRLSHLRKLVPGFGKAYTIFNKTLMEADAHYKSVRTWNEIIPSKGCLSVGGRCHPHVNGVFFNGIILGPDGNVLIPEMQSSLLQQHMELLESSVIPLMHPLADPSTVFKDGDEAEDFVEVHLPDVQEQVSGVDLGLPNWGKYVLMSAGALAILILTIFLITCCRRANKIKSTRQGLGGSGRKVSVSPQNGKVISSWESYKNGGETRL

SEQ ID NO: 31629 - protein, 524 aa, Artificial Sequence
  derived and/or modified protein sequence (wt) from glycoprotein__RABV__KJ174666.1
MIPQALLFVPLLIPSLCLGKFPIYTIPDKLGPWSPIDIHHLSCPNNLVVEDEGCTSLSGFSYMELKVGYISAIKVNGFTCTGVVTEAETYTNFVGYVTTTFKRKHFRPMPDACRAAHDWKIAGDPRYEDSLQNPYPDYHWLRTVKTTKESLVIISPSVAELDPYDKSLHSRVFPSGKCLGITVSSTYCSTNHDYTIWMPVEARLGTSCDIFTNSRGKKASKGGRTCGFVDERGLYKSLKGACKLKLCGVPGLRLMDGTWVSIQTSDDIKWCPPDQLVNLHDFHSDEIEHLVVEELIKKREGCLDALESIMTTKSVSFRRLSHLRKLVPGFGKAYTIFNNTLMEADAHYKSVRTWNEVIPSKGCLKVGGRCHPPVNGVFFNGIILGPDGKVLIPEMQSSLLQQHMELLESSVIPLMHPLADPSTVFKDGDEAEDFVEVHLPDVHKQVSDVDLGLPSWGKYLLMSAGALATLILAIFLITCCRRANRTESTQRGHRESGGKMSVAPQNGKIISSWELYKSESETGM

SEQ ID NO: 31630 - protein, 524 aa, Artificial Sequence
  derived and/or modified protein sequence (wt) from glycoprotein__RABV__KJ174667.1
MIFQALLFVPLLISSLCLGKFPIYTIPDKLGPWSPIDIHHLSCPNNLVVEDEGCTSLSGFSYMELKVGYISAIKVNGFTCTGVVTEAETYTNFVGYVTTTFKRKHFRPIPDACRAAYNWKIAGDPRYEESLQNPYPDYHWLRTVKTTKESLIIISPSVADLDPYDKSLHSRLFPGGKCLGITISSTYCSTNHDYTIWMPEEPRLGTSCDIFTNSKGKKASKGGKVCGFVDERGLYKSLKGACKLKLCGVSGLRLMDGTWVTIQTSDETKWCPPDQLVNLHDFHSDEIEHLVVEELVKKREECLDALESIMTTKSVSFRRLSYLRKLVPGFGKAYTIFNKTLMEADAHYKSVRTWNEIIPSKGCLKVSDRCHPHVDGVFFNGIILGPDGNVLIPEMQSSLLQQHMELLESSVIPLMHPLADPSTVFKDGDEAEDFVEVHLPDVHKQISGVDLGLPSWGKYLLMIAGGLATLVLIIFLMACCRRTKRTEPRRRGSGESGEKVLATPQPKKVVSSWELYKREGDARL

SEQ ID NO: 31631 - protein, 524 aa, Artificial Sequence
  derived and/or modified protein sequence (wt) from glycoprotein__RABV__KJ174668.1
MIFQALLFVPLLISSLCLGKFPIYTIPDKIGPWSPIDIHHLSCPNNLVVEDEGCTSLSGFSYMELKVGYISAIKVNGFTCTGVVTEAETYTNFVGYVTTTFKRKHFRPIPDACRAAYNWKIAGDPRYEESLQNPYPDYHWLRTVKTTKESLIIISPSVADLDPYDKSLHSRLFPGGKCLGITISSTYCSTNHDYTIWMPEEPRLGTSCDIFTNSKGKKASKGGKVCGFVDERGLYKSLKGACKLKLCGVSGLRLMDGTWVTIQTSDETKWCPPDQLVNLHDFHSDEIEHLVVEELVKKREECLDALESIMTTKSVSFRRLSYLRKLVPGFGKAYTIFNKTLMEADAHYKSVRTWNEIIPSKGCLKVSDRCHPHVDGVFFNGIILGPDGNVLIPEMQSSLLQQHMELLESSVIPLMHPLADPSTVFKDGDEAEDFVEVHLPDVHKQISGVDLGLPSWGKYLLMIAGGLATLVLIIFLMACCRRTKRTESRRRGSGESGEKVLATPQPKKVVSSWELYKREGDARL

SEQ ID NO: 31632 - protein, 524 aa, Artificial Sequence
  derived and/or modified protein sequence (wt) from glycoprotein__RABV__KJ174669.1
MIFQALLFVPLLISSLCLGKFPIYTIPDKIGPWSPIDIHHLSCPNNLVVEDEGCTSLSGFSYMELKVGYISAIKVNGFTCTGVVTEAETYTNFVGYVTTTFKRKHFRPIPDACRAAYNWKIAGDPRYEESLQNPYPDYHWLRTVKTTKESLIIISPSVADLDPYDKSLHSRLFPGGKCLGITISSTYCSTNHDYTIWMPEEPRLGTSCDIFTNSKGKKASKGGKVCGFVDERGLYKSLKGACKLKLCGVSGLRLMDGTWVTIQTSDETKWCPPDQLVNLHDFHSDEIEHLVVEELVKKREECLDALESIMTTKSVSFRRLSYLRKLVPGFGKAYTIFNKTLMEADAHYKSVRTWNEIIPSKGCLKVSDRCHPHVDGVFFNGIILGPDGNVLIPEMQSSLLQQHMELLESSVIPLMHPLADPSTVFKDGDEAEDFVEVHLPDVHKQISGVDLGLPSWGKYLLMIAGGLATLVLIIFLMACCRRTKRAESRRRGSGESGEKVLATPQPKKVVSSWELYKREGDARL

SEQ ID NO: 31633 - protein, 524 aa, Artificial Sequence; identical to SEQ ID NO: 31631
  derived and/or modified protein sequence (wt) from glycoprotein__RABV__KJ174670.1

SEQ ID NO: 31634 - protein, 524 aa, Artificial Sequence; identical to SEQ ID NO: 31420
  derived and/or modified protein sequence (wt) from glycoprotein__RABV__KJ174671.1

SEQ ID NO: 31635 - protein, 524 aa, Artificial Sequence
  derived and/or modified protein sequence (wt) from glycoprotein__RABV__KJ174672.1
MIFQALLFVPLLISSLCLGKFPIYTIPDKLGPWSPIDIHHLSCPNNLVVEDEGCTSLSGFSYMELKVGYISAIKVNGFTCTGVVTEAETYTNFVGYVTTTFKRKHFRPIPDACRAAYNWKTAGDPRYEESLQNPYPDYHWLRTVKTTKESLIIISPSVADLDPYDKSLHSRLFPGGKCLGITISSTYCSTNHDYTIWMPEEPRLGTSCDIFTNSKGKKASKGGKVCGFVDERGLYKSLKGACKLKLCGVSGLRLMDGTWVTIQTSDETKWCPPDQLVNLHDFHSDEIEHLVVEELVKKREECLDALESIMTTKSVSFRRLSYLRKLVPGFGKAYTIFNKTLMEADAHYKSVRTWNEIIPSKGCLKVSDRCHPHVDGVFFNGIILGPDGNVLIPEMQSSLLQQHMELLESSVIPLMHPLADPSTVFKDGDEAEDFVEVHLPDVHKQISGVDLGLPSWGKYLLMIAGGLATLVLIIFLMACCRRTKRTESRRRGSGESGEKVLATPQPKKVVSSWELYKREGDARL

SEQ ID NO: 31636 - protein, 524 aa, Artificial Sequence; identical to SEQ ID NO: 31630
  derived and/or modified protein sequence (wt) from glycoprotein__RABV__KJ174673.1

SEQ ID NO: 31637 - protein, 524 aa, Artificial Sequence
  derived and/or modified protein sequence (wt) from glycoprotein__RABV__KJ174674.1
MIFQALLFVPLLISSLCLGKFPIYPIPDKLGPWSPIDIHHLSCPNNLVGEDEGCISLSGFSYMELKVGYISAIKVNGFTCTGVVTEAETYTNFVGYVTTTFKRKHFRPIPDACRAAYNWKIAGDPRYEESLQNPYPDYHWLRTVKTTKESLIIISPSVADLDPYDKSLHSRLFPGGKCLGITISSTYCSTNHDYTIWMPEEPRLGTSCDIFTNSKGKKASKGGKVCGFVDERGLYKSLKGACKLKLCGVSGLRLMDGTWVTIQTSDETKWCPPDQLVNLHDFHSDEIEHLVVEELVKKREECLDALESIMTTKSVSFRRLSYLRKLVPGFGKAYTIFNKTLMEADAHYKSVRTWNEIIPSKGCLKVSDRCHPHVDGVFFNGIILGPDGNVLIPEMQSSLLQQHMELLESSVIPLMHPLADPSTVFKDGDEAEDFVEVHLPDVHKQISGVDLGLPSWGKYLLMIAGGLATLVLIIFLMACCRRTKRTESRRRGSGESGEKVLATPQPKKVVSSWELYKREGDARL

SEQ ID NO: 31638 - protein, 524 aa, Artificial Sequence; identical to SEQ ID NO: 31312
  derived and/or modified protein sequence (wt) from glycoprotein__RABV__KJ174675.1

SEQ ID NO: 31639 - protein, 524 aa, Artificial Sequence
  derived and/or modified protein sequence (wt) from glycoprotein__RABV__KJ174676.1
MIPQALLFVPLLISSLCFGRFPIYTIPDKLGPWSPIDIHHLSCPNNLVVEDEGCTSLSGFSYMELKVGYISAIKVNGFTCTGVVTEAETYTNFVGYVTTTFKRKHFRPMPDACRTAYNWKIAGDPRYEESLQNPYPDYNWLRTVKTTKESLIVISPSVADLDPYDKSLHSRVFPGGKCLGITISSTYCSTNHDYTIWMPEEARLGTSCDIFTNSRGKRASKGGKTCGFVDERGLYKSLKGACKLKLCGVPGLRLMDGTWVTIQTSDETKWCPSDQLVNLHDFHSDEIEHLVVEELVKKREECLDALESIMTTKSVSFRRLSHLRKLVPGFGKAYTIFNKTLMEADAHYKSIRTWNEVIPSKGCLKVGGRCHPHVDGVFFNGIILGPDGNVLIPEMQSSLLQQHVELLESSVIPLMHPLADPSTVFKDGDEAEDFVEVHFPDIHKQVSGVDLGLPNWGKYLLMSAGALAALMLAIFLMTCCRRVNRTESIQRGPGESGRKVSITSQNGKVISSWELYKSGGETGL

SEQ ID NO: 31640 - protein, 524 aa, Artificial Sequence
  derived and/or modified protein sequence (wt) from glycoprotein__RABV__KJ174677.1
MIPQALLFVPLLISSLCFGGFPIYTIPDKLGPWSPIDIHHLSCPNNLVVEDEGCTSLSGFSYMELKVGYISAIKVNGFTCTGVVTEAETYTNFVGYVTTTFKRKHFRPMPDSCRAAYNWKTAGDPRYEESLQNPYPDYHWLRTVKTTKESLIIISPSVADLDPYDKSLHSRVFPGGKCLGITVSSTYCSTNHDYTIWMPEEARLGTSCDIFTNSRGKRASKGGRTCGFVDERGLYKSLKGACKLKLCGVLGLRLMDGTWVTIHTSNETKWCPSDQLVNLHDFHSDEIEHLVVEELVKKREECLDALESIMTTKSVSFRRLSHLRKLVPGFGKAYTIFNKTLMEADAHYKSIRTWNEIIPSKGCLKVGGRCHPHVDGVFFNGIILGPDGNVLIPEMQSSLLQQHVELLESSVIPLMHPLADPSTVFKDGDEAEDFVEVHLPDVHKQVSGVDLGLPNWGKYLLMSAGVLATLMLTIFLITCCRRVDRTESIQRGPGELGREVSVTSQNGKVVSSWELYKSGGETRL

SEQ ID NO: 31641 - protein, 524 aa, Artificial Sequence
  derived and/or modified protein sequence (wt) from glycoprotein__RABV__KJ174678.1
MIPQALLFVPLLISSLCFGGFPIYTIPDKLGPWSPIDIHHLSCPNNLVVEDEGCTSLSGFSYMELKVGYISAIKVNGFTCTGVVTEAETYTNFVGYVTTTFKRKHFRPMPDACRAAYNWKTAGDPRYEESLQNPYPDYHWLRTVKTTKESLIIISPSVADLDPYDKSLHSRVFPGGKCLGITVSSTYCSTNHDYTIWMPDEARLGTSCDIFTNSRGKRASKGGRTCGFVDERGLYKSLKGACKLKLCGVLGLRLMDGTWVTIQTSNETKWCPSDQLVNLHDFHSDEIEHLVVEELVKKREECLDALESIMTTKSVSFRRLSHLRKLVPGFGKAYTIFNKTLMEADAHYKSIRTWNEIIPSKGCLKVGGRCHPHMDGVFFNGIILGPDGNVLIPEMQSSLLQQHVELLESSVIPLMHPLADPSTVFKDGDEAEDFVEVHLPDVHKQVSGVDLGLPNWGKYLLMSAGALATLMLMIFLITCCRRVDRTESIQRGPGELGREVSVTSQNGKVISSWELYKSGGETRL

SEQ ID NO: 31642 - protein, 524 aa, Artificial Sequence
  derived and/or modified protein sequence (wt) from glycoprotein__RABV__KJ174679.1
MIPQALFFVPLLISSLCVGGFPIYTIPDKLGPWSPIDIHHLSCPNNLVVEDEGCTSLSGFSYMELKVGYISAIKVNGFTCTGVVTEAETYTNFVGYVTTTFKRKHFRPMPDSCRAAYNWKTAGDPRYEESLQNPYPDYHWLRTVKTTKESLIIISPSVADLDPYDKSLHSRVFPGGKCLGITVSSTYCSTNHDYTIWMPEEARLGTSCDIFTNSRGKRASKGGRTCGFVDERGLYKSLKGACKLKLCGVLGLRLMDGTWVTIHTSNETKWCPSDQLVNLHDFHSDEIEHLVVEELVKKREECLDALESIMTTKSVSFRRLSHLRKLVPGFGKAYTIFNKTLMEADAHYKSIRTWNEIIPSKGCLKVGGRCHPHVDGVFFNGIILGPDGNVLIPEMQSSLLQQHVELLESSVIPLMHPLADPSTVFKDGDEAEDFVEVHLPDVHKQVSGVDLGLPNWGKYLLMSAGVLATLMLTIFLITCCRRVDRTESIQRGPGELGREVSVTSQNGKVISSWELYKSGGETRL

SEQ ID NO: 31643 - protein, 524 aa, Artificial Sequence
  derived and/or modified protein sequence (wt) from glycoprotein__RABV__KJ174680.1
MIPQALLFVPLLISSLCFGGFPIYTIPDKLGPWSPIDIHHLSCPNNLVVEDEGCTSLSGFSYMELKVGYISAIKVNGFTCTGVVTEAETYTNFVGYVTTTFKRKHFRPMPDACRAAYNWKTAGDPRYEESLQNPYPDYHWLRTVKTTKESLIIISPSVADLDPYDKSLHSRVFPGGKCLGITVSSTYCSTNHDYTIWMPEEARLGTSCDIFTNSRGKRASKGGRTCGFVDERGLYKSLKGACKLKLCGVLGLRLMDGTWVTIQTSNETKWCPSDQLVNLHDFHSDEIEHLVVEELVKKREECLDALESIMTTKSVSFRRLSHLRKLVPGFGKAYTIFNKTLMEADAHYKSIRTWNEIIPSKGCLKVGGRCHPHVDGVFFNGIILGPDGNVLIPEMQSSLLQQHVELLESSVIPLMHPLADPSTVFKDGDEAEDFVEVHLPDVHKQVSGVDLGLPNWGKYLLMSAGALATLMLMIFLITCCRRVDRTESIQRGPGELGREVSVTSQNGKVISSWELYKSGGETRL

SEQ ID NO: 31644 - protein, 524 aa, Artificial Sequence
  derived and/or modified protein sequence (wt) from glycoprotein__RABV__KJ174681.1
MIPQALLFVPLLISSLCFGGFPIYTIPDKLGPWSPIDIHHLSCPNNLVVEDEGCTSLSGFSYMELKVGYISAIKVNGFTCTGVVTEAETYTNFVGYVTTTFKRKHFRPMPDSCRAAYNWKTAGDPRYEESLQNPYPDYHWLRTVKTTKESLIIISPSVADLDPYDKSLHSRVFPGGKCLGITVSSTYCSTNHDYTIWMPEEARLGTSCDIFTNSRGKRASKGGRTCGFVDERGLYKSLKGACKLKLCGVLGLRLMDGTWVTIHTSNETKWCPSDQLVNLHDFHSDEIEHLVVEELVKKREECLDALESIMTTKSVSFRRLSHLRKLVPGFGKAYTIFNKTLMEADAHYKSIRTWNEIIPSKGCLKVGGRCHPHVDGVFFNGIILGPDGNVLIPEMQSSLLQQHVELLESSVIPLMHPLADPSTVFKDGDEAEDFVEVHLPDVHKQVSGVDLGLPNWGKYLLVSAGVLATLMLTIFLITCCRRVDRTESIQRGPGELGRKVSVTSQNGKVISSWELYKSGGETRL

SEQ ID NO: 31645 - protein, 524 aa, Artificial Sequence
  derived and/or modified protein sequence (wt) from glycoprotein__RABV__KJ174682.1
MIAQALLFVPLLISPLCFGKFPIYTIPDKLGPWSPIDIHHLSCPNNLVVEDEECTSLSGFSYMELKVGYISAIKVNGFTCTGVVTEAETYTNFVGYVTTTFKRKHFRPTPDACRAAYNWKMAGDPRYEESLHNPYPDYHWLRTVKTTKESLIIISPSVADLDPYDKSLHSRVFPGGKCLGITISSTYCSTNHDYTIWMPEEARLGTSCDIFANSRGKRASKGGRTCGFVDERGLYKSLKGACKLKLCGVPGLRLMDGTWVTIQTSNETKWCPPDRLVNLHDFHSDEIEHLVVEELVKKREECLDALESIMTTKSVSFRRLSYLRKLVPGFGKAYTIFNKTLMEADAHYKSVRTWNEIIPSKGCLKVGGRCHPHVDGVFFNGIILGPDGNVLIPEMQSSLLQQHMELLESSVIPLMHPLADPSTVFKDGDEAEDFVEVHLPDIHKQVSGVDLGLPDWGKYLLMSAGALATLMLTIFLMTCCRRANRTESIQRGPGESGRKVSVTPQNGKVISSWELYKSGGETKL

SEQ ID NO: 31646 - protein, 524 aa, Artificial Sequence
  derived and/or modified protein sequence (wt) from glycoprotein__RABV__KJ174683.1
MIAQALLFVPLLISPLCLGKFPIYTIPDKLGPWSPIDIHHLSCPNNLVVEDEECTSLSGFSYMELKVGYISAIKVNGFTCTGVVTEAETYTNFVGYVTTTFKRKHFRPTPDACRAAYNWKMAGDPRYEESLHNPYPDYHWLRTVKTTKESLIIISPSVADLDPYDKSLHSRVFPGGKCLGITISSTYCSTNHDYTIWMPEEARLGTSCDIFANSRGKRASKGGRTCGFVDERGLYKSLKGACKLKLCGVPGLRLMDGTWVTIQTSNETKWCPPDRLVNLHDFHSDEIEHLVVEELVKKREECLDALESIMTTKSVSFRRLSYLRKLVPGFGKAYTIFNKTLMEADAHYKSVRTWNEIIPSKGCLKVGGRCHPHVDGVFFNGIILGPDGNVLIPEMQSSLLQQHMELLESSVIPLMHPLADPSTVFKDGDEAEDFVEVHLPDIHKQVSGVDLGLPDWGKYLLMSAGALATLMLTIFLMTCCRRANRTESIQRGPGESGRKVSVTPQNGKVISSWELYKSGGETKL

SEQ ID NO: 31647 - protein, 524 aa, Artificial Sequence
  derived and/or modified protein sequence (wt) from glycoprotein__RABV__KJ466147.1
MIPQALLFVPLLVFPLCFGKFPIYTIPDKLGPWSPIDIHHLSCPNNLVVEDEGCTNLSGFSYMELKVGYISAIKVNGFTCTGVVTEAETYTNFVGYVTTTFKRKHFRPTPDACRSAYNWKMAGDPRYEESLHNPYPDYHWLRTVKTTKESVVIISPSVADLDPYDESLHSRVFPRGKCSGITVSSAYCSTNHDYTIWMPENPRLGTSCDIFTNSRGKRASKGSKTCGFVDERGLYKSLKGACKLKLCGVLGLRLMDGTWVAIQTSNETKWCPPDQLVNLHDFHSDEIEHLVVEELVKKREECLDALESIMTTKSVSFRRLSHLRKLVPGFGKAYTIFNKTLMEADAHYKSVQTWNEIIPSKGCLRVGGRCHPHVNGVFFNGIILGPDGHVLIPEMQSSLLQQHMELLKSSVIPLMHPLADPSTVFKDGDEVEDFVEVHLQDVHKQVSGVDLGLPNWGKDVLMGAGVLTALMLMIFLMTCCRRTNRAESIQHSLGETGRKVSVTPQSGRVISSWESYKSGGETKL

SEQ ID NO: 31648 - protein, 524 aa, Artificial Sequence
  derived and/or modified protein sequence (wt) from glycoprotein__RABV__KJ476819.1
MVPQALLLVPLLVFSMCFGKFPIYTIPDKLGPWSPIDIHHLSCPNNLVVEDEGCTNLSGFSYMELKVGHISAIKVNGFTCTGVVTEAETYTNFVGYVTTTFKRKHFRPTPDACRAAYNWKMAGDPRYEESLHNPYPDYHWLRTVKTTKESLVIISPSVADLDPYDKSLHSRVFPNGKCSGITISSTYCPTNHDYTIWLPENPRLGTSCDIFTNSRGKRASKGSKTCGFVDERGLYKSLKGACKLKLCGVLGLRLMDGTWVAMQASDETKWCPPDQLVNLHDFRSDEIEHLVVEELVKKREECLDALESIMTTKSVSFRRLSHLRKLVPGFGKAYTIFNKTLMEADAHYKSVRTWNEIIPSKGCLRVGGRCHPHVNGVFFNGIILGPDGHVLIPEMQSSLLQQHMELLESSVIPLMHPLADPSTVFKDGDEAENFVEVHLPDVHKQISGVDLGLPNWGKYVLVSAGVLIALMLIIFLMTCCGRVNRPKSTQHNLGGTGREVSVTPQSGKVISSWESYKSGGETRL

SEQ ID NO: 31649 - protein, 524 aa, Artificial Sequence
  derived and/or modified protein sequence (wt) from glycoprotein__RABV__KJ476820.1
MVPQALLFVPLLVFSMCFGKFPIYTIPDKLGPWSPIDIHHLSCPNNLVVEDEGCTNLSGFSYMELKVGYISAIKVNGFTCTGVVTEAETYTNFVGYVTTTFKRKHFRPTPDACRTAYNWKMAGDPRYEESLHNPYPDYHWLRTVKTTKESLVIISPSVADLDPYDKSLHSRVFPNGKCSGITISSTYCPTNHDYTIWLPENPRLGTSCDIFTNSRGKRASKGSKTCGFVDERGLYKSLKGACKLKLCGVLGLRLMDGTWVAMQASDETKWCPPDQLVNLHDFRSDEIEHLVVEELVKKREECLDALESIMTTKSVSFRRLSHLRKLVPGFGKAYTIFNKTLMEADAHYKSVRTWNEIIPSKGCLRVGGRCHPHVNGVFFNGIILGPDGHVLIPEMQSSLLQQHMELLESSVIPLMHPLADPSTVFKDGDEAENFVEVHLPDVHKQISGVDLGLPNWGKYVLVSAGVLIALMLIIFLMTCCGRVNRPKSTQHNLGGTGREVSVTPQSGKVISSWESYKSGGETRL

SEQ ID NO: 31650 - protein, 524 aa, Artificial Sequence
  derived and/or modified protein sequence (wt) from glycoprotein__RABV__KJ564280.1
MVPQALLFVPLLVFSSCFGKFPIYTIPDKLGPWSPIDIHHLSCPNNLVVEDEGCTNLSGFSYMELKVGYISAIKVNGFTCTGVVTEAETYTNFVGYVTTTFKRKHFRPMPDACRAAYNWKMAGDPRYEESLHNPYPDYHWLRTVKTTKESLVIISPSVADLDPYDKSLHSRVFPGGKCSGITVSSTCCSTNHDYTIWMPENPRLGTSCDIFTNSRGKRASKGGKTCGFVDERGLYKSLKGACKLKLCGVLGLRLMDGTWVAIQTSDEIKWCSPDQLVNLHDFHSDEIEHLVVEELVKKREECLDALETIMTTKSVSFRRLSHLRKLVPGFGKAYTIFNKTLMEADAHYKSIRTWNETIPSKGCLRVGGRCHPHVNGVFFNGIILGPDGHVLIPEMQSSLLHQHMELLESSVIPLMHPLADPSTVFKDGDEAEDFVEVHLPDVHKQISGVDLGLPNWGKYVLISAGALTALMLTIFLMTCCRKTNRAGSIQHSPGETGRKVSVTSHNGRVISSWESYKSGGETGL

SEQ ID NO: 31651 - protein, 524 aa, Artificial Sequence
  derived and/or modified protein sequence (wt) from glycoprotein__RABV__KM016899.1
MVPLVPLFVPLLVFPLCSGKFPIYTIPDKLGPWSPIDIHHLSCPNNLVVEDEGCANLSGFSYMELKVGYISAIKVNGFTCTGVVTEAETYTNFVGYVTTTFRRKHFRPTPDACRAAYNWKMAGDPRYEESLHNPYPDYHWLRTVKTTKESLVIISPSVADLDPYDKSLHSRVFPSGKCSGITVSSTYCSTNHDYTIWMPENLRLGTSCDIFTNSRGKRASKGSKTCGFVDERGLYKSLKGACKLKLCGVLGLRLMDGTWVAMQTSGETKWCPPDQLVNLHDFRSDEIEHLVVEELVKKREECLDALESIMTTKSVSFRRLSHLRKLVPGFGKAYTIFNKTLMEADAHYKSVRTWNEIIPSKGCLRVGGRCHPHVNGVFFNGIILGPDGHVLIPEMQSSLLQQHMELLESSVIPLMHPLADPSTVFKDGDEAEDFVEVHLPDVHKQVSGVDLGLPNWGKYILLSAGALIALMLMIFLMTCCRKFNRPESTQRSLGGTGRKVSITSQGGKVISSWESYKSGGETRL

SEQ ID NO: 31652 - protein, 524 aa, Artificial Sequence; identical to SEQ ID NO: 30956
  derived and/or modified protein sequence (wt) from glycoprotein__RABV__KM093868.1

SEQ ID NO: 31653 - protein, 524 aa, Artificial Sequence
  derived and/or modified protein sequence (wt) from glycoprotein__RABV__KM278992.1
MVPQVLLFVPLLVFSMCFGKFPIYTIPDKLGPWSPIDIHHLSCPNNLVVEDEGCTNLSGFSYMELKVGYISAIKVNGFTCTGVVTEAETYTNFVGYVTTTFKRKHFRPTPDACRAAYNWKMAGDPRYEESLHNPYPDYHWLRTVKTTKESLVIISPSVTDLDPYDKSLHSRVFPSGKCLGITISSTYCSTNHDYTIWMPENPRLGTSCDIFTNSRGKRASKGGKTCGFVDERGLYKSLKGACKLKLCGVLGLRLMDGTWVAMQASDETKWCPPDQLVNLHDFRSDEIEHLVVEELVKKREECLDALESIMTTKSVSFRRLSHLRKLVPGFGKAYTIFNKTLMEADAHYKSVRTWNEIIPSKGCLRVGGRCHPHVKGVFFNGIILGPDGHVLIPEMQSSLLQQHMELLESSVIPLMHPLADPSTVFKDGDEAEDFVEVHLPDVHKQVSGVDLGLPSWGKYVLVSAGVLVVLMLTIFIITCCGRVHRPKSTQHSLGGTGRKVSVTSQSGKVISSWESYKSGGETRL

SEQ ID NO: 31654 - protein, 524 aa, Artificial Sequence; identical to SEQ ID NO: 31653
  derived and/or modified protein sequence (wt) from glycoprotein__RABV__KM278993.1

SEQ ID NO: 31655 - protein, 524 aa, Artificial Sequence
  derived and/or modified protein sequence (wt) from glycoprotein__RABV__KM408747.1
MVPQVLLFVPLLVFSMCFGKFPIYTIPDKLGPWSPIDIHHLSCPNNLVVEDEGCTNLSGFSYMELKVGYISAIKVNGFTCTGVVTEAETYTNFVGYVTTTFKRKHFRPTPDACRAAYNWKMAGDPRYEESLHNPYPDYHWLRTVKTTKESLVIISPSVADLDPYDKSLHSRVFPSGKCSGITISSTYCSTNHDYTIWMPENPRLGTSCDIFTNSRGKRASKGGKTCGFVDERGLYKSLKGACKLKLCGVLGLRLMDGTWVAMQTSDETKWCPPDQLVNLHDFRSDEIEHLVVEELVKKREECLDALESIMTTKSVSFRRLSHLRKLVPGFGKAYTIFNKTLMEADAHYKSVRTWNEIIPSKGCLRVGGRCHPHVKGVFFNGIILGPDGHVLIPEMQSSLLQQHMELLESSVIPLMHPLADPSTVFKEGDEAEDFVEVHLPDVHKQISGVDLGLPSWGKYVLVSAGVLVVLMLTIFIITCCGRIHRPKFTQHGLGGTGRKVSVTSQSGKVISSWESYKSGGETRL

SEQ ID NO: 31656 - protein, 524 aa, Artificial Sequence
  derived and/or modified protein sequence (wt) from glycoprotein__RABV__KM492745.1
MVPQVLLFVPLLVFSMCFGKFPIYTIPDKLGPWSPIDIHHLSCPNNLVVEDEGCTNLSGFSYMELKVGYISAIKVNGFTCTGVVTEAETYTNFVGYVTTTFKRKHFRPTPDACRAAYNWKMAGDPRYEESLHNPYPDYHWLRTVKTTKESLVIISPSVADLDPYDKSLHSRVFPSGKCSGITISSTYCSTNHDYTIWMPENPRLGTSCDIFTNSRGKRASKGGKTCGFVDERGLYKSLKGACKLKLCGVLGLRLMDGTWVAMQTSDETKWCPPDQLVNLHDFRSDEIEHLVVEELVKKREECLDALESIMTTKSVSFRRLSHLRKLVPGFGKAYTIFNKTLMEADAHYKSVRTWNEIIPSKGCLRVGGRCHPHVKGVFFNGIILGPDGHVLIPEMQSSLLQQHMELLESSVIPLMHPLADPSTVFKDGDEAEDFVEVHLPDVHKQISGVDLGLPSWGKYVLVSAGVLVVLMLTTFIITCCGRIRRPKSTQHGLGGTGRKVSVTSQSGKVISSWESYKSGGETRL

SEQ ID NO: 31657 - protein, 524 aa, Artificial Sequence; identical to SEQ ID NO: 31130
  derived and/or modified protein sequence (wt) from glycoprotein__RABV__KM492746.1

SEQ ID NO: 31658 - protein, 524 aa, Artificial Sequence
  derived and/or modified protein sequence (wt) from glycoprotein__RABV__KM492747.1
MVPQVLLFVPLLVFSMCFGKFPIYTIPDKLGPWSPIDIHHLSCPNNLVVEDEGCTNLSGFSYMELKVGYISAIKVNGFTCTGVVTEAETYTNFVGYVTTTFKRKHFRPTPDACRAAYNWKMAGDPRYEESLHNPYPDYHWLRTVKTTKESLVIISPSVADLDPYDKSLHSRVFPSGKCSGITISSTYCSTNHDYTIWMPENPRLGTSCDIFTNSRGKRASKGGKTCGFVDERGLYKSLKGACKLKLCGVLGLRLMDGTWVAMQTSDETKWCPPDQLVNLHDFRSDEIEHLVVEELVKKREECLDALESIMTTKSVSFRRLSHLRKLVPGFGKAYTIFNKTLMEADAHYKSVRTWNEIIPSKGCLRVGGRCHPHVNGVFFNGIILGPDGHVLIPEMQSSLLQQHMELLESSVIPLMHPLADPSTVFKDGDEAEDFVEVHLPDVHKQISGVDLGLPSWGKYVLVSAGVLVVLMLTIFIMTCCGRVRRPKSTQHGFGGTGRKVSVTSQSGKVISSWESYKSGGETRL

SEQ ID NO: 31659 - protein, 524 aa, Artificial Sequence
  derived and/or modified protein sequence (wt) from glycoprotein__RABV__KM492748.1
MVPQVLLLVPLLVFSMCFGKFPIYTIPDKLGPWSPIDIHHLSCPNNLVVEDEGCTNLSGFSYMELKVGYISAIKVNGFTCTGVVTEAETYTNFVGYVTTTFKRKHFRPTPDACRAAYNWKMAGDPRYEESLHNPYPDYHWLRTVKTTKESLVIISPSVADLDPYDKSLHSRVFPSGKCSGITISSTYCSTNHDYTIWMPENPRLGTSCDIFTNSRGKRASKGGKTCGFVDERGLYKSLKGACKLKLCGVLGLRLMDGTWVAMQTSDETKWCPPDQLVNLHDFRSDEIEHLVVEELVKKREECLDALESIMTTKSVSFRRLSHLRKLVPGFGKAYTIFNKTLMEADAHYKSVRTWNEIIPSKGCLRVGGRCHPHVNGVFFNGIILGPDGHVLIPEMQSSLLQQHMELLESSVIPLMHPLADPSTVFKDGDEAEDFVEVHLPDVHKQISGVDLGLPSWGKYVLVSAGVLVVLMLTIFMITCCGRIHRPKSTQHGLGGTGRKVSVTSQSGKVISSWESYKSGGETRL

SEQ ID NO: 31660 - protein, 524 aa, Artificial Sequence
  derived and/or modified protein sequence (wt) from glycoprotein__RABV__KM492750.1
MVPQVLLFVPLLVFSVCFGKFPIYTIPDKLGPWSPIDIHHLICPNNLVVEDEGCTNLTGFSYMELKVGYISAIKVNGFSCTGVVTEAYTYPNFVGYVTSTFKRKHFRPTPDACRAAYNWKMAGDPRFEESLHYPYPDYHWLRTVKTTKESLVIISPSVADLDPYDKSLHSRVFPSGKCSGITISSTYCSTNHDYTIWMPENPRLGTSCDIFTNSRGKRASKGGKTCGFVDERGLYKSLKGACKLKLCGVLGLRLMDGTWVAMQTSDETKWCPPDQLVNLHDFRSDEIEHLVVEELVKKREECLDALESIMTTKSVSFRRLSHLRKLVPGFGKAYTIFNKTLMEADAHYKSVRTWNEIIPSKGCLRVGGRCHPHVKGVFFNGIILGPDGHVLIPEMQSSLLQQHMELLESSVIPLMHPLADPSTVFKDGDEAEDFVEVHLPDVHKQISGVDLGLPSWGKYVLVSAGVLVVLMLTIFIITCCGRIHRPKSTQHGLGGTGRKVSVTSQSGKVISSWESYKSGGETRL

SEQ ID NO: 31661 - protein, 524 aa, Artificial Sequence
  derived and/or modified protein sequence (wt) from glycoprotein__RABV__KM492751.1
MVPQVLLFVPLLVFSMCFGKFPIYTIPDKLGPWSPIDIHHLSCPNNLVVEDEGCTNLSGFSYMELKVGYISAIKVNGFTCTGVVTEAETYTNFVGYVTTTFKRKHFRPTPDACRAAYNWKMAGDPRYEESLHNPYPDYHWLRTVKTTKESLVIISPSVADLDPYDKSLHSRVFPSGKCSGITISSTYCSTNHDYTIWMPENPRLGTSCDIFTNSRGKRASKGGKTCGFVDERGLYKSLKGACKLKLCGVLGLRLMDGTWVAMQTSDETKWCPPDQLVNLHDFRSDEIEHLVVEELVKKREECLDALESIMTTKSVSFRRLSHLRKLVPGFGKAYTIFNKTLMEADAHYKSVRTWNEIIPSKGCLRVGGRCHPHVKGVFFNGIILGPDGHVLIPEMQSSLLQQHMELLESSVIPLMHPLADPSTVFKDGDEAEDFVEVHLPDVHKQISGVDLGLPSWGKYVLVSAGVLVVLMLTIFIITCCRRIRRPRSTQHGLGGTGRKVSVTSQSGKVISSWESYKSGGETRL

SEQ ID NO: 31662 - protein, 524 aa, Artificial Sequence
  derived and/or modified protein sequence (wt) from glycoprotein__RABV__KM492752.1
MVPQVLLFVPLLVFSMCFGKFPIYTIPDKLGPWSPIDIHHLSCPNNLVVEDEGCTNLSGFSYMELKVGYISAIKVNGFTCTGVVTEAETYTNFVGYVTTTFKRKHFRPTPDACRAAYNWKMAGDPRYEESLHNPYPDYHWLRTVKTTKESLVIISPSVADLDPYDKSLHSRVFPSGKCSGITISSTYCSTNHDYTIWMPENPRLGTSCDIFTNSRGKRASRGGKTCGFVDERGLYKSLKGACKLKLCGVLGLRLMDGTWVAMQTSDETKWCPPDQLVNLHDFRSDEIEHLVVEELVKKREECLDALESIMTTKSVSFRRLSHLRKLVPGFGKAYTIFNKTLMEADAHYKSVRTWNEIIPSKGCLRVGGRCHPHVKGVFFNGIILGPDGHVLIPEMQSSLLQQHMELLESSVIPLMHPLADPSTVFKDGDEAEDFVEVHLPDVHKQISGVDLGLPNWGKYVLVSAGVLVVLMLTIFIITCCGRIRRPRSTQHGLGGTGRKVSVTSQSGKVISSWESYKSGGETRL

SEQ ID NO: 31663 - protein, 524 aa, Artificial Sequence
  derived and/or modified protein sequence (wt) from glycoprotein__RABV__KM492753.1
MVPQVLLFVPLLVFSMCFGKFPIYTIPDKLGPWSPIDIHHLSCPNNLVVEDEGCTNLSGFSYMELKVGYISAIKVNGFTCTGVVTEAETYTNFVGYVTTTFKRKHFRPTPDACRAAYNWKMAGDPRYEESLHNPYPDYHWLRTVKTTKESLVIISPSVADLDPYDKSLHSRVFPSGKCSGITISSTYCSTNHDYTIWMPENPRLGTSCDIFTNSRGKRASKGGKTCGFVDERGLYKSLKGACKLKLCGVLGLRLMDGTWVAMQTSDETKWCPPDQLVNLHDFRSDEIEHLVVEELVKKREECLDALESIMTTKSVSFRRLSHLRKLVPGFGKAYTIFNKTLMEADAHYKSVRTWNEIIPSKGCLRVGGRCHPHVNGVFFNGIILGPDGHVLIPEMQSSLLQQHMELLESSVIPLMHPLADPSTVFKDGDEAEDFVEVHLPDVHKQISGVDLGLPSWGKYVLVSAGVLVVLMLTIFIMTCCGRVHRPKSTQHGLGGTGRKVSVTSQSGKVISSWESYKSGGETRL

SEQ ID NO: 31664 - protein, 524 aa, Artificial Sequence
  derived and/or modified protein sequence (wt) from glycoprotein__RABV__KM492754.1
MVPQVLLFVPLLVFSMCFGKFPIYTIPDKLGPWSPIDIHHLSCPNNLVVEDEGCTNLSGFSYMELKVGYISAIKVNGFTCTGVVTEAETYTNFVGYVTTTFKRKHFRPTPDACRAAYNWKMAGDPRYEESLHNPYPDYHWLRTVKTTKESLVIISPSVADLDPYDKSLHSRVFPSGKCSGITISSTYCSTNHDYTIWMPENPRLGTSCDIFTNSRGKRASKGGKTCGFVDERGLYKSLKGACKLKLCGVLGLRLMDGTWVAMQTSDETKWCPPDQLVNLHDFRSDEIEHLVVEELVKKREECLDALESIMTTKSVSFRRLSHLRKLVPGFGKAYTIFNKTLMEADAHYKSVRTWNEIIPSKGCLRVGGRCHPHVNGVFFNGIILGPDGHVLIPEMQSSLLQQHMELLESSVIPLMHPLADPSTVFKDGDEAEDFVEVHLPDVHKQISGVDLGLPSWGKYVLVSAGVLVVLMLTIFIMTCCGRVHRSKSTQHGLGGTGRKVSVTSQSGKVISSWESYKSGGETRL

SEQ ID NO: 31665 - protein, 524 aa, Artificial Sequence
  derived and/or modified protein sequence (wt) from glycoprotein__RABV__KM492755.1
MVPQVLLFVPLLVFSMCFGKFPIYTIPDKLGPWSPIDIHHLSCPNNLVVEDEGCTNLSGFSYMELKVGYISAIKVNGFTCTGVVTEAETYTNFVGYVTTTFKRKHFRPTPDACRAAYNWKMAGDPRYEESLHNPYPDYHWLRTVKTTKESLVIISPSVADLDPYDKSLHSRVFPSGKCSGITISSTYCSTNHDYTIWMPENPRLGTSCDIFTNSRGKRASKGGKTCGFVDERGLYKSLKGACKLKLCGVLGLRLMDGTWVAMQTSDETKWCPPDQLVNLHDFRSDEIEHLVVEELVKKREECLDALESIMTTKSVSFRRLSHLRKLVPGFGKAYTIFNKTLMEADAHYKSVRTWNEIIPSKGCLRVGGRCHPHVNGVFFNGIILGPDGHVLIPEMQSSLLQQHMELLESSVIPLMHPLADPSTVFKDGDEAEDFVEVHLPDVHKQISGVDLGLPSWGKYVLVSAGVLVVLMLTIFIMTCCGRVHRPKSTQHGLGGTERKVSVTSQSGKVISSWESYKSGGETRL

SEQ ID NO: 31666 - protein, 524 aa, Artificial Sequence; identical to SEQ ID NO: 31665
  derived and/or modified protein sequence (wt) from glycoprotein__RABV__KM492758.1

SEQ ID NO: 31667 - protein, 524 aa, Artificial Sequence
  derived and/or modified protein sequence (wt) from glycoprotein__RABV__KM492759.1
MVPQVLLFVPLLVFSMCFGKFPIYTIPDKLGPWSPIDIHHLSCPNNLVVEDEGCTNLSGFSYMELKVGYISAIKVNGFTCTGVVTEAETYTNFVGYVTTTFKRKHFRPTPDACRAAYNWKMAGDPRYEESLHNPYPDYHWLRTVKTTKESLVIISPSVADLDPYDKSLHSRVFPSGKCSGITISSTYCSTNHDYTIWMPENPRLGTSCDIFTNSRGKRASKGGKTCGFVDERGLYKSLKGACKLKLCGVLGLRLMDGTWVAMQTSDETKWCPPDQLVNLHDFRSDEIEHLVVEELVKKREECLDALESIMTTKSVSFRRLSHLRKLVPGFGKAYTIFNKTLMEADAHYKSVRTWNEIIPSKGCLRVGGRCHPHVNGVFFNGIILGPDGHILIPEMQSSLLQQHMELLESSVIPLMHPLADPSTVFKDGDEAEDFVEVHLPDVHKQISGVDLGLPSWGKYVLVSAGVLVVLMLTIFIMTCCGRVHRPKSTQHGLGGTERKVSVTSQSGKVISSWESYKSGGETRL

SEQ ID NO: 31668 - protein, 524 aa, Artificial Sequence
  derived and/or modified protein sequence (wt) from glycoprotein__RABV__KM492760.1
MVPQVLLFVPLLVFSMCFGKFPIYTIPDKLGPWSPIDIHHLSCPNNLVVEDEGCTNLSGFSYMELKVGYISAIKVNGFTCTGVVTEAETYTNFVGYVTTTFKRKHFRPTPDACRAAYNWKMAGDPRYEESLHNPYPDYHWLRTVKTTKESLVIISPSVADLDPYDKSLHSRVFPSGKCSGITISSTYCSTNHDYTIWMPENPRLGTSCDIFTNSRGKRASKGGKTCGFVDERGLYKSLKGACKLKLCGVLGLRLMDGTWVAMQTSDETKWCPPDQLVNLHDFRSDEIEHLVVEELVKKREECLDALESIMTTKSVSFRRLSHLRKLVPGFGKAYTIFNKTLMEADAHYKSVRTWNEIIPSKGCLRVGGRCHPHVNGVFFNGIILGPDGHVLIPEMQSSLLQQHMELLESSVIPLMHPLADPSTVFKDGDEAEDFVEVHLPDVHKQISGVDLGLPSWGKYVLVSAGVLVVLMLTIFIMTCCGRVHRPKSTQHSLGGTERKVSVTSQSGKVISSWESYKSGGETRL

SEQ ID NO: 31669 - protein, 524 aa, Artificial Sequence
  derived and/or modified protein sequence (wt) from glycoprotein__RABV__KM492761.1
MVPQVLLFVPLLVFSMCFGKFPIYTIPDKLGPWSPIDIHHLSCPNNLVVEDEGCTNLSGFSYMELKVGYISAIKVNGFTCTGVVTEAETYTNFVGYVTTTFKRKHFRPTPDACRAAYNWKMAGDPRYEESLHNPYPDYHWLRTVKTTKESLVIISLSVADLDPYDKSLHSRVFPSGKCSGITISSTYCSTNHDYTIWMPENPRLGTSCDIFTNSRGKRASKGGKTCGFVDERGLYKSLKGACKLKLCGVLGLRLMDGTWVAMQTSDETKWCPPDQLVNLHDFRSDEIEHLVVEELVKKREECLDALESIMTTKSVSFRRLSHLRKLVPGFGKAYTIFNKTLMEADAHYKSVRTWNEIIPSKGCLRVGGRCHPHVNGVFFNGIILGPDGHVLIPEMQSSLLQQHMELLESSVIPLMHPLADPSTVFKDGDEAEDFVEVHLPDVHKQISGVDLGLPSWGKYVLVSAGVLVVLMLTIFIMTCCGRVHRPKSTQHGLGGTGRKVSVTSQSGKVISSWESYKSGGETRL

SEQ ID NO: 31670 - protein, 524 aa, Artificial Sequence
  derived and/or modified protein sequence (wt) from glycoprotein__RABV__KM492762.1
MVPQVLLFVPLLVFSMCFGKFPIYTIPDKLGPWSLIDIHHLSCPNNLVVEDEGCTNLSGFSYMELKVGYISAIKVNGFTCTGVVTEAETYTNFVGYVTTTFKRKHFRPTPDACRAAYNWKMAGDPRYEESLHNPYPDYHWLRTVKTTKESLVIISPSVADLDPYDKSLHSRVFPSGKCSGITISSTYCSTNHDYTIWMPENPRLGTSCDIFTNSRGKRASKGGKTCGFVDERGLYKSLKGACKLKLCGVLGLRLMDGTWVAMQTSDETKWCPPDQLVNLHDFRSDEIEHLVVEELVKKREECLDALESIMTTKSVSFRRLSHLRKLVPGFGKAYTIFNKTLMEADAHYKSVRTWNEIIPSKGCLRVGGRCHPHVNGVFFNGIILGPDGHVLIPEMQSSLLQQHMELLESSVIPLMHPLADPSTVFKDGDEAEDFVEVHLPDVHKQISGVDLGLPSWGKYVLVSAGVLVVLMLTIFIMTCCGRVHRPKSTQHGLGGTERKVSVTSQSGKVISSWESYKSGGETRL

SEQ ID NO: 31671 - protein, 524 aa, Artificial Sequence; identical to SEQ ID NO: 31663
  derived and/or modified protein sequence (wt) from glycoprotein__RABV__KM492763.1

SEQ ID NO: 31672 - protein, 524 aa, Artificial Sequence; identical to SEQ ID NO: 31665
  derived and/or modified protein sequence (wt) from glycoprotein__RABV__KM492764.1

SEQ ID NO: 31673 - protein, 524 aa, Artificial Sequence
  derived and/or modified protein sequence (wt) from glycoprotein__RABV__KM492765.1
MVPQVLLFVPLLVFSMCFGKFPIYTIPDKVGPGSPIDIHHLSCPNNLVIEDEGCTNLSGFSYMELKVGYISAIKVSGFTCTGVETEAETYTNFVGYVTTTFKRKHFRPTPNACRAAYNRKMAGDPRYEESLHNRCPEYHWLRTVKTTKESLVIISPSVADLDPYDKSLHSRVFPSGKCSGITISSTYCSTNHDYTIWMPENPRLGTSCDIFTNSRGKRASKGGKTCGFVDERGLYKSLKGACKLKLCGVLGLRLMDGTWVAMQTSDETKWCPPDQLVNLHDFRSDEIEHLVVEELVKKREECLDALESIMTTKSVSFRRLSHLRKLVPGFGKAYTIFNKTLMEADAHYKSVRTWNEIIPSKGCLRVGGRCHPHVNGVFFNGIILGPDGHVLIPEMQSSLLQQHMELLESSVIPLMHPLADPSTVFKDGDEAEDFVEVHLPDVHKQISGVDLGLPSWGKYVLVSAGVLVVLMLTIFIMTCCGRVHRPKSTQHGLGGTERKVSVTSQSGKVISSWESYKSGGETRL

SEQ ID NO: 31674 - protein, 524 aa, Artificial Sequence
  derived and/or modified protein sequence (wt) from glycoprotein__RABV__KM594023.1
MIPQNPLLGLLLVSSLCFGKFPIYTIPDKLGPWSPIDIHHLSCPNNLVVEDEGCTSLSGFSYMELKVGYISAIKVNGFTCTGVVTEAETYTNFVGYVTTTFKRRHFRPMPDACRAAHNWKIAGDPRYEDSLQNPYPDYHWLRTVKTTKESLIIISPSVADLDPYDKSLHSRVFPGGKCLGVTISSTYCSTNHDYTIWMPEEAGLGTSCDIFTNSRGKRASKGGKTCGFVDERGLYKSLKGSCKLKLCGVPGLRLMDGTWVSIQTPDETKWCPPDQVVNLHDFHSDEIEHLVVEELIKKREECLDALESIMTTKSVSFRRLSHLRKLVPGFGKAYTIYNKTLMEADAHYKSVRTWNEIIPSKGCLRVGGRCHPDVDGVFFNGIILGPDGNVLIPEMQSSLLQQHMELLESSVIPLMHPLADPSTIFKDSDEAEDFVEVHLPDVHKKISGVDLGLPSWGKYLLMSAGALAALMLTTLLITCCRKVNRAEPKQQGPRESGRTISVTPQNGRVISSWELYKSGSETGL

SEQ ID NO: 31675 - protein, 524 aa, Artificial Sequence
  derived and/or modified protein sequence (wt) from glycoprotein__RABV__KM594024.1
MIPRNPLLGLLLVSSLCFGKFPIYTIPDKLGPWSPIDIHHLSCPNNLVVEDEGCTSLSGFSYMELKVGYISAIKVNGFTCTGVVTEAETYTNFVGYVTTTFKRRHFRPMPDACRAAHNWKIAGDPRYEDSLQNPYPDYHWLRTVKTTKESLIIISPSVADLDPYDKSLHSRVFPGGKCLGVTISSTYCSTNHDYTIWMPEEAGLGTSCDIFTNSRGKRASKGGKTCGFVDERGLYKSLKGSCKLKLCGVPGLRLIDGTWVSIQTPDETKWCPPDQVVNLHDFHSDEIEHLVVEELIKKREECLDALESIMTTKSVSFRRLSHLRKLVPGFGKAYTIHNKTLMEADAHYKSVRTWNEIIPSKGCLRVGGRCHPNVDGVFFNGIILGPDGNVLIPEMQSSLLQQHMELLESSVIPLMHPLADPSTIFKDSDEAEDFVDVHLPDVHKKISGVDLGLPSWGKYLLMSAGALAALMLTTLLITCCRKVNRAEPKQQGPRESGRTISVTPQNGRVISSWELYKSGSETGL

SEQ ID NO: 31676 - protein, 524 aa, Artificial Sequence
  derived and/or modified protein sequence (wt) from glycoprotein__RABV__KM594025.1
MIPLDLLLGLLLASSLCFGKFPIYTIPDKLGPWSPIDIHHLSCPNNLVVEDEGCTSLSGFSYMELKVGYISAIKVNGFTCTGVVTEAETYTNFVGYVTTTFKRKHFRPMPDACRAAHEWKTAGDPRYEDSLQNPYPDYHWLRTVKTTKESLVIISPSVADLDPYDKSLHSRVFPGGKCLGVTISSTYCSTNHDYTIWMPEEAGLGTSCDIFTNSRGKRASKGGRICGFVDERGLYKSLKGACKLKLCGVPGLRLMDGTWVSIQAPDETKWCPPDQVVNLHDFHSDEIEHLVVEELIKKREECLDALESIMTTKSVSFRRLSHLRKLVPGFGKAYTIFNKTLMEADAHYKSVRTWNEVVPSKGCLKVGGRCHSDVDGVFFNGIILGPDGNVLIPEMQSSLLQQHMELLESSVIPLMHPLADPSTIFKDSDEAEDFVDVHLPDVHKQVSGVDLGLPSWGKYLLMSAGALATLMSAIFLVTCCKKVKRAEPAHHGPKESGRKISVTPQNGKVISSWEVYKSGNEPGL

SEQ ID NO: 31677 - protein, 524 aa, Artificial Sequence
  derived and/or modified protein sequence (wt) from glycoprotein__RABV__KM594026.1
MIPQALLFVPLLISSSCFGKFPVYTIPEKLGPWSPIDIHHLSCPNNLAVEDEGCNSLSGFSYMELKVGYISAIKVNGFTCTGVVTEAETYTNFVGYVTTTFKRKHFRPMPDACRAAYNWKMAGDPRYEESLHNPYPDYHWLRTVTTTKESLIIISPSVANLDPYDKSLHSRVFPGGKCMGITVSSTFCSTNHDYTIWMPENARLGTSCDIFTTSKGKKASKGGKICGFVDERGLYKSLKGACKLKLCGVSGLRLLDGTWVTIQTSDEIKWCPPDKLVNLHDFHSDEIEHLVVEELVRKREECLDTLESIMTTKSVSFRRLSHLRKLVPGFGKAYTIFNKTLMEADAHYKSVNTWNEIIPSKGCLTVGGRCHPHVNGVFFNGIILGPDGHVLIPEMQSSLLQQHMELLESSVIPLMHPLADPSTVFKDGDEAEDFVEVHLPDVHKQVSGIDLGLPNWGKYVLISAGFLVTLLLIIFFMICCRRANRRVSTQQSLGESGKKVFVIPQNGKVISSWESYKNGTETRL

SEQ ID NO: 31678 - protein, 524 aa, Artificial Sequence
  derived and/or modified protein sequence (wt) from glycoprotein__RABV__KM594027.1
MIPQALLFVPLLISSSCFGKFPVYTIPEKLGPWSPIDIHHLSCPNNLAVEDEGCNSLSGFSYMELKVGYISAIKVNGFTCTGVVTEAETYTNFVGYVTTTFKRKHFRPMPDACRAAYNWKMAGDPRYEESLHNPYPDYHWLRTVTTTKESLIIISPSVANLDPYDKSLHSRVFPGGKCMGITVSSTFCSTNHDYTIWMPENARLGTSCDIFTTSKGKKASKGGKICGFVDERGLYKSLKGACKLKLCGVSGLRLLDGTWVTIQTSDEIKWCPPDKLVNLHDFHSDEIEHLVVEELVRKREECLDTLESIMTTKSVSFRRLSHLRKLVPGFGKAYTIFNKTLMEADAHYKSVNTWNEIIPSKGCLTVGGRCHPHVNGVFFNGIILGPDGHVLIPEMQSSLLQQHMELLESSVIPLMHPLADPSTVFKDGDEAEDFVEVHLPDVHKQVSGIDLGLPNWGKYVLISAGFLVTLLLIIFLMICCRRANRRVSTQQSLGESGKKVFVIPQNGKVISSWESYKNGAETRL

SEQ ID NO: 31679 - protein, 524 aa, Artificial Sequence
  derived and/or modified protein sequence (wt) from glycoprotein__RABV__KM594028.1
MIPQALLFVPLLISSSCFGKFPVYTIPEKLGPWSPIDIHHLSCPNNLAVEDEGCNSLSGFSYMELKVGYISAIKVNGFTCTGVVTEAETYTNFVGYVTTTFKRKHFRPMPDACRAAYNWKMAGDPRYEESLHNPYPDYHWLRTVTTTKESLIIISPSVANLDPYDKSLHSRVFPGGKCMGITVSSTFCSTNHDYTIWMPENARLGTSCDIFTTSKGKKASKGGKICGFVDERGLYKSLKGACKLKLCGVSGLRLLDGTWVTIQTSDEIKWCPPDKLVNLHDFHSDEIEHLVVEELVRKREECLDTLESIMTTKSVSFRRLSHLRKLVPGFGKAYTIFNKTLMEADAHYKSVNTWNEIIPSKGCLTVGGRCHPHVNGVFFNGIILGPDGHVLIPEMQSSLLQQHMELLESSVIPLMHPLADPSTVFKEGDEAEDFVEVHLPDVHKQVSGIDLGLPNWGKYVLISAGFLVTLLLIIFLMICCRRANRRVSTQQSLGESGKKMFVIPQNGKVISSWESYKNGAETGL

SEQ ID NO: 31680 - protein, 524 aa, Artificial Sequence
  derived and/or modified protein sequence (wt) from glycoprotein__RABV__KM594029.1
MIHQALLLVPLMISSQCLGKFPIYTIPDKLGPWSPIDIHHLSCPNNLIVEDEGCTSLSGLSYMELKVGYISAIKVNGFTCTGVVTEAETYTNFVGYVTTTFKRKHFRPMPDACRAAYNWKIAGDPRYEESLQNPYPDSHWLRTVKTTKESLIIISPSVADLDPYDKSLRSRVFPGGKCLGITISSTYCSTNHDYTIWMPEEARLGTSCDIFTNSKGKRASKGGKICGFVDERGLYKSLKGACKLKLCGVSGLRLMDGTWVSIQIPDEIKWCPSDQLVNLHDFHSDEIEHLVVEELVKKREECLDALESIMTTKSVSFRRLSHLRKLVPGFGKAYTIFNKTLMEADAHYNSVRTWNEIIPSKGCLKVGGRCHPHVDGVFFNGIIMGPDGSVLIPEMQSSLLQQHMELLESSVIPLMHPLADPSTVFKDDDEAENFVEVHLPDIHKQVSGIDLGLPDWGKYLLMSTGALAALILTIFLILCCRKVNRKESIQRSLEESGRKVPVTPQNGKVISSWELYKNGGETKL

SEQ ID NO: 31681 - protein, 524 aa, Artificial Sequence
  derived and/or modified protein sequence (wt) from glycoprotein__RABV__KM594030.1
MIPQALLFVLLLISSSCFGKFPVYTIPDKLGPWSPIDIHHLSCPNNLIVEDEGCNNLSGFSYMELKVGYISAIKVNGFTCTGVVTEAETYTNFVGYVTTTFKRKHFRPTPDACRAAYNWKMAGDPRYEESLHNPYPDYHWLRTVKTTKESLIIISPSVADLDPYDKSLHSRVFPSGKCLGITISSTYCSTNHDYTIWMPEKARLGTSCDIFTNSKGKKASKGGKVCGFVDERGLYKSLKGACKLKLCGVPGLRLMDGTWVSVQTPDEAKWCPPDQLVNLHDFHSDEIEHLVVEELVKKREECLDTLESIMTTKSVSFRRLSHLRKLVPGFGKAYTIFNKTLMEADAHYKSVHTWNEVIPSKGCLKVGGRCHPHVNGVFLNGIILGPDGNVLIPEMQSSLLQQHMELLESSVIPLMHPLSDPSTVFKDGDEAEDFVEVHLPDVHKQVSGVDFGLPNWGRYVLMSAGVLAILILTIFLMICCRRVNRKDSSRSSPGELGRKVSVTPQNGKVISSWESYKSEGETRL

SEQ ID NO: 31682 - protein, 524 aa, Artificial Sequence
  derived and/or modified protein sequence (wt) from glycoprotein__RABV__KM594031.1
MIPQALLFVLLLISSSCFGKFPVYTIPDKLGPWSPIDIHHLSCPNNLIVEDEGCNNLSGFSYMELKVGYISAIKVNGFTCTGVVTEAETYTNFVGYVTTTFKRKHFRPTPDACRAAYNWKMAGDPRYEESLHNPYPDYHWLRTVKTTKESLIIISPSVADLDPYDKSLHSRVFPSGKCLGITISSTYCSTNHDYTIWMPEKARLGTSCDIFTNSKGKKASKGGKVCGFVDERGLYKSLKGACKLKLCGVPGLRLMDGTWVSVQTPDEAKWCPPDQLVNLHDFHSDEIEHLVVEELVKKREECLDTLESIMTTKSVSFRRLSHLRKLVPGFGKAYTIFNKTLMEADAHYKSVHTWNEVIPSKGCLKVGGRCHPHVNGVFLNGIILGPDGNVLIPEMQSSLLQQHMELLESSVIPLMHPLSDPSTVFKDGDEAEDFVEVHLPDVHKQVSGVDFGLPNWGRYVLMSAGVLAILILTIFLMICCRRVNRKDSSRSSLGELGRKVSVTPQNGKVISSWESYKSEGETRL

SEQ ID NO: 31683 - protein, 524 aa, Artificial Sequence
  derived and/or modified protein sequence (wt) from glycoprotein__RABV__KM594032.1
MIPQALLFVLLLISSLCSGKFPIYTIPDKLGPWSPIDIHHLSCPNNLIVEDEGCSSLSGFSYMELKVGYISAIKVNGFTCTGVVTEAETYTNFVGYVTTTFKRKHFRPMPDACRAAYNWKMAGDPRYEESLHNPYPDYHWLRTVKTTKESLIIISPSVADLDPYDKSLHSRVFPGGKCLGITISSTYCSTNHDYTIWMPEEPRLRTSCDIFTNSKGKRASKGGKMCGFVDERGLYKSLKGACKLKLCGVPGLRLMDGTWVSVQTPDETKWCSPDQLVNLHDFHSDEIEHLVVEELVKKREECLDTLESIMTTKSVSFRRLSHLRKLVPGFGKAYTIFNKTLMEADAHYKSIQTWNEVIPSKGCLKVGGRCHPHVNGVFLNGIILGPDGNVLIPEMQSSLLQQHMELLESSVIPLMHPLSDPSTVFKDGDEAEDFVEVHLPDVHKQVSGVDFGLPNWGRYVLMSAGALAILMLTIFLMICCRKVKRTDSSQSSLEELRRKVSVTPQNGKVISSWESYKSEGETRL

SEQ ID NO: 31684 - protein, 524 aa, Artificial Sequence
  derived and/or modified protein sequence (wt) from glycoprotein__RABV__KM594033.1
MIPQALLLVPLVISSLCLGKFPIYTIPDKLGPWSPIDIHHLSCPNNLVVEDEGCTSLSGFSYMELKVGYISAIKVNGFTCTGVVTEAETYTNFVGYVTTTFKRKHFRPMSDACRAAYNWKVAGDPRYEESLQNPYPDYHWLRTVKTTKESLIIISPSVADLDPYDKSLRSRIFPGGKCLGITVSSTYCSTNHDYTIWMPEEARLGTYCDIFTNSKGKRASKGGKICGFVDERGLYKSLKGACRLKLCGVSGLRLMDGTWVAIQTSEETKWCPSDQLVNLHDFHSDEIEHLVVEELVKKREECLDTLESIMTTKSVSFRRLSHLRKLVPGFGKAYTIFNKTLMEADAHYNSVRTWNEIIPSKGCLKVGGRCHPHVDGVFFNGIILGPDGNVLIPEMQSSLLQQHMELLESSVIPLMHPLADPSTVFKEGDEAENFVEVHLPDIHKQVSGIDLGLPNWGKYLLMSAGALAALILTIFLITCCRRVNRTESIKRGPEESRRKVSVTPQNGKVISSWELYKNGGETKL

SEQ ID NO: 31685 - protein, 524 aa, Artificial Sequence
  derived and/or modified protein sequence (wt) from glycoprotein__RABV__KM594034.1
MIPQALLLVPLVISSLCLGKFPIYTIPDKLGPWSPIDIHHLSCPNNLVVEDEGCTSLSGFSYMELKVGYISAIKVNGFTCTGVVTEAETYTNFVGYVTTTFKRKHFRPMSGACRAAYNWKVAGDPRYEESLQNPYPDYHWLRTVKTTKESLIIISPSVADLDPYDKSLRSRIFPGGKCLGITVSSTYCSTNHDYTIWMPEEARLGTSCDIFTNSKGKRASKGGKICGFVDERGLYKSLKGACRLKLCGVSGLRLMDGTWVAIQTSEETKWCPSDQLVNLHDFHSDEIEHLVVEELVKKREECLDTLESIMTTKSVSFRRLSHLRKLVPGFGKAYTIFNKTLMEADAHYNSVRTWNEIIPSKGCLRVGGRCHPHVDGVFFNGIILGPDGNVLIPEMQSSLLQQHMELLESSVIPLMHPLADPSTVFKEGDEAENFVEVHLPDIHKQVSGIDLGLPNWGKYLLMSAGALAALILTIFLITCCRRVNRTESIKQGPEESRRKVSVTPQNGKVISSWELYKNGGETKL

SEQ ID NO: 31686 - protein, 524 aa, Artificial Sequence
  derived and/or modified protein sequence (wt) from glycoprotein__RABV__KM594035.1
MIPQALLLVPLVISSLCLGKFPIYTIPDKLGPWSPIDIHHLSCPNNLVVEDEGCTSLSGFSYMELKVGYISAIKVNGFTCTGVVTEAETYTNFVGYVTTTFKRKHFRPMSDACRAAYNWKVAGDPRYEESLQNPYPDYHWLRTVKTTKESLIIISPSVADLDPYDKSLRSRIFPGGKCLGITVSSTYCSTNHDYTIWMPEEARLGTSCDIFTNSKGKRASKGGKICGFVDERGLYKSLKGACRLKLCGVSGLRLMDGTWVAIQTSEETKWCPSDQLVNLHDFHSDEIEHLVVEELVKKREECLDTLESIMTTKSVSFRRLSHLRKLVPGFGKAYTIFNKTLMEADAHYNSVRTWNEIIPSKGCLKVGGRCHPHVDGVFFNGIILGPDGNVLIPEMQSSLLQQHMELLESSVIPLMHPLADPSTVFKEGDEAENFVEVHLPDIHKQVSGIDLGLPNWGKYLLMSAGALAALILTIFLITCCRRVNRTESIKRGPEESRRKVSVTPQNGKVISSWELYKNGGETKL

SEQ ID NO: 31687 - protein, 524 aa, Artificial Sequence
  derived and/or modified protein sequence (wt) from glycoprotein__RABV__KM594036.1
MIPQALLLVPLVISSLCLGKFPIYTIPDKLGPWSPIDIHHLSCPNNLVVEDEGCTSLSGFSYMELKVGYISAIKVNGFTCTGVVTEAETYTNFVGYVTTTFKRKHFRPMSDACRAAYNWKVAGDPRYEESLQNPYPDYHWLRTVKTTKESLIIISPSVADLDPYDKSLRSRIFPGGKCLGITVSSTYCSTNHDYTIWMPEEARLGTSCDIFTNSKGKRASKGGKICGFVDERGLYKSLKGACRLKLCGVSGLRLMDGTWVAIQTSEETKWCPSDQLVNLHDFHSDEIEHLVVEELVKKREECLDTLESIMTTKSVSFRRLSHLRKLVPGFGKAYTIFNKTLMEADAHYNSVRTWNEIIPSKGCLKVGGRCHPHVDGVFFNGIILGPDGNVLIPEMQSSLLQQHMELLESSVIPLMHPLADPSTVFKEGDEAENFVEVHLPDIHKQVSGIDLGLPNWGKYLLMSAGALAALILTIFLITCCRRVNRTESIKQGPEESRRKVSVTPQNGKVISSWELYKNGGETKL

SEQ ID NO: 31688 - protein, 524 aa, Artificial Sequence
  derived and/or modified protein sequence (wt) from glycoprotein__RABV__KM594037.1
MILQALLFVPLLISSLCFGKFPIYTIPDKLGPWSPIDIHHLSCPNNLVVEDEGCTSLSGFSYMELKVGYISAIKVNGFTCTGVVTEAETYTNFVGYVTTTFKRKHFRPTPDACRAAYNWKVAGDPRYEESLQNPYPDYHWLRTVKTTKESLIIISPSVADLDPYDKSLHSRVFPSGKCLGITISSTYCSTNHDYTIWMPEEARLGTSCDIFTSSKGKKASKGGKTCGFVDERGLYKSLKGACKLKLCGVPGLRLMDGTWVTIQTSDETKWCPPDQLVNLHDFHSDEIEHLVVEELVKKREECLDALESIMTTKSVSFRRLSHLRKLVPGFGKAYTIFNKTLMEADAHYKSVRTWNEIIPSKGCLKVGGRCHPHVDGVFFNGIILGPDGNVLIPEMQSSLLQQHMELLESSVIPLMHPLADPSTVFKDGDEAEDFVEVHLPDVHKQISGVDLGLPSWGKYLLMIAGALAGLILIIFLMACCRRAKRTESRRRGSGESERKVPVPPQNGKVISSWELYKSEGETGL

SEQ ID NO: 31689 - protein, 524 aa, Artificial Sequence
  derived and/or modified protein sequence (wt) from glycoprotein__RABV__KM594038.1
MILQALLFVPLLISSLCFGKFPIYTIPDKLGPWSPIDIHHLSCPNNLVVEDEGCTSLSGFSYMELKVGYISAIKVNGFTCTGVVTEAETYTNFVGYVTTTFKRKHFRPTPDACRAAYNWKVAGDPRYEESLQNPYPDYHWLRTVKTTKESLIIISPSVADLDPYDKSLHSRVFPSGKCLGITISSTYCSTNHDYTIWMPEEARLGTSCDIFTSSKGKKASKGGRTCGFVDERGLYKSLKGACKLKLCGVPGLRLMDGTWVTIQTSDETKWCPPDQLVNLHDFHSDEIEHLVVEELVKKREECLDALESIMTTKSVSFRRLSHLRKLVPGFGKAYTIFNKTLMEADAHYKSVRTWNEIIPSKGCLKVGGRCHPHVDGVFFNGIILGPDGNVLIPEMQSSLLQQHMELLESSVIPLMHPLADPSTVFKDGDEAEDFVEVHLPDVHKQISGVDLGLPSWGKYLLMIAGALAGLILIIFLMACCRRAKRTESRRRGSGESERKVPVPPQNGKVISSWELYKSEGETGL

SEQ ID NO: 31690 - protein, 524 aa, Artificial Sequence; identical to SEQ ID NO: 30525
  derived and/or modified protein sequence (wt) from glycoprotein__RABV__KM594039.1

SEQ ID NO: 31691 - protein, 524 aa, Artificial Sequence; identical to SEQ ID NO: 30541
  derived and/or modified protein sequence (wt) from glycoprotein__RABV__KM594040.1

SEQ ID NO: 31692 - protein, 524 aa, Artificial Sequence
  derived and/or modified protein sequence (wt) from glycoprotein__RABV__KM594041.1
MILQALLFVPLLISSLCLGKFPIYTIPDKLGPWSPIDIHHLSCPNNLVVEDEGCTNLSGFSYMELKVGYISAIKVNGFTCTGVVTEAETYTNFVGYVTTTFKRKHFRPIPDACRAAYNWKMAGDPRYEESLQNPYPDYHWLRTVKTTKESLIIISPSVADLDPYDKSLHSRVFPGGKCLGITVSSTYCSTNHDYTIWMPEEPRLGTSCDIFTSSKGKKASKGGKTCGFVDERGLYKSLKGACKLKLCGVLGLRLMDGTWVSIQTSDDTKWCPPDQLVNLHDFHSDEIEHLVVEELVKKREECLDALESIMTTKSVSFRRLSYLRKLVPGFGKAYTIFNKTLMEADAHYKSVRTWNEIIPSKGCLKVRERCHPPVDGVFFNGIILGPDGNVLIPEMQSSLLQQHMELLESSVIPLMHPLADPSTVFKEGDEAEDFVEVHLPDVHKQISGVDLGLPSWGKYLLMIAGGLATLVLIICSMACCRRTKRTESRRRGSRESEKKVTAAPQTRKVVSSWELYKSEGDARL

SEQ ID NO: 31693 - protein, 524 aa, Artificial Sequence; identical to SEQ ID NO: 30541
  derived and/or modified protein sequence (wt) from glycoprotein__RABV__KM594042.1

SEQ ID NO: 31694 - protein, 524 aa, Artificial Sequence
  derived and/or modified protein sequence (wt) from glycoprotein__RABV__KM594043.1
MILQALLFVPLLISSLCLGKFPIYTIPDKLGPWSPIDIHHLSCPNNLVVEDEGCTNLSGFSYMELKVGYISAIKVNGFTCTGVVTEAETYTNFVGYVTTTFKRKHFRPIPDACRAAYNWKMAGDPRYEESLQNPYPDYHWLRTVKTTKESLIIISPSVADLDPYDKSLHSRVFPGGKCLGTTVSSTYCSTNHDYTIWMPEEPRLGTSCDIFTSSKGKKASKGGKTCGFVDERGLYKSLKGACKLKLCGVLGLRLMDGTWVSIQTSDDTKWCPPDQLVNLHDFHSDEIEHLVVEELVKKREECLDALESIMTTKSVSFRRLSYLRKLVPGFGKAYTIFNKTLMEADAHYKSVRTWNEIIPSKGCLKVRERCHPPVDGVFFNGIILGPDGNVLIPEMQSSLLQQHMELLESSVIPLMHPLADPSTVFKEGDEAEDFVEVHLPDVHKQISGVDLGLPSWGRYLLMIAGGLATLVLIICSMACCRRTKRTESRRRDSRESEKKVTVTPQTRKVVSSWELYKSEGDASL

SEQ ID NO: 31695 - protein, 524 aa, Artificial Sequence
  derived and/or modified protein sequence (wt) from glycoprotein__RABV__KP723638.1
MVLQTLLFVPFLVFSLCFGKFPIYTIPDKLGPWSPIDIHHLSCPNNLVVEDEGCTNLSGFSYMELKVGYISAIKVNGFTCTGVVTEAETYTNFVGYVTTTFKRKHFRPTPDACRAAYNWKMAGDPRYEESLHNPYPDYHWLRTVKTTKESLVIISPSVADLDPYDKSLHSRVFPSGKCSGITVSSTYCSTNHDYTIWMPENPRLGTSCDIFANSRGKRASKGSKTCGFVDERGLYKSLKGACKLKLCGVLGLRLMDGTWVAMQTSEETKWCPPDQLVNLHDFRSDEIEHLVVEELVKKREECLDALESIMTTKSVSFRRLSHLRKLVPGFGKAYTIFNKTLMEADAHYKSVRTWNEIIPSKGCLRVGGRCHPHVNGVFFNGIILGPDGHVLIPEMQSSLLQQHMELLESSVIPLMHPLADPSTVFKDGDEAEDFVEVHLPDVHKQVSGVDLGLPNWGKYVLLSAGTLIVLMLIIFLMTCCRRVNRPKPTQRSLGGTGRKVSVTSQSGKVISSWESYKSGSETRL

SEQ ID NO: 31696 - protein, 524 aa, Artificial Sequence
  derived and/or modified protein sequence (wt) from glycoprotein__RABV__KR105372.1
MVPQVLLFVPLLGFSLCFGKFPIYTIPDELGPWSPIDIHHLSCPNNLVVEDEGCTNLSEFSYMELKVGYISAIKVNGFTCTGVVTEAETYTNFVGYVTTTFKRKHFRPTPDACRAAYNWKMAGDPRYEESLHNPYPDYHWLRTVRTTKESLIIISPSVTDLDPYDKSLHSRVFPGGKCSGITVSSTYCSTNHDYTIWMPEDPRPRTPCDIFTNSRGKRASKGNKTCGFVDERGLYKSLKGACRLKLCGVLGLRLMDGTWVAMQTSDETKWCPPDQLVNLHDFHSDEIEHLVVEELVKKREECLDALESIMTTKSVSFRRLSHLRKLVPGFGKAYTIFNKTLMEADAHYKSVRTWNEIIPSKGCLKVGGRCHPHVNGVFFNGIILGPDGHVLIPEMQSSLLQQHMELLKSSVIPLMHPLADPSTVFKEGDEAEDFVEVHLPDVYKRISGVDLGLPNWGKYVLMTAGAMIGLVLIFSLMTWCRRANRPESKQRSFGGTGRNVSVTSQSGKVIPSWESYKSGGETRL

SEQ ID NO: 31697 - protein, 524 aa, Artificial Sequence
  derived and/or modified protein sequence (wt) from glycoprotein__RABV__KR906734.1
MVPQALLFVPLLVFPLCFGKFPIYTIPDKLGPWSPIDIHHLSCPNNLVVEDEGCTNLSGFSYMELKVGYISAIKVNGFTCTGVVTEAETYTNFVGYVTTTFKRKHFRPIPDACRAAYNWKMAGDPRYEESLHNPYPDYHWLRTVKTTKESLVIISPSVADLDPYDKSLHSRVFPSGKCSGITVSSTYCSTNHDYTIWMPENPRLGTSCDIFTNSRGKRASKGGKTCGFVDERGLYKSLRGACKLKLCGVLGLRLMDGTWVAMQTSDETKWCPPDQLVNMHDFRSDEIEHLVVEELVKKREECLDALESIMTTKSVSFRRLSHLRKLVPGFGKAYTIFNKTLMEADAHYKSVRTWNEIIPSKGCLRVGGRCHPHVNGVFFNGIILGPDGHVLIPEMQSSLLQQHMELLESSVIPLMHPLADPSTVFKEGDEAEDFVEVHLPDVHKQVSGVDLGLPNWGKYVLLSAGTLIALMLIIFLMTCCRRVNRPEPTQRSLGGTGRKVSVTSQSGKVISSWESYKSGGETRL

SEQ ID NO: 31698 - protein, 524 aa, Artificial Sequence
  derived and/or modified protein sequence (wt) from glycoprotein__RABV__KR906735.1
MVPQTLLFVPLLVFSLCFGKFPIYTIPDKLGPWSPIDIHHLSCPNNLVVEDEGCTNLSGFSYMELKVGYISAIKVNGFTCTGVVTEAETYTNFVGYVTTTFKRKHFRPIPDACRAAYNWKMAGDPRYEESLHNPYPDYHWLRTVKTTKESLVIISPSVADLDPYDKSLHSRVFPSGKCSGITVSSTYCSTNHDYTIWMPENPRLGTSCNIFTNSRGKRASKGGKTCGFVDERGLYKSLKGACKLKLCGVLGLRLMDGTWVAMQTSDETKWCPPDQLVNMHDFRSDEIEHLVVEELVKKREECLDALESIMTTKSVSFRRLSHLRKLVPGFGKAYTIFNKTLMEADAHYKSVRTWNEIIPSKGCLRVGGRCHPHVNGVFFNGIILGPDGHVLIPEMQSSLLQQHMELLESSVIPLMHPLADPSTVFKDGDEAEDFVEVHLPDVHKQVSGVDLGLPNWGKYVLLSAGTLIALMLIIFLMTCCRRVNRPESTQRSLGGTRRKVSVTSQSGKVISSWESYKSGGETRL

SEQ ID NO: 31699 - protein, 524 aa, Artificial Sequence; identical to SEQ ID NO: 31698
  derived and/or modified protein sequence (wt) from glycoprotein__RABV__KR906736.1

SEQ ID NO: 31700 - protein, 524 aa, Artificial Sequence
  derived and/or modified protein sequence (wt) from glycoprotein__RABV__KR906737.1
MVPQALLFVPLLVFPLCFGKFPIYTIPDKLGPWSPIDIHHLSCPNNLVVEDEGCTNLSGFSYMELKVGYISAIKVNGFTCTGVVTEAETYTNFVGYVTTTFKRKHFRPIPDACRAAYNWKMAGDPRYEESLHNPYPDYHWLRTVKTTKESLVIISPSVADLDPYDKSLHSRVFTSGKCSGITVSSTYCSTNHDYTIWMPENPRLGTSCNIFVNSKGKRASKGGKTCGFVDERGLYKSLKGACKLKLCGVLGLRLMDGTWVAMQTSDETKWCSPDQLVNMHDFRSDEIEHLVVEELVKKREECLDALESIMTTKSVSFRRLSHLRKLVPGFGKAYTIFNKTLMEADAHYKSVRTWNEIIPSKGCLRVGGRCHPHVNGVFFNGIILGPDGHVLIPEMQSSLLQQHMELLESSVIPLMHPLADPSTVFKDGDEAEDFVEVHLPDVHKQVSGVDLGLPNWGKYVLLSAGTLIALMLIIFLMTCCRRVNRPESTQRSLGGTGRKVSVTSQSGKVISSWESYKSGGETRL

SEQ ID NO: 31701 - protein, 524 aa, Artificial Sequence; identical to SEQ ID NO: 31700
  derived and/or modified protein sequence (wt) from glycoprotein__RABV__KR906738.1

SEQ ID NO: 31702 - protein, 524 aa, Artificial Sequence
  derived and/or modified protein sequence (wt) from glycoprotein__RABV__KR906739.1
MVPQALLFVPLLVFPLCFGKFPIYTIPDKLGPWSPIDIHHLSCPNNLVVEDEGCTNLSGFSYMELKVGYISAIKVNGFTCTGVVTEAETYTNFVGYVTTTFKRKHFRPIPDACRAAYNWKMAGDPRYEESLHNPYPDYHWLRTVKTTKESLVIISPSVADLDPYDKTLHSRVFPSGKCSGITVSSTYCSTNHDYTIWMPENPRLGTSCDIFTNSRGKRASKGGKTCGFVDERGLYKSLKGACKLKLCGVLGLRLMDGTWVAMQTSDETKWCPPDRLVNMHDFRSDEIEHLVVEELVKKREECLDALESIMTTKSVSFRRLSHLRKLVPGFGKAYTIFNKTLMEADAHYKSVRTWNEIIPSKGCLRVGGRCHPHVNGVFFNGIILGPDGHVLIPEMQSSLLQQHMELLESSVIPLMHPLADPSTVFKDGDEAEDFVEVHLPDVHKQVSGVDLGLPNWGKYVLLSAGTLIALMLIIFLMTCCRRVNRPEPTQRSLGGTGRKVSVTSQSGKVISSWESYKSGGETKL

SEQ ID NO: 31703 - protein, 524 aa, Artificial Sequence
  derived and/or modified protein sequence (wt) from glycoprotein__RABV__KR906740.1
MVPQARLFVPLLVFPLCFGKFPIYTIPDKLGPWSPIDIHHLSCPNNLVVEDEGCTNLSGFSYMELKVGYISAIKVNGFTCTGVVTEAETYTNFVGYVTTTFKRKHFRPIPDACRAAYNWKMAGDPRYEESLHNPYPDYHWLRTVKTTKESLVIISPSVADLDPYDRSLHSRVFTGGKCSGITVSSTYCSTNHDYTIWMPENPRLGTSCNIFANSKGKRASKGGKTCGFVDERGLYKSLKGACKLKLCGVLGLRLMDGTWVAMQTSDETKWCPPDQLVNMHDFRSDEIEHLVVEELVKKREECLDALESIMTTKSVSFRRLSHLRKLVPGFGKAYTIFNKTLMEADAHYKSVRTWNEIIPSKGCLRVGGRCHPHVNGVFFNGIILGPDGHVLIPEMQSSLLQQHMELLESSVIPLMHPLADPSTVFKDGDEAEDFVEVHLPDVHKQVSGVDLGLPNWGKYVLLSAGTLIALMLIIFLMTCCRRVSRPESTQRSLGRIGRKVSVTSQSGKVISSWESYKSGGETRL

SEQ ID NO: 31704 - protein, 524 aa, Artificial Sequence
  derived and/or modified protein sequence (wt) from glycoprotein__RABV__KR906741.1
MVPQALLFVPLLVFPLCFGKFPIYTIPDKLGPWSPIDIHHLSCPNNLVVEDEGCTNLSGFSYMELKVGYISAIKVNGFTCTGVVTEAETYTNFVGYVTTTFKRKHFRPIPDACRAAYNWKMAGDPRYEESLHNPYPDYHWLRTVKTTKESLVIISPSVADLDPYDKSLHSRVFTSGKCSGITVSSTYCSTNHDYTIWMPENPRLGTSCNIFANSKGKRASKGGKTCGFVDERGLYKSLKGACKLKLCGVLGLRLMDGTWVAMQTSDETKWCPPDQLVNMHDFRSDEIEHLVVEELVKKREECLDALESIMTTKSVSFRRLSHLRKLVPGFGKAYTIFNKTLMEADAHYKSVRTWNEIIPSKGCLRVGGRCHPHVNGVFFNGIILGPDGHVLIPEMQSSLLQQHMELLESSVIPLMHPLADPSTVFKDGDEAEDFVEVHLPDVHKQVSGVDLGLPNWGKYVLLSAGTLIALMLILFLMTCCRRVNRPESTQRSLGGTGRKVSVTSQSGKVISSWESYKSGGETRL

SEQ ID NO: 31705 - protein, 524 aa, Artificial Sequence; identical to SEQ ID NO: 31492
  derived and/or modified protein sequence (wt) from glycoprotein__RABV__KR906742.1

SEQ ID NO: 31706 - protein, 524 aa, Artificial Sequence; identical to SEQ ID NO: 31697
  derived and/or modified protein sequence (wt) from glycoprotein__RABV__KR906743.1

SEQ ID NO: 31707 - protein, 524 aa, Artificial Sequence
  derived and/or modified protein sequence (wt) from glycoprotein__RABV__KR906744.1
MVPQALLFVPLLVFPLCFGKFPIYTIPDKLGPWSPIDIHHLSCPNNLVVEDEGCTNLSGFSYMELKVGYISAIKVNGFTCTGVVTEAETYTNFVGYVTTTFKRKHFRPIPDACRAAYNWKMAGDPRYEESLHNPYPDYHWLRTVKTTKESLVIISPSVADLDPYDKTLHSRVFPSGKCSGITVSSTYCSTNHDYTIWMPENPRLGTSCDIFTNSRGKRASKGGKTCGFVDERGLYKSLKGACKLKLCGVLGLRLMDGTWVAMQTSDETKWCPPDQLVNMHDFRSDEIEHLVVEELVKKREECLDALESIMTTKSVSFRRLSHLRKLVPGFGKAYTIFNKTLMEADAHYKSVRTWNEIIPSKGCLRVGGRCHPHVNGVFFNGIILGPDGHVLIPEMQSSLLQQHMELLESSVIPLMHPLADPSTVFKDGDEAEDFVEVHLPDVHKQVSGVDLGLPNWGKYVLLSAGTLIALMLIIFLMTCCRRVNRPEPTQRSLGGTGRKVSVTSQSGKVISSWESYKSGGETKL

SEQ ID NO: 31708 - protein, 524 aa, Artificial Sequence; identical to SEQ ID NO: 31700
  derived and/or modified protein sequence (wt) from glycoprotein__RABV__KR906745.1

SEQ ID NO: 31709 - protein, 524 aa, Artificial Sequence
  derived and/or modified protein sequence (wt) from glycoprotein__RABV__KR906746.1
MVPQALLFVTLLVFSLCFGKFPIYTIPDKLGPWSPIDIHHLSCPNNLVVEDEGCTNLSGFSYMELKVGYISAIKVNGFTCTGVVTEAETYTNFVGYVTTTFKRKHFRPIPDACRAAYNWKMAGDPRYEESLHNPYPDYHWLRTVKTTKESLVIISPSVADLDPYDKSLHSRVFPGGKCSGITVSSTFCSTNHDYTIWMPENPRLGTSCDIFANSRGKRASKGGKTCGFVDERGLYKSLKGACKLKLCGVLGLRLMDGTWVAMQTSDETKWCPPDQLVNMHDFRSDEIEHLVVEELVKKREECLDALESIMTTKSVSFRRLSHLRKLVPGFGKAYTMFNKTLMEADAHYKSVRTWNEIIPSKGCLRVGGRCHPHVNGVFFNGIILGPDGHVLIPEMQSSLLQQHMELLESSVIPLMHPLADPSTVFKDGDEAEDFVEVHLPDVHKQVSGVDLGLPNWGKYVLLSAGTLIALMLIIFLMTCCRRVNRPESTDRSLGGTGRKVSVTSQSGKVISSWESYKSGGETRL

SEQ ID NO: 31710 - protein, 524 aa, Artificial Sequence; identical to SEQ ID NO: 31709
  derived and/or modified protein sequence (wt) from glycoprotein__RABV__KR906747.1

SEQ ID NO: 31711 - protein, 524 aa, Artificial Sequence
  derived and/or modified protein sequence (wt) from glycoprotein__RABV__KR906748.1
MVPQALLFVPLLVFSLCFGKFPIYTIPDKLGPWSPIDIHHLSCPNNLVVEDEGCTNLSGFSYMELKVGYISAIKVNGFTCTGVVTEAETYTNFVGYVTTTFKRKHFRPIPDACRATYNWKIAGDPRYEESLHNPYPDYHWLRTVKTTKESLVIISPSVADLDPYDKSLHSRVFPSGKCSGITVSSTHCSTNHDYTIWMPENPRLGTSCDIFTNSRGKRASKGSKTCGFVDERGLYKSLKGACKLKLCGVLGLRLMDGTWVAMQTSDETKWCPPDQLVNLHDFRSDEIEHLVVEELVKKREECLDALESIMTTKSVSFRRLSHLRKLVPGFGKAYTIFNKTLMEADAHYKSVRTWNEIIPSKGCLRVGGRCHPPVNGVFFNGIILGPDGHVLIPEMQSSLLQQHMELLESSVIPLMHPLADPSAVFKDGDEAEDFVEVHLPDVHKQVSGVDLGLPNWGKYVLLSAGTLIALMLIIFLMTCCRGVNRPESKQCSLGGTRRKVSVTSQSGKVISSWESYKSGGETRL

SEQ ID NO: 31712 - protein, 524 aa, Artificial Sequence
  derived and/or modified protein sequence (wt) from glycoprotein__RABV__KR906749.1
MVPQDLLFVPLLVLPLCFGKFPIYTIPDKLGPWSPIDIHHLSCPNNLVVEDEGCTNLSGFSYMELKVGYISAIKVNGFTCTGVVTEAETYTNFVGYVTTTFKRKHFRPIPDACRAAYNWKMAGDPRYEESLHNPYPDYHWLRTVKTTKESLVIISPSVADLDPYDKSLHSRVFTSGKCSGITVSSTYCSTNHDYTIWMPENPRLGTSCNIFANSKGKRASKGGKTCGFVDERGLYKSLKGACKLKLCGVLGLRLMDGTWVAMQTSDETKWCPPDQLVNMHDFRSDEIEHLVVEELVKKREECLDALESIMTTKSVSFRRLSHLRKLVPGFGKAYTIFNKTLMEADAHYKSVRTWNEIIPSKGCLRVGGRCHPHVNGVFFNGIILGPDGHVLIPEMQSSLLQQHMELLESSVIPLMHPLADPSTVFKDGDEAEDFVEVHLPDVHKQVSGVDLGLPNWGKYVLLSAGTLIALMLIIFLTTCCRRVNRPESTQRSLGGTGRKVSVTSQSGKVISSWESYKSGGETRL

SEQ ID NO: 31713 - protein, 524 aa, Artificial Sequence; identical to SEQ ID NO: 31492
  derived and/or modified protein sequence (wt) from glycoprotein__RABV__KR906750.1

SEQ ID NO: 31714 - protein, 524 aa, Artificial Sequence
  derived and/or modified protein sequence (wt) from glycoprotein__RABV__KR906751.1
MVPQALLFVTLLVFSLCFGKFPIYTIPDKLGPWSPIDIHHLSCPNNLVVEDEGCTNLSGFSYMELKVGYISAIKVNGFTCTGVVTEAETYTNFVGYVTTTFKRKHFRPIPDACRAAYNWKMAGDPRYEESLHNPYPDYHWLRTVKTTKESLVIISPSVADLDPYDKSLHSRVFPGGKCSGITVSSTFCSTNHDYTIWMPENPRLGTSCDIFANSKGKRASKGGKTCGFVDERGLYKSLKGACKLKLCGVLGLRLMDGTWVAMQTSDETKWCPPDQLVNMHDFRSDEIEHLVVEELVKKREECLDALESIMTTKSVSFRRLSHLRKLVPGFGKAYTMFNKTLMEADAHYKSVRTWNEIIPSKGCLRVGGRCHPHVNGVFFNGIILGPDGHVLIPEMQSSLLQQHMELLESSVIPLMHPLADPSTVFKDGDEAEDFVEVHLPDVHKQVSGVDLGLPNWGKYVLLSAGTLIALMLIIFLMTCCRRVNRPESTHRSLGRTGRKVSVTSQSGKVISSWESYKSGGETRL

SEQ ID NO: 31715 - protein, 524 aa, Artificial Sequence; identical to SEQ ID NO: 31704
  derived and/or modified protein sequence (wt) from glycoprotein__RABV__KR906753.1

SEQ ID NO: 31716 - protein, 524 aa, Artificial Sequence
  derived and/or modified protein sequence (wt) from glycoprotein__RABV__KR906755.1
MVPQALLFVLLLVFPLCFGKFPIYTIPDKLGPWSPIDIHHLSCPNNLVVEDEGCTNLSGFSYMELKVGYISAIKVNGFTCTGVVTEAETYTNFVGYVTTTFKRKHFRPIPDACRAAYNWKMAGDPRYEESLHNPYPDYHWLRTVKTTKESLVIISPSVADLDPYDKSLHSRVFTSGKCSGITVSSTYCSTNHDYTIWMPENPRLGTSCNIFVNSKGKRASKGGKTCGFVDERGLYKSLKGACKLKLCGVLGLRLMDGTWVAMQTSDETKWCSPDQLVNMHDFRSDEIEHLVVEELVKKREECLDALESIMTTKSVSFRRLSHLRKLVPGFGKAYTIFNKTLMEADAHYKSVRTWNEIIPSKGCLRVGGRCHPHVNGVFFNGIILGPDGHVLIPEMQSSLLQQHMELLESSVIPLMHPLADPSTVFKDGDEAEDFVEVHLPDVHKQVSGVDLGLPNWGKYVLLSAGTLIALMLIIFLMTCCRRVNRPESTQRSLGGTGRKVSVTSQSGKVISSWESYKSGGETRL

SEQ ID NO: 31717 - protein, 524 aa, Artificial Sequence
  derived and/or modified protein sequence (wt) from glycoprotein__RABV__KR906756.1
MVPQALLFVLLLVFPLCFGKFPIYTIPDKLGPWSPIDIHHLSCPNNLVVEDEGCTNLSGFSYMELKVGYISAIKVNGFTCTGVVTEAETYTNFVGYVTTTFKRKHFRPIPDACRAAYNWKMAGDPRYEESLHNPYPDYHWLRTVKTTKESLIIISPSVADLDPYDKSLHSRVFTSGKCSGITVSSTYCSTNHDYTIWMPENPRLGTSCNIFVNSKGKRASKGGKTCGFVDERGLYKSLKGACKLKLCGVLGLRLIDGTWVAMQTSDETKWCSPDQLVNMHDFRSDEIEHLVVEELVKKREECLDALESIMTTKSVSFRRLSHLRKLVPGFGKAYTIFNKTLMEADAHYKSVRTWNEIIPSKGCLRVGGRCHPHVNGVFFNGIILGPDGHVLIPEMQSSLLQQHMELLESSVIPLMHPLADPSTVFKDGDEAEDFVEVHLPDVHKQVSGVDLGLPNWGKYVLLSAGTLIALMLIIFLMTCCRRVNRPESTQRSLGGTGRKVSVTSQSGKVISSWESYKSGGETRL

SEQ ID NO: 31718 - protein, 524 aa, Artificial Sequence; identical to SEQ ID NO: 31717
  derived and/or modified protein sequence (wt) from glycoprotein__RABV__KR906760.1

SEQ ID NO: 31719 - protein, 524 aa, Artificial Sequence
  derived and/or modified protein sequence (wt) from glycoprotein__RABV__KR906762.1
MVPQARLFVPLLVFPLCFGKFPIYTIPDKLGPWSPIDIHHLSCPNNLVVEDEGCTNLSGFSYMELKVGYISAIKVNGFTCTGVVTEAETYTNFVGYVTTTFKRKHFRPIPDACRAAYNWKMAGDPRYEESLHNPYPDYHWLRTVKTTKESLVIISPSVADLDPYDKSLHSRVFTGGKCSGITVSSTYCSTNHDYTIWMPENPRLGTSCNIFANSKGKRASKGGKTCGFVDERGLYKSLKGACKLKLCGVLGLRLMDGTWVAMQTSDETKWCPPDQLVNMHDFRSDEIEHLVVEELVKKREECLDALESIMTTKSVSFRRLSHLRKLVPGFGKAYTIFNKTLMEADAHYKSVRTWNEIIPSKGCLRVGGRCHPHVNGVFFNGIILGPDGHVLIPEMQSSLLQQHMELLESSVIPLMHPLADPSTVFKDGDEAEDFVEVHLPDVHKQVSGVDLGLPNWGKYILLSAGTLIALMLIIFLMTCCRRVSRPESTQRSLGRTGRKVSVTSQSGKVISSWESYKSGGETRL

SEQ ID NO: 31720 - protein, 524 aa, Artificial Sequence; identical to SEQ ID NO: 31698
  derived and/or modified protein sequence (wt) from glycoprotein__RABV__KR906763.1

SEQ ID NO: 31721 - protein, 524 aa, Artificial Sequence
  derived and/or modified protein sequence (wt) from glycoprotein__RABV__KR906766.1
MVPQTLLFVPLLVFSLCFGKFPIYTIPDKLGPWSPIDIHHLSCPNNLVVEDEGCTNLSGFSYMELKVGYISAIRVNGFTCTGVVTEAETYTNFVGYVTTTFKRKHFRPIPDACRAAYNWKMAGDPRYEESLHNPYPDYHWLRTVKTTKESLVIISPSVADLDPYDKSLHSRVFPSGKCSGITVSSTYCSTNHDYTIWMPENPRLGTSCNIFTNSRGKRASKGGKTCGFVDERGLYKSLKGACKLKLCGVLGLRLMDGTWVAMQTSDETKWCPPDQLVNMHDFRSDEIEHLVVEELVKKREECLDALESIMTTKSVSFRRLSHLRKLVPGFGKAYTIFNKTLMEADAHYKSVRTWNEIIPSKGCLRVGGRCHPHVNGVFFNGIILGPDGHVLIPEMQSSLLQQHMELLESSVIPLMHPLADPSTVFKDGDEAEDFVEVHLPDVHKQVSGVDLGLPNWGKYVLLSAGTLIALMLIIFLMTCCRRVNRPESTQRSLGGTRRKVSVTSQSGKVISSWESYKSGGETRL

SEQ ID NO: 31722 - protein, 524 aa, Artificial Sequence
  derived and/or modified protein sequence (wt) from glycoprotein__RABV__KR906767.1
MVPQALLFVPLLVFPLCFGKFPIYTIPDKLGPWSPIDIHHLSCPNNLVVEDEGCTNLSGFSYMELKVGYISAIKVNGFTCTGVVTEAETYTNFVGYVTTTFKRKHFRPIPDACRAAYNWKMAGDPRYEESLHNPYPDYHWLRTVKTTKESLVIISPSVADLDPYDKSLHSRVFTSGKCSGITVSSTYCSTNHDYTIWMPENPRLGTSCNIFANSKGKRASKGGKTCGFVDERGLYKSLRGACKLKLCGVLGLRLMDGTWVAMQTSDETKWCPPDQLVNMHDFRSDEIEHLVVEELVKKREECLDALESIMTTKSVSFRRLSHLRKLVPGFGKAYTIFNKTLMEADAHYKSVRTWNEIIPSKGCLRVGGRCHPHVNGVFFNGIILGPDGHVLIPEMQSSLLQQHMELLESSVIPLMHPLADPSTVFKDGDEAEDFVEVHLPDVHKQVSGVDLGLPNWGKYVLLSAGTLIALMLIIFLMTCCRRVSRPESTQRSLGGTGRKVSVTSQSGKVISSWESYKSGGETRL

SEQ ID NO: 31723 - protein, 524 aa, Artificial Sequence; identical to SEQ ID NO: 31492
  derived and/or modified protein sequence (wt) from glycoprotein__RABV__KR906768.1

SEQ ID NO: 31724 - protein, 524 aa, Artificial Sequence
  derived and/or modified protein sequence (wt) from glycoprotein__RABV__KR906769.1
MVPQALLFVPLLVFPLCFGKFPIYTIPDKLGPWSPIDIHHLSCPNNLVVEDEGCTNLSGFSYMELKVGYISAIKVNGFTCTGVVTEAETYTNFVGYVTTTFKRKHFRPIPDACRAAYNWKMAGDPRYEESLHNPYPDYHWLRTVKTTKESLVIISPSVADLDPYDKSLHSRVFPSGKCSGITVSSTYCSTNHDYTIWMPENPRLGTSCNIFANSKGKRASKGGKTCGFVDERGLYKSLKGACKLKLCGVLGLRLMDGTWVAMQTSDETKWCPPDQLVNMHDFRSDEIEHLVVEELVKKREECLDALESIMTTKSVSFRRLSHLRKLVPGFGKAYTIFNKTLMEADAHYKSVRTWNEIIPSKGCLRVGGRCHPHVNGVFFNGIILGPDGHVLIPEMQSSLLQQHMELLESSVIPLMHPLADPSTVFKDGDEAEDFVEVHLPDVHKQVSGVDLGLPNWGKYVLLSAGTLIALMLIIFLMTCCRRVSRPESTQRSLGRTGRKVSVTSQSGKVISSWESYKSGGETRL

SEQ ID NO: 31725 - protein, 524 aa, Artificial Sequence; identical to SEQ ID NO: 31697
  derived and/or modified protein sequence (wt) from glycoprotein__RABV__KR906770.1

SEQ ID NO: 31726 - protein, 524 aa, Artificial Sequence
  derived and/or modified protein sequence (wt) from glycoprotein__RABV__KR906771.1
MVPQALLFVLLLVFPLCFGKFPIYTIPDKLGPWSPIDIHHLSCPNNLVVEDEGCTNLSGFSYMELKVGYISAIKVNGFTCTGVVTEAETYTNFVGYVTTTFKRKHFRPIPDACRAAYNWKMAGDPRYEESLHNPYPDYHWLRTVKTTKESLVIISPSVADLDPYDKSLHSRVFTSGKCSGITVSSTYCSTNHDYTIWMPENPRLGTSCNIFVNSKGKRASKGGKTCGFVDERGLYKSLKGACKLKLCGVLGLRLMDGTWVAMQTSDETKWCSPDQLVNMHDFRSDEIEHLVVEELVKKREECLDALESIMTTKSVSFRRLSHLRKLVPGFGKAYTIFNKTLMEADAHYKSVRTWNEIIPSKGCLRVGGRCHPHVNGVFFNGIILGPNGHVLIPEMQSSLLQQHMELLESSVIPLMHPLADPSTVFKDGDEAEDFVEVHLPDVHKQVSGVDLGLPNWGKYVLLSAGTLIALMLIIFLMTCCRRVNRPESTQRSLGGTGRKVSVTSQSGKVISSWESYKSGGETRL

SEQ ID NO: 31727 - protein, 524 aa, Artificial Sequence; identical to SEQ ID NO: 31700
  derived and/or modified protein sequence (wt) from glycoprotein__RABV__KR906773.1

SEQ ID NO: 31728 - protein, 524 aa, Artificial Sequence; identical to SEQ ID NO: 31697
  derived and/or modified protein sequence (wt) from glycoprotein__RABV__KR906776.1

SEQ ID NO: 31729 - protein, 524 aa, Artificial Sequence; identical to SEQ ID NO: 31700
  derived and/or modified protein sequence (wt) from glycoprotein__RABV__KR906778.1

SEQ ID NO: 31730 - protein, 524 aa, Artificial Sequence
  derived and/or modified protein sequence (wt) from glycoprotein__RABV__KR906779.1
MVPQALLFVPLLVFPLCFGKFPIYTIPDKLGPWSPIDIHHLSCPNNLVVEDEGCTNLSGFSYMELKVGYISAIKVNGFTCTGVVTEAETYTNFVGYVTTTFKRKHFRPIPDACRAAYNWKMAGDPRYEESLHNPYPDYHWLRTVKTTKESLVIISPSVADLDPYDKSLHSRVFPSGKCSGITVSSTYCSTNHDYTIWMPENPRLGTSCDIFTNSRGKRASKGGKTCGFVDERGLYKSLKGACKLKLCGVLGLRLMDGTWVAMQTSDETKWCPPDQLVNMHDFRSDEIEHLVVEELVKKREECLDALESIMTTKSVSFRRLSHLRKLVPGFGKAYTIFNKTLMEADAHYKSVRTWNEIIPSKGCLRVGGRCHPHVNGVFFNGIILGPDGHVLIPEMQSSLLQQHMELLESSVIPLMHPLADPSTVFKDGDEAEDFVEVHLPDVHKQVSGVDLGLPNWGKYVLLSAGTLIALMLIIFLMTCCRRVNRPESTQRSLGGTGRKVSVTSQSGKVISSWESYKSGGETRL

SEQ ID NO: 31731 - protein, 524 aa, Artificial Sequence; identical to SEQ ID NO: 31700
  derived and/or modified protein sequence (wt) from glycoprotein__RABV__KR906780.1

SEQ ID NO: 31732 - protein, 524 aa, Artificial Sequence; identical to SEQ ID NO: 31700
  derived and/or modified protein sequence (wt) from glycoprotein__RABV__KR906781.1

SEQ ID NO: 31733 - protein, 524 aa, Artificial Sequence; identical to SEQ ID NO: 31716
  derived and/or modified protein sequence (wt) from glycoprotein__RABV__KR906782.1

SEQ ID NO: 31734 - protein, 524 aa, Artificial Sequence; identical to SEQ ID NO: 31697
  derived and/or modified protein sequence (wt) from glycoprotein__RABV__KR906784.1

SEQ ID NO: 31735 - protein, 524 aa, Artificial Sequence
  derived and/or modified protein sequence (wt) from glycoprotein__RABV__KR906785.1
MVPQALLFVPLLVFPLCFGKFPIYTIPDKLGPWSPIDIHHLSCPNNLVVEDEGCTNLSGFSYMELKVGYISAIKVNGFTCTGVVTEAETYTNFVGYVTTTFKRKHFRPIPDACRAAYNWKMAGDPRYEESLHNPYPDYHWLRTVKTTKESLVIISPSVADLDPYDKSLHSRVFPSGKCSGITVSSTYCSTNHDYTIWMPENPRLGTSCDIFTNSRGKRASKGGKTCGFVDERGLYKSLRGACKLKLCGVLGLRLMDGTWVAMQTSDETKWCPPDQLVNMHDFRSDEIEHLVVEELVKKREECLDALESIMTTKSVSFRRLSHLRKLVPGFGKAYTIFNKTLMEADAHYKSVRTWNEIIPSKGCLRVGGRCHPHVNGVFFNGIILGPDGHVLIPEMQSSLLQQHMELLESSVIPLMHPLADPSTVFKEGDEAEDFVEVHLPDVHKQVSGVDLGLPNWGKYVLLSAGTLIASMLIIFLMTCCRRVNRPEPTQRSLGGTGRKVSVTSQSGKVISSWESYKSGGETRL

SEQ ID NO: 31736 - protein, 524 aa, Artificial Sequence
  derived and/or modified protein sequence (wt) from glycoprotein__RABV__KR906787.1
MVPQALLFVLLLVFPLCFGKFPIYTIPDKLGPWSPIDIHHLSCPNNLVVEDEGCTNLSGFSYMELKVGYISAIKVNGFTCTGVVTEAETYTNFVGYVTTTFKRKHFRPIPDACRAAYNWKMAGDPRYEESLHNPYPDYHWLRTVKTTKESLVIISPSVADLDPYDKSLHSRVFTSGKCSGITVSSTYCSTNHDYTIWMPENPRLGTSCNIFVNSKGKRASKGGKTCGFVDERGLYKSLKGACKLKLCGVLGLRLMDGTWVAMQTSDETKWCSPDQLVNMHDFRSDEIEHLVVEELVKKREECLDALESIMTTKSVSFRRLSHLRKLVPGFGKAYTIFNKTLMEADAHYKSVRTWNEIIPSKGCLRVGGRCHPHVNGVFFNGIILGPDGHVLIPEMQSSLLQQHMELLESSVIPLMHPLADPSTVFKDGDEAEDFVEVHLPDVHKQVSGVDLGLPNWGKYVLLSAGTLIALMLIIFLMTCCRRVNRPESTQRSLRGTGRKVSVTSQSGKVISSWESYKSGGETRL

SEQ ID NO: 31737 - protein, 524 aa, Artificial Sequence
  derived and/or modified protein sequence (wt) from glycoprotein__RABV__KR906788.1
MVPQALLFVPLLVFPLCFGKFPIYTIPDKLGPWSPIDIHHLSCPNNLVVEDEGCTNLSGFSYMELKVGYISAIKVNGFTCTGVVTEAETYTNFVGYVTTTFKRKHFRPIPDACRAAYNWKMAGDPRYEESLHNPYPDYHWLRTVKTTKESLVIISPSVADLDPYDKSLHSRVFTSGKCSGITVSSTYCSTNHDYTIWMPENPRLGTSCNIFVNSKGKRASKGGKTCGFVDERGLYKSLKGACKLKLCGVLGLRLMDGTWVAMQTSDETKWCSPDQLVNMHDFRSDEIEHLVVEELVKKREECLDALESIMTTKSVSFRRLSHLRKLVPGFGKAYTIFNKTLMEADAHYKSVRTWNEIIPSKGCLRVGGRCHPHVNGVFFNGIILGPDGHVLIPEMQSSLLQQHMELLESSVIPLMHPLADPSTVFKDGDEAEDFVEVHLPDVHKQVSGVDLGLPNWGKYVLLSAGTLIALMLTIFLMTCCRRVNRPESTQRSLGGTGRKVSVTSQSGKVISSWESYKSGGETRL

SEQ ID NO: 31738 - protein, 524 aa, Artificial Sequence; identical to SEQ ID NO: 31730
  derived and/or modified protein sequence (wt) from glycoprotein__RABV__KR906790.1

SEQ ID NO: 31739 - protein, 524 aa, Artificial Sequence; identical to SEQ ID NO: 31692
  derived and/or modified protein sequence (wt) from glycoprotein__RABV__KT023100.1

SEQ ID NO: 31740 - protein, 524 aa, Artificial Sequence
  derived and/or modified protein sequence (wt) from glycoprotein__RABV__KT221112.1
MIPQALLFVPLLVFSLCFGKFPIYTIPDKLGPWSPIDIHHLSCPNNLVVEDEGCTNLSGFSYMELKVGYISAIKVNGFTCTGVVTEAETYTNFVGYVTTTFKRKHFRPTPDACRAAYNWKMAGDPRYEESLNNPYPDYHWLRTVKTTKESLVVISPSVADLDPYDKSLHSRVFPSGKCSGITVSSTCCSTNHDYTIWMPENPRLGTSCDIFVNSRGKRASKGSKTCGFVDERGLYKSLKGACKLKLCGVLGLRLMDGTWVAIQTSDETKWCPPDQLVNLHDFRSDEIEHLVVEELVKKREECLDALESIMTTKSVSFRRLSHLRKLVPGFGKAYTIFNKTLMEADAHYKSVRTWNEIIPSKGCLRVGGRCHPHVNGVFFNGIILGPDGHVLIPEMQSSLLQQHMELLESSVIPLMHPLADPSTIFKDGDEAEDFVEVHLPDVHKQVSGVDLGLPNWGKYVLMSAGALIALMLMIFSMTCCRKTDRIGSTHHGPGETGRKVSVTSQNGRVIASWESYKSGGETKL

SEQ ID NO: 31741 - protein, 524 aa, Artificial Sequence
  derived and/or modified protein sequence (wt) from glycoprotein__RABV__KT221113.1
MIPQALLFVPLLVFSLCFGKFPIYTIPDKLGPWSPIDIHHLSCPNNLVVEDEGCTNLSGFSYMELKVGYISAIKVNGFTCTGVVTEAETYTNFVGYVTTTFKRKHFRPTPDACRAAHNWKMAGDPRYEESLHNPYPDYHWLRTVKTTKESLVIISPSVADLDPYDKSLHSRVFPSGKCSGITVSSTYCSTNHDYTIWMPENPRLGTSCDIFVNSRGKRASKGSKTCGFVDERGLYKSLKGACKLKLCGVLGLRLMDGTWVAIQTSDETKWCPPDQLVNLHDFRSDEIEHLVVEELVKKREECLDALESIMTTKSVSFRRLSHLRKLVPGFGKAYTIFNKTLMEADAHYKSVRTWNEIIPSKGCLRVGGRCHPHVNGVFFNGIILGPDGHVLIPEMQSSLLQQHMELLESSVIPLMHPLADPSTIFKDGDEAEDFVEVHLPDVHRQVSGVDLGLPNWGKYVLMSAGALVALMLMIFLMTCCVKTDRTGSTHHSPGETGRKVSVTSQNGRVIASWESYKSGGETKL

SEQ ID NO: 31742 - protein, 524 aa, Artificial Sequence
  derived and/or modified protein sequence (wt) from glycoprotein__RABV__KT221114.1
MIPQALLFVPLLVFSLCFGKFPIYTIPDKLGPWSPIDIHHLSCPNNLVVEDEGCTNLSGFSYMELKVGYISAIKVNGFTCTGVVTEAETYTNFVGYVTTTFKRKHFRPTPDACRAAHNWKMAGDSRYEESLHNPYPDYHWLRTVKTTKESLVIISPSVADLDPYDKSLHSRVFPSGKCSGITVSSTYCSTNHDYTIWMPENPRLGTSCDIFVNSRGKRASKGSKTCGFVDERGLYKSLKGACKLKLCGVLGLRLMDGTWVAIQTSDETKWCPPDQLVNLHDFRSDEIEHLVVEELVKKREECLDALESIMTTKSVSFRRLSHLRKLVPGFGKAYTIFNKTLMEADAHYKSVRTWNEIIPSKGCLRVGGRCHPHVNGVFFNGIILGPDGHVLIPEMQSSLLQQHMELLESSVIPLMHPLADPSTIFKDGDEAEDFVEVHLPDVHRQVSGVDLGLPNWGKYVLMSAGALVALMLMIFLMTCCVKTDRTGSTHHSPGETGRKVSVTSQNGRVIASWESYKSGGETKL

SEQ ID NO: 31743 - protein, 524 aa, Artificial Sequence; identical to SEQ ID NO: 31741
  derived and/or modified protein sequence (wt) from glycoprotein__RABV__KT221115.1

SEQ ID NO: 31744 - protein, 524 aa, Artificial Sequence
  derived and/or modified protein sequence (wt) from glycoprotein__RABV__KT221117.1
MIPQALLFVPLLVFSLCFGKFPIYTIPDKLGPWSPIDIHHLSCPNNLVVEDEGCTNLSGFSYMELKVGYISAIKVNGFTCTGVVTEAETYTNFVGYVTTTFKRKHFRPTPDACRAAYNWKMAGDPRYEESLHNPYPDYHWLRTVKTTKESLVVISPSVADLDPYDKSLHSRVFPSGKCSGITVSSTYCSTNHDYTIWMPENPRLGTSCDIFVNSRGKRASKGSKTCGFVDERGLYKSLKGACKLKLCGVLGLRLMDGTWVAIQTSDETKWCPPDQLVNLHDFRSDEIEHLVVEELVKKREECLDALESIMTTKSVSFRRLSHLRKLVPGFGKAYTIFNKTLMEADAHYKSVRTWNEIIPSKGCLRVGGRCHPHVNGVFFNGIILGPDGHVLIPEMQSSLLQQHMELLESSVIPLMHPLADPSTIFKDGDEAEDFVEVHLPDVHKQVSGVDLGLPNWGKYVLMSAGALIALMLMVFLMTCCRKTDRTGSTHHSPGETGRKVSVTSQNERVIASWESYKSGGETKL

SEQ ID NO: 31745 - protein, 524 aa, Artificial Sequence
  derived and/or modified protein sequence (wt) from glycoprotein__RABV__KT221118.1
MVPQALLFVPLLAVPLCFGKFPIYTIPDKLGPWSPIDIHHLSCPNNLVVEDEGCTNLSGFSYMELKVGYISAIKVNGFTCTGVVTEAETYTNFVGYVTTTFKRKHFRPTPDACRSAYNWKMAGDPRYEESLHNPYPDYHWLRTVKTTKESFVIISPSVADLDPYDKSLHSRVFPRGKCSGITVSSTYCSTNHDYTIWMPENPRLGTSCDIFTNSRGKRASKGSKTCGFVDERGLYKSLKGACKLKLCGVLGLRLMDGTWVAIQTSDETKWCPPDQLVNLHDFHSDEIEHLVVEVLVKKREECLDALESIMTTKSVSFRRLSHLRKLVPGFGKAYTIFNKTLMEADAHYKSVRTWNEIIPSKGCLRVGGRCHPHVNGVFFNGIILGPDGHVLIPEMQSSLLQQHMELLESSVIPLMHPLADPSTVFKDGDEAEDFVEVHLPDVHKQVSGVDLGLPSWGKYVLMSAGILTALMLMIFLMTCCRRTNRAESIQHSLGETGRKVSVTSQNGRVISSWESYKSGGETKL

SEQ ID NO: 31746 - protein, 524 aa, Artificial Sequence; identical to SEQ ID NO: 30827
  derived and/or modified protein sequence (wt) from glycoprotein__RABV__KT221120.1

SEQ ID NO: 31747 - protein, 524 aa, Artificial Sequence
  derived and/or modified protein sequence (wt) from glycoprotein__RABV__KT221122.1
MIPQVLLFVPFLVFSSCFGKFPIYTIPDKLGPWSPIDIHHLSCPNNLVVEDEGCTNLSGFSYMELKVGYISAIKVNGFTCTGVVTEAETYTNFVGYVTTTFKRKHFRPTPDACRAAYNWKMAGDPRYEESLHNPYPDYHWLRTVKTSKESLVIISPSVADLDPYDKSLHSRVFPGGKCSGITVSSTCCSTNHDYTIWMPENPRLGTSCDIFTNSRGKRASKGGKTCGFVDERGLYKSLKGACKLKLCGVLGLRLMDGTWVAIQTSDEIKWCSPDQLVNLHDFHSDEIEHLVVEELVKKREECLDALETIMTTKSVSFRRLSHLRKLVPGFGKAYTIFNKTLMEADAHYKSIRTWNEIIPSKGCLRVGGRCHPHVNGVFFNGIILGPDGHVLIPEMQSSLLHQHMELLESSVIPLMHPLADPSTVFKDGDEAEDFVEVHLPDVHKQISGVDLGLPNWGKYVLVSAGALTALMLMIFLMTCCRKTNRAESIQHSPGETGRKVSVTSHNGRVISSWESYKSGGETKL

SEQ ID NO: 31748 - protein, 524 aa, Artificial Sequence; identical to SEQ ID NO: 30956
  derived and/or modified protein sequence (wt) from glycoprotein__RABV__KT221125.1

SEQ ID NO: 31749 - protein, 524 aa, Artificial Sequence; identical to SEQ ID NO: 30956
  derived and/or modified protein sequence (wt) from glycoprotein__RABV__KT221126.1

SEQ ID NO: 31750 - protein, 524 aa, Artificial Sequence; identical to SEQ ID NO: 31175
  derived and/or modified protein sequence (wt) from glycoprotein__RABV__KT221127.1

SEQ ID NO: 31751 - protein, 524 aa, Artificial Sequence; identical to SEQ ID NO: 30846
  derived and/or modified protein sequence (wt) from glycoprotein__RABV__KT221128.1

SEQ ID NO: 31752 - protein, 524 aa, Artificial Sequence; identical to SEQ ID NO: 30846
  derived and/or modified protein sequence (wt) from glycoprotein__RABV__KT221129.1

SEQ ID NO: 31753 - protein, 524 aa, Artificial Sequence
  derived and/or modified protein sequence (wt) from glycoprotein__RABV__KT221130.1
MVPPVLLFVPLLFFSSCFGKFPIYPIPDKLGPWSPIDIHHLTCPNNLVVENEGCTILSGFSYMELKVGYISPIKVNGFTCTGVVTKAKTYTNFVGYVTTTFKKKHFPPMPDACKAAYNWKMAGDPRYEKSLHNPYPDYHWLQTVKTTKESLVIISPSVANLDPYDKSLHSRVFPGGKCSGITVSSTCCSTNHDYTIWMPENPKLGTSCDIFTNSRGKRASKGGKTCGFVDERGLYKSLKGACKLKLCGVLGLRLMDGTWVAIQTSDEIKWCSPDQLVNLHDFHSDEIEHLVVEELVKKREECLDALETIMTTKSVSFRRLSHLRKLVPGFGKAYTIFNKTLMEADAHYKSIRTWNEIIPSKGCLRVGGRCHPHVNGVFFNGIILGPDGHVLIPEMQSSLLHQHMELLESSVIPLMHPLADPSTVFKDGDEAEDFVEVHLPDVHKQISGVDLGLPNWGKYVLISAGALTALMLMIFLMTCCRKANRAESIQHNPGETGRKVSVTSHNGRVISSWESYKSGGETKL

SEQ ID NO: 31754 - protein, 524 aa, Artificial Sequence
  derived and/or modified protein sequence (wt) from glycoprotein__RABV__KT221132.1
MIPQVLLFVHLLVFSSCFGKFPIYTIPDKLGPWSPIDIHHLSCPNNLVVEDEGCTNLSGFSYMELKVGYISAIKVNGFTCTGVVTEAETYTNFVGYVTTTFKRKHFRPMPDACRAAYNWKMAGDPRYEESLHNPYPDYHWLRTVKTTKESLVIISPSVADLDPYDKSLHSRVFPGGKCSGITVSSTCCSTNHDYTIWMPENPRLGTSCDIFTNSRGKRASKGGKTCGFVDERGLYKSLKGACKLKLCGVLGLRLMDGTWVAIQTSDEIKWCSPDQLVNLHDFHSDEIEHLVVEELVKKREECLDALETIMTTKSVSFRRLSHLRKLVPGFGKAYTIFNKTLMEADAHYKSIRTWNEIIPSKGCLRVGGRCHPHVNGVFFNGIILGPDGHVLIPEMQSSLLHQHMELLESSVIPLMHPLADPSTVFKDGDEAEDFVEVHLPDVHKQISGVDLGLPNWGKYVLISAGALTALMLTIFLMTCCRKTNRAGSIQHSPGETGRKVSVTSHNGRVISSWESYKSGSETKL

SEQ ID NO: 31755 - protein, 524 aa, Artificial Sequence; identical to SEQ ID NO: 30827
  derived and/or modified protein sequence (wt) from glycoprotein__RABV__KT221133.1

SEQ ID NO: 31756 - protein, 524 aa, Artificial Sequence; identical to SEQ ID NO: 30827
  derived and/or modified protein sequence (wt) from glycoprotein__RABV__KT221134.1

SEQ ID NO: 31757 - protein, 524 aa, Artificial Sequence
  derived and/or modified protein sequence (wt) from glycoprotein__RABV__KT221136.1
MVPQALLFVPLLAIPLCFGKFPIYTIPDKLGPWSPIDIHHLSCPNNLVVEDEGCTNLSGFSYMELKVGYISAIKVNGFTCTGVVTEAETYTNFVGYVTTTFKRKHFRPTPDACRSAYNWKMAGDPRYEESLHNPYPDYHWLRTVKTTKESFVIISPSVADLDPYDKSLHSRVFPRGKCSGITVSSTYCSTNHDYTIWMPENPRLGTSCDIFTNSRGKRASKGSKTCGFVDERGLYKSLKGACKLKLCGVLGLRLMDGTWVAIQTSDETKWCPPDQLVNLHDFHSDEIEHLVVEELVKKREECLDALESIMTTKSVSFRRLSHLRKLVPGFGKAYTIFNKTLMEADAHYKSVRTWNEIIPSKGCLRVGGRCHPHVNGVFFNGIILGPDGHVLIPEMQSSLLQQHMELLESSVIPLMHPLADPSTVFKDGDEAEDFVEVHLPDVHKQVSGVDLGLPSWGKYVLMSAGILTALMLMIFLMTCCRRTNRAESIQRSLGETGRKVSVTSQSGRVISSWESYKSGGETKL

SEQ ID NO: 31758 - protein, 524 aa, Artificial Sequence; identical to SEQ ID NO: 30956
  derived and/or modified protein sequence (wt) from glycoprotein__RABV__KT221138.1

SEQ ID NO: 31759 - protein, 524 aa, Artificial Sequence
  derived and/or modified protein sequence (wt) from glycoprotein__RABV__KT221139.1
MIPQVLLFVTLLVFSSCFGKFPIYTIPDKLGPWSPIDIHHLSCPNNLVVEDEGCTNLSGFSYMELKVGYISAIKVNGFTCTGVVTEAETYTNFVGYVTTTFKRKHFRPMPDACRAAYNWKMAGDPRYEESLHNPYPDYHWLRTVKTTKESLVIISPSVADLDPYDKSLHSRVFPGGKCSGITVSSTCCSTNHDYTIWMPENPRLGTSCDIFTNSRGKRASKGGKTCGFVDERGLYKSLKGACKLKLCGVLGLRLMDGTWVAIQTSDEIKWCPPDQLVNLHDFHSDEIEHLVVEELVKKREECLDALETIMTTKSVSFRRLSHLRKLVPGFGKAYTIFNKTLMEADAHYKSIRTWNEIIPSKGCLRVGGRCHPHVNGVFFNGIILGPDGHVLIPEMQSSLLHQHMELLESSVIPLMHPLADPSTVFKDGDEAEDFVEVHLPDVHKQISGVDLGLPNWGKYVLISAGALTALMLTIFLMTCCRKTNGAGSIQHSPGETGRKVSVTSHNGRVISSWESYKSGSETKL

SEQ ID NO: 31760 - protein, 524 aa, Artificial Sequence; identical to SEQ ID NO: 31759
  derived and/or modified protein sequence (wt) from glycoprotein__RABV__KT221140.1

SEQ ID NO: 31761 - protein, 524 aa, Artificial Sequence
  derived and/or modified protein sequence (wt) from glycoprotein__RABV__KT276368.1
MILQALLFVPLLISSLCLGKFPIYTIPDKLGPWSPIDIHHLSCPNNLVVEDEGCTNLSGFSYMELKVGYISAIKVNGFTCTGVVTEAETYTNFVGYVTTTFKRKHFRPIPDACRAAYNWKMAGDPRYEESLQNPYPDYHWLRTVKTTKESLIIISPSVADLDPYDKSLHSRVFPGGKCLGITVSSTYCSTNHDYTIWMPEEPRLGTSCDIFTSSKGKKASKGGKTCGFVDERGLYKSLKGACKLKLCGVLGLRLMDGTWVSIQTSDDTKWCPPDQLVNLHDFHSDEIEHLVVEELVKKREECLDALESIMTTKSVSFRRLSYLRKLVPGFGKAYTIFNKTLMEADAHYKSVRTWNEIIPSKGCLKVRERCHPPVDGVFFNGIILGPDGNVLIPEMQSSLLQQHMELLESSVIPLMHPLADPSTVFKEGDEAEDFVEVHLPDVHKQISGVDLGLPSWGKYLLMIAGGLATLVLIICSMACCRRTKQTESRRRGSRESEKKVTAAPQTRKVVSSWELYKSEGDARL

SEQ ID NO: 31762 - protein, 524 aa, Artificial Sequence
  derived and/or modified protein sequence (wt) from glycoprotein__RABV__KT336432.1
MVPQALLFVPLLVFPLCFGKFPIYTIPDKLGPWSPIDIHHLSCPNNLVVEDEGCTNLSGFSYMELKVGYISAIKVNGFTCTGVVTEAETYTNFVGYVTTTFKRKHFRPLPDACRAAYNWKMAGDPRYEESLHNPYPDYHWLRTVKTTKESLVIISPSVADLDPYDKSLHSRVFPSGKCSGITVSSTFCSTNHDYTIWMPENPRLGTSCDIFANSRGKRASKGGKTCGFVDERGLYKSLKGACKLKLCGVLGLRLMDGTWVAIQTSDETKWCPPDQLVNMHDFRSDEIEHLVVEELVKKREECLDALESIMTTKSVSFRRLSHLRKLVPGFGKAYTIFNKTLMEADAHYKSVRTWNEIIPSKGCLRVGGRCHPHVNGVFFNGIILGPDGHVLIPEMQSSLLQQHMELLESSVIPLMHPLADPSTVFKDGDEAEDFVEVHLPDVHKQVSGVDLGLPNWGKYVLLSAGTLIALMLITFLMTCCRRVNRPESTKRSLGGTGRKVSVTSQSGKVISSWESYKSGGETRL

SEQ ID NO: 31763 - protein, 524 aa, Artificial Sequence
  derived and/or modified protein sequence (wt) from glycoprotein__RABV__KT336433.1
MVPQALLFVPLLVFSLCFGKFPIYTIPDKLGPWSPIDIHHLSCPNNLVVEDEGCTNLSGFSYMELKVGYISAIKVNGFTCTGVVTEAETYTNFVGYVTTTFKRKHFRPIPDACRAAYNWKMAGDPRYEESLHNPYPDYHWLRTVKTTKESLVIISPSVADLDPYDKSLHSRVFPSGKCSGITVSSTYCSTNHDYTIWMPENPRLGTSCDIFANSRGKRASKGGKTCGFVDERGLYKSLKGACKLKLCGVLGLRLMDGTWVAMQTSDETKWCPPDQLVNMHDFRSDEIEHLVVEELVKKREECLDALESIITTKAVSFRRLSHLRKLVPGFGKAYTIFNKTLMEADAHYKSVRTWNEIIPSKGCLRVGGRCHPHVNGVFFNGIILGPDGRVLIPEMQSSLLQQHMELLESSVIPLMHPLADPSTVFKDGDEAEDFVEVHLPDVHKQVSGVDLGLPNWGKYVLLSAGTLIALMLTIFLITCCRRVNRPEFTQRSLGGTGRKVSVTSQSGKVISSWESYKSGGETRL

SEQ ID NO: 31764 - protein, 524 aa, Artificial Sequence
  derived and/or modified protein sequence (wt) from glycoprotein__RABV__KT336434.1
MVPQALLFVPLLVFSLCFGKFPIYTIPDKLGPWSPIDIHHLSCPNNLVVEDEGCTNLSGFSYMELKVGYISAIKVNGFTCTGVVTEAETYTNFVGYVTTTFKRKHFRPIPDACRAAYNWKMAGDPRYEESLHNPYPDYHWLRTVKTTKESLVIISPSVADLDPYDKSLHSRVFPSGKCSGITVSSTFCSTNHDYTIWMPENPRLGTSCDIFANSRGKRASKGGKTCGFVDERGLYKSLKGACKLKLCGVLGLRLMDGTWVAMQTSDETKWCPPDQLVNMHDFRSDEIEHLVVEELVKKREECLDALESIMTTKSVSFRRLSHLRKLVPGFGKAYTIFNKTLMEADAHYKSVRTWNEIIPSKGCLRVGGRCHPHVNGVFFNGIILGPDGHVLIPEMQSSLLQQHMELLESSVIPLMHPLADPSTVFKDGDEAEDFVEVHLPDVHKQVSGVDLGLPNWGKYVLLSAGTLIALMLIIFLMTCCRRVNRPESTDRSLGGTGRKVSVTSQSGKVISSWESYKSGGETRL

SEQ ID NO: 31765 - protein, 524 aa, Artificial Sequence
  derived and/or modified protein sequence (wt) from glycoprotein__RABV__KT336435.1
MVPQALLFLPLLVFPLCFGKFPIYTIPDKLGPWSPIDIHHLSCPNNLVVEDEGCTNLSGFSYMELKVGYISAIKVNGFTCTGVVTEAETYTNFVGYVTTTFKRKHFRPIPDACRAAYNWKMAGDPRYEESLHNPYPDYHWLRTVKTTKESLVIISPSVADLDPYDKSLHSRVFPSGKCSGITVSSTFCSTNHDYTIWMPENPRLGTSCDIFANSRGKRASKGGKTCGFVDERGLYKSLKGACKLKLCGVLGLRLMDGTWVAMQTSDETKWCPPDQLVNIHDFRSDEIEHLVVEELVKKREECLDALESIMTTKSVSFRRLSHLRKLVPGFGKAYTIFNKTLMEADAHYKSVRTWNEIIPSKGCLRVGGRCHPHVNGVFFNGIILGPDGHVLIPEMQSSLLQQHMELLESSVIPLMHPLADPSTVFKDGDEAEDFVEVHLPDVHKQVSGVDLGLPNWGKYVLLSAGTLIALMLIIFLMTCCRRVNRPESTERSLGRTGRKVSVTSQSGKVISSWESYKSGGETRL

SEQ ID NO: 31766 - protein, 524 aa, Artificial Sequence
  derived and/or modified protein sequence (wt) from glycoprotein__RABV__KT336436.1
MVPQALLFVPLLVFPLCFGKFPIYTIPDKLGPWSPIDIHHLSCPNNLVVEDEGCTNLSGFSYMELKVGYISAIKVNGFTCTGVVTEAETYTNFVGYVTTTFKRKHFRPIPDACRAAYNWKMAGDPRYEESLHNPYPDYHWLRTVKTTKESLVIISPSVADLDPYDKSLHSRVFPSGKCSGITVSSTFCSTNHDYTIWMPENPRLGTSCDIFANSRGKRASKGGKTCGFVDERGLYKSLKGACKLKLCGVLGLRLMDGTWVAMQTSDETKWCPPDQLVNMHDFRSDEIEHLVVEELVKKREECLDALESIMTTKSVSFRRLSHLRKLVPGFGKAYTIFNKTLMEADAHYKSVRTWNEIIPSKGCLRVGGRCHPHVNGVFFNGIILGPDGHVLIPEMQSSLLQQHMELLESSVIPLMHPLADPSTVFKDGDEAEDFVEVHLPDVHKQVSGVDLGLPNWGKYVLLSAGTLIALMLITFLMTCCRRVNRPESTKRRLGGTGRKVSVTSQSGKVISSWESYKSGGETRL

SEQ ID NO: 31767 - protein, 524 aa, Artificial Sequence
  derived and/or modified protein sequence (wt) from glycoprotein__RABV__KT336437.1
MVPQALLFLPLLVFPLCFGKFPIYTIPDKLGPWSPIDIHHLNCPNNLVVEDEGCTNLSGFSYMELKVGYISAIKVNGFTCTGVVTEAETYTNFVGYVTTTFKRKHFRPIPDACRAAYNWKMAGDPRYEESLHNPYPDYHWLRTVKTTKESLVIISPSVADLDPYDKSLHSRVFPSGKCSGITVSSTFCSTNHDYTIWMPENPRLGTSCDIFANSRGKRASKGGKTCGFVDERGLYKSLKGACKLKLCGVLGLRLMDGTWVAMQTSDETKWCPPDQLVNIHDFRSDEIEHLVVEELVKKREECLDALESIMTTKSVSFRRLSHLRKLVPGFGKAYTIFNKTLMEADAHYKSVRTWNEIIPSKGCLRVGGRCHPHVNGVFFNGIILGPDGHILIPEMQSSLLQQHMELLESSVIPLMHPLADPSTVFKDGDEAEDFVEVHLPDVHKQVSGVDLGLPNWGKYVLLSAGTLIALMLIIFLMTCCRRVNRPESTERSLGGTGRKVSVTSQSGKVISSWESYKSGGETRL

SEQ ID NO: 31768 - protein, 524 aa, Artificial Sequence
  derived and/or modified protein sequence (wt) from glycoprotein__RABV__KU198460.1
MVPQALLFVPLLAFPMCFGKFPIYTIPDKLGPWSPIDIHHLSCPNNLVVEDEGCTNLSGFSYMELKVGYISAIKVNGFTCTGVVTEAETYTNFVGYVTTTFKRKHFRPTPDACRAAYNWKMAGDPRYEESLHNPYPDYHWLRTVKTTKESLIIISPSVADLDPYDKSLHSRVFPSGKCLGITISSTYCSTNHDYTIWMPENLRLGTSCDIFTNSRGKRASKGSKTCGFVDERGLYKSLKGACKLKLCGVLGLRLMDGTWVAMQTSDETKWCSPDQLVNLHDFRSDEIEHLVVEELVKKREECLDALESIMTTKSVSFRRLSHLRKLVPGFGKAYTIFNKTLMEADAHYKSVRTWSEIIPSKGCLRVGGRCHPHVNGVFFNGIILGPDGHVLIPEMQSSLLQQHMELLESSVIPLMHPLADPSTVFKDGDEAEDFVEVHLPDVHKQISGVDLGLPNWGRYVLIIAGVLIAMILTIFLMTCCGRGNRPKSTQHSLGGIGRKVSATSQSGKVISSWESYKSGGETRL

SEQ ID NO: 31769 - protein, 524 aa, Artificial Sequence
  derived and/or modified protein sequence (wt) from glycoprotein__RABV__KU198461.1
MVPQALLFVPLLAFPMCFGKFPIYTIPDKLGPWSPIDIHHLSCPNNLVVEDEGCTNLSGFSYMELKVGYISAIKVNGFTCTGVVTEAETYTNFVGYVTTTFKRKHFRPTPDACRAAYNWKMAGDPRYEESLHNPYPDYHWLRTVKTTKESLIIISPSVADLDPYDKSLHSRVFPSGKCLGITISSTYCSTNHDYTIWMPENLRLGTSCDIFTNSRGKRASKGSKTCGFVDERGLYKSLKGACKLKLCGVLGLRLMDGTWVAMQTSDETKWCSPDQLVNLHDFRSDEIEHLVVEELVKKREECLDALESIMTTKSVSFRRLSHLRKLVPGFGKAYTIFNKTLMEADAHYKSVRTWNEIIPSKGCLRVGGRCHPHVNGVFFNGIILGPDGHVLIPEMQSSLLQQHMELLESSVIPLMHPLADPSTVFKDGDEAEDFVEVHLPDVHKQISGVDLGLPNWGKYVLIIAGVLIAMILTIFLMTCCGRGNRPKSTQHSLGGIGRKVSATSQSGKVISSWESYKSGGETRL

SEQ ID NO: 31770 - protein, 524 aa, Artificial Sequence
  derived and/or modified protein sequence (wt) from glycoprotein__RABV__KU198462.1
MVPQALLFVPLLAFPMCFGKFPIYTIPDKLGPWSPIDIHHLSCPNNLVVEDEGCTNLSGFSYMELKVGYISAIKVNGFTCTGVVTEAETYTNFVGYVTTTFKRKHFRPTPDACRAAYNWKMAGDPRYEESLHNPYPDYHWLRTVKTTKESLIIISPSVADLDPYDKSLHSRVFPSGKCLGITISSTYCSTNHDYTIWMPENLRLGTSCDIFTNSRGKRASKGSKTCGFVDERGLYKSLKGACKLKLCGVLGLRLMDGTWVAMQTSDETKWCPPDQLVNLHDFRSDEIEHLVVEELVKKREECLDALESIMTTKSVSFRRLSHLRKLVPGFGKAYTIFNKTLMEADAHYKSVRTWNEIIPSKGCLRVGGRCHPHVNGVFFNGIILGPDGHVLIPEMQSSLLQQHMELLESSVIPLMHPLADPSTVFKDGDEAEDFVEVHLPDVHKQISGVDLGLPNWGKYVLIIAGVLIAMILTIFLMTCCGRGNRPKSTQHSPGGIGRKVSATSQSGKVISSWESYKSGGETRL

SEQ ID NO: 31771 - protein, 524 aa, Artificial Sequence
  derived and/or modified protein sequence (wt) from glycoprotein__RABV__KU198463.1
MVPQALLFVPLLAFPMCFGKFPIYTIPDKLGPWSPIDIHHLSCPNNLVVEDEGCTNLSGFSYMELKVGYISAIKVNGFTCTGVVTEAETYTNFVGYVTTTFKRKHFRPTPDACRAAYNWKMAGDPRYEESLHNPYPDYHWLRTVKTTKESLIIISPSVADLDPYDKSLHSRVFPSGKCLGITISSTYCSTNHDYTIWMPENLRLGTSCDIFTNSRGKRASKGSKTCGFVDERGLYKSLKGACKLKLCGVLGLRLIDGTWVAMQTSDETKWCPPDQLVNLHDFRSDEIEHLVVEELVKKREECLDALESIMTTKSVSFRRLSHLRKLVPGFGKAYTIFNKTLMEADAHYKSVRTWNEIIPSKGCLRVGGRCHPHVNGVFFNGIILGPDGHVLIPEMQSSLLQQHMELLESSVIPLMHPLADPSTVFKDGDEAEDFVEVHLPDVHKQISGVDLGLPNWGKYVLIIAGVLIAMILTIFLMTCCGRGNRPKSTQHSLGGIGRKVSATSQSGKVISSWESYKSGGETRL

SEQ ID NO: 31772 - protein, 524 aa, Artificial Sequence
  derived and/or modified protein sequence (wt) from glycoprotein__RABV__KU198464.1
MVPQALLFVPLLAFPMCFGKFPIYTIPDKLGPWSPIDIHHLSCPNNLVVEDEGCTNLSGFSYMELKVGYISAIKVNGFTCTGVVTEAETYTNFVGYVTTTFKRKHFRPTPDACRAAYNWKMAGDPRYEESLHNPYPDYHWLRTVKTTKESLIIISPSVADLDPYDKSLHSRVFPSGKCLGITISSTYCSTNHDYTIWMPENLRLGTSCDIFTNSRGKRASKGSKTCGFVDERGLYKSLKGACKLKLCGVLGLRLMDGTWVAMQTSDETKWCPPDQLVNLHDFRSDEIEHLVVEELVKKREECLDALESIMTTKSVSFRRLSHLRKLVPGFGKAYTIFNKTLMEADAHYKSVRTWSEIIPSKGCLRVGGRCHPHVNGVFFNGIILGPDGHVLIPEMQSSLLQQHMELLESSVIPLMHPLADPSTVFKDGDEAEDFVEVHLPDVHKQISGVDLGLPNWGKYVLIIAGVLIAMILTIFLMTCCGRCNRPKSTQHSLGGIGRKVSATSQSGKVISSWESYKSGGETRL

SEQ ID NO: 31773 - protein, 524 aa, Artificial Sequence
  derived and/or modified protein sequence (wt) from glycoprotein__RABV__KU198465.1
MVPQALLLVPLLAFPMCFGKFPIYTIPDKLGPWSPIDIHHLSCPNNLVVEDEGCTNLSGFSYMELKVGYISAIKVNGFTCTGVVTEAETYTNFVGYVTTTFKRKHFRPTPDACRAAYNWKMAGDPRYEESLHNPYPDYHWLRTVKTTKESLIIISPSVADLDPYDKSLHSRVFPSGKCLGITISSTYCSTNHDYTIWMPENLRLGTSCDIFTNSRGKRASKGSKTCGFVDERGLYKSLKGACKLKLCGVLGLRLMDGTWVAMQTSDETKWCPPDQLVNLHDFRSDEIEHLVVEELVKKREECLDALESIMTTKSVSFRRLSHLRKLVPGFGKAYTIFNKTLMEADAHYKSVRTWSEIIPSKGCLRVGGRCHPHVNGVFFNGIILGPDGHVLIPEMQSSLLQQHMELLESSVIPLMHPLADPSTVFKDGDEAEDFVEVHLPDVHKQISGVDLGLPNWGKYVLIIAGVLIAMILTIFLMTCCGRGNRPKSTQHSLGGIGRKVSATSQSGKVISSWESYKSGSETRL

SEQ ID NO: 31774 - protein, 524 aa, Artificial Sequence; identical to SEQ ID NO: 31484
  derived and/or modified protein sequence (wt) from glycoprotein__RABV__KU198466.1

SEQ ID NO: 31775 - protein, 524 aa, Artificial Sequence; identical to SEQ ID NO: 31484
  derived and/or modified protein sequence (wt) from glycoprotein__RABV__KU198467.1

SEQ ID NO: 31776 - protein, 524 aa, Artificial Sequence
  derived and/or modified protein sequence (wt) from glycoprotein__RABV__KU198468.1
MVPQALLFVPLLAFPMCFGKFPIYTIPDKLGPWSPIDIHHLSCPNNLIVEDEGCTNLSGFSYMELKVGYISAIKVNGFTCTGVVTEAETYTNFVGYVTTTFKRKHFRPTPDACRAAYNWKMAGDPRYEESLHNPYPDYHWLRTVKTTKESLIIISPSVADLDPYDKSLHSRVFPSGKCLGITISSTYCSTNHDYTIWMPENLRLGTSCDIFTNSRGKRASKGSKTCGFVDERGLYKSLKGACKLKLCGVLGLRLMDGTWVAMQTSDETKWCPPNQLVNLHDFRSDEIEHLVVEELVKKREECLDALESIMTTKSVSFRRLSHLRKLVPGFGKAYTIFNKTLMEADAHYKSVRTWNEIIPSKGCLRVGGRCHPHVNGVFFNGIILGPDGHVLIPEMQSSLLQQHMELLESSVIPLMHPLADPSTVFKDGDEAEDFVEVHLPDVHKQISGVDLGLPNWGKYVLIIAGVLIAMILTIFLMTCCGRGNRPKSTQHSLGGIGRKVSATSQSGKVISSWESYKSGGETRL

SEQ ID NO: 31777 - protein, 524 aa, Artificial Sequence
  derived and/or modified protein sequence (wt) from glycoprotein__RABV__KU198469.1
MVPQALLFVPLLAFPMCFGKFPIYTIPDKLGPWSPIDIHHLSCPNNLVVEDEGCTNLSGFSYMELKVGYISAIKVNGFTCTGVVTEAETYTNFVGYVTTTFKRKHFRPTPDACRAAYNWKMAGDPRYEESLHNPYPDYHWLRTVKTTKESLIIISPSVADLDPYDKSLHSRVFPSGKCLGITISSTYCSTNHDYTIWMPENLRLGTSCDIFTNSRGKRASKGSKTCGFVDERGLYKSLKGACKLKLCGVLGLRLMDGTWVAMQTSDETKWCPPDQLVNLHDFRSDEIEHLVVEELVKKREECLDALESIMTTKSVSFRRLSHLRKLVPGFGKAYTIFNKTLMEADAHYKSVRTWNEIIPSKGCLRVGGRCHPHVNGVFFNGIILGPDGHVLIPEMQSSLLQQHMELLESSVIPLMHPLADPSTVFKDGDEAEDFVEVHLPDVHKQISGVDLGLPNWGKYVLIIAGVLIAMILTTFLMTCCGRGNRPKSTQHSLGGIGRKVSATSQSGKVISSWESYKSGGETRL

SEQ ID NO: 31778 - protein, 524 aa, Artificial Sequence; identical to SEQ ID NO: 31474
  derived and/or modified protein sequence (wt) from glycoprotein__RABV__KU198470.1

SEQ ID NO: 31779 - protein, 524 aa, Artificial Sequence; identical to SEQ ID NO: 31475
  derived and/or modified protein sequence (wt) from glycoprotein__RABV__KU198471.1

SEQ ID NO: 31780 - protein, 524 aa, Artificial Sequence
  derived and/or modified protein sequence (wt) from glycoprotein__RABV__KU198472.1
MVPQALLFVPLLAFPMCFGKFPIYTIPDKLGPWSPIDIHHLSCPNNLVVEDEGCTNLSGFSYMELKVGYISAIKVNGFTCTGVVTEAETYTNFVGYVTTTFKRKHFRPTPDACRAAYNWKMAGDPRYEESLHNPYPDYHWLRTVKTTKESLIIISPSVSDLDPYDKSLHSRVFPSGKCLGITISSTYCSTNHDYTIWMPENVRLGTSCDIFTNSRGKRASKGSKTCGFVDERGLYKSLKGACKLKLCGVLGLRLMDGTWVSMPTSDETKWCPPDQLVNLHDFRSDEIEHLVVEELVRKREECLDALESIMTTKSVSFRRLSHLRKLVPGFGKAYTIFNKTLMEADAHYKSVRTWSEIIPSKGCLRVGGRCHPHVNGVFFNGIILGPDGHVLIPEMQSSLLQQHMELLESSVIPLMHPLADPSTVFKDGDEAEDFVEVHLPDVHKQISGVDLGLPNWGKYVLIIAGVLIAMILTILLMTCCGRGNRPKSTQHSLGGIGRKVSSTSQSGKVISSWESYKSGGETRL

SEQ ID NO: 31781 - protein, 524 aa, Artificial Sequence
  derived and/or modified protein sequence (wt) from glycoprotein__RABV__KU198473.1
MVPQALLFVPLLAFPMCFGKFPIYTIPDKLGPWSPIDIHHLSCPNNLVVEDEGCTNLSGFSYMELKVGYISAIKVNGFTCTGVVTEAETYTNFVGYVTTTFKRKHFRPTPDACRAAYNWKMAGDPRYEESLHNPYPDYHWLRTVKTTKESLIIISPSVADLDPYDKSLHSRVFPSGKCLGITISSTYCSTNHDYTIWMPENVRLGTSCDIFTNSRGKRASKGSKTCGFVDERGLYKSLKGACKLKLCGVLGLRLMDGTWVSMPTSDETKWCPPDQLVNLHDFRSDEIEHLVVEELVRKREECLDALESIMTTKSVSFRRLSHLRKLVPGFGKAYTIFNKTLMEADAHYKSVRTWNEIIPSKGCLRVGGRCHPHVNGVFFNGIILGPDGHVLIPEMQSSLLQQHMELLESSVIPLMHPLADPSTVFKDGDEAEDFVEVHLPDVHKQISGVDLGLPNWGKYVLIIAGVLIAMILTIFLMTCCGRGNRPKSTQHSLGGIGRKVSSTSQSGKVISSWESYKSGGETRL

SEQ ID NO: 31782 - protein, 524 aa, Artificial Sequence; identical to SEQ ID NO: 31781
  derived and/or modified protein sequence (wt) from glycoprotein__RABV__KU198474.1

SEQ ID NO: 31783 - protein, 524 aa, Artificial Sequence
  derived and/or modified protein sequence (wt) from glycoprotein__RABV__KU198475.1
MVPQALLFVPLLAFPMCFGKFPIYTIPDKLGPWSPIDIHHLSCPNNLVVEDEGCTNLSGFSYMELKVGYISAIKVNGFTCTGVVTEAETYTNFVGYVTTTFKRKHFRPTPDACRAAYNWKMAGDPRYEESLHNPYPDYHWLRTVKTTKESLIIISPSVSDLDPYDKSLHSRVFPSGKCLGITISSTYCSTNHDYTIWMPENVRLGTSCDIFTNSRGKRASKGSKTCGFVDERGLYKSLKGACKLKLCGVLGLRLMDGTWVSMPTSDETKWCPPDQLVNLHDFRSDEIEHLVVEELVRKREECLDALESIMTTKSVSFRRLSHLRKLVPGFGKAYTIFNKTLMEADAHYKSVRTWNEIIPSKGCLRVGGRCHPHVNGVFFNGIILGPDGHVLIPEMQSSLLQQHMELLESSVIPLMHPLADPSTVFKDGDEAEDFVEVHLPDVHKQISGVDLGLPNWGKYVLIIAGVLIAMILTILLMTCCGRGNRPKSTQHSLGGIGRKVSSTSQSGKVISSWESYKSGGETRL

SEQ ID NO: 31784 - protein, 524 aa, Artificial Sequence
  derived and/or modified protein sequence (wt) from glycoprotein__RABV__KU198476.1
MVPQALLFVPLLAFPMCFGKFPIYTIPDKLGPWSPIDIHHLSCPNNLVVEDEGCTNLSGFSYMELKVGYISAIKVNGFTCTGVVTEAETYTNFVGYVTTTFKRKHFRPTPDACRAAYNWKMAGDPRYEESLHNPYPDYHWLRTVKTTKESLIIISPSVADLDPYDKSLHSRVFPSGKCLGITISSTYCSTNHDYTIWMPENVRLGTSCDIFTNSRGKRASKGSKTCGFVDERGLYKSLKGACKLKLCGVLGLRLMDGTWVAMPTSDETKWCPPDQLVNLHDFRSDEIEHLVVEELVRKREECLDALESIMTTKSVSFRRLSHLRKLVPGFGKAYTIFNKTLMEADAHYKSVRTWNEIIPSKGCLRVGGRCHPHVNGVFFNGIILGPDGHVLIPEMQSSLLQQHMELLESSVIPLMHPLADPSTVFKDGDEAEDFVEVHLPDVHKQISGVDLGLPNWGKYVLIIAGVLIAMILTIFLMTCCGRGNRLKSTQHSLGGIGRKVSSTSQSGKVISSWESYKSGGETRL

SEQ ID NO: 31785 - protein, 524 aa, Artificial Sequence; identical to SEQ ID NO: 31474
  derived and/or modified protein sequence (wt) from glycoprotein__RABV__KU198478.1

SEQ ID NO: 31786 - protein, 524 aa, Artificial Sequence
  derived and/or modified protein sequence (wt) from glycoprotein__RABV__KU198479.1
MVPQALLFVPLLAFPMCFGKFPIYTIPDKLGPWSPIDIHHLSCPNNLVVEDEGCTNLSGFSYMELKVGYISAIKVNGFTCTGVVTEAETYTNFVGYVTTTFKRKHFRPTPDACRAAYNWKMAGDPRYEESLHNPYPDYHWLRTVKTAKESLIIISPSVADLDPYDKSLHSRVFPSGKCLGITISSTYCSTNHDYTIWMPENVRLGTSCDIFTNSRGKRASKGSKTCGFVDERGLYKSLKGACKLKLCGVLGLRLMDGTWVSMPTSDETKWCPPDQLVNLHDFRSDEIEHLVVEELVRKREECLDALESIMTTKSVSFRRLSHLRKLVPGFGKAYTIFNKTLMEADAHYKSVRTWNEIIPSKGCLRVGGRCHPHINGVFFNGIILGPDGHVLIPEMQSSLLQQHMELLESSVIPLMHPLADPSTVFKDGDEAEDFVEVHLPDVHKQISGVDLGLPNWGKYVLIIAGVLIAMILTIFLMTCCGRGNRPKSTQHSLGGIGRKVSSTSQSGKVISSWESYKSGGETRL

SEQ ID NO: 31787 - protein, 524 aa, Artificial Sequence; identical to SEQ ID NO: 31337
  derived and/or modified protein sequence (wt) from glycoprotein__RABV__KU534939.1

SEQ ID NO: 31788 - protein, 524 aa, Artificial Sequence
  derived and/or modified protein sequence (wt) from glycoprotein__RABV__KU534940.1
MVPQVLLFVPLLVFSMCFGKFPIYTIPDKLGPWSPIDIHHLSCPNNLVVEDEGCTNLSGFSYMELKVGYISAIKVNGFTCTGVVTEAETYTNFVGYVTTTFKRKHFRPTPDACRAAYNWKMAGDPRYEESLHNPYPDYHWLRTVKTTKESLVIISPSVADLDPYDKSLHSRVFPSGKCSGITISSTYCSTNHDYTIWMPENPRLGTSCDIFTNSRGKRASKGGKTCGFVDERGLYKSLKGACKLKLCGVLGLRLMDGTWVAMQTSDETKWCPPDQLVNLHDFRSDEIEHLVVEELVKKREECLDALESIMTTKSVSFRRLSHLRKLVPGFGKAYTIFNKTLMEADAHYKSVRTWNEIIPSKGCLRVGGRCHPHVKGVFFNGIILGPDGHVLIPEMQSSLLQQHMELLESSVIPLMHPLADPSTVFKDGDEAEDFVEVHLPDVHKQISGVDLGLPSWGKYVLASAGVLVVLMLTIFIITCCGRVHRPKSTQHGLGGTGRKVSVTSQSGKVISSWESYKSGGETRL

SEQ ID NO: 31789 - protein, 524 aa, Artificial Sequence; identical to SEQ ID NO: 31338
  derived and/or modified protein sequence (wt) from glycoprotein__RABV__KU534941.1

SEQ ID NO: 31790 - protein, 524 aa, Artificial Sequence; identical to SEQ ID NO: 31124
  derived and/or modified protein sequence (wt) from glycoprotein__RABV__KU534942.1

SEQ ID NO: 31791 - protein, 524 aa, Artificial Sequence
  derived and/or modified protein sequence (wt) from glycoprotein__RABV__KU739036.1
MVPQVLWFVPLLVFSMCFGKFPIYTIPDKLGPWSPIDIHHLSCPNNLVVEDEGCTNLSGFSYMELKVGYISAIKVNGFTCTGVVTEAETYTNFVGYVTTTFKRKHFRPTPDACRAAYNWKMAGDPRYEESLHNPYPDYHWLRTVKTTKESLVIISPSVADLDPYDKSLHSRVFPSGKCSGITISSTYCSTNHDYTIWMPENPRLGTSCDIFANSRGKRASKGSKTCGFVDERGLYKSLKGACKLKLCGVLGLRLMDGTWVAMQTSDETKWCPPDQLVNLHDFRSDEIEHLVVEELVKKREECLDALESIMTTKSVSFRRLSHLRKLVPGFGKAYTIFNKTLMEADAHYKSVRTWNEIIPSKGCLRVGGRCHPHVNGVFFNGIILGPDGHVLIPEMQSSLLQQHMELLESSVIPLMHPLADPSTVFKDGDEAEDFVEVHLPDVHKQISGVDLGLPNWGKYVLVSAGVLVVLMLAIFIMTCCGRVNRPKSTQHSLEGTGRKVSVTSQSGKVISSWESYKSGGETRL

SEQ ID NO: 31792 - protein, 524 aa, Artificial Sequence
  derived and/or modified protein sequence (wt) from glycoprotein__RABV__KU739037.1
MVPQALLFVPLLVFPLCFGKFPIYTIPDKLGPWSPIDIHHLSCPNNLVVEDEGCTNLSGFSYMELKVGYISAIKVNGFTCTGVVTEAETYTNFVGYVTTTFRRKHFRPTPDACRAAYNWKMAGDPRYEESLHNPYPDYHWLRTVKTTKESLVIISPSVADLDPYDKSLHSRVFPGGKCSGITVSSTYCSTNHDYTIWLPENPRLGTSCDIFTNSRGKRASKGSKTCGFVDERGLYKSLKGACKLKLCGVLGLRLMDGTWVAMQTSDETKWCPPDQLVNLHDFRSDEIEHLVVEELVKKREECLDALESIMTTKSVSFRRLSHLRKLVPGFGKAYTIFNKTLMEADAHYKSVRTWNEIIPSKGCLRVGGRCHHHVNGVFFNGIILGPDGHVLIPEMQSSLLQQHMELLESSVIPLMHPLADPSTVFKDGDEAEDFVEVHLPDVHKQVSGVDLGLPNWGKYVLLSAGALIALMLIIFLMTCCRRVNRPESTQRSFGGTEREVSITPQSGKVISSWESYKSGGETRL

SEQ ID NO: 31793 - protein, 524 aa, Artificial Sequence
  derived and/or modified protein sequence (wt) from glycoprotein__RABV__KU739038.1
MVPLALLVVPLLVLSLCSGKFPIYTIPDKLGPWSPIDIHHLSCPNNLVVEDEGCTNLSGFSYMELKVGYISAIKVNGFTCTGVVTEAETYTNFVGYVTTTFRRKHFRPTPDACRAAYNWKMAGDPRYEESLHNPYPDYHWLRTVKTTKESLVIISPSVADLDPYDRSLHSRVFPNGKCSGITVSSTYCPTNHDYTIWMPENPRLGTSCDIFVNSRGKRASKGSKTCGFVDERGLYKSLKGACKLKLCGVLGLRLMDGTWVAMRTSDETKWCPPDQLVNIHDFRSDEIEHLVVEELVKKREECLDALESIMTTKSVSFRRLSHLRKLVPGFGKAYTIFNKTLMEADAHYKSVRTWDEIIPSKGCLRVGGRCHPHVHGVFFNGIILGPDGHVLIPEMQSSLLQQHMELLESSVIPLMHPLADPSTVFKDGDEAEDFVEVHLPDVHKQISGVDLGLPNWGKYVLMSAGALIALMLIIFLMTCCRKIKQPESTQHSLRGTGRKVSVTSQNGKVISSWESYKSGGETRL

SEQ ID NO: 31794 - protein, 524 aa, Artificial Sequence
  derived and/or modified protein sequence (wt) from glycoprotein__RABV__KU739043.1
MVPLTLLVVPLLVLSLCSGKFPIYTIPDKLGPWSPIDIHHLSCPNNLVVEDEGCTNLSGFSYMELKVGYISAIKVNGFTCTGVVTEAETYTNFVGYVTTTFRRKHFRPTPDACRTAYNWKMAGDPRYEESLHNPYPDYHWLRTVKTTKESLVIISPSVADLDPYDRSLHSRVFPNGKCSGITVSSTYCPTNHDYTIWMPENPRLGTSCDIFVNSRGKRASKGSKTCGFVDERGLYKSLKGACKLKLCGVLGLRLMDGTWVAMRTSDETKWCPPDQLVNIHDFHSDEIEHLVVEELVKKREECLDALESIMTTKSVSFRRLSHLRKLVPGFGKAYTIFNKTLMEADAHYKSVRTWDEIIPSKGCLRVGGRCHPHVHGVFFNGIILGPDGHVLIPEMQSSLLQQHMELLESSVIPLMHPLADPSTVFKDGDEAEDFVEVHLPDVHKQISGVDLGLPNWGKYVLMSAGALIALMLIIFLMTCCRKIKRPESTQHSPRGTGRKVSVTSQNGKVISSWESYKSGGETRL

SEQ ID NO: 31795 - protein, 524 aa, Artificial Sequence
  derived and/or modified protein sequence (wt) from glycoprotein__RABV__KU739044.1
MVPQALLFVPLLVFSLCFGKFPIYTIPDKLGPWSPIDIHHLSCPNNLVVEDEGCTNLSGFSYMELKVGYISAIKVNGFTCTGVVTEAETYTNFVGYVTTTFKRKHFRPTPDACRAAYNWKMAGDPRYEESLHNPYPDYHWLRTVKTTKESLVIISPSVADLDPYDKSLHSRVFPSGKCSGITVSSTYCSTNHDYTIWMPENPRLGTSCDIFTNSRGKRASKGSKTCGFVDERGLYKSLKGACKLKLCGVLGLRLMDGTWVAMQTSDETKWCPPDQLVNLHDFRSDEIEHLVVEELVKKREECLDALESIMTTKSVSFRRLSHLRKLVPGFGKAYTIFNKTLMEADAHYKSVRTWNEIIPSKGCLRVGGRCHPHVNGVFFNGIILGPDGHVLIPEMQSSLLQQHMELLESSVIPLMHPLADPSTVFKDGDEAEDFVEVHLPDVHKQVSGVDLGLPNWGKYVLLSAGTLIALMLIIFLMTCCRRVNRPKSTQRGPGETGRKVSVTSQSGKVISSWESYKSGGETRL

SEQ ID NO: 31796 - protein, 524 aa, Artificial Sequence; identical to SEQ ID NO: 30555
  derived and/or modified protein sequence (wt) from glycoprotein__RABV__KU739045.1

SEQ ID NO: 31797 - protein, 524 aa, Artificial Sequence; identical to SEQ ID NO: 31687
  derived and/or modified protein sequence (wt) from glycoprotein__RABV__KU739047.1

SEQ ID NO: 31798 - protein, 524 aa, Artificial Sequence
  derived and/or modified protein sequence (wt) from glycoprotein__RABV__KU739048.1
MVPQALLFVPLLGFSLCFGKFPIYTIPDKLGPWSPIDIHHLSCPNNLVVEDEGCTNLSGFSYMELKVGYISAIKVNGFTCTGVVTEAETYTNFVGYVTTTFKRKHFRPTPDACRAAYNWKMAGDPRYEESLHNPYPDYHWLRTVKTTKESLVIISPSVADLDPYDKSLHSRVFPGGKCSGITVSSTYCSTNHDYTIWLPENPRLGTSCDIFTNSRGKRASKGSKTCGFVDERGLYKSLKGACKLKLCGVLGLRLMDGTWVAMQTSDETKWCSPDQLVNLHDFRSDEIEHLVVEELVKKREECLDTLESIMTTKSVSFRRLSHLRKLVPGFGKAYTIFNKTLMEADAHYKSVRTWNEIIPSKGCLRVGGRCHHHVNGVFFNGIILGPDGHVLIPEMQSSLLQQHMELLESSVIPLMHPLADPSTVFKDGDEAEDFVEVHLPDVHKQVSGVDLGLPNWGKYVLLSAGALVALMLIIFLMTCCRRVNRPESTQRSFGGTERKVSITPQSGKVISSWESYKSGSETRL

SEQ ID NO: 31799 - protein, 524 aa, Artificial Sequence
  derived and/or modified protein sequence (wt) from glycoprotein__RABV__KU739049.1
MVPQALLLVPLLGFSLCFGKFPIYTIPDKLGPWSPIDIHHLSCPNNLVVEDEGCTNLSGFSYMELKVGYISSIKVNGFTCTGVVTEAETYTNFVGYVTTTFRRKHFRPTPDACRAAYNWKMAGDPRYEESLHNPYPDYHWLRTVKTTKESLVIISPSVADLDPYDKSLHSRVFPSGKCSGITVSSTYCSTNHDYTIWMPENLRLGTSCDIFTNSRGKRASKGSKTCGFVDERGLYKSLKGACKLKLCGVLGLRLMDGTWVAMQTSDETKWCPPDQLVNLHDFRSDEIEHLVVEELVKKREECLDALESIMTTKSVSFRRLSHLRKLVPGFGKAYTIFNKTLMEADAHYKSVRTWNEVIPSRGCLRVGGRCHPHVNGVFFNGIILGPDGHVLIPEMQSSLLQQHIELLESSVIPLTHPLADPSTVFKDGDEAEDFVEVHLPDVHKQVSGVDLGLPNWGKYVLLSAGALIALMLIIFLITCCRRVNRPESTQRSLRGAGRKVSITSQSGKVISSWESYKSGGETRL

SEQ ID NO: 31800 - protein, 524 aa, Artificial Sequence
  derived and/or modified protein sequence (wt) from glycoprotein__RABV__KU739050.1
MVPQALLFVPLLVFSLCFGKFPIYTIPDKLGPWSPIDIHHLSCPNNLVVEDEGCTNLSGFSYMELKVGYISAIKVNGFTCTGVVTEAETYTNFVGYVTTTFRRKHFRPTPDACRAAYNWKMAGDPRYEESLHNPYPDYHWLRTVKTTKESLVIISPSVADLDPYDKSLHSRVFPSGKCSGITVSSTYCSTNHDYTIWMPENPRLGTSCDIFTNSRGKRASKGSKTCGFVDERGLYKSLKGACKLKLCGVLGLRLMDGTWVAMQTTDETKWCPPDQLVNLHDFRSDEIEHLVVEELVKKREECLDALESIMTTKSVSFRRLSHLRKLVPGFGKAYTIFNKTLMEADAHYKSVRTWNEIIPSKGCLRVGGRCHPHVNGVFFNGIILGPDGHVLIPEMQSSLLQQHMELLESSVIPLMHPLADPSTVFKDGDEAEDFVEVHLPDVHKQVSGVDLGLPNWGKYVLLSAGTLIALMLIIFLMTCCRRVNRPESMQRSLGETGRKVSVTSQSGKVISSWESYKSGGETRL

SEQ ID NO: 31801 - protein, 524 aa, Artificial Sequence
  derived and/or modified protein sequence (wt) from glycoprotein__RABV__KU888637.1
MVPQALLFVPLLVFSLCFGKFPIYTIPDKLGPWSPIDIHHLSCPNNLVVEDEGCTNLSGFSYMELKVGYISAIKVNGFTCTGVVTEAETYTNFVGYVTTTFKRKHFRPTPDACRAAYNWKMAGDPRYEESLHNPYPDYHWLRTVKTTKESLVIISPSVADLDPYDKSLHSRVFPSGKCSGITVSSTYCSTNHDYTIWMPENPRLGTSCDIFANSRGKRASKGSKTCGFVDERGLYKSLKGACKLKLCGVLGLRLMDGTWVAMQTSDETKWCPPDQLVNLHDFRSDEIEHLVVEELVKKREECLDALESIMTTKSVSFRRLSHLRKLVPGFGKAYTIFNKTLMEADAHYKSVRTWNEIIPSKGCLRVGGRCHPHVNGVFFNGIILGPDGHVLIPEMQSSLLQQHMELLESSVIPLMHPLADPSTVFKDGDEAEDFVEVHLPDVHKQVSGVDLGLPGWGKYVLLSAGALIALMLIIFLMTCCRRVNRPESTQRSLGGTGRKVSITSQSGKVISSWESYKSGGETRL

SEQ ID NO: 31802 - protein, 524 aa, Artificial Sequence; identical to SEQ ID NO: 31338
  derived and/or modified protein sequence (wt) from glycoprotein__RABV__KU888639.1

SEQ ID NO: 31803 - protein, 524 aa, Artificial Sequence
  derived and/or modified protein sequence (wt) from glycoprotein__RABV__KU888640.1
MVPQALLFVPLLGFSLCFGKFPIYTIPDKLGPWSPIDIHHLSCPNNLVVEDEGCTNLSGFSYMELKVGYISAIKVNGFTCTGVVTEAETYTNFVGYVTTTFKRKHFRPTPDACRAAYNWKMAGDPRYEESLHNPYPDYHWLRTVKTTKESLVIISPSVADLDPYDKSLHSRVFPSGKCSGITVSSTYCPTNHDYTIWMPENPRLGTSCDIFTSSKGKRASKGSKTCGFVDERGLYKSLKGACKLKLCGVLGLRLMDGTWVAMQTSDETKWCPPDQLVNLHDFRSDEIEHLVVEELVKKREECLDALESIMTTKSVSFRRLSHLRKLVPGFGKAYTIFNKTLMEADAHYKSVRTWNEIIPSKGCLRIGGRCHPHVNGVFFNGIILGPDGHVLIPEMQSSLLQQHMELLESSVIPLMHPLADPSTVLKDGDEAEDFVEVHLPDVHKQISGVDLGLPNWGKYVLLSAGALIALMLIIFLMTCCRRVNRQESTQRSLGGTGRKVSITSQSGKVISSWESYKSGGETRL

SEQ ID NO: 31804 - protein, 524 aa, Artificial Sequence
  derived and/or modified protein sequence (wt) from glycoprotein__RABV__KU888641.1
MVPQALLVIPLLGFSLCFGKFPIYTIPDKLGPWSPIDIHHLSCPNNLIVEDEGCTNLSGFSYMELKVGYISAIKVNGFTCTGVVTEAETYTNFVGYVTTTFKRKHFRPTPDECRAAYNWKMAGDPRYEESLHNPYPDYHWLRTVKTTKESLVIISPSVADLDPYDKSLHSRVFPSGKCSGITVSSTYCSTNHDYTIWMPENPRLGTSCDIFTNSRGKRASKGSKTCGFVDERGLYKSLKGACKLKLCGVLGLKLMDGTWVAMQASDETKWCPPDQLVNLHDLRSDEIEHLVVEELVKKREECLDALESIMTTKSVSFRRLSHLRKLVPGFGKAYTIFNKTLMEADAHYKSVRTWNEIIPSKGCLKVGGRCHPHVNGVFFNGVILGPDGHVLIPEMQSSLLQQHMELLESSVIPLMHPLADPSTVFKDGEEAEDFVEVHLPDVHKQVSGVDLGLPNWGKYVSLGAGALIALMLTILLITCCRRVNRPEPTRRSLEGKERKVSVTSQSGKVISSWESYKSGGETRL

SEQ ID NO: 31805 - protein, 524 aa, Artificial Sequence
  derived and/or modified protein sequence (wt) from glycoprotein__RABV__KU888642.1
MVPQALLFVPLLGFSLCFGKFPIYTIPDKLGPWSPIDIHHLSCPNNLVVEDEGCTNLSGFSYMELKVGYISAIKVNGFTCTGVVTEAETYTNFVGYVTTTFKRKHFRPTPDACRAAYNWKMAGDPRYEESLHNPYPDYHWLRTVKTTKESLVIISPSVADLDPYDKSLHSRVFPSGKCSGITVSSTYCSTNHDYTIWMPENPRLGTSCDIFTNSKGKRASKGSKTCGFVDERGLYKSLKGACKLKLCGVLGLRLMDGTWVAMQTSDETKWCPPDQLVNLHDFRSDEIEHLVVEELVKKREECLDALESIMTTKSVSFRRLSHLRKLVPGFGKAYTIFNKTLMEADAHYKSVRTWNEIIPSKGCLRVGGRCHPHVNGVFFNGIILGPDGHVLIPEMQSSLLQQHMELLESSVIPLMHPLADPSTVLKDSDEAEDFVEVHLPDVHKQISGVDLGLPNWGKYVLLSAGALIALMLIIFLMTCCRRVNRQESTQRSLGGTGRKVSITSQSGKVISSWESYKSGGETRL

SEQ ID NO: 31806 - protein, 524 aa, Artificial Sequence; identical to SEQ ID NO: 30845
  derived and/or modified protein sequence (wt) from glycoprotein__RABV__KU888643.1

SEQ ID NO: 31807 - protein, 524 aa, Artificial Sequence
  derived and/or modified protein sequence (wt) from glycoprotein__RABV__KU946961.1
MIPQALLFVPLLVFPLCFGKFPIYTIPDKLGPWSPIDIHHLSCPNNLVVEDEGCTNLSGFSYMELKVGYISAIKVNGFTCTGVVTEAETYTNFVGYVTTTFKRKHFRPTPDACRSAYNWKMAGDPRYEESLHNPYPDYHWLRTVKTTKESVVIISPSVADLDPYDKSLHSRVFPRGKCSGITVSSAYCSTNHDYTIWMPENPRLGTSCDIFTNSRGKRASKGSKTCGFVDERGLYKSLKGACKLKLCGVLGLRLMDGTWVAIQTSNETKWCPPDQLVNLHDFHSDEIEHLVVEEVVKKREECLDALESIMTTKSVSFRRLSHLRKLVPGFGKAYTIFNKTLMEADAHYKSVQTWDEIIPSKGCLRVGGRCHPHVNGVFFNGIILGPDGHVLIPEMQSSLLQQHMELLKSSVIPLMHPLADPSTVFKDGDEVEDFVEVHLPDVHKQVSGVDLGLPNWGKDVLMGAGVLTALMLMIFLMTCCRRTNRAESIQHSLGETGRKVSVTSQSGRVISSWESYKSGGETKL

SEQ ID NO: 31808 - protein, 524 aa, Artificial Sequence; identical to SEQ ID NO: 31474
  derived and/or modified protein sequence (wt) from glycoprotein__RABV__KX036361.1

SEQ ID NO: 31809 - protein, 524 aa, Artificial Sequence
  derived and/or modified protein sequence (wt) from glycoprotein__RABV__KX036363.1
MVPQALLFVPLLAFPMCFGKFPIYTIPDKLGPWSPIDIHHLSCPNNLVVEDEGCTNLSGFSYMELKVGYISAIKVNGFTCTGVVTEAETYTNFVGYVTTTFKRKHFRPTPDACRAAYNWKMAGDPRYEESLHNPYPDYHWLRTVKTTKESLIIISPSVADLDPYDKSLHSRVFPSGKCLGITISSTYCSTNHDYTIWMPENVRLGTSCDIFTNSRGKRASKGSKTCGFVDERGLYKSLKGACKLKLCGVLGLRLMDGTWVAMPTSDETKWCPPDQLVNLHDFRSDEIEHLVVEELVRKREECLDALESIMTTKSVSFRRLSHLRKLVPGFGKAYTIFNKTLMEADAHYKSVRTWNEIIPSKGCLRVGGRCHPHVNGVFFNGIILGPDGHVLIPEMQSSLLQQHMELLESSVIPLMHPLADPSTVFKDGDEAEDFVEVHLPDVHKQISGVDLGLPNWGKYVLIIAGVLIAMILTIFLMTCCGRGNRPKSKQHSLGGIGRKVSSTSQSGKVISSWESYKSGGETRL

SEQ ID NO: 31810 - protein, 524 aa, Artificial Sequence; identical to SEQ ID NO: 31809
  derived and/or modified protein sequence (wt) from glycoprotein__RABV__KX036364.1

SEQ ID NO: 31811 - protein, 524 aa, Artificial Sequence; identical to SEQ ID NO: 31809
  derived and/or modified protein sequence (wt) from glycoprotein__RABV__KX036365.1

SEQ ID NO: 31812 - protein, 524 aa, Artificial Sequence
  derived and/or modified protein sequence (wt) from glycoprotein__RABV__KX036366.1
MVPQALLFVPLMAFPMCFGKFPIYTIPDKLGPWSPIDIHHLSCPNNLVVEDEGCTNLSGFSYMELKVGYISAIKVNGFTCTGVVTEAETYTNFVGYVTTTFKRKHFRPTPDACRAAYNWKMAGDPRYEESLHNPYPDYHWLRTVKTTKESLIIISPSVADLDPYDKSLHSRVFPSGKCLGITISSTYCSTNHDYTIWMPDNVRLGTSCDIFTNSRGKRASKGSKTCGFVDERGLYKSLKGACKLKLCGVLGLRLMDGTWVAMPTSDETKWCPPDQLVNLHDFRLDEIEHLVVEELVRKREECLDALESIVTTKSVSFRRLSHLRKLVPGFGKAYTIFNKTLMEADAHYKSVRTWNEIIPSKGCLRVGGRCHPHVNGVFFNGIILGPDGHVLIPEMQSSLLQQHMELLESSVIPLMHPLADPSTVFKDGDEAEDFVEVHLPDVHKQISGVDLGLPNWGKYVLIIAGVLIAMILTIFLMTCCGRGNRPKSTQHSLGGIGRKVSSTSQSGKVISSWESYKSGGETRL

SEQ ID NO: 31813 - protein, 524 aa, Artificial Sequence
  derived and/or modified protein sequence (wt) from glycoprotein__RABV__KX036367.1
MVPQALLFVPLLAFPMCFGKFPIYTIPDKLGPWSPIDIHHLSCPNNLVVEDEGCTNLSGFSYMELKVGYISAIKVNGFTCTGVVTEAETYTNFVGYVTTTFKRKHFRPTPDACRAAYNWKMAGDPRYEESLHNPYPDYHWLRTVKTTKESLIIISPSVADLDPYDKSLHSRVFPSGKCLGITISSTYCSTNHDYTIWMPENVRLGTSCDIFTNSRGKRASKGSKTCGFVDERGLYKSLKGACKLKLCGVLGLRLMDGTWVAMPTSDETKWCPPDQLVNLHDFRSDEIEHLVVEELVRKREECLDALESIMTTKSVSFRRLSHLRKLVPGFGKAYTIFNKTLMEADAHYKSVRTWNEIIPSKGCLRVGGRCHPHVNGVFFNGIILGPDGHVLIPEMQSSLLQQHMELLESSVIPLMHPLADPSTVFKDGDEAEDFVEVHLPDVHKQISGVDLGLPNWGKYVLIIAGVLIAMILTIFLMTCCGRGNRPMSKQHSLGGIGRKVSSTSQSGKVISSWESYKSGGETRL

SEQ ID NO: 31814 - protein, 524 aa, Artificial Sequence
  derived and/or modified protein sequence (wt) from glycoprotein__RABV__L40426.1
MVPQVLLFVLLLGFSLCFGKFPIYTIPDKLGPWSPIDIHHLRCPNNLVVEDEGCTNLSGFSYMELKVGYISAIKVNGFTCTGVVTEAETYTNFVGYVTTTFKRKHFRPTPDACRAAYNWKMAGDPRYEESLQNPYPDYHWLRTVRTTKESLIIISPSVTDLDPYDKSLHSRVFPGGKCSGITVSSTYCSTNHDYTIWMPENPRPGTPCDIFTNSRGKRASNGNKTCGFVDERGLYKSLKGACRLKLCGVLGLRLMDGTWVAMQTSDETKWCSPDQLVNLHDFRSDEIEHLVVEELVKKREECLDTLESIMTTKSVSFRRLSHLRKLVPGFGKAYTIFNKTLMEADAHYKSVRTWNEIIPSKGCLKVGGRCHPHVNGVFFNGIILGPDDRVLIPEMQSSLLRQHMELLESSVIPLMHPLADPSTVFKEGDEAEDFVEVHLPDVYKQISGVDLGLPNWGKYVLMTAGAMIGLVLIFSLMTWCRRANRPESKQRSFGGTGGNVSVTSQSGKVIPSWESYKSGGEIRL

SEQ ID NO: 31815 - protein, 524 aa, Artificial Sequence; identical to SEQ ID NO: 30572
  derived and/or modified protein sequence (wt) from glycoprotein__RABV__LC009632.1

SEQ ID NO: 31816 - protein, 524 aa, Artificial Sequence
  derived and/or modified protein sequence (wt) from glycoprotein__RABV__LC009633.1
MIPQALLFVPLLVFSLCFGKFPIYTIPDKLGPWSPIDIHHLSCPNNLVVEDEGCTNLSGFSYMELKVGYISAIKVNGFTCTGVVTEAETYTNFVGYVTTTFKRKHFRPTPDACRAAYNWKMAGDPRYEESLHNPYPDYHWLRTVKTTKESLVIISPSVADLDPYDKSLHSRVFPSGKCSGITVSSTYCSTNHDYTIWMPENPRLGTSCDIFTNSRGKRASKGNKTCGFVDERGLYKSLKGACKLKLCGVLGLRLMDGTWAAIQTSDETKWCPPDQLVNLHDFRSDEIEHLVVEELVKKREECLDALESIMTTKSVSFRRLSHLRKLVPGFGKAYTIFNKTLMEADAHYKSVRTWNEIIPSKGCLRVGGRCHPHVNGVFFNGIILGPDGHVLIPEMQSSLLQQHMELLESSVIPLMHPLADPSTVFKDDDEAEDFVEVHLPDVHKQVSGVDLGLPSWGKYVLMSAGVLTALMLMIFLMTCCRRANRAESAQHSLGERGRKVSVTSQSGRVISSWESYKSGGETKL

SEQ ID NO: 31817 - protein, 524 aa, Artificial Sequence
  derived and/or modified protein sequence (wt) from glycoprotein__RABV__LC009635.1
MVPQVLLFVLLLGFSLCFGKFPIYTIPDELGPWSPIDIHHLSCPNNLVVEDEGCTNLSEFSYMELKVGYISAIKVNGFTCTGVVTEAETYTNFVGYVTTTFKRKHFRPTPDACRAAYNWKMAGDPRYEESLHNPYPDYHWLRTVRTTKESLIIISPSVTDLDPYDKSLHSRVFPGGKCSGITVSSTYCSTNHDYTIWMPENPRPRTPCDIFTNSRGKRASNGSKTCGFVDERGLYKSLKGACRLKLCGVLGLRLMDGTWVAMQTSDETKWCPPDQLVNLHDFRSDEIEHLVVEELVKKREECLDALESIMTTKSVSFRRLSHLRKLVPGFGKAYTIFNKTLMEADAHYKSVRTWNEIIPSKGCLKVGGRCHPHVNGVFFNGIILGPDDHVLIPEMQSSLLQQHMELLESSVIPLMHPLADPSTVFKEGDEAEDFVEVHLPDVYKQISGVDLGLPNWGKYVLMTAGAMIGLVLIFSLMTWCRRANRPESKQRSFGGTGGNVSVTSQSGKVIPSWESYKSGGEIRL

SEQ ID NO: 31818 - protein, 524 aa, Artificial Sequence; identical to SEQ ID NO: 30572
  derived and/or modified protein sequence (wt) from glycoprotein__RABV__LC018482.1

SEQ ID NO: 31819 - protein, 524 aa, Artificial Sequence; identical to SEQ ID NO: 30571
  derived and/or modified protein sequence (wt) from glycoprotein__RABV__LC018483.1

SEQ ID NO: 31820 - protein, 524 aa, Artificial Sequence; identical to SEQ ID NO: 30598
  derived and/or modified protein sequence (wt) from glycoprotein__RABV__LC018484.1

SEQ ID NO: 31821 - protein, 524 aa, Artificial Sequence; identical to SEQ ID NO: 30595
  derived and/or modified protein sequence (wt) from glycoprotein__RABV__LC018485.1

SEQ ID NO: 31822 - protein, 524 aa, Artificial Sequence; identical to SEQ ID NO: 30572
  derived and/or modified protein sequence (wt) from glycoprotein__RABV__LC018486.1

SEQ ID NO: 31823 - protein, 524 aa, Artificial Sequence; identical to SEQ ID NO: 30595
  derived and/or modified protein sequence (wt) from glycoprotein__RABV__LC018487.1

SEQ ID NO: 31824 - protein, 524 aa, Artificial Sequence; identical to SEQ ID NO: 30599
  derived and/or modified protein sequence (wt) from glycoprotein__RABV__LC018488.1

SEQ ID NO: 31825 - protein, 524 aa, Artificial Sequence; identical to SEQ ID NO: 30595
  derived and/or modified protein sequence (wt) from glycoprotein__RABV__LC018489.1

SEQ ID NO: 31826 - protein, 524 aa, Artificial Sequence; identical to SEQ ID NO: 30595
  derived and/or modified protein sequence (wt) from glycoprotein__RABV__LC018490.1

SEQ ID NO: 31827 - protein, 524 aa, Artificial Sequence; identical to SEQ ID NO: 30572
  derived and/or modified protein sequence (wt) from glycoprotein__RABV__LC018493.1

SEQ ID NO: 31828 - protein, 524 aa, Artificial Sequence; identical to SEQ ID NO: 30595
  derived and/or modified protein sequence (wt) from glycoprotein__RABV__LC018494.1

SEQ ID NO: 31829 - protein, 524 aa, Artificial Sequence; identical to SEQ ID NO: 30595
  derived and/or modified protein sequence (wt) from glycoprotein__RABV__LC018495.1

SEQ ID NO: 31830 - protein, 524 aa, Artificial Sequence; identical to SEQ ID NO: 30595
  derived and/or modified protein sequence (wt) from glycoprotein__RABV__LC018496.1

SEQ ID NO: 31831 - protein, 524 aa, Artificial Sequence
  derived and/or modified protein sequence (wt) from glycoprotein__RABV__LC018497.1
MIPQALLFVPLLVFSLCFGKFPIYTIPDKLGPWSPIDIHHLSCPNNLVVEDEGCTNLSGFSYMELKVGYISAIKVNGFTCTGVVTEAETYTNFVGYVTTTFKRKHFRPTPDACRSAYNWKMAGDPRYEESLHNPYPDYHWLRTVKTTKESLVIISPSVADLDPYDKSLHSRVFPSGKCSGITVSSTYCSTNHDYTIWMPENPRLGTSCDIFTNSRGKRASKGSKTCGFVDERGLYKSLKGACKLKLCGVLGLRLMDGTWAAIQTSDETKWCPPDQLVNLHDFRSDEIEHLVVEELVKKREECLDALESIMTTKSVSFRRLSHLRKLVPGFGKAYTIFNKTLMEADAHYKSVRTWNEIIPSKGCLRVGGRCHPHVNGVFFNGIILGPDGHVLIPEMQSSLLQQHMELLESSVIPLMHPLADPSTVFKDDDEAEDFVEVHLPDVHKQVSGVDLGLPSWGKYVLMSAGVLTALMLMIFLTRCCRRANRAESAQHSLGERGRKVSVTSQSGRVISSWESYKSGGETKL

SEQ ID NO: 31832 - protein, 524 aa, Artificial Sequence; identical to SEQ ID NO: 30595
  derived and/or modified protein sequence (wt) from glycoprotein__RABV__LC018498.1

SEQ ID NO: 31833 - protein, 524 aa, Artificial Sequence
  derived and/or modified protein sequence (wt) from glycoprotein__RABV__LC018501.1
MIPQALLFVPLLVFSLCFGKFPIYTIPDKLGPWSPIDIHHLSCPNNLVVEDEGCTNLSGFSYMELKVGYISAIKVNGFTCTGVVTEAETYTNFVGYVTTTFKRKHFRPTPDACRAAYNWKMAGDPRYEESLHNPYPDYHWLRTVKTTKESLVIISPSVADLDPYDKSLHSRVFPSGKCSGITVSSTYCSTNHDYTIWMPENPRLGTSCDIFTNSRGKRASKGSKTCGFVDERGLYKSLKGACKLKLCGVLGLRLMDGTWAAIQTSDETKWCPPDQLVNLHDFRSDEIEHLVVEELVKKREECLDALESIMTTKSVSFRRLSHLRKLVPGFGKAYTIFNKTLMEADAHYKSVRTWNEIIPSKGCLRVGGRCHPHVNGVFFNGIILGPDGHVLIPEMQSSLLQQHMELLESSVIPLMHPLADPSTVFKDDDEAEDFVEVHLPDVHKQVSGVDLGLPSWGKYVLMSAGVLTALMLMIFLMTCCRRTNRAESAQHSPGERGRKVSVTSQSGRVISSWESYKSGGETKL

SEQ ID NO: 31834 - protein, 524 aa, Artificial Sequence; identical to SEQ ID NO: 30572
  derived and/or modified protein sequence (wt) from glycoprotein__RABV__LC018502.1

SEQ ID NO: 31835 - protein, 524 aa, Artificial Sequence
  derived and/or modified protein sequence (wt) from glycoprotein__RABV__LC018503.1
MIPQALLFVPLLVFSLCFGKFPIYTIPDKLGPWSPIDIHHLSCPNNLVVEDEGCTNLSGFSYMELKVGYISAIKVNGFTCTGVVTEAETYTNFVGYVTTTFKRKHFRPTPDACRAAYNWKMAGDPRYEESLHNPYPDYHWLRTVKTTKESLVIISPSVADLDPYDKSLHSRVFLNGKCSGITVSSTYCSTNHDYTIWMPENPRLGTSCDIFTNSRGKRASKGSKTCGFVDERGLYKSLKGACKLKLCGVLGLRLMDGTWAAIQTSDETKWCPPDQLVNLHDFRSDEIEHLVVEELVKKREECLDALESIMTTKSVSFRRLSHLRKLVPGFGKAYTIFNKTLMEADAHYKSVRTWNEIIPSKGCLRVGGRCHPHVNGVFFNGIILGPDGHVLIPEMQSSLLQQHVELLESSVIPLMHPLADPSTVFKDDDEAEDFVEVHLPDVHKQVSGVDLGLPSWGKYVLMSAGVLTALMLMIFLMTCCRRANRAESAQHSLGERGRKVSVTSQSGRVVSSWESYKSGGETKL

SEQ ID NO: 31836 - protein, 524 aa, Artificial Sequence; identical to SEQ ID NO: 30572
  derived and/or modified protein sequence (wt) from glycoprotein__RABV__LC018504.1

SEQ ID NO: 31837 - protein, 524 aa, Artificial Sequence
  derived and/or modified protein sequence (wt) from glycoprotein__RABV__LC018505.1
MIPQALLFVPLLVFSLCFGKFPIYTIPDKLGPWSPIDIHHLSCPNNLVVEDEGCTNLSGFSYMELKVGYISAIKVNGFTCTGVVTEAETYTNFVGYVTTTFKRKHFRPTPDACRAAYNWKMAGDPRYEESLHNPYPDYHWLRTVKTTKESLVIISPSVADLDPYDKSLHSRVFPNGKCSGITVSSTYCSTNHDYTIWMPENPRLGTSCDIFTNSRGKRASKGSKTCGFVDERGLYKSLKGACKLKLCGVLGLRLMDGTWAAIQTSDETKWCPPDQLVNLHDFRSDEIEHLVVEELVKKREECLDALESIMTTKSVSFRRLSHLRKLVPGFGKAYTIFNKTLMEADAHYKSVRTWNEIIPSKGCLRVGGRCHPHVNGVFFNGIILGPDGHVLIPEMQSSLLQQHMELLESSVIPLMHPLADPSTVFKDDDEAEDFVEVHLPDVHKQVSGVDLGLPSWGKYVLMSAGVLTALMLMIFLMTCCRRANRAESAQHSLGERGRKVSVTSQSGRVISSWESYKSGGETKL

SEQ ID NO: 31838 - protein, 524 aa, Artificial Sequence
  derived and/or modified protein sequence (wt) from glycoprotein__RABV__LC018506.1
MIPQALLFVPLLVFSLCFGKFPIYTIPDKLGPWSPIDIHHLSCPNNLVVEDEGCTNLSGFSYMELKVGYISTIKVNGFTCTGVVTEAETYTNFVGYVTTTFKRKHFRPTPDACRAAYNWKMAGDPRYEESLHNPYPDYHWLRTVKTTKESLVIISPSVADLDPYDKSLHSRVFPNGKCSGITVSSTYCSTNHDYTIWMPENPRLGTSCDIFTNSRGKRASKGSKTCGFVDERGLYKSLKGACKLKLCGVLGLRLMDGTWAAIQTSDETKWCPPDQLVNLHDFRSDEIEHLVVEELVKKREECLDALESIMTTKSVSFRRLSHLRKLVPGFGKAYTIFNKTLMEADAHYKSVRTWNEIIPSKGCLRVGGRCHPHVNGVFFNGIILGPDGHVLIPEMQSSLLQQHMELLESSVIPLMHPLADPSTVFKDDDEAEDFVEVHLPDVHKQVSGVDLGLPSWGKYVLMSAGVLTALMLMIFLMTCCRRANRAESAQHSLGERGRKVSVTSQSGRVISSWESYKSGGETKL

SEQ ID NO: 31839 - protein, 524 aa, Artificial Sequence; identical to SEQ ID NO: 30572
  derived and/or modified protein sequence (wt) from glycoprotein__RABV__LC018507.1

SEQ ID NO: 31840 - protein, 524 aa, Artificial Sequence; identical to SEQ ID NO: 30595
  derived and/or modified protein sequence (wt) from glycoprotein__RABV__LC018508.1

SEQ ID NO: 31841 - protein, 524 aa, Artificial Sequence; identical to SEQ ID NO: 30618
  derived and/or modified protein sequence (wt) from glycoprotein__RABV__LC018509.1

SEQ ID NO: 31842 - protein, 524 aa, Artificial Sequence; identical to SEQ ID NO: 30595
  derived and/or modified protein sequence (wt) from glycoprotein__RABV__LC018513.1

SEQ ID NO: 31843 - protein, 524 aa, Artificial Sequence; identical to SEQ ID NO: 30595
  derived and/or modified protein sequence (wt) from glycoprotein__RABV__LC018514.1

SEQ ID NO: 31844 - protein, 524 aa, Artificial Sequence; identical to SEQ ID NO: 30595
  derived and/or modified protein sequence (wt) from glycoprotein__RABV__LC018515.1

SEQ ID NO: 31845 - protein, 524 aa, Artificial Sequence
  derived and/or modified protein sequence (wt) from glycoprotein__RABV__LC018516.1
MIPQALLFVPLLVFSLCFGKFPIYTIPDKLGPWSPIDIHHLSCPNNLVVEDEGCTNLSGFSYMELKVGYISAIKVNGFTCTGVVTEAETYTNFVGYVTTTFKRKHFRPTPDACRAAYNWKMAGDPRYEESLHNPYPDYHWLRTVKTTKESLVIISPSVADLDPYDKSLHSRVFPSGKCSGITVSSTYCSTNHDYTIWMPENPRLGTSCDIFTNSRGKRASKGSKTCGFVDERGLYRSLKGACKLKLCGVLGLRLMDGTWAAIQTSDETKWCPPDQLVNLHDFRSDEIEHLVVEELVKKREECLDALESIMTTKSVSFRRLSHLRKLVPGFGKAYTIFNKTLMEADAHYKSVRTWNEIIPSKGCLRVGGRCHPHVNGVFFNGIILGPDGHVLIPEMQSSLLQQHMELLESSVIPLMHPLADPSTVFKDDDEAEDFVEVHLPDVHKQVSGVDLGLPSWGKYVLMSAGVLTALMLMIFLMTCCRRTNRAESAQHSLGERGRKVSVTSQSGRVISSWESYKSGGETKL

SEQ ID NO: 31846 - protein, 524 aa, Artificial Sequence
  derived and/or modified protein sequence (wt) from glycoprotein__RABV__LC018517.1
MIPQALLFVPLLVFSLCFGKFPIYTIPDKLGPWSPIDIHHLSCPNNLVVEDEGCTNLSGFSYMELKVGYISAIKVNGFTCTGVVTEAETYTNFVGYVTTTFKRKHFRPTPDACRAAYNWKMAGDPRYEESLHNPYPDYHWLRTVKTTKESLVIISPSVADLDPYDKSLHSRVFPNGKCSGITVSSTYCSTNHDYTIWMPENPRLGTSCDIFTNSRGKRASKGSKTCGFVDERGLYKSLKGACKLKLCGVLGLRLMDGTWAAIQTSDETKWCPPDQLVNLHDFRSDEIEHLVVEELVKKREECLDALESIMTTKSVSFRRLSHLRKLVPGFGKAYTIFNKTLMEADAHYKSVRTWNEIIPSKGCLRVGGRCHPHVNGVFFNGIILGPDGHVLIPEMQSSLLQQHMELLESSVIPLMHPLADPSTVFKDDDEAEDFVEVHLPDVHKQVSGVDLGLPSWGKYVLMSAGVSTALMLMIFLMTCCRRANRAESAQHSLGERGRKVSVTSQSGRVISSWESYKSGGETKL

SEQ ID NO: 31847 - protein, 524 aa, Artificial Sequence; identical to SEQ ID NO: 30571
  derived and/or modified protein sequence (wt) from glycoprotein__RABV__LC018518.1

SEQ ID NO: 31848 - protein, 524 aa, Artificial Sequence; identical to SEQ ID NO: 30571
  derived and/or modified protein sequence (wt) from glycoprotein__RABV__LC018519.1

SEQ ID NO: 31849 - protein, 524 aa, Artificial Sequence; identical to SEQ ID NO: 30572
  derived and/or modified protein sequence (wt) from glycoprotein__RABV__LC018520.1

SEQ ID NO: 31850 - protein, 524 aa, Artificial Sequence
  derived and/or modified protein sequence (wt) from glycoprotein__RABV__LC018522.1
MIPQALLFVPLLVFSLCFGKFPIYTIPDKLGPWSPIDIHHLSCPNNLVVEDEGCTNLSGFSYMELKVGYISAIKVNGFTCTGVVTEAETYTNFVGYVTTTFKRKHFRPTPDACRAAYNWKMAGDPRYEESLHNPYPDYHWLRTVKTTKESLVIISPSVADLDPYDKSLHSRVFPNGKCSGITVSSTYCSTNHDYTIWMPENPRLGTSCDIFTNSRGKRASKGSRTCGFVDERGLYKSLKGACKLKLCGVLGLRLMDGTWAAIQTSDETKWCPPDQLVNLHDFRSDEIEHLVVEELVKKREECLDALESIMTTKSVSFRRLSHLRKLVPGFGKAYTIFNKTLMEADAHYKSVRTWNEIIPSKGCLRVGGRCHPHVNGVFFNGIILGPDGHVLIPEMQSSLLQQHMELLESSVIPLMHPLADPSTVFKDDDEAEDFVEVHLPDVHKQVSGVDLGLPSWGKYVLMSAGVLTALMLMIFLMTCCRRANRAESAQHSLGERGRKVSVTSQSGRVISSWESYKSGGETKL

SEQ ID NO: 31851 - protein, 524 aa, Artificial Sequence
  derived and/or modified protein sequence (wt) from glycoprotein__RABV__LC018523.1
MIPQALLFVPLLVFSLCFGKFPIYTIPDKLGPWSPIDIHHLSCPNNLVVEDEGCTNLSGFSYMELKVGYISAIKVNGFTCTGVVTEAETYTNFVGYVTTTFKRKHFRPTPDACRAAYNWKMAGDPRYEESLHNPYPDYHWLRTVKTTKESLVIISPSVADLDPYDKSLHSRVFPSGKCSGITVSSTYCSTNHDYTIWMPENPRLGTSCDIFTNSRGKRASKGSKTCGFVDERGLYKSLKGACKLKLCGVLGLRLMDGTWAAIQTSDETKWCPPDQLVNLHDFRSDEIEHLVVEELVKKREECLDALESIMTTKSVSFRRLSHLRKLVPGFGKAYTIFNKTLMEADAHYKSVRTWNEIIPSKGCLRVGGRCHPHVNGVFFNGIILGPDGHVLIPEMQSSLLQQHMELLESSVIPLMHPLADPSTVFKDDDEAEDFVEVHLPDVHKQVSGVDLGLPSWGKYVLMSAGILTALMLMIFLMTCCRRANRVESAQHSLGERGRKVSVTSQSGRVISSWESYKSGGETKL

SEQ ID NO: 31852 - protein, 524 aa, Artificial Sequence; identical to SEQ ID NO: 30571
  derived and/or modified protein sequence (wt) from glycoprotein__RABV__LC018524.1

SEQ ID NO: 31853 - protein, 524 aa, Artificial Sequence
  derived and/or modified protein sequence (wt) from glycoprotein__RABV__LC018525.1
MIPQALLFVPLLVFSLCFGKFPIYTIPDKLGPWSPIDIHHLSCPNNLVVEDEGCTNLSGFSYMELKVGYISAIKVNGFTCTGVVTEAETYTNFVGYVTTTFKRKHFRPTPDACRAAYNWKMAGDPRYEESLHNPYPDYHWLRTVKTTKESLVIISPSVADLDPYDKSLHSRVFPSGKCSGITVSSTYCSTNHDYTIWMPENPRLGTSCDIFTNSRGKRASKGSKTCGFVDERGLYKSLKGACKLKLCGVLGLRLMDGTWAAIQTSDETKWCPPDQLVNLHDFRSDEIEHFVVEELVKKREECLDALESIITTKSVSFRRLSHLRKLVPGFGKAYTIFNKTLMEADAHYKSVRTWNEIIPSKGCLRVGGRCHPHVNGVFFNGIILGPDGHVLIPEMQSSLLQQHMELLESSVIPLMHPLADPSTVFKDDDEAEDFVEVHLPDVHKQVSGVDLGLPSWGKYVLMSAGVLTALMLMIFLMTCCRRANRAESAQHSLGERGRKVSVTSQSGRVISSWESYKSGGETKL

SEQ ID NO: 31854 - protein, 524 aa, Artificial Sequence
  derived and/or modified protein sequence (wt) from glycoprotein__RABV__LC018526.1
MIPQALLFVPLMVFSLCFGKFPIYTIPDKLGPWSPIDIHHLSCPNNLVVEDEGCTNLSGFSYMELKVGYISAIKVNGFTCTGVVTEAETYTNFVGYVTTTFKRKHFRPTPDACRAAYNWKMAGDPRYEESLHNPYPDYHWLRTVKTTKESLVIISPSVADLDPYDKSLHSRVFPSGKCSGITVSSTYCSTNHDYTIWMPENPRLGTSCDIFTNSRGKRASKGSKTCGFVDERGLYKSLKGACKLKLCGVLGLRLMDGTWAAIQTSDETKWCPPDQLVNLHDFRSDEIEHLVVEELVKKREECLDALESIMTTKSVSFRRLSHLRKLVPGFGKAYTIFNKTLMEADAHYKSVRTWNEIIPSKGCLRVGGRCHPHVNGVFFNGIILGPDGHVLIPEMQSSLLQQHMELLESSVIPLMHPLADPSTVFKDDDEAEDFVEVHLPDVHKQVSGVDLGLPSWGKYVLMSAGVLTALMLMIFLMTCCRRTNRAESAQHSLGERGRKVSVTSQSGRVISSWESYKSGGETKL

SEQ ID NO: 31855 - protein, 524 aa, Artificial Sequence
  derived and/or modified protein sequence (wt) from glycoprotein__RABV__LC018527.1
MIPQALLFVPLLVFSLCFGKFPIYTIPDKLGPWSPIDIHHLSCPNNLIVEDEGCTNLSGFSYMELKVGYISAIKVNGFTCTGVVTEAETYTNFVGYVTTTFKRKHFRPTPDACRAAYNWKMAGDPRYEESLHNPYPDYHWLRTVKTTKESLVIISPSVADLDPYDKSLHSRVFPSGKCSGITVSSTYCSTNHDYTIWMPENPRLGTSCDIFTNSRGKRASKGSKTCGFVDERGLYKSLKGACKLKLCGVLGLRLMDGTWAAIQTSDETKWCPPDQLVNLHDFRSDEIEHLVVEELVKKREECLDALESIMTTKSVSFRRLSHLRKLVPGFGKAYTIFNKTLMEADAHYKSVRTWNEIIPSKGCLRVGGRCHPHVNGVFFNGIILGPDGHVLIPEMQSSLLQQHMELLESSVIPLMHPLADPSTVFKDDDEAEDFVEVHLPDVHKQVSGVDLGLPSWGKYVLMSAGVLTALMLMIFLMTCCRRTNRAESAQHSLGERGRKVSVTSQSGRVISSWESYKSGGETKL

SEQ ID NO: 31856 - protein, 524 aa, Artificial Sequence; identical to SEQ ID NO: 30595
  derived and/or modified protein sequence (wt) from glycoprotein__RABV__LC018529.1

SEQ ID NO: 31857 - protein, 524 aa, Artificial Sequence; identical to SEQ ID NO: 30595
  derived and/or modified protein sequence (wt) from glycoprotein__RABV__LC018531.1

SEQ ID NO: 31858 - protein, 524 aa, Artificial Sequence; identical to SEQ ID NO: 30571
  derived and/or modified protein sequence (wt) from glycoprotein__RABV__LC018532.1

SEQ ID NO: 31859 - protein, 524 aa, Artificial Sequence; identical to SEQ ID NO: 30595
  derived and/or modified protein sequence (wt) from glycoprotein__RABV__LC018534.1

SEQ ID NO: 31860 - protein, 524 aa, Artificial Sequence; identical to SEQ ID NO: 30595
  derived and/or modified protein sequence (wt) from glycoprotein__RABV__LC018535.1

SEQ ID NO: 31861 - protein, 524 aa, Artificial Sequence; identical to SEQ ID NO: 30571
  derived and/or modified protein sequence (wt) from glycoprotein__RABV__LC018536.1

SEQ ID NO: 31862 - protein, 524 aa, Artificial Sequence; identical to SEQ ID NO: 30595
  derived and/or modified protein sequence (wt) from glycoprotein__RABV__LC018539.1

SEQ ID NO: 31863 - protein, 524 aa, Artificial Sequence
  derived and/or modified protein sequence (wt) from glycoprotein__RABV__LC018540.1
MIPQALLFVPLLVFSLCFGKFPIYTIPDKLGPWSPIDIHHLSCPNNLVVEDEGCTNLSGFSYMELKVGYISAIKVNGFTCTGVVTEAETYTNFVGYVTTTFKRKHFRPTPDACRAAYNWKMAGDPRYEESLHNPYPDYHWLRTVKTTKESLVIISPSVADLDPYDRSLHSRVFPSGKCSGITVSSTYCSTNHDYTIWMPENPRLGTSCDIFTNSRGKRASKGSKTCGFVDERGLYKSLKGACKLKLCGVLGLRLMDGTWAAIQTSDETKWCPPDQLVNLHDFRSDEIEHLVVEELVKKREECLDALESIMTTKSVSFRRLSHLRKLVPGFGKAYTIFNKTLMEADAHYKSVRTWNEIIPSKGCLRVGGRCHPHVNGVFFNGIILGPDGHVLIPEMQSSLLQQHMELLESSVIPLMHPLADPSTVFKDDDEAEDFVEVHLPDVHKQVSGVDLGLPSWGKYVLMSAGVLTALMLMIFLMTCCRRANRVESAQHSLGERGRKVSVTSQSGRVISSWESYKSGGETKL

SEQ ID NO: 31864 - protein, 524 aa, Artificial Sequence
  derived and/or modified protein sequence (wt) from glycoprotein__RABV__LC018542.1
MIPQALLFVPLLVFSLCFGKFPIYTIPDKLGPWSPIDIHHLSCPNNLVVEDEGCTNLSGFSYMELKVGYISAIKVNGFTCTGVVTEAETYTNFVGYVTTTFKRKHFRPTPDACRAAYNWKMAGDPRYEESLHNPYPDYHWLRTVKTTKESLVIISPSVADLDPYDKSLHSRVFPSGKCSGITVSSTYCSTNHDYTIWMPENPRLGTSCDIFTSSRGKRASKGSKTCGFVDERGLYKSLKGACKLKLCGVLGLRLMDGTWAAIQTSDETKWCPPDQLVNLHDFRSDEIEHLVVEELVKKREECLDALESIMTTKSVSFRRLSHLRKLVPGFGKAYTIFNKTLMEADAHYKSVRTWNEIIPSKGCLRVGGRCHPHVNGVFFNGIILGPDGHVLIPEMQSSLLQQHMELLESSVIPLMHPLADPSTVFKDDDEAEDFVEVHLPDVHKQVSGVDLGLPSWGKYVLMSAGVLTALMLMIFLMTCCRRANRVESAQHSLGERGRKVSVTSQSGRVISSWESYKSGGETKL

SEQ ID NO: 31865 - protein, 524 aa, Artificial Sequence
  derived and/or modified protein sequence (wt) from glycoprotein__RABV__LC018544.1
MIPQALLFVPLLVFSLCFGKFPIYTIPDKLGPWSPIDIHHLSCPNNLVVEDEGCTNLSGFSYMELKVGYISAIKVNGFTCTGVVTEAETYTNFVGYVTTTFKRKHFRPTPDACRAAYNWKMAGDPRYEESLHNPYPDYHWLRTVKTTKESLVIISPSVADLDPYDKSLHSRVFPSGKCSGITVSSTYCSTNHDYTIWMPENPRLGTSCDIFTNSRGKRASKGSKTCGFVDERGLYKSLKGACKLKLCGVLGLRLMDGTWAAIQTSDETKWCPPDQLVNLHDFRSDEIEHLVVEELVKKREECLDALESIMTTKSVSFRRLSHLRKLVPGFGKAYTIFNKTLMEADAHYKSVRTWNEIIPSKGCLRVGGRCHPHVNGVFFNGIILGPDGHVLIPEMQSSLLQQHMELLESSVIPLMHPLADPSTVFKDDDEAEDFVEVHLPDVHKQVSGVDLGLPSWGKYVLMSAGVLTALMLMIFLMTCCRRANIVESAQHSLGERGRKVSVTSQSGRVISSWESYKSGGETKL

SEQ ID NO: 31866 - protein, 524 aa, Artificial Sequence
  derived and/or modified protein sequence (wt) from glycoprotein__RABV__LC018545.1
MIPQALLFVPLLVFSLCFGKFPIYTIPDKLGPWSPIDIHHLSCPNNLVVEDEGCTNLSGFSYMELKVGYISAIKVNGFTCTGVVTEAETYTNFVGYVTTTFKRKHFRPTPDACRAAYNWKMAGDPRYEESLHNPYPDYHWLRTVKTTKESLVIISPSVADLDPYDKSLHSRVFPSGKCSGITVSSTYCSTNHDYTIWMPENPRLGTSCDIFTNSRGKRASKGSKTCGFVDERGLYKSLKGACKLKLCGVLGLRLMDGTWAAIQTSDETKWCPPDQLVNLHDFRSDEIEHLVVEELVKKREECLDALESIMTTKSVSFRRLSHLRKLVPGFGKAYTIFNKTLMEADAHYKAVRTWNEIIPSKGCLRVGGRCHPHVNGVFFNGIILGPDGHVLIPEMQSSLLQQHMELLESSVIPLMHPLADPSTVFKDDDEAEDFVEVHLPDVHKQVSGVDLGLPSWGKYVLMSAGVLTALMLMIFLMTCCRRANRAESAQHSLGERGRKVSVTSQSGRVISSWESYKSGGETKL

SEQ ID NO: 31867 - protein, 524 aa, Artificial Sequence
  derived and/or modified protein sequence (wt) from glycoprotein__RABV__LC018546.1
MIPQALLFVPLLVSSLCFGKFPIYTIPDKLGPWSPIDIHHLSCPNNLVVEDEGCTNLSGFSYMELKVGYISAIKVNGFTCTGVVTEAETYTNFVGYVTTTFKRKHFRPTPDACRAAYNWKMAGDPRYEESLHNPYPDYHWLRTVKTTKESLVIISPSVADLDPYDKSLHSRVFPSGKCSGITVSSTYCSTNHDYTIWMPENPRLGTSCDIFTNSRGKRASKGSKTCGFVDERGLYKSLKGACKLKLCGVLGLRLMDGTWAAIQTSDETKWCPPDQLVNLHDFRSDEIEHLVVEELVKKREECLDALESIMTTKSVSFRRLSHLRKLVPGFGKAYTIFNKTLMEADAHYKSVRTWNEIIPSKGCLRVGGRCHPHVNGVFFNGIILGPDGHVLIPEMQSSLLQQHMELLESSVIPLMHPLADPSTVFKDDDEAEDFVEVHLPDVHKQVSGVDLGLPSWGKYVLTSAGVLTALMLMIFLMTCCRKANRAESAQHSLGERGRKVSVTSQSGRVISSWESYKSGGETKL

SEQ ID NO: 31868 - protein, 524 aa, Artificial Sequence
  derived and/or modified protein sequence (wt) from glycoprotein__RABV__LC018548.1
MIPQALLFVPLLVFSLCFGKFPIYTIPDKLGPWSPIDIHHLSCPNNLVVEDEGCTNLSGFSYMELKVGYISAIKVNGFTCTGVVTEAETYTNFVGYVTTTFKRKHFRPTPDACRAAYNWKMAGDPRYEESLHNPYPDYHWLRTVKTTKESLVIISPSVADLDPYDKSLHSRVFPSGKCSGITVSSTYCSTNHDYTIWMPENPRLGTSCDIFTNSRGKRASKGSKTCGFVDERGLYKSLKGACKLKLCGVPGLRLMDGTWAAIQTSDETKWCPPDQLVNLHDFRSDEIEHLVVEELVKKREECLDALESIMTTKSVSFRRLSHLRKLVPGFGKAYTIFNKTLMEADAHYKSVRTWNEIIPSKGCLRVGGRCHPHVNGVFFNGIILGPDGHVLIPEMQSSLLQQHMELLESSVIPLMHPLADPSTVFKDDDEAEDFVEVHLPDVHKQVSGVDLGLPSWGKYVLMSAGVLTALMLMIFLMTCCRRANRAESAQHSLGERGRKVSVTSQSGRVISSWESYKSGGETKL

SEQ ID NO: 31869 - protein, 524 aa, Artificial Sequence; identical to SEQ ID NO: 30571
  derived and/or modified protein sequence (wt) from glycoprotein__RABV__LC018549.1

SEQ ID NO: 31870 - protein, 524 aa, Artificial Sequence; identical to SEQ ID NO: 31837
  derived and/or modified protein sequence (wt) from glycoprotein__RABV__LC018552.1

SEQ ID NO: 31871 - protein, 524 aa, Artificial Sequence; identical to SEQ ID NO: 30572
  derived and/or modified protein sequence (wt) from glycoprotein__RABV__LC018553.1

SEQ ID NO: 31872 - protein, 524 aa, Artificial Sequence
  derived and/or modified protein sequence (wt) from glycoprotein__RABV__LC018554.1
MIPQALLFVPLLVFSLCFGKFPIYTIPDKLGPWSPIDIHHLSCPNNLVVEDEGCTNLSGFSYMELKVGYISAIKVNGFTCTGVVTEAETYTNFVGYVTTTFKRKHFRPTPDACRAAYNWKMAGDPRYEESLHNPYPDYHWLRTVKTTKESLVIISPSVADLDPYDKSLHSRVFPSGKCSGITVSSTYCSTNHDYTIWMPENPRLGTSCDIFTNSRGKRASKGSKTCGFVDERGLYKSLKGACKLKLCGVLGLRLMDGTWAAIQTSDETKWCPPDQLVNLHDFRSDEIEHLVVEELVKKREECLDALESIMTTKSVSFRRLSHLRKLVPGFGKAYTIFNKTLMEADAHYKSVRTWNEIIPSKGCLRVGGRCHPHVNGVFFNGIILGPDGHVLIPEMQSSLLQQHMELLESSVIPLMHPLADPSTVFKDDDEAEDFVEVHLPDVHKQVSGVDLGFPSWGKYVLMSAGVLTSLMLMIFLMTCCRRANRVESAQHSLGERGRKVSVTSQSGRVISSWESYKSGGETKL

SEQ ID NO: 31873 - protein, 524 aa, Artificial Sequence
  derived and/or modified protein sequence (wt) from glycoprotein__RABV__LC018555.1
MIPQALLFVPLLVFSLCFGKFPIYTIPDKLGPWSPIDIHHLSCPNNLVVEDEGCTNLSGFSYMELKVGYISAIKVNGFTCTGVVTEAETYTNFVGYVTTTFKRKHFRPTPDACRAAYNWKMAGDPRYEESLHNPYPDYHWLRTVKTTKESLVIISPSVADLDPYDKSLHSRVFPSGRCSGITVSSTYCSTNHDYTIWMPENPRLGTSCDIFTNSRGKRASKGSKTCGFVDERGLYKSLKGACKLKLCGVLGLRLMDGTWAAIQTSDETKWCPPDQLVNLHDFRSDEIEHLVVEELVKKREECLDALESIMTTKSVSFRRLSHLRKLVPGFGKAYTIFNKTLMEADAHYKSVRTWNEIIPSKGCLRVGGRCHPHVNGVFFNGIILGPDGHVLIPEMQSSLLQQHMELLESSVIPLMHPLADPSTVFKDDDEAEDFVEVHLPDVHKQVSGVDLGLPSWGKYVLMSAGVLTALMLMIFLMTCCRRANRAESAQHSLGERGRKVSVTSQSGRVISSWESYKSGGETKL

SEQ ID NO: 31874 - protein, 524 aa, Artificial Sequence; identical to SEQ ID NO: 30572
  derived and/or modified protein sequence (wt) from glycoprotein__RABV__LC018556.1

SEQ ID NO: 31875 - protein, 524 aa, Artificial Sequence
  derived and/or modified protein sequence (wt) from glycoprotein__RABV__LC018557.1
MIPQALLFVPLLVFSLCFGKFPIYTIPDKLGPWSPIDIHHLSCPNNLVVEDEGCTNLSGFSYMELKVGYISAIKVNGFTCTGVVTEAETYTNFVGYVTTTFKRKHFRPTPDACRAAYNWKMAGDPRYEESLHNPYPDYHWLRTVKTTKESLVIISPSVADLDPYDKSLHSRVFPSGKCSGITVSSTYCSTNHDYTIWMPENPRLGTSCDIFTNSRGKRASKGSKTCGFVDERGLYKSLKGACKLKLCGVLGLRLMDGTWAAIQTSDETKWCPPDQLVNLHDFRSDEIEHLVVEELVKKREECLDALESIMTTKSVSFRRLSHLRKLVPGFGKAYTIFNKTLMEADAHYKSVRTWNEIIPSKGCLRVGGRCHPHVNGVFFNGIILGPDGHVLIPEMQSSLLQQHMELLESSVIPLMHPLADPSTVFKDDDEAEDFVEVHLPDVHKQVSGVDLGLPSWGKYVLMSACVLTALMLMIFLMTCCRRANRAESAQHSLGERGRKVSVTSQSGRVISSWESYKSGGETKL

SEQ ID NO: 31876 - protein, 524 aa, Artificial Sequence; identical to SEQ ID NO: 30595
  derived and/or modified protein sequence (wt) from glycoprotein__RABV__LC018558.1

SEQ ID NO: 31877 - protein, 524 aa, Artificial Sequence; identical to SEQ ID NO: 30595
  derived and/or modified protein sequence (wt) from glycoprotein__RABV__LC018561.1

SEQ ID NO: 31878 - protein, 524 aa, Artificial Sequence; identical to SEQ ID NO: 30595
  derived and/or modified protein sequence (wt) from glycoprotein__RABV__LC018562.1

SEQ ID NO: 31879 - protein, 524 aa, Artificial Sequence; identical to SEQ ID NO: 30595
  derived and/or modified protein sequence (wt) from glycoprotein__RABV__LC018564.1

SEQ ID NO: 31880 - protein, 524 aa, Artificial Sequence
  derived and/or modified protein sequence (wt) from glycoprotein__RABV__LC018565.1
MIPQALLFVPLLVFSLCFGKFPIYTIPDKLGPWSPIDIHHLSCPNNLVVEDEGCTNLSGFSYMELKVGYISAIKVNGFTCTGVVTEAETYTNFVGYVTTTFKRKHFRPTPDACRAAYNWKMAGDPRYEESLHNPYPDYHWLRTVKTTKESLVIISPSVADLDPYDKSLHSRVFPSGKCSGITVSSTYCSTNHDYTIWMPENPRLGTSCDIFTNSRGKRASKGSKTCGFVDERGLYKSLKGACKLKLCGVLGLRLMDGTWAAIQTSDETKWCPPDQLVNLHDFRSDEIEHLVVEELVKKREECLDALESIMTTKSVSFRRLSHLRKLVPGFGKAYTIFNKTLMEADAHYKSVRTWNEIIPSKGCLRVGGRCHPHVNGVFFNGIILGPDGHVLIPEMQSSLLQQHMELLESSVIPLMHPLADPSTVFKDDDEAEDFVEVHLPDVHKQVSGVDLGLPSWGNYVLMSAGVLTALMLMIFLMTCCRRTNRAESAQHSLGERGRKVSVTSQSGRVISSWESYKSGGETKL

SEQ ID NO: 31881 - protein, 524 aa, Artificial Sequence; identical to SEQ ID NO: 30595
  derived and/or modified protein sequence (wt) from glycoprotein__RABV__LC018567.1

SEQ ID NO: 31882 - protein, 524 aa, Artificial Sequence
  derived and/or modified protein sequence (wt) from glycoprotein__RABV__LC018569.1
MIPQALLFVPLLVFSLCFGKFPIYTIPDKLGPWSPIDIHHLSCPNNLVVEDEGCTNLSGFSYMELKVGYISAIKVNGFTCTGVVTEAETYTNFVGYVTTTFKRKHFRPTPDACRAAYNWKMAGDPRYEESLHNPYPDYHWLRTVKTTKESLVIISPSVADLDPYDKSLHSRVFPSGKCSGITVSSTYCSTNHDYTIWMPENPRLGTSCDIFTNSRGKRASKGSKTCGFVDERGLYKSLKGACKLKLCGVLGLRLMDGTWAAIQTSDETKWCPPDQLVNLHDFHSDEIEHLVVEELVKKREECLDALESIMTTKSVSFRRLSHLRKLVPGFGKAYTIFNKTLMEADAHYKSVRTWNEIIPSKGCLRVGGRCHPHVNGVFFNGIILGPDGHVLIPEMQSSLLQQHMELLESSVIPLMHPLADPSTVFKDDDEAEDFVEVHLPDVHKQVSGVDLGLPSWGKYVLMSAGVLTALMLMIFLMTCCRRTNRAESAQHSLGERGRKVSVTSQSGRVISSWESYKSGGETKL

SEQ ID NO: 31883 - protein, 524 aa, Artificial Sequence; identical to SEQ ID NO: 30595
  derived and/or modified protein sequence (wt) from glycoprotein__RABV__LC018570.1

SEQ ID NO: 31884 - protein, 524 aa, Artificial Sequence
  derived and/or modified protein sequence (wt) from glycoprotein__RABV__LC018571.1
MIPQALLFVPLLVFSLCFGKFPIYTIPDKLGPWSPIDIHHLSCPNNLVVEDEGCTNLSGFSYMELKVGYISAIKVNGFTCTGVVTEAETYTNFVGYVTTTFKRKHFRPTPDACRAAYNWKMAGDPRYEESLHNPYPDYHWLRTVKTTKESLVIISPSVADLDPYDKSLHSRVFSSGKCSGITVSSTYCSTNHDYTIWMPENPRLGTSCDIFTNSRGKRASKGSKTCGFVDERGLYKSLKGACKLKLCGVLGLRLMDGTWAAIQTSDETKWCPPDQLVNLHDFRSDEIEHLVVEELVKKREECLDALESIMTTKSVSFRRLSHLRKLVPGFGKAYTIFNKTLMEADAHYKSVRTWNEIIPSKGCLRVGGRCHPHVNGVFFNGIILGPDGHVLIPEMQSSLLQQHMELLESSVIPLMHPLADPSTVFKDDDEAEDFVEVHLPDVHKQVSGVDLGLPSWGKYVLMSAGVLTALMLMIFLMTCCRRTNRAESAQHSLGERGRKVSVTSQSGRVISSWESYKSGGETKL

SEQ ID NO: 31885 - protein, 524 aa, Artificial Sequence; identical to SEQ ID NO: 30595
  derived and/or modified protein sequence (wt) from glycoprotein__RABV__LC018572.1

SEQ ID NO: 31886 - protein, 524 aa, Artificial Sequence; identical to SEQ ID NO: 30595
  derived and/or modified protein sequence (wt) from glycoprotein__RABV__LC018573.1

SEQ ID NO: 31887 - protein, 524 aa, Artificial Sequence; identical to SEQ ID NO: 30595
  derived and/or modified protein sequence (wt) from glycoprotein__RABV__LC018581.1

SEQ ID NO: 31888 - protein, 524 aa, Artificial Sequence
  derived and/or modified protein sequence (wt) from glycoprotein__RABV__LC018584.1
MIPQALLFVPLLVFSLCFGKFPIYTIPDKLGPWSPIDIHHLSCPNNLVVEDEGCTNLSGFSYLELKVGYISAIKVNGFTCTGVVTEAETYTNFVGYVTTTFKRKHFRPMPDACRAAYNWKMAGDPRYEESLHNPYPDYHWLRTVKTTKESLVIISPSVADLDPYNKSLHSRVFPSGKCSGITVSSTYCSTNHDYTIWMPENPRLGTSCDIFTNSRGKRASKGSKTCGFVDERGLYKSLKGACKLKLCGVLGLRLMDGTWAAIQTSDETKWCPPDQLVNLHDFRSDEIEHLVVEELVKKREECLDALESIMTTKSVSFRRLSHLRKLVPGFGKAYTIFNKTLMEADAHYKSVRTWNEILPSKGCLRVGGRCHPHVNGVFFNGIILGPDGHVLIPEMQSSLLQQHMELLESSVIPLMHPLADPSTVFKDDDEAEDFVEVHLPDVHKQVSGVDLGLPSWGKYVLMSAGVLTALMLMIFLMTCCRRPNRAESAQHSLGEREKKVSVTSQSGRVISSWESYKSGGETKL

SEQ ID NO: 31889 - protein, 524 aa, Artificial Sequence
  derived and/or modified protein sequence (wt) from glycoprotein__RABV__LC018585.1
MIPQALLFVPLLVFSLCFGKFPIYTIPDKLGPWSPIDIHHLSCPNNLVVEDEGCTNLSGFSYLELKVGYISAIKVNGFTCTGVVTEAETYTNFVGYVTTTFKRKHFRPMPDACRAAYNWKMAGDPRYEESLHNPYPDYHWLRTVKTTKESLVIISPSVADLDPYDKSLHSRVFPSGKCSGITVSSTYCSTNHDYTIWMPENPRLGTSCDIFTNSRGKRASKGSKTCGFVDERGLYKSLKGACKLKLCGVLGLRLMDGTWAAIQTSDETKWCPPDQLVNLHDFRSDEIEHLVVEELVKKREECLDALESIMTTKSVSFRRLSHLRKLVPGFGKAYTIFNKTLMEADAHYKSVRTWNEIIPSKGCLRVGGRCHPHVNGVFFNGIILGPDGHVLIPEMQSSLLQQHMELLESSVIPLMHPLADPSTVFKDDDEAEDFVEVHLPDVHKQVSGVDLGLPSWGKYVLMSAGVLTALMLMIFLMTCCRRPNRAESAQHSLGEREKKVSVTSQSGRVISSWESYKSGGETKL

SEQ ID NO: 31890 - protein, 524 aa, Artificial Sequence; identical to SEQ ID NO: 30572
  derived and/or modified protein sequence (wt) from glycoprotein__RABV__LC018586.1

SEQ ID NO: 31891 - protein, 524 aa, Artificial Sequence
  derived and/or modified protein sequence (wt) from glycoprotein__RABV__LC018587.1
MIPQALLFVPLLVFSLCFGKFPIYTIPDKLGPWSPIDIHHLSCPNNLVVEDEGCTNLSGFSYMELKVGYISAIKVNGFTCTGVVTEAETYTNFVGYVTTTFKRKHFRPTPDACRAAYNWKMAGDPRYEESLHNPYPDYHWLRTVKTTKESLVIISPSVADLDPYDKSLHSRVFPSGKCSGITVSSTYCSTNHDYTIWMPENPRLGTSCDIFTNSRGKRASKGSKTCGFVDERGLYKSLKGACKLKLCGVLGLRLMDGTWVAIQTSDETKWCPPDQLVNLHDFRSDEIEHLVVEELVKKREECLDALESIMTTKSVSFRRLSHLRKLVPGFGKAYTIFNKTLMEADAHYKSVRTWNEIIPSKGCLRVGGRCHPHVNGVFFNGIILGPDGHVLIPEMQSSLLQQHMELLESSVIPLMHPLADPSTVFKDDDEAEDFVEVHLPDVHKQVSGVDLGLPSWGKYVLMSAGVLTALMLMIFLMTCCRRANRAESAQHSLGERGRKVSVTSQSGRVISSWESYKSGGETKL

SEQ ID NO: 31892 - protein, 524 aa, Artificial Sequence; identical to SEQ ID NO: 30572
  derived and/or modified protein sequence (wt) from glycoprotein__RABV__LC018588.1

SEQ ID NO: 31893 - protein, 524 aa, Artificial Sequence
  derived and/or modified protein sequence (wt) from glycoprotein__RABV__LC018589.1
MIPQALLFVPLLVFSLCFGKFPIYTIPDKLGPWSPIDIHHLSCPNNLVVEDEGCTNLSGFSYMELKVGYISAIKVNGFTCTGVVTEAETYTNFVGYVTTTFKRKHFRPTPDACRAAYNWKMAGDPRYEESLHNPYPDYHWLRTVKTTKESLVIISPSVADLDPYDKSLHSRVFPSGKCSGITVSSTYCSTNHDYTIWMPENPRLGTSCDIFTNSRGKRASKGSKTCGFVDERGLYKSLKGACKLKLCGVLGLRLMDGTWAAIQTSDETKWCPPDQLVNLHDFRSDEIEHLVVEELVKKREECLDALESIMTTKSVSFRRLSHLRKLVPGFGKAYTIFNKTLMEADAHYKSVRTWNEIIPSKGCLRVGGRCHPHVNGVFFNGIILGPDGHVLIPEMQSSLLQQHMELLESSVIPLMHPLADPSTVFKDDDEAEDFVEVHLPDVHKQVSGVDLGLPSWGKYVLMSAGVLTALMLMIFLMTCCRRANRAESARHSLGERGRKVSVTSQSGRVISSWESYKSGGETKL

SEQ ID NO: 31894 - protein, 524 aa, Artificial Sequence
  derived and/or modified protein sequence (wt) from glycoprotein__RABV__LC018590.1
MIPQALLFVPLLVFSLCFGKFPIYTIPDKLGPWSPIDIHHLSCPNNLVVEDEGCTNLSGFSYMELKVGYISAIKVNGFTCTGVVTEAETYTNFVGYVTTTFKRKHFRPTPDACRAAYNWKMAGDPRYEESLHNPYPDYHWLRTVKTTKESLVIISPSVADLDPYDKSLHSRVFPSGKCSGITVSSTYCSTNHDYTIWMPENPRLGTSCDIFINSRGKRASKGSKTCGFVDERGLYKSLKGACKLKLCGVPGLRLMDGTWAAIQTSDETKWCPPDQLVNLHDFRSDEIEHLVVEELVKKREECLDALESIMTTKSVSFRRLSHLRKLVPGFGKAYTIFNKTLMEADAHYKSVRTWNEIIPSKGCLRVGGRCHPHVNGVFFNGIILGPDGHVLIPEMQSSLLQQHMELLESSVIPLMHPLADPSTVFKDDDEAEDFVEVHLPDVHKQVSGVDLGLPSWGKYVLMSAGVLTALMLMIFLMTCCRRANRAESAQHSLGERGRKVSVTSQSGRVISSWESYKSGGETKL

SEQ ID NO: 31895 - protein, 524 aa, Artificial Sequence
  derived and/or modified protein sequence (wt) from glycoprotein__RABV__LC071936.1
MIPQALLLVPLLVFPLCFGKFPIYTIPDKLGPWSPIDIHHLSCPNNLVVEDEGCTNLSGFSYMELKVGYISAIKVNGFTCTGVVTEAETYTNFVGYVTTTFKRKHFRPTPDACRAAYNWKMAGDPRYEESLHNPYPDYHWLRTVKATKESLVIISPSVSDLDPYDKSLHSRVFPSGKCSGITVSSTYCPTSHDYTIWMPENPRLGTSCDIFINSRGKRASKGSKTCGFVDERGLYKSLKGACKLKLCGVLGLRLMDGTWAAIQTSDEAKWCPPDQLVNIHDFHSDEIEHLVVEELVKKREECLDALESIMTTKSVSFRRLSHLRKLVPGFGKAYTIFNKTLMEADAHYKSVRTWNEIIPSKGCLRVGGRCHPHVNGVFFNGIILGPDGHVLIPEMQSSLLQQHMELLESSVIPLMHPLADPSTVFKDGDEAEDFVEVHLPDVHKQVSGVDLGLPSWGKYVLMSVGTLIALMVMIFLMTCCRKANGVESMRHRLGETGRKVSVTSQSGRVISSWESYKSGGETKL

SEQ ID NO: 31896 - protein, 524 aa, Artificial Sequence
  derived and/or modified protein sequence (wt) from glycoprotein__RABV__LC071937.1
MIPQALLFVPLLVFSLCFGKFPIYTIPDKLGPWSPIDIHHLSCPNNLVVEDEGCTNLSGFSYMELKVGYISAIKVNGFTCTGVVTEAETYTNFVGYVTTTFKRKHFRPTPDACRAAYNWKMAGDPRYEESLHNPYPDYHWLRTVKTTKESLVIISPSVSDLDPYDKSLHSRVFPSGKCSGITVSSTYCPTNHDYTIWMPENPRLGTSCDIFTTSRGKRASKGGKTCGFVDERGLYKSLKGACKLKLCGVLGLRLMDGTWAAIQTSDEAKWCPPDQLVNIHDFRSDEIEHLVVEELVKKREECLDALESIMTTKSVSFRRLSHLRKLVPGFGKAYTIFNKTLMEADAHYKSVRTWNEIIPSKGCLRVGGRCHPHVNGVFFNGIILGPDGHVLIPEMQSSLLQQHMELLESSVIPLMHPLADPSTVFKDDDEAEDFVEVHLPDVHKQVSGVDLGLPSWGKYVLMSVGAMIALMLMIFLTTCCRKANGAESTPHRLGETGRKVSVTSQSGRVISSWESYKSGGETKL

SEQ ID NO: 31897 - protein, 524 aa, Artificial Sequence; identical to SEQ ID NO: 31896
  derived and/or modified protein sequence (wt) from glycoprotein__RABV__LC071938.1

SEQ ID NO: 31898 - protein, 524 aa, Artificial Sequence; identical to SEQ ID NO: 31896
  derived and/or modified protein sequence (wt) from glycoprotein__RABV__LC071939.1

SEQ ID NO: 31899 - protein, 524 aa, Artificial Sequence
  derived and/or modified protein sequence (wt) from glycoprotein__RABV__LC071940.1
MIPQALLFVPLLVFSLCFGKFSIYTIPDKLGPWSPIDIHHLSCPNNLVVEDEGCTNLSGFSYMELKVGYISAIKVNGFTCTGVVTEAETYTNFVGYVTTTFKRKHFRPTPDACRAAYNWKMAGDPRYEESLHNPYPDYHWLRTVKTTKESLVIISPSVSDLDPYDKSLHSRVFPSGKCSGITVSSTYCPTNHDYTIWMPENPRLGTSCDIFTTSRGKRASKGGKTCGFVDERGLYKSLKGACKLKLCGVLGLRLMDGTWAAIQTSDEAKWCPPDQLVNIHDFRSDEIEHLVVEELVKKREECLDALESIMTTKSVSFRRLSHLRKLVPGFGKAYTIFNKTLMEADAHYKSVRTWNEIIPSKGCLRVGGRCHPHVNGVFFNGIILGPDGHVLIPEMQSSLLQQHMELLESSVIPLMHPLADPSTVFKDDDEAEDFVEVHLPDVHKQVSGVDLGLPSWGKYVLMSVGAMIALMLMIFLTTCCRKANGAESTQHRLGETGRKVSVTSQSGRVISSRESYKSGGETKL

SEQ ID NO: 31900 - protein, 524 aa, Artificial Sequence
  derived and/or modified protein sequence (wt) from glycoprotein__RABV__LC071941.1
MIPQALLFVPLLVFSLCFGKFPIYTIPDKLGPWSPIDIHHLSCPNNLVVEDEGCTNLSGFSYMELKVGYISAIKVNGFTCTGVVTEAETYTNFVGYVTTTFKRKHFRPTPDACRAAYNWKMAGDPRYEESLHNPYPDYHWLRTVKTTKESLVIISPSVSDLDLYDKSLHSRVFPSGKCSGITVSSTYCPTNHDYTIWMPENPRLGTSCDIFTTSRGKRASKGGKTCGFVDERGLYKSLKGACKLKLCGVLGLRLMDGTWAAIQTSDEAKWCPPDQLVNIHDFRSDEIEHLVVEELVKKREECLDALESIMTTKSVSFRRLSHLRKLVPGFGKAYTIFNKTLMEADAHYKSVRTWNEIIPSKGCLRVGGRCHPHVNGVFFNGIILGPDGHVLIPEMQSSLLQQHMELLESSVIPLMHPLADPSTVFKDDDEAEDFVEVHLPDVHKQVSGVDLGLPSWGKYVLMSVGAMIALMLMIFLTTCCRKANGAESTQHRLGETGRKVSVTSQSGRVISSWESYKSGGETKL

SEQ ID NO: 31901 - protein, 524 aa, Artificial Sequence
  derived and/or modified protein sequence (wt) from glycoprotein__RABV__LC071943.1
MIPQALLFVPLLVFSLCFGKFPIYTIPDKLGPWSPIDIHHLSCPNNLVVEDEGCTNLSGFSYMELKVGYISAIKVNGFTCTGVVTEAETYTNFVGYVTTTFKRKHFRPTPDACGAAYNWKMAGDPRYEESLHNPYPDYHWLRTVKTTKESLVIISPSVSDLDPYDKSLHSRVFPSGKCSGITVSSTYCPTNHDYTIWMPENPRLGTSCDIFTTSRGKRASKGGKTCGFVDERGLYKSLKGACKLKLCGVLGLRLMDGTWAAIQTSDEAKWCPPDQLVNIHDFRSDEIEHLVVEELVKKREECLDALESIMTTKSVSFRRLSHLRKLVPGFGKAYTIFNKTLMEADAHYKSVHTWNEIIPSKGCLRVGGRCHPHVNGVFFNGIILGPDGHVLIPEMQSSLLQQHMELLESSVIPLMHPLADPSTVFKDDDEAEDFVEVHLPDVHKQVSGVDLGLPSWGKYVLMSVGAMIALMLMIFLTTCCRKANGAESTQHRLGETGRKVSVTSQSGRVISSWESYKSGGETKL

SEQ ID NO: 31902 - protein, 524 aa, Artificial Sequence
  derived and/or modified protein sequence (wt) from glycoprotein__RABV__LC071944.1
MIPQALLFVPLLVFSLCFGKFPIYTIPDKLGPWSPIDIHHLSCPNNLVVEDEGCTNLSGFSYMELKVGYISAIKVNGFTCTGVVTEAETYTNFVGYVTTTFKRKHFRPTPDACRAAYNWKMAGDPRYEVSLHNPYPDYHWLRTVKTTKESLVIISPSVSDLDPYDKSLHSRVFPSGKCSGITVSSTYCPTNHDYTIWMPENPRLGTSCDIFTTSRGKRASKGGKTCGFVDERGLYKSLKGACKLKLCGVLGLRLMDGTWAAIQTSDEAKWCPPDQLVNIHDFRSDEIEHLVVEELVKKREECLDALESIMTTKSVSFRRLSHLRKLVPGFGKAYTIFNKTLMEADAHYKSVRTWNEIIPSKGCLRVGGRCHPHVNGVFFNGIILGPDGHVLIPEMQSSLLQQHMELLESSVIPLMHPLADPSTVFKDDDEAEDFVEVHLPDVHKQVSGVDLGLPSWGKYVLMSVGAMIALMLMIFLTTCCRKANGAESTQHRLGETGRKVSVTSQSGRVISSWESYKSGGETKL

SEQ ID NO: 31903 - protein, 524 aa, Artificial Sequence
  derived and/or modified protein sequence (wt) from glycoprotein__RABV__LC071945.1
MIPQALLFVSLLVFSLCFGKFPIYTIPDKLGPWSPIDIHHLSCPNNLVVEDEGCTNLSGFSYMELKVGYISAIKVNGFTCTGVVTEAETYTNFVGYVTTTFKRKHFRPTPDACRAAYNWKMAGDPRYEESLHNPYPDYHWLRTVKTTKESLVIISPSVSDLDPYDKSLHSRVLPGGKCSGITVSSTYCPTNHDYTIWMPENPRLGTSCDIFTTSRGKRASKGGKTCGFVDERGLYKSLKGACKLKLCGVLGLRLMDGTWAAIQTSDEAKWCPPDQLVNIHDFRSDEIEHLVVEELVKKREECLDALESIMTTKSVSFRRLSHLRKLVPGFGKAYTIFNKTLMEADAHYKSVRTWNEIIPSKGCLRVGGRCHPHVNGVFFNGIILGPDGHVLIPEMQSSLLQQHMELLESSVIPLMHPLADPSTVFKDDDEAEDFVEVHLPDVHKQVSGVDLGLPSWGKYVLMSVGAMIALMLMIFLTTCCRKANGAESTQHRLGETGRKVSVTSQSGRVISSWESYKSGGETKL

SEQ ID NO: 31904 - protein, 524 aa, Artificial Sequence
  derived and/or modified protein sequence (wt) from glycoprotein__RABV__LC071946.1
MIPQALLFVPLLVFSLCFGKFPIYTIPDKLGPWSPIDIHHLSCPNNLVVEDEGCTNLSGFSYMELKVGYISAIKVNGFTCTGVVTEAETYTNFVGYVTTTFKRKHFRPTPDACRAAYNWKMAGDPRYEESLHNPYPDYHWLRTVKTTKESLVIISPSVSDLDPYDKSLHSRVFPGGKCSGITVSSTYCPTNHDYTIWMPENPRLGTSCDIFTTSRGKRASKGGKTCGFVDERGLYKSLKGACKLKLCGVLGLRLMDGTWAAIQTSDEAKWCPPDQLVNIHDFRSDEIEHLVVEELVKKREECLDALESIMTTKSVSFRRLSHLRKLVPGFGKAYTIFNKTLMEADAHYKSVRTWNEIIPSKGCLRVGGRCHPHVNGVFFNGIILGPDGHVLIPEMQSSLLQQHMELLESSVIPLMHPLADPSTVFKDDDEAEDFVEVHLPDVHKQVSGVDLGLPSWGKHVLMSVGAMIALMLMIFLTTCCRKANGAESTQHRLGETGRKVSVTSQSGRVISSWESYKSGGETKL

SEQ ID NO: 31905 - protein, 524 aa, Artificial Sequence
  derived and/or modified protein sequence (wt) from glycoprotein__RABV__LC071947.1
MIPQALLFVPLLVFSLCFGKFPIYTIPDKLGPWSPIDIHHLSCPNNLVVEDEGCTNLSGFSYMELKVGYISAIKVNGFTCTGVVTEAETYTNFVGYVTTTFKRKHFRPTPDACRAAYNWKMAGDPRYEESLHNPYPDYHWLRTVKTTKESLVIISPSVSDLDPYDKSLHSRVFPSGKCSGITVSSTYCPTNHDYTIWMPENPRLGTSCDIFTTSRGKRASKGGKTCGFVDERGLYKSLKGACKLKLCGVLGLRLMDGTWAAIQTSDEAKWCPPDQLVNIHDFRSDEIEHLVVEELVKKREECLDALESIMTTKSVSFRRLSHLRKLVPGFGKAYTIFNKTLMEADAHYKSVRTWNEIIPSKGCLRVGGRCHPHVNGVFFNGIILGPDGHVLIPEMQSSLLQQHMELLESSVIPLMHPLADPSTVFKDDDEAEDFVEVHLPDVHKQVSGVDLGLPSWGKYVLMSVGAMIALMLMIFLTTCCRKANGAESTQHRLGETGRKVSVTSQSGRVISSWESYKSGGETKL

SEQ ID NO: 31906 - protein, 524 aa, Artificial Sequence
  derived and/or modified protein sequence (wt) from glycoprotein__RABV__LC071948.1
MIPQALLFVPLLVFSLCFGKFPIYTIPDKLGPWSPIDIHHLSCPNNLVVEDEGCTNLSGFSYMELKVGYISAIKVNGFTCTGVVTEAETYTNFVGYVTTTFKRKHFRPTPDACRAAYNWKMAGDPRYEESLHNPYPDYHWLRTVKTTKESLVIISPSVSDLDPYDKSLHSRVFPSGKCSGITVSSTYCPTNHDYTIWMPENPRLGTSCDIFTTSRGKRASKGGKTCGFVDERGLYKSLKGACKLKLCGVLGLRLMDGTWAAIQTSDEAKWCPPDQLVNIHDFRSDEIEHLVVEELVKKREECLDALESIMTTKSVSFRRLSHLRKLVPGFGKAYTIFNKTLMEADAHYKSVRTWNEIIPSKGCLRVGGRCHPHVNGVFFNGIILGPDGHVLIPEMQSSLLQQHMELLESSVIPLMHPLADPSTVFKDDDEAEDFVEVHLPDVHKQVSGVDLGLPSWGKYVLMSVGAMIALMLMIFLMTCCRKANGAESTQHRLGETGRKVSVTSQSGRVISSWESYKSGGETKL

SEQ ID NO: 31907 - protein, 524 aa, Artificial Sequence; identical to SEQ ID NO: 31905
  derived and/or modified protein sequence (wt) from glycoprotein__RABV__LC071949.1

SEQ ID NO: 31908 - protein, 524 aa, Artificial Sequence
  derived and/or modified protein sequence (wt) from glycoprotein__RABV__LC071950.1
MIPQALLFVPLLVFSLCFGKFPIYTIPDKLGPWSPIDIHHLSCPNNLVVEDEGCTSLSGFSYMELKVGYISAIKVNGFTCTGVVTEAETYTNFVGYVTTTFKRKHFRPTPDACRAAYNWKMAGDPRYEESLHNPYPDYHWLRTVKTTKESLVIISPSVSDLDPYDKSLHSRVFPSGKCSGITVSSTYCPTNHDYTIWMPEKPRLGTSCDIFTTSRGKRASKGGKTCGFVDERGLYKSLKGACKLKLCGVLGLRLMDGTWAAIQTSDEAKWCPPDQLVNIHDFRSDEIEHLVVEELVKKREECLDALESIMTTKSVSFRRLSHLRKLVPGFGKAYTIFNKTLMEADAHYKSVRTWNEIIPSKGCLRVGGRCHPHVNGVFFNGIILGPDGHVLIPEMQSSLLQQHMELLESSVIPLMHPLADPSTVFKDDDEAEDFVEVHLPDVHKQVSGVDLGLPSWGKYVLMSVGAMIALMLMIFLTTCCRKANGAESTQHRLGETGRKVSVTSQSGRVISSWESYKSGGETKL

SEQ ID NO: 31909 - protein, 524 aa, Artificial Sequence
  derived and/or modified protein sequence (wt) from glycoprotein__RABV__LC071951.1
MIPQALLFVPLLVFSLCFGKFPIYTIPDKLGPWSPIDIHHLSCPNNLVVEDEGCTNLSGFSYMELKVGYISAIKVNGFTCTGVVTEAETYTNFVGYVTTTFKRKHFRPTPDACRAAYNWKMAGDPRYEESLHNPYPDYHWLRTVKTTKESLVIISPSVSDLDPYDKSLHSRVFPSGKCSGITVSSTYCPTNHDYTIWMPENPRLGTSCDIFTTSRGKRASKGGKTCGFVDERGLYKSLKGACKLKLCGVLGLRLMDGTWAAIQTSDEAKWCPPDQLVNIHDFRSDEIEHLVVEELVKKREECLDALESIMTTKSVSFRRLSHLRRLVPGFGKAYTIFNKTLMEADAHYKSVRTWNEIIPSKGCLRVGGRCHPHVNGVFFNGIILGPDGHVLIPEMQSSLLQQHMELLESSVIPLMHPLADPSTVFKDDDEAEDFVEVHLPDVHKQVSGVDLGLPSWGKYVLMSVGAMIALMLMIFLTTCCRKANGAESTQHRLGETGRKVSVTSQSGRVISSWESYKSGGETKL

SEQ ID NO: 31910 - protein, 524 aa, Artificial Sequence; identical to SEQ ID NO: 31905
  derived and/or modified protein sequence (wt) from glycoprotein__RABV__LC071952.1

SEQ ID NO: 31911 - protein, 524 aa, Artificial Sequence
  derived and/or modified protein sequence (wt) from glycoprotein__RABV__LC071953.1
MIPQALLFVPLLVFSLCFGKFPIYTIPDKLGPWSPIDIHHLSCPNNLVVEDEGCTNLSGFSYMELKVGYISAIKVNGFTCTGVVTEAETYTNFVGYVTTTFKRKHFRPTPDACRAAYNWKMAGDPRYEESLHNPYPDYHWLRTVKTTKESLVIISPSVSDLDPYDKSLHSRVFPSGKCSGITVSSTYCPTNHDYTIWMPENPRLGTSCDIFTTSRGKRASKGGKTCGFVDERGLYKSLKGACKLKLCGVLGLRLMDGTWAAIQTSDEAKWCPPDQLVNIHDFRSDEIEHLVVEELVKKREECLDALESIMTTKSVSFRRLSHLRKLVPGFGKAYTIFNKTLMEADAHYKSVRTWNEIIPSKGCLRVGGRCHPHVNGVFFNGIILGPDGHVLIPEMQSSLLQQHMELLESSVIPLMHPLADPSTVFKDDDEAEDFVEVHLPDVHKQVSGVDLGLPSWGKYVLMSVGAMIALTLMIFLTTCCRKANGAESTQHRLGETGRKVSVTSQSGRVISSWESYKSGGETKL

SEQ ID NO: 31912 - protein, 524 aa, Artificial Sequence
  derived and/or modified protein sequence (wt) from glycoprotein__RABV__LC071954.1
MIPQALLFVPLLVFSLCFGKFPIYTIPDKLGPWSPIDIHHLSCPNNLVVEDEGCTNLSGFSYMELKVGYISAIKVNGFTCTGVVAEAETYTNFVGYVTTTFKRKHFRPTPDACRAAYNWKMAGDPRYEESLHNPYPDYHWLRTVKTTKESLVIISPSVSDLDPYDKSLHSRVFPSGKCSGITVSSTYCPTNHDYTIWMPENPRLGTSCDIFTTSRGKRASKGGKTCGFVDERGLYKSLKGACKLKLCGVLGLRLMDGTWAAIQTSDEAKWCPPDQLVNIHDFRSDEIEHLVVEELVKKREECLDALESIMTTKSVSFRRLSHLRKFVPGFGKAYTIFNKTLMEADAHYKSVRTWNEIIPSKGCLRVGGRCHPHVNGVFFNGIILGPDGHVLIPEMQSSLLQQHMELLESSVIPLMHPLADPSTVFKDDDEAEDFVEVHLPDVHKQVSGVDLGLPSWGKYVLMSVGAMIALMLMIFLTTCCRKANGAESTQHRLGETGRKVSVTSQSGRVISSWESYKSGGETKL

SEQ ID NO: 31913 - protein, 524 aa, Artificial Sequence
  derived and/or modified protein sequence (wt) from glycoprotein__RABV__LC071955.1
MIPQALLFVPLLVFSLCFGKFPIYTIPDKLGPWSPIDIHHLSCPNNLVVEDEGCTNLSGFSYMELKVGYISAIKVNGFTCTGVVTEAETYTNFVGYVTTTFKRKHFRPTPDACRAAYNWKMAGDPRYEESLHNPYPDYHWLRTVKTTKESLVIISPSVSDLDPYDKSLHSRVFPSGKCSGITVSSTYCPTNHDYTIWMPENPRLGTSCDIFTTSRGKRASKGGKTCGFVDERGLYKSLKGACKLKLCGVLGLRLMDGTWAAIQTSDEAKWCPPDQLVNIHDFRSDEIEHLVVEELVKKREECLDALEPIMTTKSVSFRRLSHLRKLVPGFGKAYTIFNKTLMEADAHYKSVRTWNEIIPSKGCLRVGGRCHPHVNGVFFNGIILGPDGHVLIPEMQSSLLQQHMELLESSVIPLMHPLADPSTVFKDDDEAEDFVEVHLPDVHKQVSGVDLGLPSWGKYVLMSVGAMIALMLMIFLTTCCRKANGAESTQHRLGETGRKVSVTSQSGRVISSWESYKSGGETKL

SEQ ID NO: 31914 - protein, 524 aa, Artificial Sequence
  derived and/or modified protein sequence (wt) from glycoprotein__RABV__LC071956.1
MIPQALLFVPLLVFSLCFGKFPIYTIPDKLGPWSPIDIHHLSCPNNLVVEDEGCTNLSGFSYMELKVGYISAIKVNGFTCTGVVTEAETYTNFVGYVTTTFKRKHFRPTPDACRAAYNWKMAGDPRYEESLHNPYPDYHWLRTVKTTKESLVIISPSVSDLDPYDKSLHSKVFPSGKCSGITVSSTYCPTNHDYTIWMPENPRLGTSCDIFTTSRGKRASKGGKTCGFVDERGLYKSLKGACKLMLCGVLGLRLMDGTWAAIQTSDEAKWCPPDQLVNIHDFRSDEIEHLVVEELVKKREECLDALESIMTTKSVSFRRLSHLRKLVPGFGKAYTIFNKTLMEADAHYKSVRTWNEIIPSKGCLRVGGRCHPHVNGVFFNGIILGPDGHVLIPEMQSSLLQQHMELLESSVIPLMHPLADPSTVFKDDDEAEDFVEVHLPDVHKQVSGVDLGLPSWGKYVLMSVGAMIALMLMIFLTTCCRKANGAESTQHRLGETGRKVSVTSQSGRVISSWESYKSGGETKL

SEQ ID NO: 31915 - protein, 524 aa, Artificial Sequence; identical to SEQ ID NO: 31914
  derived and/or modified protein sequence (wt) from glycoprotein__RABV__LC071957.1

SEQ ID NO: 31916 - protein, 524 aa, Artificial Sequence
  derived and/or modified protein sequence (wt) from glycoprotein__RABV__LC071958.1
MIPQALLFVPLLVFSSCFGKFPIYTIPDKLGPWSPIDIHHLSCPNNLVVGDEGCTNLSGFSYMELKVGYISAIKVNGFTCTGVVTEAETYTNFVGYVTTTFKRKHFRPTPDACRAAYNWKMAGDPRYEESLHNPYPDYHWLRTVKTTKESLVIISPSVSDLDPYDKSLHSRVFPSGKCSGITVSSTYCPTNHDYTIWMPENPRLGTSCDIFTTSRGKRASKGGKTCGFVDERGLYKSLKGACKLMLCGVLGLRLTDGTWAAIQTSDEAKWCPPDQLVNIHDFRSDEIEHLVVEELVKKREECLDALESIMTTKSVSFRRLSHLRKLVPGFGKAYTIFNKTLMEADAHYKSVRTWNEIIPSKGCLRVGGRCHPHVNGVFFNGIILGPDGHVLIPEIQSSLLQQHMELLESSVIPLMHPLADPSTVFKDDDEAEDFVEVHLPDVHKQVSGVDLGLPSWGKYVLMSVGAMIALMLMIFLTTCCRKANGAESTQHRLGETGRKVSVTSQSGRVISSWESYKSGGETKL

SEQ ID NO: 31917 - protein, 524 aa, Artificial Sequence; identical to SEQ ID NO: 31905
  derived and/or modified protein sequence (wt) from glycoprotein__RABV__LC071959.1

SEQ ID NO: 31918 - protein, 524 aa, Artificial Sequence
  derived and/or modified protein sequence (wt) from glycoprotein__RABV__LC071960.1
MIPQALLFVPLLVFSLCFGKFPIYTIPDKLGPWSPIDIHHLSCPNNLVVEDEGCTNLSGFSYMELKVGYISAIKVNGFTCTGVVTEAETYTNFVGYVTTTFKRKHFRPTPDACRAAYNWKMAGDPRYEESLHNPYPDYHWLRTVKTTKESLVIISPSVSDLDPYDKSLHSRVFPSGKCSGITVSSTYCPTNHDYTIWMPENPRLGTSCDIFTTSRGKRASKGGKTCGFVDERGLYKSLKGACKLKLCGVLGLRLMDGTWGAIQTSDEAKWCPPDQLVNIHDFRSDEIEHLVVEELVKKREECLDALESIMTTKSVSFRRLSHLRKLVPGFGKAYTIFNKTLMEADAHYKSVRTWNEIIPSKGCLRVGGRCHPHVNGVFFNGIILGPDGHVLIPEMQSSLLQQHMELLESSVIPLMHPLADPSTVFKDDDEAEDFAEVHLPDVHKQVSGVDLGLPSWGKYVLMSVGAMIALMLMIFLTTCCRKANGAESTQHRLGETGRKVSVTSQSGRVISSWESYKSGGETKL

SEQ ID NO: 31919 - protein, 524 aa, Artificial Sequence
  derived and/or modified protein sequence (wt) from glycoprotein__RABV__LC071961.1
MIPQALLFVPLLVFSLCFGKFPIYTIPDKLGPWSPIDIHHLSCPNNLVVEDEGCTNLSGFSYMELKVGYISAIKVNGFTCTGVVTEAETYTNFVGYVTTTFKRKHFRPTPDACRAAYNWKMAGDPRYEESLHNPYPDYHWLRTVKTTKESLDIISPSVSDLDPYDKSLHSRVFPSGKCSGITVSSTYCPTNHDYTIWMPENPRLGTSCDIFTTSRGKRASKGGKTCGFVDERGLYKSLKGACKLKLCGVLGLRLMDGTWAAIQTSDEAKWCPPDQLVNIHDFRSDEIEHLVVEELVKKREECLDALESIMTTKSVSFRRLSHLRKLVPGFGKAYTIFNKTLMEADAHYKSVRTWNEIIPSKGCLRVGGRCHPHVNGVFFNGIILGPDGHVLIPEMQSSLLQQHMELLESSVIPLMHPLADPSTVFKDDDEAEDFVEVHLPDVHKQVSGVDLGLPSWGKYVLMSVGAMIALMLMIFLTTCCRKANGAESTQHRLGETGRKVSVTSQSGRVISSWESYKSGGETKL

SEQ ID NO: 31920 - protein, 524 aa, Artificial Sequence; identical to SEQ ID NO: 31905
  derived and/or modified protein sequence (wt) from glycoprotein__RABV__LC071962.1

SEQ ID NO: 31921 - protein, 524 aa, Artificial Sequence; identical to SEQ ID NO: 31905
  derived and/or modified protein sequence (wt) from glycoprotein__RABV__LC071963.1

SEQ ID NO: 31922 - protein, 524 aa, Artificial Sequence
  derived and/or modified protein sequence (wt) from glycoprotein__RABV__LC071965.1
MIPQALLFVPLLVFSLCFGKFPIYTIPDKLGPWSPIDIHHLSCPNNLVVEDEGCTNLSGFSYMELKVGYISAIKVNGFTCTGVVTEAETYTNFVGYVTTTFKRKHFRPTPDACRAAYNWKMAGDPRYEESLHNPYPDYHWLRTVKTTKESLVIISPSVSDLDPYDKSLHSRVFPSGKCSGITVSSTYCPTNHDYTIWMPENPRLGTSCDIFTTSRGKRASKGGKTCGFVDERGLYKSLKGACKLKLCGVLGLRLMDGTWAAIQTSDEAKWCPPDQLVNIHDFRSDEIEHLVVEELVKKREECLDALESIMTTKSVSFRRLSHLRKLVPGFGKAYTIFNKTLMEADAHYKSVRTWNEIIPSKGCLRVGGRCHPHVNGVFFNGIILGPDGHVLIPEMQSSLLQQHMELLESSVIPLMHPLADPSTVFKDDDEAEDFVEVHLPDVHKQVSGVDLGLPSWGKYVLMSVGAMIALMLMIFLTMCCRKANGAESTQHRLGETGRKVSVTSQSGRVISSWESYKSGGETKL

SEQ ID NO: 31923 - protein, 524 aa, Artificial Sequence
  derived and/or modified protein sequence (wt) from glycoprotein__RABV__LC071966.1
MIPQALLFVPLLVFSLCFGKFPIYTIPDKLGPWSPIDIHHLSCPNNLVVEDEGCTNLSGFSYMELKVGYISAIKVNGFTCTGVVTEAETYTNFVGYVTTTFKRKHFRPTPDACSAAYNWKMAGDPRYEESLHNPYPDYHWLRTVKTTKESLVIISPSVSDLDPYDKSLHSRVFPSGKCSGITVSSTYCPTNHDYTIWMPENPRLGTSCDIFTTSRGKRASKGGKTCGFADERGLYKSLKGACKLKLCGVLGLRLMDGTWAAIQTSDEAKWCPPDQLVNIHDFRSDEIEHLVVEELVKKREECLDALESIMTTKSVSFRRLSHLRKLVPGFGKAYTIFNKTLMEADAHYKSVRTWNEIIPSKGCLRVGGRCHPHVNGVFFNGIILGPDGHVLIPEMQSSLLQQHMELLESSVIPLMHPLADPSTVFKDDDEAEDFVEVHLPDVHKQVSGVDLGLPSWGKYVLMSVGAMIALMLMIFLTMCCRKANGAESTQHRLGETGRKVSVTSQSGRVISSWESYKSGGETKL

SEQ ID NO: 31924 - protein, 524 aa, Artificial Sequence
  derived and/or modified protein sequence (wt) from glycoprotein__RABV__LC071967.1
MIPQALLFVPLLVFSLCFGKFPIYTIPDKLGPWSPIDIHHLSCPNNLVVEDEGCTNLSGFSYMELKVGYISAIKVNGFTCTGVVTEAETYTNFVGYVTTTFKRKHFRPTPDACRAAYNWKMAGDPRYEESLHNPYPDYHWLRTVKTTKESLVIISPSVSDLDPYDKSLHSRVFPSGKCSGITVSSTYCPTNHDYTIWMPENPRLGTSCDIFTTSRGKRASKGGKTCGFVDERGLYKSLKGACKLKLCGVLGLRLMDGTWAAIQTSDEAKWCPPDQLVNIHDFRSDEIEHLVVEELVKKREECLDALESIMTTKSVSFRRFSHLRKLVPGFGKAYTIFNKTLMEADAHYKSVRTWNEIIPSKGCLRVGGRCHPHVNGVFFNGIILGPDGHVLIPEMQSSLLQQHMELLESSVIPLMHPLADPSTVFKDDDEAEDFVEVHLPDVHKQVSGVDLGLPSWGKYVLMSVGAMIALMLMIFLTMCCRKANGAESTQHRLGETGRKVSVTSQSGRVISSWESYKSGGETKL

SEQ ID NO: 31925 - protein, 524 aa, Artificial Sequence; identical to SEQ ID NO: 31922
  derived and/or modified protein sequence (wt) from glycoprotein__RABV__LC071968.1

SEQ ID NO: 31926 - protein, 524 aa, Artificial Sequence
  derived and/or modified protein sequence (wt) from glycoprotein__RABV__LC071969.1
MIPQALLFVPLLVFSSCFGKFPICTIPDKLGPWSPIDIHHLSCPNNLVVEDEGCTNLSGFSYMELKVGYISAIKVNGFTCTGVVTEAETYTNFVGYVTTTFKRKHFRPTPDACRAAYNWKMAGDPRYEESLHNPYPDYHWLRTVKTTKESLVIISPSVSDLDPYDKSLHSRVFPSGKCSGITVSSTYCPTNHDYTVWMPENPRLGTSCDIFTNSRGKRASKGGKTCGFVDERGLYKSLKGACKLKLCGVLGLRLMDGTWVAIQTSDEAKWCPPDQLVNIHDFRSDEIEHLVVEELVKKREECLDALESIMTTKSVSFRRLSHLRKLVPGFGKAYTIFNKTLMEADAHYKSVRTWNEIIPSKGCLRVGGRCHPHVNGVFFNGIILGPDGHVLIPEMQSSLLQQHMELLESSVIPLMHPLADPSTVFKDGDEAEDFVEVHLPDVHKQVSGVDLGLPSWGKYVLMSVGAMIALMLMIFLMTCCRKANGAETIQHRLGETGRKVSVTSQSGRVISSWESYKSGGETKL

SEQ ID NO: 31927 - protein, 524 aa, Artificial Sequence
  derived and/or modified protein sequence (wt) from glycoprotein__RABV__LC071970.1
MIPQALLFVPLLVFSSCFGKFPIYTIPDKLGPWSPIDIHHLSCPNNLVVEDEGCTNLSGFSYMELKVGYISAIKVNGFTCTGVVTEAETYTNFVGYVTTTFKRKHFRPTPDACRAAYNWKMAGDPRYEESLHNPYPDYHWLRTVKTTKESLVIISPSVSDLDPYDKSFHSRVFPSGKCSGITVSSTYCPTNHDYTIWMPENPRLGTSCDIFTNSRGKRASKGGKTCGFVDERGLYKSLKGACKLKLCGVLGLRLMDGTWVAIQTSDEAKWCPPDQLVNIHDFRSDEIEHLVVEELVKKREECLDALESIMTTKSVSFRRLSHLRKLVPGFGKAYTIFNKTLMEADAHYKSVRTWNEIIPSKGCLRVGGRCHPHVNGVFFNGIILGPDGHVLIPEMQSSLLQQHMELLESSVIPLMHPLADPSTVFKDGDEAEDFVEVHLPDVHKQVSGVDLGLPSWGKYVLMSVGAMIALMLMIFLMTCCRKANGAETIQHRLGETGRKVSVTSQSGRVISSWESYKSGGETKL

SEQ ID NO: 31928 - protein, 524 aa, Artificial Sequence
  derived and/or modified protein sequence (wt) from glycoprotein__RABV__LC071971.1
MIPQALLFVPLLVFSSCFGKFPIYTIPDKLGPWSPIDIHHLSCPNNLVVEDEGCTNLSGFSYMELKVGYISAIKVNGFTCTGVVTEAETYTNFVGYVTTTFKRKHFRPTPDACRAAYNWKMAGDPRYEESLHNPYPDYHWLRTVKTTKESLVIISPSVSDLDPYDKSLHSRVFPSGKCSGITVSSTYCPTNRDYTIWMPENPRLGTSCDIFTNSRGKRASKGGKTCGFVDERGLYKSLKGACKLKLCGVLGLRLMDGTWVAIQTSDEAKWCPPDQLVNIHDFRSDEIEHLVVEELVKKREECLDALESIMTTKSVSFRRLSHLRKLVPGFGKAYTIFNKTLMEADAHYKSVRTWNEIIPSKGCLRVGGRCHPHVNGVFFNGIILGPDGHVLIPEMQSSLLQQHMELLESSVIPLMHPLADPSTVFKDGDEAEDFVEVHLPDVHKQVSGVDLGLPSWGKYVLMSVGAMIALMLMIFLMTCCRKANGAETIQHRLGETGRKVSVTSQSGRVISSWESYKSGGETKL

SEQ ID NO: 31929 - protein, 524 aa, Artificial Sequence; identical to SEQ ID NO: 31028
  derived and/or modified protein sequence (wt) from glycoprotein__RABV__LC071972.1

SEQ ID NO: 31930 - protein, 524 aa, Artificial Sequence
  derived and/or modified protein sequence (wt) from glycoprotein__RABV__LC071973.1
MIPQALLFVPLLVFSSCFGKFPIYTIPDKLGPWSPIDIHHLSCPNNLVVEDEGCTNLSGFSYMELKVGYISAIKVNGFTCTGVVTEAETYTNFVGYVTTTFKRKHFRPTPDACRAAYNWKMAGDPRYEESLHNPYPDYHWLRTVKTTKESLVIISPSVSDLDPYDKSLHSRVFPSGKCSGITVSSTYCPTNHDYTIWMPENPRLGTSCDIFTNSRGKRASKGGKTCGFVDERGLYKSLKGACKLKLCGVLGLRLMDGTWVAIQTSDEAKWCPPDQLVNIHDFRSDEIEHLVVEELVKKREECLDALESIMTTKSVSFRRLSHLRKLVPGFGKAYTIFNKTLMEADAHYKSVRTWNEIIPSKGCLRVGGRCHPHVNGVFFNGIILGPDGHVLIPEMQSSLLQQHMGLLESSVIPLMHPLADPSTVFKDGDEAEDFVEVHLPDVHKQVSGVDLGLPSWGKYVLMSVGAMIALMLMIFLMTCCRKANGAETIQHRLGETGRKVSVTSQSGRVISSWESYKSGGETKL

SEQ ID NO: 31931 - protein, 524 aa, Artificial Sequence
  derived and/or modified protein sequence (wt) from glycoprotein__RABV__LC071974.1
MIPQALLFVPLLVFSSCFGKFPIYTIPDKLGPWSPIDIHHLSCPNNLVVEDEGCTNLSGFSYMELKVGYISAIKVNGFTCTGVVTEAETYTNFVGYVTTTFKRKHFRPTPDACRAAYNWKMAGDPRYEESLHNPYPDYHWLRTVKTTKESLVIISPSVSDLDPYDKSLHSRVFPSGKCSGITVSSTYCPTNHDYTIWMPENPRLGTSCDIFTNSRGKRASKGGKTCGFVDERGLYKSLKGACKLKLCGVLGLRLMDGTWVAIQTSDEAKWCPPDQLVNIHDFRSDEIEHLVVEELVKKREECLDALESIMTTKSVSFGRLSHLRKLVPGFGKAYTIFNKTLMEADAHYKSVRTWNEIIPSKGCLRVGGRCHPHVNGVFFNGIILGPDGHVLIPEVQSSLLQQHMELLESSVIPLMHPLADPSTVFKDGDEAEDFVEVHLPDVHKQVSGVDLGLPSWGKYVLMSVGAMIALMLMIFLMTCCRKANGAETIQHRLGETGRKVSVTSQSGRVISSWESYKSGGETKL

SEQ ID NO: 31932 - protein, 524 aa, Artificial Sequence
  derived and/or modified protein sequence (wt) from glycoprotein__RABV__LC071975.1
MIPQALLFVPLLVFSSCFGKFPIYTIPDKLGPWSPIDIHHLSCPNNLVVEDEGCTNLSGFSYMELKVGYISAIKVNGFTCTGVVTEAETYTNFVGYVTTTFKRKHFRPTPDACRAAYNWKMAGDPRYEESLHNPYPDYHWLRTVKTTKESLVIISPSVSDLDPYDKSLHSRVFPSGKCSGITVSSTYCPTNHDYTIWMPENPRLGTSCDIFTNSRGKRASKGGKTCGFVDERGLYKSLKGACKLKLCGVLGLRLMDGTWVAIQTSDEAKWCPPDQLVNIHDFRSDEIEHLVVEELVKKREECLDALESVMTTKSVSFRRLSHLRKLVPGFGKAYTIFNKTLMEADAHYKSVRTWNEIIPSKGCLRVGGRCHPHVNGVFFNGIILGPDGHVLIPEMQSSLLQQHMELLESSVIPLMHPLADPSTVFKDGDEAEDFVEVHLPDVHKQVSGVDLGLPSWGKYVLMSVGAMIALMLMIFLMTCCRKANGAETIQHRLGETGRKVSVTSQSGRVISSWESYKSGGETKL

SEQ ID NO: 31933 - protein, 524 aa, Artificial Sequence; identical to SEQ ID NO: 31028
  derived and/or modified protein sequence (wt) from glycoprotein__RABV__LC071976.1

SEQ ID NO: 31934 - protein, 524 aa, Artificial Sequence
  derived and/or modified protein sequence (wt) from glycoprotein__RABV__LC071977.1
MIPQALLFVPLLVFSSCFGKFPIYTIPDKLGPWSPIDIHHLSCPNNLVVEDEGCTNLSGFSYMELKVGYISAIKVNGFTCTGVVTEAETYTNFVGYVTTTFKRKHFRPTPDACRAAYNWKMAGDPRYEESLHNPYPDYHWLRAVKTTKESLVIISPSVSDLDPYDKSLHSRVFPSGKCSGITVSSTYCPTNHDYTIWMPENPRLGTSCDIFTNSRGKRASKGGKTCGFVDERGLYKSLKGACKLKLCGVLGLRLMDGTWVAIQTSDEAKWCPPDQLVNIHDFRSDEIEHLVVEELVKKREECLDALESIMTTKSVSFRRLSHLRKLVPGFGKAYTIFNKTLMEADAHYKSVRTWNEIIPSKGCLRVGGRCHPHVNGVFFNGIILGPDGHVLIPEMQSSLLQQHMELLESSVIPLMHPLADPSTVFKDGDEAEDFVEVHLPDVHKQVSGVDLGLPSWGKYVLMSVGAMIALMLMIFLMTCCRKANGAETIQHRLGETGRKVSVTSQSGRVISSWESYKSGGETKL

SEQ ID NO: 31935 - protein, 524 aa, Artificial Sequence; identical to SEQ ID NO: 31028
  derived and/or modified protein sequence (wt) from glycoprotein__RABV__LC071978.1

SEQ ID NO: 31936 - protein, 524 aa, Artificial Sequence
  derived and/or modified protein sequence (wt) from glycoprotein__RABV__LC071979.1
MIPQALLFVPLLVFSSCFGKFPIYTIPDKLGPWSPIDIHHLSCPNNLVVEDEGCTNLSGFSYMELKVGYISAIKVNGFTCTGVVTEAETYTNFVGYVTTTFKRKHFRPTPDACRAAYNWKMAGDPRYEESLHNPYPDYHWLRTVKTTKESLVIISPSVSDLDPYDKSLHSRVFPSGKCSGITVSSTYCPTNHDYTIWMPENPRLGTSCDIFTNSRGKRASKGGKTCGFVDERGLYKSLKGACKLKLCGVLGLRLMDGTWVAIQTSDEAKWCPPDQLVNIHDFRSDEIEHLVVEELVKKREECLDALESIMTTKSVSFRRLSHLRKLVPGFGEAYTIFNKTLMEADAHYKSVRTWNEIIPSKGCLRVGGRCHPHVNGVFFNGIILGPDGHVLIPEMQSSLLQQHMELLESSVIPLMHPLADPSTVFKDGDEAEDFVEVHLPDVHKQVSGVDLGLPSWGKYVLMSVGAMIALMLMIFLMTCCRKANGAETIQHRLGETGRKVSVTSQSGRVISSWESYKSGGETKL

SEQ ID NO: 31937 - protein, 524 aa, Artificial Sequence; identical to SEQ ID NO: 31028
  derived and/or modified protein sequence (wt) from glycoprotein__RABV__LC071980.1

SEQ ID NO: 31938 - protein, 524 aa, Artificial Sequence
  derived and/or modified protein sequence (wt) from glycoprotein__RABV__LC071981.1
MIPQALLFVPLLVFSSCFGKFPIYTIPDKLGPWSPIDIHHLSCPNNLVVEDEGCTNLSGFSYMELKVGYISAIKVNGFTCTGVVTEAETYTNFVGYVTTTFKRKHFRPTPDACRAAYNWKMAGDPRYEESLHNPYPDYHWLRTVKTTKESLVIISPSVSDLDPYDKSLHSRVFPSGKRSGITVSSTYCPTNHDYTIWMPENPRLGTSCDIFTNSRGKRASKGGKTCGFVDERGLYKSLKGACKLKLCGVLGLRLMDGTWVAIQTSDEAKWCPPDQLVNIHDFRSDEIEHLVVEELVKKREECLDALESIMTTKSVSFRRLSHLRKLVPGFGKAYTIFNKTLMEADAHYKSVRTWNEIIPSKGCLRVGGRCHPHVNGVFFNGIVLGPDGHVLIPEMQSSLLQQHMELLESSVIPLMHPLADPSTVFKDGDEAEDFVEVHLPDVHKQVSGVDLGLPSWGKYALMSVGAMIALMLMIFLMTCCRKANGAETKQHRLGETGRKVSVTSQSGRVISSWESYKSGGETKL

SEQ ID NO: 31939 - protein, 524 aa, Artificial Sequence
  derived and/or modified protein sequence (wt) from glycoprotein__RABV__LC071983.1
MIPQALLFIPLSVFSLCFGKFPIYTIPDKLGPWSPIDIHHLSCPNNLVVEDEGCTNLSGFSYMELKVGYISAIKVNGFTCTGVVTEAETYTNFVGYVTTTFKRKHFRPTPDACRAAYNWKMAGDPRYEESLHNPYPDYHWLRTVKTTKESLVIISPSVSDLDPYDKSLHSRVFPSGKCSGITVSSTYCPTNHDYTIWMPESPRLGTSCDIFTNSRGKRASKGSKTCGFVDERGLYKSLKGACKLKLCGVLGLRLMDGTWAAIQTPDEVKWCPPDQLVNIHDFRSDEIEHLVVEELVKKREECLDALESIMTTKSVSFRRLSHLRKLVPGFGKAYTIFNKTLMEADAHYKSVRTWNEIIPSKGCLRVGGRCHPHVNGVFFNGIILGPDGHVLIPEMQSSLLQQHMELLESSVIPLMHPLADPSTVFKDGDEAEDFVEVHLPDVHKQVSGVDLGLPSWGKYVLMSVGAMIALMLMIFLTTCCRKANGAESIQHRRGETGRKVSVTSQSGRVISSWESYKSGGETKL

SEQ ID NO: 31940 - protein, 524 aa, Artificial Sequence
  derived and/or modified protein sequence (wt) from glycoprotein__RABV__LM645015.1
MVPQALLFVPLLAFPMCFGKFPIYTIPDKLGPWSPIDIHHLSCPNNLVVEDEGCTNLSGFSYMELKVGYISAIKVNGFTCTGVVTEAETYTNFVGYVTTTFKRKHFRPTPDACRAAYNWKMAGDPRYEESLHNPYPDYHWLRTVKTTKESLIIISPSVADLDPYDKSLHSRVFPSGKCLGITISSTYCSTNHDYTIWMPENVRLGTSCDIFTNSRGKRASKGSKTCGFVDERGLYKSLKGACKLKLCGVLGLRLMDGTWVAMPTSDETKWCPPDQLVNLHDFRSDEIEHLVVEELVRKREECLDALESIMTTKSVSFRRLSHLRKLVPGFGKAYTIFNKTLMEADAHYKSVRTWNEIIPSKGCLRVGGRCHPHVNGVFFNGIILGPDGHVLIPEMQSSLLQQHMELLESSVIPLMHPLADPSTVFKDGDEAEDFVEVHLPDVHKQVSGVDLGLPNWGKYVLIIAGVLIAMILTIFLMTCCGRGNRPKSTQHSLGGIGRKVSSTSQSGKVISSWESYKSGGETRL

SEQ ID NO: 31941 - protein, 524 aa, Artificial Sequence
  derived and/or modified protein sequence (wt) from glycoprotein__RABV__LM645016.1
MVPQALLFVPLLAFPMCFGKFPIYTIPDKLGPWSPIDIHHLSCPNNLVVEDEGCTNLSGFSYMELKVGYISAIKVNGFTCTGVVTEAETYTNFVGYVTTTFKRKHFRPTPDACRAAYNWKMAGDPRYEESLHNPYPDYHWLRTVKTTKESLIIISPSVADLDPYDKSLHSRVFPSGKCLGITISSTYCSTNHDYTIWMPENVRLGTSCDIFTNSRGKRASKGSKTCGFVDERGLYKSLRGACKLKLCGVLGLRLMDGTWVAMPTSDETKWCPPDQLVNLHDFRSDEIEHLVVEELVRKREECLDALESIMTTKSVSFRRLSHLRKLVPGFGKAYTIFNKTLMEADAHYKSVRTWNEIIPSKGCLRVGGRCHPHVNGVFFNGIILGPDGHVLIPEMQSSLLQQHMELLESSVIPLMHPLADPSTVFKDGDEAEDFVEVHLPDVHKQISGVDLGLPNWGKYVLIIAGVLIAMILTIFLMTCCGRGNRPKSTQHSLGGIGRKVSSTSQSGKVISSWESYKSGGETRL

SEQ ID NO: 31942 - protein, 524 aa, Artificial Sequence
  derived and/or modified protein sequence (wt) from glycoprotein__RABV__LM645018.1
MVPQALLFVPLLAFPMCFGKFPIYTIPDKLGPWSPIDIHHLSCPNNLVVEDEGCTNLSGFSYMELKVGYISAIKVNGFTCTGVVTEAETYTNFVGYVTTTFKRKHFRPTPDACRAAYNWKMAGDPRYEESLHNPYPDYHWLRTVKTTKESLIIISPSVADLDPYDKSLHSRVFPSGKCLGITISSTYCSTNHDYTIWMPENVRLGTSCDIFTNSRGKRASKGSKTCGFVDERGLYKSLKGACKLKLCGVLGLRLMDGTWVAMPTSDETKWCPPDQLVNLHDFRSDEIEHLVVEELVRKREECLDALESIMTTKSVSFRRLSHLRKLVPGFGKAYTIFNKTLMEADAHYKSVRTWNEIIPSKGCLRVGGRCHPHVNGVFFNGIILGPDGHVLIPEMQSSLLQQHMELLESSVIPLMHPLADPSTVFKDGDEAEDFVEVHLPDVHKQISGVDLGLPNWGKYVLIITGVLIAMILTIFLMTCCGRGNRPKSKQHSLGGIGRKVSSTSQSGKVISSWESYKSGGETRL

SEQ ID NO: 31943 - protein, 524 aa, Artificial Sequence; identical to SEQ ID NO: 31809
  derived and/or modified protein sequence (wt) from glycoprotein__RABV__LM645019.1

SEQ ID NO: 31944 - protein, 524 aa, Artificial Sequence
  derived and/or modified protein sequence (wt) from glycoprotein__RABV__LM645021.1
MVPQALLFVPLLAFPMCFGKFPIYTIPDKLGPWSPIDIHHLSCPNNLVVEDEGCTNLSGFSYMELKVGYISAIKVNGFTCTGVVTEAETYTNFVGYVTTTFKRKHFRPTPDACRAAYNWKMAGDPRYEESLHNPYPDYHWLRTVKTTKESLIIISPSVADLDPYDKSLHSRVFPSGKCLGITISSTYCSTNHDYTIWMPENVRLGTSCDIFTNSRGKRASKGSKTCGFVDERGLYKSLKGACKLKLCGVLGLRLMDGTWVAMPTSDETKWCSPDQLVNLHDFRSDEIEHLVVEELVRKREECLDALESIMTTKSVSFRRLSHLRKLVPGFGKAYTIFNKTLMEADAHYKSVRTWNEIIPSKGCLRVGGRCHPHVNGVFFNGIILGPDGHVLIPEMQSSLLQQHMELLESSVIPLMHPLADPSTVFKDGDEAEDFVEVHLPDVHKQISGVDLGLPNWGKYVLIIAGVLIAMILTIFLMTCCGRGNRPKSKQHSLGGIGRKVSSTSQSGKVISSWESYKSGGETRL

SEQ ID NO: 31945 - protein, 524 aa, Artificial Sequence
  derived and/or modified protein sequence (wt) from glycoprotein__RABV__LM645022.1
MVPQALLFVPLLAFPMCFGKFPIYTIPDKLGPWSPIDIHHLSCPNNLVVEDEGCTNLSGFSYMELKVGYISAIKVNGFTCTGVVTEAETYTNFVGYVTTTFKRKHFRPTPDACRAAYNWKMAGDPRYEESLHNPYPDYHWLRTVKTTKESLIIISPSVADLDPYDKSLHSRVFPSGKCLGITISSTYCSTNHDYTIWMPENVRLRTSCDIFTNSRGKRASKGSKTCGFVDERGLYKSLKGACKLKLCGVLGLRLMDGTWVAMPTSDETKWCPPDQLVNLHDFRSDEIEHLVVEELVRKREECLDALESIMTTKSVSFRRLSHLRKLVPGFGKAYTIFNKTLMEADAHYKSVRTWNEIIPSKGCLRVGGRCHPHVNGVFFNGIILGPDGHVLIPEMQSSLLQQHMELLESSVIPLMHPLADPSTVFKDGDEAEDFVEVHLPDVHKQISGVDLGLPNWGKYVLIIAGVLIAMILTIFLMTCCGRGNRPKSKQHSLGGIGRKVSSTSQSGKVISSWESYKSGGETRL

SEQ ID NO: 31946 - protein, 524 aa, Artificial Sequence; identical to SEQ ID NO: 31809
  derived and/or modified protein sequence (wt) from glycoprotein__RABV__LM645024.1

SEQ ID NO: 31947 - protein, 524 aa, Artificial Sequence; identical to SEQ ID NO: 31809
  derived and/or modified protein sequence (wt) from glycoprotein__RABV__LM645026.1

SEQ ID NO: 31948 - protein, 524 aa, Artificial Sequence
  derived and/or modified protein sequence (wt) from glycoprotein__RABV__LM645027.1
MVPQALLFVPLLAFPMCFGKFPIYTIPDKLGPWSPIDIHHLSCPNNLVVEDEGCTNLSGFSYMELKVGYISAIKVNGFTCTGVVTEAETYTNFVGYVTTTFKRKHFRPTPDACRAAYNWKMAGDPRYEESLHNPYPDYHWLRTVKTTKESLIIISPSVADLDPYDKSLHSRVFPSGKCLGITISSTYCSTNHDYTIWMPENVRLGTSCDIFTNSRGKRASKGSKTCGFVDERGLYKSLKGACKLKLCGVLGLRLMDGTWVAMPTSDETKWCPPDQLVNLHDFRSDEIEHLVVEELVRKREECLDALESIMTTKSVSFRRLSHLRKLVPGFGKAYTIFNKTLMEADAHYKSVRTWNEIIPSKGCLRVGGRCHPHVNGVFFNGIILGPDGHVLIPEMQSSLLQQHMELLESSVIPLMHPLADPSTVFKDGDEAEDFVEVHLPDVHKQISGVDLGLPNWGKYVLIIAGLLIAMILTIFLMTCCGRGNRPKSTQHSLGGIGRKVSSTSQSGKVISSWESYKSGGETRL

SEQ ID NO: 31949 - protein, 524 aa, Artificial Sequence
  derived and/or modified protein sequence (wt) from glycoprotein__RABV__LM645029.1
MVPQALLFVPLLAFPMCFGKFPIYTIPDKLGPWSPIDIHHLSCPNNLVVEDEGCTNLSGFSYMELKVGYISAIKVNGFTCTGVVTEAETYTNFVGYVTTTFKRKHFRPTPDACRAAYNWKMAGDPRYEESLHNPYPDYHWLRTVKTTKESLIIISPSVADLDPYDKSLHSRVFPSGKCLGITISSTYCSTNHDYTIWMPENVRLGTSCDIFTNSRGKRASKGSKTCGFVDERGLYKSLKGACKLKLCGVLGLRLMDGTWVAMPTSDETKWCPPDQLVNLHDFRSDEIEHLVVEELVRKREECLDALESIITTKSVSFRRLSHLRKLVPGFGKAYTIFNKTLMEADAHYKSVRTWNEIIPSKGCLRVGGRCHPHVNGVFFNGIILGPDGHVLIPEMQSSLLQQHMELLESSVIPLMHPLADPSTVFKDGDEAEDFVEVHLPDVHKQISGVDLGLPNWGKYVLIIAGVLIAMILTIFLMTCCGRGNRPKSKQHSLGGIGRKVSSTSQSGKVISSWESYKSGGETRL

SEQ ID NO: 31950 - protein, 524 aa, Artificial Sequence
  derived and/or modified protein sequence (wt) from glycoprotein__RABV__LM645031.1
MVPQALLFVPLLAFPMCFGKFPIYTIPDKLGPWSPIDIHHLSCPNNLVVEDEGCTNLSGFSYMELKVGYISAIKVNGFTCTGVVTEAETYTNFVGYVTTTFKRKHFRPTPDACRAAYNWKMAGDPRYEESLHNPYPDYHWLRTVKTTKESLIIISPSVADLDPYDKSLHSRVFPSGKCLGITISSTYCSTNHDYTIWMPENVRLGTSCDIFTNSRGKRASRGSKTCGFVDERGLYKSLKGACKLKLCGVLGLRLMDGTWVAMPTSDETKWCPPDQLVNLHDFRSDEIEHLVVEELVRKREECLDALESIMTTKSVSFRRLSHLRKLVPGFGKAYTIFNKTLMEADAHYKSVRTWNEIIPSKGCLRVGGRCHPHVNGVFFNGIILGPDGHVLIPEMQSSLLQQHMELLESSVIPLMHPLADPSTVFKDGDEAEDFVEVHLPDVHKQISGVDLGLPNWGKYVLIIAGVLIAMILTIFLMTCCGRGNRPKSKQHSLGGIGRKVSSTSQSGKVISSWESYKSGGETRL

SEQ ID NO: 31951 - protein, 524 aa, Artificial Sequence; identical to SEQ ID NO: 31809
  derived and/or modified protein sequence (wt) from glycoprotein__RABV__LM645034.1

SEQ ID NO: 31952 - protein, 524 aa, Artificial Sequence; identical to SEQ ID NO: 31809
  derived and/or modified protein sequence (wt) from glycoprotein__RABV__LM645035.1

SEQ ID NO: 31953 - protein, 524 aa, Artificial Sequence
  derived and/or modified protein sequence (wt) from glycoprotein__RABV__LM645036.1
MVPQALLFVPLLAFPMCFGKFPIYTIPDKLGPWSPIDIHHLSCPNNLVVEDEGCTNLSGFSYMELKVGYISAIKVNGFTCTGVVTEAETYTNFVGYVTTTFKRKHFRPTPDACRAAYNWKMAGDPRYEESLHNPYPDYHWLRTVKTTKESLIIISPSVADLDPYDKSLHSRVFPSGKCLGITISSTYCLTNHDYTIWMPENVRLGTSCDIFTNSRGKRASKGSKTCGFVDERGLYKSLKGACKLKLCGVLGLRLMDGTWVAMPTSDETKWCPPDQLVNLHDFRSDEIEHLVVEELVRKREECLDALESIMTTKSVSFRRLSHLRKLVPGFGKAYTIFNKTLMEADAHYKSVRTWNEIIPSKGCLRVGGRCHPHVNGVFFNGIILGPDGHVLIPEMQSSLLQQHMELLESSVIPLMHPLADPSTVFKDGDEAEDFVEVHLPDVHKQISGVDLGLPNWGKYVLIIAGVLIAMILTIFLMTCCGRGNRPKSKQHSLGGIGRKVSSTPQSGKVISSWESYKSGGETRL

SEQ ID NO: 31954 - protein, 524 aa, Artificial Sequence; identical to SEQ ID NO: 31474
  derived and/or modified protein sequence (wt) from glycoprotein__RABV__LM645037.1

SEQ ID NO: 31955 - protein, 524 aa, Artificial Sequence
  derived and/or modified protein sequence (wt) from glycoprotein__RABV__LM645039.1
MVPQALLFVPLLAFPMCFGKFPIYTIPDKLGPWSPIDIHHLSCPNNLVVEDEGCTNLSGFSYMELKVGYISAIKVNGFTCTGVVTEAETYTNFVGYVTTTFKRKHFLPTPDACRAAYNWKMAGDPRYEESLHNPYPDYHWLRTVKTTKESLIIISPSVADLDPYDKSLHSRVFPSGKCLGITISSTYCSTNHDYTIWMPENVRLGTSCDIFTNSRGKRASKGSKTCGFVDERGLYKSLKGACKLKLCGVLGLRLMDGTWVAMPTSDETKWCPPDQLVNLHDFRSDEIEHLVVEELVRKREECLDALESIMTTKSVSFRRLSHLRKLVPGFGKAYTIFNKTLMEADAHYKSVRTWNEIIPSKGCLRVGGRCHPHVNGVFFNGIILGPDGHVLIPEMQSSLLQQHMELLESSVIPLMHPLADPSTVFKDGDEAEDFVEVHLPDVHKQISGVDLGLPNWGKYVLIIAGVLIAMILTIFLMTCCGRGNRPKSTQHSLGGIGRKVSSTSQSGKVISSWESYKSGGETRL

SEQ ID NO: 31956 - protein, 524 aa, Artificial Sequence; identical to SEQ ID NO: 31474
  derived and/or modified protein sequence (wt) from glycoprotein__RABV__LM645041.1

SEQ ID NO: 31957 - protein, 524 aa, Artificial Sequence
  derived and/or modified protein sequence (wt) from glycoprotein__RABV__LM645042.1
MVPQALLFVPLLAFPMCFGKFPIYTIPDKLGPWSPIDIHHLSCPNNLVVEDEGCTNLSGFSYMELKVGYISAIKVNGFTCTGVVTEAETYTNFVGYVTTTFKRKHFLPTPDACRAAYNWKMAGDPRYEESLHNPYPDYHWLRTVKTTKESLIIISPSVADLDPYDKSLHSRVFPSGKCLGITISSTYCSTNHDYTIWMPENVRLGTSCDIFTNSRGKRASKGSKTCGFVDKRGLYKSLKGACKLKLCGVLGLRLMDGTWVAMPTSDETKWCPPDQLVNLHDFRSDEIEHLVVEELVRKREECLDALESIMTTKSVSFRRLSHLRKLVPGFGKAYTIFNKTLMEADAHYKSVRTWNEIIPSKGCLRVGGRCHPHVNGVFFNGIILGPDGHVLIPEMQSSLLQQHMELLESSVIPLMHPLADPSTVFKDGDEAEDFVEVHLPDVHKQISGVDLGLPNWGKYVLIIAGVLIAMILTIFLMTCCGRGNRPKSTQHSLGGIGRKVSSTSQSGKVISSWESYKSGGETRL

SEQ ID NO: 31958 - protein, 524 aa, Artificial Sequence; identical to SEQ ID NO: 31474
  derived and/or modified protein sequence (wt) from glycoprotein__RABV__LM645043.1

SEQ ID NO: 31959 - protein, 524 aa, Artificial Sequence
  derived and/or modified protein sequence (wt) from glycoprotein__RABV__LM645045.1
MVPQALLFVPLLAFPMCFGKFPIYTIPDKLGPWSPIDIHHLSCPNNLVVEDEGCTNLSGFSYMELKVGYISAIKVNGFTCTGVVTEAETYTNFVGYVTTTFKRKHFRPTPDACRAAYNWKMAGDPRYEESLHNPYPDYHWLRTVKTTKESLIIISPSVADLDPYDKSLHSRVFPSGKCLGITISSTYCSTNHDYTIWMPENVRLGTSCDIFTNSRGKRASKGSKTCGFVDERGLYKSLKGACKLKLCGVLGLRLMDGTWVAMPTSDETKWCPPDQLVNLHDFRSDEIEHLVVEELVRKREECLDALESIMTTKSVSFRRLSHLRKLVPGFGKAYTIFNKTLMEADAHYKSVRTWNEIIPSKGCLRVGGRCHPHVNGVFFNGIILGPDGHVLIPEMQSSLLQQHMELLESSVIPLMHPLADPSTVFKDGDEAEDFVEVHFPDVHKQISGVDLGLPNWGKYVLIIAGVLIAMILTIFLMTCCGRGNRPKSTQHSLGGIGRKVSSTSQSGKVISSWESYKSGGETRL

SEQ ID NO: 31960 - protein, 524 aa, Artificial Sequence; identical to SEQ ID NO: 31959
  derived and/or modified protein sequence (wt) from glycoprotein__RABV__LM645049.1

SEQ ID NO: 31961 - protein, 524 aa, Artificial Sequence; identical to SEQ ID NO: 31474
  derived and/or modified protein sequence (wt) from glycoprotein__RABV__LM645052.1

SEQ ID NO: 31962 - protein, 524 aa, Artificial Sequence; identical to SEQ ID NO: 31474
  derived and/or modified protein sequence (wt) from glycoprotein__RABV__LM645053.1

SEQ ID NO: 31963 - protein, 524 aa, Artificial Sequence; identical to SEQ ID NO: 31474
  derived and/or modified protein sequence (wt) from glycoprotein__RABV__LM645056.1

SEQ ID NO: 31964 - protein, 524 aa, Artificial Sequence
  derived and/or modified protein sequence (wt) from glycoprotein__RABV__LN713547.1
MVPQALLFVPLLVFPLCFGKFPIYTIPDKLGPWSPIDIHHLSCPNNLVVEDEGCTNLSGFSYMELKVGNILAIKMNGFTCTGVVTEAETYTNFVGYVTTTFKRKHFRPTPDACRAAYNWKMAGDPRYEESLHNPYPDYRWLRTVKTTKESLVIISPSVADLDPYDRSLHSRVFPSGKCSGVAVSSTYCSTNHDYTIWMPESPRLGMSCDIFTNSRGKRASKGSETCGFVDERGLYKSLKGACKLKLCGVLGLRLMDGTWVSMQTSNETKWCPPDQLVNLHDFRSDEIEHLVVEELVRKREECLDALESIMTTKSVSFRRLSHLRKLVPGFGKAYTILNKTLMEADAHYKSVRTWNEILPSKGCLRVGGRCHPHVNGVFFNGIILGPDGNVLIPEMQSSLLQQHMELLESSVIPLVHPLADPSTVFKDGDEAEDFVEVHLPDVHNQVSGVDLGLPNWGKYVLLSAGALTALMLIIFLMTCCRRVNRSEPTQHNLRGTGREVSVTPQSGKIISSWESHKSGGETRL

SEQ ID NO: 31965 - protein, 524 aa, Artificial Sequence; identical to SEQ ID NO: 31964
  derived and/or modified protein sequence (wt) from glycoprotein__RABV__LN713552.1

SEQ ID NO: 31966 - protein, 524 aa, Artificial Sequence
  derived and/or modified protein sequence (wt) from glycoprotein__RABV__LN713556.1
MVPQALLFVPLLVFPLCFGKFPIYTIPDKLGPWSPIDIHHLSCPNNLVVEDEGCTNLSGFSYMELKVGNILAIKMNGFTCTGVVTEAETYTNFVGYVTTTFKRKHFRPTPDACRAAYNWKMAGDPRYEESLHNPYPDYRWLRTVKTTKESLVIISPSVADLDPYDRSLHSRVFPSGKCSGVAVSSTYCSTNHDYTIWMPENPRLGMSCDIFTNSRGKRASKGSETCGFVDERGLYKSLKGACKLKLCGVLGLRLMDGTWVSMQTSNETKWCPPDKLVNLHDFRSDEIEHLVVEELVRKREECLDALESIMTTKSVSFRRLSHLRKLVPGFGKAYTILNKTLMEADAHYKSVRTWNEILPSKGCLRVGGRCHPHVNGVFFNGIILGPDGNVLIPEMQSSLLQQHMELLESSVIPLVHPLADPSTVFKDGDEAEDFVEVHLPDVHNQVSGVDLGLPNWGKYVLLSAGALTALMLIIFLMTCCRRVNRSEPTQHNLRGTGREVSVTPQSGKIISSWESHKSGGETRL

SEQ ID NO: 31967 - protein, 524 aa, Artificial Sequence; identical to SEQ ID NO: 31964
  derived and/or modified protein sequence (wt) from glycoprotein__RABV__LN713559.1

SEQ ID NO: 31968 - protein, 524 aa, Artificial Sequence
  derived and/or modified protein sequence (wt) from glycoprotein__RABV__LN713560.1
MVPQALLFVPLLVFPLCFGKFPIYTIPDKLGPWSPIDIHHLSCPNNLVVEDEGCTNLSGFSYMELKVGNILAIKVNGFTCTGVVTEAETYTNFVGYVTTTFKRKHFRPTPDACRAAYNWKMAGDPRYEESLHNPYPDYRWLRTVKTTKESLVIISPSVADLDPYDRSLHSRVFPSGKCSGVAVSSTYCSTNHDYTIWMPESPRLGMSCDIFTNSRGKRASKGSETCGFVDERGLYKSLKGACKLKLCGVLGLRLMDGTWVSMQTSNETKWCPPDQLVNLHDFRSDEIEHLVVEELVRKREECLDALESIMTTKSVSFRRLSHLRKLVPGFGKAYTILNKTLMEADAHYKSVRTWNEILPSKGCLRVGGRCHPHVNGVFFNGIILGPDGNVLIPEMQSSLLQQHMELLESSVIPLVHPLADPSTVFKDGDEAEDFVEVHLPDVHNQVSGVDLGLPNWGKYVLLSAGALTALMLIIFLMTCCRRVNRSEPTQHNLRGTGREVSVTPQSGKIISSWESHKSGGETRL

SEQ ID NO: 31969 - protein, 524 aa, Artificial Sequence
  derived and/or modified protein sequence (wt) from glycoprotein__RABV__LN713572.1
MVPQALLFVPLLVFPLCFGKFPIYTIPDKLGPWSPIDIHHLSCPNNLVVEDEGCTNLSGFSYMELKVGYILAIKVNGFTCTGVVTEAETYTNFVGYVTTTFKRKHFRPTPDACRAAYNWKMAGDPRYEESLHNPYPDYRWLRTVKTTKESLVIISPSVADLDPYDRSLHSRVFPSGKCSGVAVSSTYCSTNHDYTIWMPENPRLGMSCDIFTNSRGKRASKGSETCGFVDERGLYKSLKGACKLKLCGVLGLRLMDGTWVSMQTSNETKWCPPDKLVNLHDFRSDEIEHLVVEELVRKREECLDALESIMTTKSVSFRRLSHLRKLVPGFGKAYTILNKTLMEADAHYKSVRTWNEILPSKGCLRVGGRCHPHVNGVFFNGIILGPDGNVLIPEMQSSLLQQHMELLESSVIPLVHPLADPSTVFKDGDEAEDFVEVHLPDVHNQVSGVDLGLPNWGKYVLLSAGALTALMLIIFLMTCCRRVNRSEPTQHNLRGTGREVSVTPQSGKIISSWESHKSGGETRL

SEQ ID NO: 31970 - protein, 524 aa, Artificial Sequence
  derived and/or modified protein sequence (wt) from glycoprotein__RABV__LN713578.1
MVPQALLFVPLLVFPLCFGKFPIYTIPDKLGPWSPIDIHHLSCPNNLVVEDEGCTNLSGFSYMELKVGYILAIKMNGFTCTGVVTEAETYTNFVGYVTTTFKRKHFRPTPDACRAAYNWKMAGDPRYEESLHNPYPDYRWLRTVKTTKESLVIISPSVADLDPYDRSLHSRVFPSGKCSGVAVSSTYCSTNHDYTIWMPENPRLGMSCDIFTNSRGKRASKGSETCGFVDERGLYKSLKGACKLKLCGVLGLRLMDGTWVSMQTSNETKWCPPDKLVNLHDFRSDEIEHLVVEELVRKREECLDALESIMTTKSVSFRRLSHLRKLVPGFGKAYTIFNKTLMEADAHYKSVRTWNEILPSKGCLRVGGRCHPHVNGVFFNGIILGPDGNVLIPEMQSSLLQQHMELLESSVIPLVHPLADPSTVFKDGDEAEDFVEVHLPDVHNQVSGVDLGLPNWGKYVLLSAGALTALMLIIFLMTCCRRVNRSEPTQHNLRGTGREVSVTPQSGKIISSWESHKSGGETRL

SEQ ID NO: 31971 - protein, 524 aa, Artificial Sequence; identical to SEQ ID NO: 31968
  derived and/or modified protein sequence (wt) from glycoprotein__RABV__LN713589.1

SEQ ID NO: 31972 - protein, 524 aa, Artificial Sequence; identical to SEQ ID NO: 31964
  derived and/or modified protein sequence (wt) from glycoprotein__RABV__LN713600.1

SEQ ID NO: 31973 - protein, 524 aa, Artificial Sequence
  derived and/or modified protein sequence (wt) from glycoprotein__RABV__LN713602.1
MVPQALLFVPLLVFPLCFGKFPIYTIPDKLGPWSPIDIHHLSCPNNLVVEDEGCTNLSGFSYMELKVGNILAIKMNGFTCTGVVTEAETYTNFVGYVTTTFKRKHFRPTPDACRAAYNWKMAGDPRYEESLHNPYPDYRWLRTVKTTKESLVIISPSVADLDPYDRSLHSRVFPSGKCSGVAVSSTYCSTNHDYTIWMPENPRLGMSCDIFTNSRGKRASKGSETCGFVDERGLYKSLKGACKLKLCGVLGLRLMDGTWVSMQTSNETKWCPPDQLVNLHDFRSDEIEHLVVEELVRKREECLDALESIMTTKSVSFRRLSHLRKLVPGFGKAYTILNKTLMEADAHYKSVRTWNEILPSKGCLRVGGRCHPHVNGVFFNGIILGPDGNVLIPEMQSSLLQQHMELLESSVIPLVHPLADPSTVFKDGDEAEDFVEVHLPDVHNQVSGVDLGLPNWGKYVLLSAGALTALMLIIFLMTCCRRVNRSEPTQHNLRGTGREVSVTPQSGKIISSWESHKSGGETRL

SEQ ID NO: 31974 - protein, 524 aa, Artificial Sequence
  derived and/or modified protein sequence (wt) from glycoprotein__RABV__LN713608.1
MVPQALLFVPLLVFPLCFGKFPIYTIPDKLGPWSPIDIHHLSCPNNLVVEDEGCTNLSGFSYMELKVGYILAIKVNGFTCTGVVTEAETYTNFVGYVTTTFKRKHFRPTPDACRAAYNWKMAGDPRYEESLHNPYPDYRWLRTVKTTKESLVIISPSVADLDPYDRSLHSRVFPSGKCSGVAVSSTYCSTNHDYTIWMPENPRLGMSCDIFTNSRGKRASKGSETCGFVDERGLYKSLKGACKLKLCGVLGLRLMDGTWVSMQTSNETKWCPPDQLVNLHDFRSDEIEHLVVEELVRKREECLDALESIMTTKSVSFRRLSHLRKLVPGFGKAYTIFNKTLMEADAHYKSVRTWNEILPSKGCLRVGGRCHPHVNGVFFNGIILGPDGNVLIPEMQSSLLQQHMELLESSVIPLVHPLADPSTVFKDGDEAEDFVEVHLPDVHNQVSGVDLGLPNWGKYVLLSAGALTALMLIIFLMTCCRRVNRSEPTQHNLRGTGREVSVTPQSGKIISSWESHKSGGETRL

SEQ ID NO: 31975 - protein, 524 aa, Artificial Sequence
  derived and/or modified protein sequence (wt) from glycoprotein__RABV__LN713628.1
MVPQALLFVPLLVFPLCFGKFPIYTIPDKLGPWSPIDIHHLSCPNNLVVEDEGCTNLSGFSYMELKVGYILAIKMNGFTCTGVVTEAETYTNFVGYVTTTFKRKHFRPTPDACRAAYNWKMAGDPRYEESLHNPYPDYRWLRTVKTTKESLVIISPSVADLDPYDRSLHSRVFPSGKCSGVAVSSTYCSTNHDYTIWMPENPRLGMSCDIFTNSRGKRASKGSETCGFVDERGLYKSLKGACKLKLCGVLGLRLMDGTWVSMQTSNETKWCPPDQLVNLHDFRSDEIEHLVVEELVRKREECLDALESIMTTKSVSFRRLSHLRKLVPGFGKAYTIFNKTLMEADAHYKSVRTWNEILPSKGCLRVGGRCHPHVNGVFFNGIILGPDGNVLIPEMQSSLLQQHMELLESSVIPLVHPLADPSTVFKDGDEAEDFVEVHLPDVHNQVSGVDLGLPNWGKYVLLSAGALTALMLIIFLMTCCRRVNRSEPTQHNLRGTGREVSVTPQSGKIISSWESHKSGGETRL

SEQ ID NO: 31976 - protein, 524 aa, Artificial Sequence
  derived and/or modified protein sequence (wt) from glycoprotein__RABV__LN713639.1
MVPQALLFVPLLVFPLCFGKFPIYTIPDKLGPWSPIDIHHLSCPNNLVVEDEGCTNLSGFSYMELKVGYILAIKVNGFTCTGVVTEAETYTNFVGYVTTTFKRKHFRPTPDACRAAYNWKMAGDPRYEESLHNPYPDYRWLRTVKTTKESLVIISPSVADLDPYDRSLHSRVFPSGKCSGVAVSSTYCSTNHDYTIWMPENPRLGMSCDIFTNSRGKRASKGSETCGFVDERGLYKSLKGACKLKLCGVLGLRLMDGTWVSMQTSNETKWCPPDQLVNLHDFRSDEMEHLVVEELVRKREECLDALESIMTTKSVSFRRLSHLRKLVPGFGKAYTILNKTLMEADAHYKSVRTWNEILPSKGCLRVGGRCHPHVNGVFFNGIILGPDGNVLIPEMQSSLLQQHMELLESSVIPLVHPLADPSTVFKDGDEAEDFVEVHLPDVHNQVSGVDLGLPNWGKYVLLSAGALTALMLIIFLMTCCRRVNRSEPTQHNLRGTGREVSVTPQSGKIISSWESHKSGGETRL

SEQ ID NO: 31977 - protein, 524 aa, Artificial Sequence
  derived and/or modified protein sequence (wt) from glycoprotein__RABV__LN713660.1
MVPQALLFVPLLVFPLCFGKFPIYTIPDKLGPWSPIDIHHLSCPNNLVVEDEGCTNLSGFSYMELKVGYISAIKMNGFTCTGVVTEAETYTNFVGYVTTTFKRKHFRPTPDACRAAYNWKMAGDPRYEESLHNPYPDYRWLRTVKTTKESLVIISPSVADLDPYDRSLHSRVFPSGKCSGVAVSSTYCSTNHDYTIWMPENPRLGMSCDIFTNSRGKRASKGSETCGFVDERGLYKSLKGACKLKLCGVLGLRLMDGTWVAMQTSNETKWCPPDQLVNLHDFRSDEIEHLVVEELVRKREECLDALESIMTTKSVSFRRLSHLRKLVPGFGKAYTIFNKTLMEADAHYKSVRTWNEILPSKGCLRVGGRCHPHVNGVFFNGIILGPDGNVLIPEMQSSLLQQHMELLESSVIPLMHPLADPSTVFKDGDEAEDFVEVHLPDVHEQVSGVDLGLPNWGKYVLLSAGALTALMLIIFLMTCCRRVNRSEPTQHNLRGTGREVSVTPQSGKIISSWESYKSGGETRL

SEQ ID NO: 31978 - protein, 524 aa, Artificial Sequence
  derived and/or modified protein sequence (wt) from glycoprotein__RABV__LN713663.1
MVPQALLFVPLLVFPLCFGKFPIYTIPDKLGPWSPIDIHHLSCPNNLVVEDEGCTNLSGFSYMELKVGYILAIKVNGFTCTGVVTEAETYTNFVGYVTTTFKRKHFRPTPDACRAAYNWKMAGDPRYEESLHNPYPDYRWLRTVKTTKESLVIISPSVADLDPYDRSLHSRVFPSGKCSGVAVSSTYCSTNHDYTIWMPENPRLGMSCDIFTNSRGKRASKGSETCGFVDERGLYKSLKGACKLTLCGVLGLRLMDGTWVSMQTSNETKWCPPDKLVNLHDFRSDEIEHLVVEELVRKREECLDALESIMTTKSVSFRRLSHLRKLVPGFGKAYTIFNKTLMEADAHYKSVETWNEILPSKGCLRVGGRCHPHVNGVFFNGIILGPDGNVLIPEMQSSLLQQHMELLESSVIPLVHPLADPSTVFKDGDEAEDFVEVHLPDVHNQVSGVDLGLPNWGKYVLLSAGALTALMLIIFLMTCCRRVNRSEPTQHNLRGTGREVSVTPQSGKIISSWESHKSGGETIL

SEQ ID NO: 31979 - protein, 524 aa, Artificial Sequence
  derived and/or modified protein sequence (wt) from glycoprotein__RABV__LN713666.1
MVPQALLFVPLLVFPLCFGKFPIYTIPDKLGPWSPIDIHHLSCPNNLVVEDEGCTNLSGFSYMELKVGYILAIKVNGFTCTGVVTEAETYTNFVGYVTTTFKRKHFRPTPDACRAAYNWKMAGDPRYEESLHNPYPDYRWLRTVKTTKESLVIISPSVADLDPYDRSLHSRVFPSGKCSGVAVSSTYCSTNHDYTIWMPENPRLGMSCDIFTNSRGKRASKGSETCGFVDERGLYKSLKGACKLMLCGVLGLRLMDGTWVSMQTSNETKWCPPDKLVNLHDFRSDEIEHLVVEELVRKREECLDALESIMTTKSVSFRRLSHLRKLVPGFGKAYTIFNKTLMEADAHYKSVETWNEILPSKGCLRVGGRCHPHVNGVFFNGIILGPDGNVLIPEMQSSLLQQHMELLESSVIPLVHPLADPSTVFKDGDEAEDFVEVHLPDVHNQVSGVDLGLPNWGKYVLLSAGALTALMLIIFLMTCCRRVNRSEPTQHNLRGTGREVSVTPQSGKIISSWESHKSGGETIL

SEQ ID NO: 31980 - protein, 524 aa, Artificial Sequence
  derived and/or modified protein sequence (wt) from glycoprotein__RABV__LN879481.2
MVPQALLFVPLLGFSLCVGKFPIYTIPDKLGPWSPIDIHHLSCPNNLVVEDEGCTNLSGFSYMELKVGYISAIKVNGFTCTGVVTEAETYTNFVGYVTTTFKRKHFRPTPDACRAAYNWKMAGDPRYEESLHNPYPDYHWLRTVKTTKESLVIISPSVADLDPYDKSLHSRVFPGGKCSGITVSSTYCSTNHDYTIWLPENPRLGTSCDIFTNSRGKRASKGSKTCGFVDERGLYKSLKGACKLKLCGVLGLRLIDGTWVAMQTSNETKWCPPDQLVNLHDFRSDEIEHLVVEELVKKREECLDALESIMTTKSVSFRRLSHLRKLVPGFGKAYTIFNKTLMEADAHYKSVRTWNEIIPSKGCLRVGGRCHHHVNGVFFNGIILGPDGHVLIPEMQSSLLQQHMELLESSVIPLMHPLADPSTVFKDGDEAEDFVEVHLPDVHKQVSGVDLGLPNWGKYVLLSAGALIALMLIIFLMTCCRRVNRPESTQPSFRGTERKVSITPQSGKVISSWESYKSGGETRL

SEQ ID NO: 31981 - protein, 524 aa, Artificial Sequence; identical to SEQ ID NO: 31474
  derived and/or modified protein sequence (wt) from glycoprotein__RABV__LT598537.1

SEQ ID NO: 31982 - protein, 524 aa, Artificial Sequence; identical to SEQ ID NO: 31781
  derived and/or modified protein sequence (wt) from glycoprotein__RABV__LT598538.1

SEQ ID NO: 31983 - protein, 524 aa, Artificial Sequence
  derived and/or modified protein sequence (wt) from glycoprotein__RABV__LT598540.1
MVPQALLFVPLLAFPMCFGKFPIYTIPDKLGPWSPIDIHHLSCPNNLVVEDEGCTNLSGFSYMELKVGYISAIKVNGFTCTGVVTEAETYTNFVGYVTTTFKRKHFRPTPDACRAAYNWKMAGDPRYEESLHNPYPDYHWLRTVKTTKESLIIISPSVADLDPYDKSLHSRVFPSGKCLGITISSTYCSTNHDYTIWMPENVRLGTSCDIFTNSRGKRASKGSKTCGFVDERGLYKSLKGACKLKLCGVLGLRLMDGTWVAMPTSDETKWCPPDQLVNLHDFRSDEIEHLVVEELVRKREECLDALESIMTTKSVSFRRLSHLRKLVPGFGKAYTIFNKTLMEADAHYKSVRTWNEIIPSKGCLRVGGRCHPHVNGVFFNGIILGPDGHVLIPEMQSSLLQQHMELLESSVIPLMHPLADPSTVFKDGDEAEDFVEVHLPDVHKQISGVDLGLPNWGKYVLMIAGVLIAMILTIFLMTCCGRGNRLKSTQHSLGGIGRKVSSTSQSGKVISSWESYKSGGETRL

SEQ ID NO: 31984 - protein, 524 aa, Artificial Sequence
  derived and/or modified protein sequence (wt) from glycoprotein__RABV__LT598541.1
MVPQALLFVPLLAFPMCFGKFPIYTIPDKLGPWSPIDIHHLSCPNNLVVEDEGCTNLSGFSYMELKVGYISAIKVNGFTCTGVVTEAETYTNFVGYVTTTFKRKHFRPTPDACRAAYNWKMAGDPRYEESLHNPYPDYHWLRTVKTTKESLIIISPSVADLDPYDKSLHSRVFPSGKCLGITISSTYCSTNHDYTIWMPENVRLGTSCDIFTNSRGKRASKGSKTCGFVDERGLYKSLKGACKLKLCGVLGLRLMDGTWVSMPTSDETKWCPPDQLVNLHDFRSDEIEHLVVEELVRKREECLDALESIMTTKSVSFRRLSHLRKLVPGFGKAYTIFNKTLMEADAHYKSVRTWNEIIPSKGCLRVGGRCHPHVNGVFFNGIILGPDGHVLIPEMQSSLLQQHMELLESSVIPLMHPLADPSTVFKDGDEAEDFVEVHLPDVHKQISGVDLGLPNWGKYVLIIAGVLIAMILTIFLTTCCGRGNRPKSTQHSLGGIGRKVSSTSQSGKVISSWESYKSGGETRL

SEQ ID NO: 31985 - protein, 524 aa, Artificial Sequence; identical to SEQ ID NO: 31809
  derived and/or modified protein sequence (wt) from glycoprotein__RABV__LT598543.1

SEQ ID NO: 31986 - protein, 524 aa, Artificial Sequence; identical to SEQ ID NO: 31431
  derived and/or modified protein sequence (wt) from glycoprotein__RABV__M13215.1

SEQ ID NO: 31987 - protein, 524 aa, Artificial Sequence
  derived and/or modified protein sequence (wt) from glycoprotein__RABV__M32751.1
MVPQVLLFAPLLVFPLCFGKFPIYTIPDKLGPWSPIDLHHLSCPNNLVVEDEGCTNLSGFSYMELKVGYISAIKVNGFTCTGVVTEAETYTNFVGYVTTTFKRKHFRPTPDACRAAYNWKMAGDPRYEESLHNPYPDYHWLRTVKTTKESLVIISPSVTDLDPYDKSLHSRVFPGGNCSGITVSSTYCSTNHDYTIWMPENLRLGTSCDIFTHSRGKRASKGDKTCGFVDERGLYKSLKGACKLKLCGVLGLRLMDGTWVAMQTSDETKWCPPGQLVNLHDFRSDEIEHLVEEELVKKREECLDALESIMTTKSVSFRRLSHLRKLVPGFGKAYTIFNKTLMEADAHYKSVQTWNEIIPSKGCLRVGERCHPHVNGVFFNGIILGSDGHVLIPEMQSSLLQQHMELLESSVIPLMHPLADPSTVFKDGDEVEDFVEVHLPDVHKQVSGVDLGLPKWGKYVLMIAGALIALMLIIFLMTCCRRVNRPESTQSNLGGTGRNVSVPSQSGKVISSWESYKSGGETRL

SEQ ID NO: 31988 - protein, 524 aa, Artificial Sequence
  derived and/or modified protein sequence (wt) from glycoprotein__RABV__M81058.1
MVPQALLFVPLLVFPLCFGKFPIYTIPDKLGPWSPIDIHHLRCPNNLVVEDEGCTNLSGFSYMELKVGYISAIKVNGFTCTGVVTEAETYTNFVGYVTTTFKRKHFRPTPDACRAAYNWKMAGDPRYEESLHNPYPDYHWLRTVKTTKESLVIISPSVADLDPYDKSLHSRVFPSGNCSGITVSSTYCSTNHDYTIWMPENPRLETSCDIFTNSRGKRASKGSKTCGFVDERGLYKSLKGACKLKLCGVLGLRLMDGTWVAMQTSDETKWCPPDQLVNLHDFRSDEIEHLVVEELVKKREECLDALESIMTTKSVSFRRLSHLRKLVPGFGKAYTIFNKTLMEADAHYKSVRTWNEIIPSKGCLRVGGRCHPHVNGVFFNGIILGPDGHVLIPEMQSSLLQQHMELLESSVIPLMHPLADPSTVFKDGDEAEDFVEVHLPDVHKQVSGVDLGLPNWGKYVLLSAGTLIALMLIIFLMTCCRRVNRPKSTERSLGETGRKVSVTSQSGKVISSWESYKSGGETRR

SEQ ID NO: 31989 - protein, 524 aa, Artificial Sequence
  derived and/or modified protein sequence (wt) from glycoprotein__RABV__M81059.1
MVPQALLFVPLLVFPLCFGKFPIYTIPDKLGPWSPIDIHHLRCPNNLVVEDEGCTNLSGFSYMELKVGYISAIKVNGFTCTGVVTEAETYTNFVGYVTTTFKRKHFRPTPDACRAAYNWKMAGDPRYEESLHNPYPDYHWLRTVKTTKESLVIISPSVADLDPYDKSLHSRVFPSGNCSGITVSSTYCSTNHDYTIWMPENPRLETSCDIFTNSRGKRASKGSKTCGFVDERGLYKSLKGACKLKLCGVLGLRLMDGTWVAMQTSDETKWCPPDQLVNLHDFRSDEIEHLVVEELVKKREECLDALESIMTTKSVSLRRLSHLRKLVPGFGKAYTIFNKTLMEAEAHYKSVQTWNEIIPSKGCLRVGGRCHPHVNGVFFNGIILGPDGHVLIPEMQSSLLQQHMELLESSVIPLMHPLADPSTVFKDGDEAEDFVEVHLPDVHKQVSGVDLGLPNWGKYVLLSAGTLIALMLIIFLMTCCRRVNRPKSTERSLGETGRKVSVTSQSGKVISSWESYKSGGETRR

SEQ ID NO: 31990 - protein, 524 aa, Artificial Sequence
  derived and/or modified protein sequence (wt) from glycoprotein__RABV__M81060.1
MVPQALLFVPLLVFSLCFGKFPIYTIPDKLGPWSPIDIHHLSCPNNLVVEDEGCTNLSGFSYMELKVGYISAIKVNGFTCTGVVTEAETYTNFVGYVTTTFKRKHFRPTPDACRAAYNWKMAGDPRYEESLHNPYPDYHWLRTVKTTKESLVIISPSVADLDPYDKSLHSRVFPSGNCSGITVSSTYCSTNHDYTIWMPENPRLETSCDIFTNSRGKRASKGSKTCGFVDERGLYKSLKGACKLKLCGVLGLRLMDGTWVAMQTSDETKWCPPDQLVNLHDFRSDEIEHLVVEELVKKREECLDALESIMTTKSVSFRRLSHLRKLVPGFGKAYTIFNKTLMEADAHYKSVRTWNEIIPSKGCLRVGGRCHPHVNGVFFNGIILGPDGHVLIPEMQSSLLQQHMELLESSVIPLMHPLADPSTVFKDGDEGEDFVEVHLPDVHKQVSGVDLGLPNWGKYVLLSAGTLIALMLIIFLMTCCRRVNRPKSTERSLGETGREVSVTSQSGKIISSWESYKSGGETRR

SEQ ID NO: 31991 - protein, 524 aa, Artificial Sequence
  derived and/or modified protein sequence (wt) from glycoprotein__RABV__S72465.1
MVPQALLLVPILGFSSCFGKFPIYTIPDTLGPWSPIDIHHLSCPNNLVVEDEGCTNLSGFSYMELKVGHISAIKVNGFTCTGVVTEAETYTNFVGYVTTTFKRKHFRPTPDACRAAYNWKMAGDPRYEESLHSPYPDYHWLRTVKTTKESLVIISPSVADLDPYDNSLHSRVFPSGKCSGITVSSVYCSTNHDYTVWMPESLRLGTSCDIFTNSRGKRVSKGSKTCGFVDERGLYKSLKGACKLKLCGVRGLRLMDGTWVAMQTSNETKWCPPDQLVNLHDLRSDEIEHLVIEELVKKREECLDALESIITTKSVSFRRLSYLRKLVPGFGKAYTIFNKTLMEAEAHYKSVRTWNEIIPSKGCLRVGGRCHPHVNGVFFNGIILGPDGHVLIPEMQSSLLQQHIELLESSVIPLMHPLADPFTVFKDGDETEDFIEVHLPDVHEQVSGVDLGLPNWGEYVLLSAGTLIALMLIIFLMTCCRKVDRPESTQRSLRGTGRNVSVTSQSGKFIPSWESYKSGGETGL

SEQ ID NO: 31992 - protein, 524 aa, Artificial Sequence
  derived and/or modified protein sequence (wt) from glycoprotein__RABV__U03764.1
MVPQALLFVPLLAFPMCFGKFPIYTIPDKLGPWSPIDIHHLSCPNNLVVEDEGCTNLSGFSYMELKVGYISAIKVNGFTCTGVVTEAETYTNFVGYVTTTFKRKHFRPTPDACRAAYNWKMAGDPRYEESLHNPYPDYHWLRTVKTTKESLIIISPSVADLDPYDKSLHSRVFPSGKCLGITISSTYCSTNHDYTIWMPENLRLGTSCDIFTNSRGKRASKGSKTCGFVDERGLYKSLKGACKLKLCGVLGLRLMDGTWVAMQTSDETKWCPPDQLVNLHDFRSDEIEHLVVEELVKKREECLDALESIMTTKSVSFRRLSHLRKLVPGFGKAYTIFNKTLMEADAHYKSVRTWNEIIPSKGCLRVGGRCHPHVNGVVFNGIILGPDGHVLIPEMQSSLLQQHMELLESSVIPLMHPLADPSTVFKDGDEAEDFVEVHLPDVHKQISGVDLGLPNWGKYVLIIAGVLIAMILTIFLMTCCGRGNRPKSTQHSLGGIGRKVSATSQSGKVISSWESYKSGGETRL

SEQ ID NO: 31993 - protein, 524 aa, Artificial Sequence
  derived and/or modified protein sequence (wt) from glycoprotein__RABV__U03765.1
MVPQALLFVPLLAFPMCFGKFPIYTIPDKLGPWSPIDIHHLSCPNNLVVEDEGCTNLSGFSYMELKVGYISAIKVNGFTCTGVVTEAETYTNFVGYVTTTFKRKHFRPTPDACRAAYNWKMAGDPRYEESLHNPYPDYHWLRTVKTTKESLIIISPSVADLDPYDKSLHSRVFPSGKCLGITISSTYCSTNHDYTIWMPENVRLGTSCDIFTNSRGKRASKGSKTCGFVDERGLYKSLKGACKLKLCGVLGLRLMDGTWVAMPTSDETKWCPPDQLVNLHDFRSDEIEHLVVEELVRKREECLDALESIMTTKSVSFRRLSHLRKLVPGFGKAYTIFNKTLMEADAHYKSVRTWNEIIPSKGCLRVGGRCHPHVNGVVFNGIILGPDGHVLIPEMQSSLLQQHMELLESSVIPLMHPLADPSTVFKDGDEAEDFVEVHLPDVHKQISGVDLGLPNWGKYVLTIAGVLIAMILTIFLMTCCGRGNRPKSTQHSLGGIGRKVSSTSQSGKVISSWESYKSGGETRL

SEQ ID NO: 31994 - protein, 524 aa, Artificial Sequence
  derived and/or modified protein sequence (wt) from glycoprotein__RABV__U03766.1
MVPQALLFVPLLAFPMCFGKFPIYTIPDKLGPWSPIDIHHLSCPNNLVVEDEGCTNLSGFSYMELKVGYISAIKVNGFTCTGVVTEAETYTNFVGYVTTTFKRKHFRPTPDACRAAYNWKMAGDPRYEESLHNPYPDYHWLRTVKTTKESLIIISPSVADLDPYDKSLHSRVFPSGKCLGITISSTYCSTNHDYTIWMPENVRLGTSCDIFTNSRGKRASKGSKTCGFVDERGLYKSLKGACKLKLCGVLGLRLMDGTWVAMPTSDETKWCPPDQLVNLHDFRSDEIEHLVVEELVRKREECLDALESIMTTKSVSFRRLSHLRKLVPGFGKAYTIFNKTLMEADAHYKSVRTWNEIIPSKGCLRVGGRCHPHVNGVVFNGIILGPDGHVLIPEMQSSLLQQHMELLESSVIPLMHPLADPSTVFKDGDEAEDFVEVHLPDVHKQISGVDLGLPNWGKYVLIIAGVLIAMILTIFLMTCCGRGNRPKSTQHSLGGIGRKVSSTSQSGKVISSWESYKSGGETRL

SEQ ID NO: 31995 - protein, 524 aa, Artificial Sequence
  derived and/or modified protein sequence (wt) from glycoprotein__RABV__U03767.1
MVPQALLFVPLLAFPMCFGKFPIYTIPDKLGPWSPIDIHHLSCPNNLVVEDEGCTNLSGFSYMELKVGYISAIKVNGFTCTGVVTEAETYTNFVGYVTTTFKRKHFRPTPDACRAAYNWKMAGDPRYEESLHNPYPDYHWLRTVKTTKESLIIISPSVADLDPYDKSLHSRVFPSGKCLGITISSTYCSTNHDYTIWMPDNVRLGTSCDIFTNSRGKRASKGSKTCGFVDERGLYKSLKGACKLKLCGVLGLRLMDGTWVAMPTSDETKWCPPGQLVNLHDFRSDEIEHLVVEELVRKREECLDALESIMTTKSVSFRRLSHLRKLVPGFGKAYTIFNKTLMEADAHYKSVRTWNEIIPSKGCLRVGGRCHPHVNGVVFNGIILGPDGHVLIPEMQSSLLQQHMELLESSVIPLMHPLADPSTVFKDGDEAEDFVEVHLPDVHKQISGVDLGLPNWGKYVLIIAGVLIAMILTIFLMTCCGRGNRPKSTQHSLGGIGRKVSSTSQSGKVISSWESYKSGGETRL

SEQ ID NO: 31996 - protein, 524 aa, Artificial Sequence
  derived and/or modified protein sequence (wt) from glycoprotein__RABV__U11736.2
MVPQALLLVPLLAFPMCFGKFPIYTIPDKLGPWSPIDIHHLSCPNNLVVEDEGCTNLSGFSYMELKVGYISAIKVNGFTCTGVVTEAETYTNFVGYVTTTFKRKHFRPTPDACRAAYNWKMAGDPRYEESLHNPYPDYHWLRTVKTMKESLIIISPSVADLDPYDKSLHSRVFPSGKCLGITISSTYCSTNHDYTIWMPENLRLGTSCDIFTNSRGKRASKGSKTCGFVDERGLYKSLKGACKLKLCGVLGLRLMDGTWVAMQTSDETKWCPPDQLVNLHDFRSDEIEHLVVEELVKKREECLDALESIMTTKSVSFRRLSHLRKLVPGFGKAYTIFNKTLMEADAHYKSVRTWNEIIPSKGCLRVGGRCHPHVNGVVFNGIILGPDGHVLIPEMQSSLLQQHMELLESSVIPLMHPLADPSTVFKDGDEAEDFVEVHLPDVHKQISGVDLGLPNWGKYVLIIAGVLIAMILTIFLMTCCGRGNRSKSTQHSLGGIGRKVSATSQSGKVISSWESYKSGSETRL

SEQ ID NO: 31997 - protein, 524 aa, Artificial Sequence
  derived and/or modified protein sequence (wt) from glycoprotein__RABV__U11743.2
MVPQALLFVPLLAFPMCFGKFPIYTIPDKLGPWSPIDIHHLSCPNNLVVEDEGCTNLSGFSYMELKVGYISAIKVNGFTCTGVVTEAETYTNFVGYVTTTFKRKHFRPTPDACRAAYNWKMAGDPRYEESLHNPYPDYHWLRTVKTTKESLIIISPSVADLDPYDKSLHSRVFPSGKCLGITISSTYCSTNHDYTIWMPENLRLGTSCDIFTNSRGKRASKGSKTCGFVDERGLYKSLKGACKLKLCGVLGLRLMDGTWVAMQTSDETKWCPPDQLVNLHDFRSDEIEHLVVEELVKKREECLDALESIMTTKSVSFRRLSHLRKLVPGFGKAYTIFNKTLMEADAHYKSVRTWNEIIPSKGCLRVGGRCHPHVNGVVFNGIILGPDGHVLIPEMQSSLLQQHMELLESSVIPLMHPLADPSTVFKDGDEAEDFVEVHLPDVHKQISGVDLGLPNWGKYVLIIAGVLIAMILTIFLMTCCGRGNRPKSTQHSLGGIGRKVSATSQSRKVISSWESYKSGGETRL

SEQ ID NO: 31998 - protein, 524 aa, Artificial Sequence; identical to SEQ ID NO: 31997
  derived and/or modified protein sequence (wt) from glycoprotein__RABV__U11747.2

SEQ ID NO: 31999 - protein, 524 aa, Artificial Sequence; identical to SEQ ID NO: 31992
  derived and/or modified protein sequence (wt) from glycoprotein__RABV__U11748.2

SEQ ID NO: 32000 - protein, 524 aa, Artificial Sequence
  derived and/or modified protein sequence (wt) from glycoprotein__RABV__U11750.2
MVPQALLFVPLLAFPMCFGKFPIYTIPDKLGPWSPIDIHHLSCPNNLVVEDEGCTNLSGFSYMELKVGYISAIKVNGFTCTGVVTEAETYTNFVGYVTTTFKRKHFRPTPDACRAAYNWKMAGDPRYEESLHNPYPDYHWLRTVKTTKESLIIISPSVADLDPYDKSLHSRVFPSGKCLGITISSTYCSTNHDYTIWMPENLRLGTSCDIFTNSRGKRASKGSKTCGFVDERGLYKSLKGACKLKLCGVLGLRLMDGTWVAMQTSEETKWCPPDQLVNLHDFRSDEIEHLVVEELVKKREECLDALESIMTTKSVSFRRLSHLRKLVPGFGKAYTIFNKTLMEADAHYKSVRTWNEIIPSKGCLRVGGRCHPHVNGVVFNGIILGPDGRVLIPEMQSSLLQQHMELLESSVIPLMHPLADPSTVFKDGDEAEDFVEVHLPDVHKQISGVDLGLPNWGKYVLIIAGVLIATILTIFLMACCGRGNRPKSTQHSLGGIGRKVSATSQSGKVISSWESYKSGGETRL

SEQ ID NO: 32001 - protein, 524 aa, Artificial Sequence
  derived and/or modified protein sequence (wt) from glycoprotein__RABV__U11752.2
MVPQALLFVPLLAFPMCFGKFPIYTIPDKLGPWSPIDIHHLSCPNNLVVEDEGCTNLSGFSYMELKVGYISAIKVNGFTCTGVVTEAETYTNFVGYVTTTFKRKHFRPTPDACRAAYNWKMAGDPRYEESLHNPYPDYHWLRTVKTTKESLIIISPSVADLDPYDKSLHSRVFPSGKCLGITISSTYCSTNHDYTIWMPENLRLGTSCDIFTNSRGKRASKGSKTCGFVDERGLYKSLKGACKLKLCGVLGLRLMDGTWVAMQTSDETKWCPPDQLVNLHDFRSDEIEHLVVEELVKKREECLDALESIMTTKSVSFRRLSHLRKLVPGFGKAYTIFNKTLMEADAHYKSVRTWNEIIPSKGCLRVGGRCHPHVNGVVFNGIILGPDGHVLIPEMQSSLLQQHMELLESSVIPLMHPLADPSTVFKDGDEAEDFVEVHLPDVHKQISGVDLGLPNWGKYVLIIAGVLIVMILTIFLMTCCGRGNRPKSTQHSLGGIGRKVSATSQSGKVISSWESYKSGGETRL

SEQ ID NO: 32002 - protein, 524 aa, Artificial Sequence
  derived and/or modified protein sequence (wt) from glycoprotein__RABV__U11753.1
MVPQALLFVPLLAFPMCFGKFPIYTIPDKLGPWSPIDIHHLSCPNNLVVEDEGCTNLSGFSYMELKVGYISAIKVNGFTCTGVVTEAETYTNFVGYVTTTFKRKHFRPTPDACRAAYNWKMAGDPRYEESLHNPYPDYHWLRTVKTTKESLIIISPSVADLDPYDKSLHSRVFPSGKCLGITISSTYCSTNHDYTIWMPENLRLGTSCDIFTNSRGKRASKGSKTCGFVDERGLYKSLKGACKLKLCGVLGLRLMDGTWVAMQTSDETKWCPPDQLVNLHDFRSDEIEHLVVEELVKKREECLDALESIMTTKSVSFRRLSHLRKLVPGFGKAYTIFNKTLMEADAHYKSVRTWNEIIPSKGCLRVGGKCHPHVNGVFFNGIILGPDGHVLIPEMQSSLLQQHMELLESSVIPLMHPLADPSTVFKDGDEAEDFVEVHLPDVHKQISGVDLGLPNWGKYVLIIAGVLIAMILTIFLMTCCGRGNRPKSTQHSLGGIGRKVSATSQSGKVISSWESYKSGGETRL

SEQ ID NO: 32003 - protein, 524 aa, Artificial Sequence
  derived and/or modified protein sequence (wt) from glycoprotein__RABV__U11754.1
MVPQALLFVPLLAFPMCFGKFPIYTIPDKLGPWSPIDIHHLSCPNNLVVEDEGCTNLSGFSYLELKVGYISAIKVNGFTCTGVVTEAETYTNFVGYVTTTFKRKHFRPTPDACRAAYNWKMAGDPRYEESLHNPYPDYHWLRTVKTTKESPIIISPSVADLDPYDKSLHSRVFPSGKCLGITISSTYCSTNHDYTIWMPENLRLGTSCDIFTNSRGKRASKGSKACGFVDERGLYKSLKGACKLKLCGVLGLRLMDGTWVAMQTSDETKWCPPDQLVNLHDFRSDEIEHLVVEELVKKREECLDALESIMTTKSVSFRRLSHLRKLVPGFGKAYTIFNKTLMEADAHYKSVRTWNEIIPSKGCLRVGGRCHPHVNGVFFNGIILGPDGHVLIPEMQSSLLQQHMELLESSVIPLMHPLADPSTVFKDGDEAEDFVEVHLPDVHKQISGVDLGLPNWGKYVLIIAGVLIAMLLTVFLMTCCGKGNRPKSIQHSLGGIGRKVSATSQSGKVISSWESYKSGGETRL

SEQ ID NO: 32004 - protein, 524 aa, Artificial Sequence
  derived and/or modified protein sequence (wt) from glycoprotein__RABV__U11755.1
MVPQALLLVPLLAFPMCFGKFPIYTIPDKLGPWSPIDIHHLSCPNNLVVEDEGCTNLSGFSYMELKVGYISAIKVNGFTCTGVVTEAETYTNFVGYVTTTFKRKHFRPTPDACRAAYNWKMAGDPRYEESLHNPYPDYHWLRTVKTTKESLIIISPSVADLDPYDKSLHSRVFPSGKCLGITISSTYCSTNHDYTIWMPENLRLGTSCDIFTNSRGKRASKGSKTCGFVDERGLYKSLKGACKLKLCGVLGLRLMDGTWVAMQTSDETKWCPPDQLVNLHDFRSDEIEHLVVEELVKKREECLDALESIMTTKSVSFRRLSHLRKLVPGFGKAYTIFNKTLMEADAHYKSVRTWNEIIPSKGCLRVGGRCHPHVNGVVFNGIILGPDGHVLIPEMQSSLLQQHMELLESSVIPLMHPLADPSTVFKDGDEAEDFVEVHLPDVHKQISGVDLGLPNWGKYVLIIAGVLIAMILTIFLMTCCGRGNRPKSTQHSLGGIGRKVSATSQSGKVISSWESYKSGSETRL

SEQ ID NO: 32005 - protein, 524 aa, Artificial Sequence
  derived and/or modified protein sequence (wt) from glycoprotein__RABV__U11756.1
MVPQALLFVPLLAFPMCFGKFPIYTIPDKLGPWSPIDIHHLSCPNNLVVEDEGCTNLSGFSYMELKVGYISAIKVNGFTCTGVVTEAETYTNFVGYVTTTFKRKHFRPTPDACRVAYNWKMAGDPRYEESLHNPYPDYHWLRTVKTTKESLIIISPSVADLDPYDKSLHSRVFPSGKCLGITISSTYCSTNHDYTIWMPENLRLGTSCDIFTNSRGKRASKGSKTCGFVDERGLYKSLKGACKLKLCGVLGLRLMDGTWVAMQTSDETKWCPPDQLVNLHDFRSDEIEHLVVEELVKKREECLDALESIMTTKSVSFRRLSHLRKLVPGFGKAYTIFNKTLMEADAHYKSVRTWNEIIPSKGCLRVGGKCHPHVNGVVFNGIILGPDGHVLIPEMQSSLLQQHMELLESSVIPLMHPLADPSTVFKDGDEAEDFVEVHLPDVHKQISGVDLGLPNWGKYVLIIAGVLIAMILTIFLMTCCGRGNRPKSTQHSLGGIGRKVSATSQSGKVISSWESYKSGGETRL

SEQ ID NO: 32006 - protein, 524 aa, Artificial Sequence
  derived and/or modified protein sequence (wt) from glycoprotein__RABV__U11757.1
MVPQALLFVPLLAFPMCFGKFPIYTIPDKLGPWSPIDIHHLSCPNNLVVEDEGCTNLSGFSYMELKVGYISAIKVNGFTCTGVVTEAETYTNFVGYVTTTFKRKHFRPTPDACRAAYNWKMAGDPRYEESLHNPYPDYHWLRTVKTTKESLIIISPSVADLDPYDKSLHSRVFPSGKCLGITISSTYCSTNHDYTIWMPENLRLGTSCDIFTNSRGKRASKGSKTCGFVDERGLYKSLKGACKLKLCGVLGLRLMDGTWVAMQTSDETKWCPPDQLVNLHDFRSDEIEHLVVEELVKKREECLDALESIMTTKSVSFRRLSHLRKLVPGFGKAYTIFNKTLMEADAHYKSVRTWNEIIPSKGCLRVGGRCHPHVNGVVFNGIILGPDGHVLIPEMQSSLLQQHMELLESSVIPLMHPLADPSTVFKDGDEAEDFVEVHLPDVHKQISGVDLGLPNWGKYVLIIAGVLIAMILTVFLMTCCGRGNRPKSIQHSLGGIGRKVSATSQSGKVISSWESYKSGGETRL

SEQ ID NO: 32007 - protein, 524 aa, Artificial Sequence; identical to SEQ ID NO: 31992
  derived and/or modified protein sequence (wt) from glycoprotein__RABV__U11758.1

SEQ ID NO: 32008 - protein, 524 aa, Artificial Sequence
  derived and/or modified protein sequence (wt) from glycoprotein__RABV__U27214.1
MVPWALLFVPFLISSLCFGKFPIYTIPDKLGPWSPIDIHHLSCPNNLVVEDEGCNSLSGFSYMELKVGYISAIKVNGFTCTGVVTEAETYTNFVGYVTTTFKRKHFCPMPDACRSAYNWKMAGDPRYEESLHNPYPDYHWLRTVKTTKESLVIISPSVADLDPYDKSLHSRIFPGGKCTGLTVSSTYCSTNHDYTIWMPEKAGLGTSCDIFTNSKGKRASKGGKTCGFVDERGLYKSLKGACKLKLCGVSGLRLMDGTWVAIQTLDETKWCSPDQLVNLHDFHSDELEHLVVEELVRKREECLDALESIMTTKSVSFRRLSHLRKLVPGFGKAYTIFNKTLMEADAHYKSVRTWSEIIPSKGCLRVGGRCHPHVNGVFFNGIILGPDGHVLIPEMQSSLLQQHVELLESSVIPLMHPLADPSAVFKDGDEAEDFVEVHLPDVHKQISGVDLGLPSWGKYMLMIAGALTTLMLFIFLMTCCKRVNRTKSIRQGPREIERKVSFTPQNKKVVSSWESYKSGGETKL

SEQ ID NO: 32009 - protein, 524 aa, Artificial Sequence
  derived and/or modified protein sequence (wt) from glycoprotein__RABV__U27215.1
MVPWALLFVPFLISSLCFGKFPIYTIPDKLGPWSPIDIHHLSCPNNLVVEDEGCNSLSGFSYMELKVGYISAIKVNGFTCTGVVTEAETYTNFVGYVTTTFKRKHFCPMPDACRSAYNWKMAGDPRYEESLHNPYPDYHWLRTVKTTKESLIIISPSVADLDPYDKSLHSRIFPGGKCTGLTVSSTYCSTNHDYTIWMPEKAGLGTSCDIFTNSKGKRASKGGKTCGFVDERGLYKSLKGACKLKLCGVSGLRLMDGTWVAIQTLDETKWCSPDQLVNLHDFHSDELEHLVVEELVRKREECLDALESIMTTKSVSFRRLSHLRKLVPGFGKAYTIFNKTLMEADAHYKSVRTWSEIIPSKGCLRVGGRCHPHVNGVFFNGIILGPDGHVLIPEMQSSLLQQHVELLESSVIPLMHPLADPSAVFKDGDEAEDFVEVHLPDVHKQISGVDLGLPSWGKYMLMIAGALTTLMLFIFLMTCCKRVNRTKSIRQGPREIERKVSFTPQNKKVVSSWESYKSGGETKL

SEQ ID NO: 32010 - protein, 524 aa, Artificial Sequence
  derived and/or modified protein sequence (wt) from glycoprotein__RABV__U27216.1
MVPWALLFVPFLISSLCFGKFPIYTIPDKLGPWSPIDIHHLSCPNNLVVEDEGCNSLSGFSYMELKVGYISAIKVNGFTCTGVVTEAETYTNFVGYVTTTFKRKHFCPMPDACRSAYNWKMAGDPRYEESLHNPYPDYHWLRTVKTTKESLIIISPSVADLDPYDRSLHSRIFPGGKCTGLTVSSTYCSTNHDYTIWMPEKAGLGTSCDIFTNSKGKRASKGGKTCGFVDERGLYKSLKGACKLKLCGVSGLRLMDGTWVAIQTLDETKWCSPDQLVNLHDFHSDELEHLVVEELVRKREECLDALESIMTTKSVSFRRLSHLRKLVPGFGKAYTIFNKTLMEADAHYKSVRTWSEIIPSKGCLRVGGRCHPHVNGVFFNGIILGPDGHVLIPEMQSSLLQQHVELLESSVIPLMHPLADPSAVFKDGDEAEDFVEVHLPDVHKQISGVDLGLPSWGKYMLMIAGALTTLMLFIFLMTCCKRVNRTESIRQGPRELESKVSVTPQNKKVISSWESYKSGGETKL

SEQ ID NO: 32011 - protein, 524 aa, Artificial Sequence
  derived and/or modified protein sequence (wt) from glycoprotein__RABV__U27217.1
MVPWALLFVPFLISSLCFGKFPIYTIPDKLGPWSPIDIHHLSCPNNLVVEDEGCNSLSGFSYMELKVGYISAIKVNGFTCTGVVTEAETYTNFVGYVTTTFKRKHFCPMPDACRSAYNWKMAGDPRYEESLHNPYPDYHWLRTVKTTKESLIIISPSVAELDPYDKSLHSRIFPGGKCTGLTVSSTYCSTNHDYTIWMPEKAGLGTSCDIFTNSKGKRASKGGKTCGFVDERGLYKSLKGACKLKLCGVSGLRLMDGTWVAIQTLDETKWCSPDQLVNLHDFHSDELEHLVVEELVRKREECLDALESIMTTKSVSFRRLSHLRKLVPGFGKAYTIFNKTLMEADAHYKSVRTWSEIIPSKGCLRVGGRCHPHVNGVFFNGIILGPDGHVLIPEMQSSLLQQHVELLESSVIPLMHPLADPSAVFKDGDEAEDFVEVHLPDVHKQISGVDLGLPSWGKYMLMIAGALTTLMLFIFLMTCCKRVNRTKSIRQGPREIERKVSFTPQNKKVVSSWESYKSGGETKL

SEQ ID NO: 32012 - protein, 524 aa, Artificial Sequence
  derived and/or modified protein sequence (wt) from glycoprotein__RABV__X71879.1
MVPQALLFVPLLVFPLCFGKFPIYTIPDKLGPWSPIDIHHLSCPNNLVVEDEGCTNLSGFSYMELKVGYILAIKMNGFTCTGVVTEAENYTNFVGYVTTTFKRKHLRPTPDACRAAYNWKMAGDPRYEESLHNPYPDYSWLRTVKTTKESLVIISPSVADLDPYDRSLHSRVFPSGKCSGVAVSSTYCSTNHDYTIWMPENPRLGKSCDIFTNSRGKRASKGSETCGFVDERGLYKSLKGACKLKLCGVLGLRLMDGTWVAMQTSNETKWCPPDQLVNLHDFRSDEIEHLVVEELVRKREECLDALESIMTTKSVSFRRLSHLRKLVPGFGKAYTIFNKTLMEADAHYKSVRTWNEILPSKGCLRVGGRCHPHVNGVFFNGIILGPDGNVLIPEMQSSLLQQHMELLESSVIPLVHPLADPSTVFKDGDEAEDFVEVHLPDVHNQVSGVDLGLPNWGKYVLLSAGALTALMLIIFLMTCCRRVNRSEPTQHNLRGTGREVSVTPQTWKIISSWESHKSGGETRL

SEQ ID NO: 32013 - RNA, 1701 nt, Artificial Sequence
  derived and/or modified CDS sequence (wt) from hemagglutinin__InfluenzaA__AAA16879
auggaagcaaaacuauuuguacuauucuguacauucacuguacugaaagcugacaccaucugugugggcuaccaugcaaacaacucuacagacacuguugacacaguacuggaaaagaaugugaccgugacucacucagugaauuugcucgaagacagccauaaugggaaacucugcagccugaacgggauagcuccccuacaauuggggaagugcaauguagcgggauggcuccuuggcaauccagaaugugaccuucuacucacugcaaacucaugguccuauauaauagagacuuccaauucagaaaacggaacaugcuaucccggugaauucauagauuaugaagaauuaagagagcagcuaaguucaguuucuucauuugaaaaguuugaaauuuucccgaaagcaagcucauggccaaaucaugagacaacuaaaggugucacagccgcaugcucuuacucuggagccagcaguuuuuaucggaacuugcuguggauaacaaagaagggaacuucauaucccaaacucagcaaaucauacacgaacaauaaggggaaagaagugcuugugcucuggggggugcaccacccuccaacuaccagugagcaacaaagucuauaccagaacgcugaugcauaugucucaguuggaucaucaaaauacaaccgaagauuuacuccggaaauagcagcuagaccuaaaguuagaggacaggcaggcaggaugaacuauuauuggacacuauuagaccaaggagauaccauaacauuugaagccacugggaauuugauagcaccaugguaugcuuucgcacugaauaaggggucugacucuggaauuauaacaucagaugcuccaguucacaauugugacacaaggugccaaaccccucauggggcuuugaacaguagccuuccuuuucagaauguacauccuaucacuauuggagaaugucccaaauacaucaagagcaccaagcuaagaauggcaacaggacuaagaaaugucccauccauucaguccagaggacuauuuggagcaauugcuggauucauugagggaggauggacaggcaugauagauggaugguacggguaccaucaccagaaugagcagggaucaggauaugcugcugaucagaaaagcacacagaaugcgaucgacggaaucacaaauaaggugaauucgguaauugaaaagaugaacacucaauucacugcagugggcaaggaauucaacaauuuagaaaggagaauugaaaaucugaauaagaaggucgaugauggauuccuggauguuuggacauacaaugccgagcugcucguucuacuugaaaaugaaaggacucuggacuuucaugauuccaaugugagaaauuuauaugagaaggucaaaucacaauugaggaauaaugccaaagaacuugggaaugguuguuuugaguucuaccacaagugugaugaugagugcauggaaagagagaagaacggcacauaugacuaucccaaauauucagaagaguccaaauugaaucgagaggaaauagacggagugaaacuagagucaaugggaguuuaccaaauuuuggcgaucuauuccacagucgccaguucucuagucuuguuagucucccugggggcaaucagcuucuggaugugcucuaaugggucauugcaaugcagaauaugcauuuag

SEQ ID NO: 32014 - RNA, 1701 nt, Artificial Sequence
  derived and/or modified CDS sequence (wt) from hemagglutinin__InfluenzaA__AAA16880
auggaagcaaaacuauuugugcuauucuguacauucacuguacugaaagcugacaccaucugugugggcuaccaugcaaacaacucuacagacacuguugacacaguacuagaaaagaaugugaccgugacucacucagugaauuugcucgaagacagccauaaugggaagcucugcagucugaacggaauagcuccccuacaacugggaaagugcaauguggcgggauggcuccuuggcaauccagagugugaccuucuacucacugcaaacucaugguccuacauaauagaaacuucaaauucagaaaacggaacaugcuaccccggugaauuuauagauuaugaagaguuaagagagcagcuaaguucaguuucuucauuugaaaaguuugaaauuuucccgaaggcaagcucauggccaaaucaugagacaacuaaagguguuacagcugcaugcucuuacucuggagccagcaguuuuuaucggaauuugcuguggauaacaaagaagggaacuucauauccaacacucagcaaaucauacacgaacaauaaggggaaagaagugcuugugcucuggggggugcaccacccuccaacugucaaugagcaacaaagucuauaccagaacgcugaugcauauguuucaguuggaucaucaaaauacaaccgaagauucacuccagaaauagcagcuagaccuaaaguuagaggacaggcaggcagaaugaacuaucauuggacacuauuagaccaaggagacaccauaacguuugaagccaccgggaauuugauagcaccaugguaugcuuucgcauugaauaaggggucugacucuggaauuauaacaucagaugcuccaguucauaacugugacacaaggugucaaaccccucauggggcuuugaacagcagccuuccuuuucagaauguacauccuaucacuauuggagaaugucccaaauacgucaaaagcaccaagcuaagaauggcaacaggacuaagaaauguuccauccauucaauccagaggacuauuuggagcaauugcuggauucauugagggaggauggacaggcaugauagaugggugguacggguaucaucaucagaaugagcagggaucaggauaugcugccgaucagaaaagcacacagaaugcgaucgacgggaucacaaauaaggugaauucggugauugagaagaugaacacuaaauucacugcagugggcaaggaauucaacaauuuagaaaggagaauugaaaauuuaaauaagaaggucgaugauggauuccuggauguuuggacauacaaugccgaacugcucguccuacuugaaaaugagaggacucuggacuuucaugacuccaaugugagaaauuuauaugagaaggucaaaucacaauugaggaauaaugccaaagaacuugggaaugguuguuuugaguucuaccacaagugugaugaugagugcauagaaagugugaagaacggcacauaugacuaucccaaauauucagaagaguccaaauugaaccgagaagaaauagacggagugaaacuagaaucgaugggaguuuaucaaauuuuggcgaucuauuccacagucgccaguucucuagucuuguuagucucccugggggcaaucagcuucuggaugugcucuaaugggucauugcaaugcagaauaugcauuuag

SEQ ID NO: 32015 - RNA, 1689 nt, Artificial Sequence
  derived and/or modified CDS sequence (wt) from hemagglutinin__InfluenzaA__AAA64362
auggccaucauuuaucucauucuccuguucacagcagugagaggggaccagauaugcauuggauaccaugccaauaauuccacagagaaggucgacacaauucuagagcggaacgucacugugacucaugccaaggacauucuugagaagacccauaacggaaaguuaugcaaacuaaacggaaucccuccacuugaacuaggggacuguagcauugccggauggcuccuuggaaauccagaaugugauaggcuucuaagugugccagaaugguccuauauaauggagaaagaaaacccgagagacgguuuguguuauccaggcagcuucaaugauuaugaagaauugaaauaucuccucagcagcgugaaacauuucgagaaaguaaagauucugcccaaagauagauggacacagcauacaacaacuggagguucacgggccugcgcggugucugguaauccaucauucuucaggaacauggucuggcugacaaagaaaggaucagauuauccgguugccaaaggaucguacaacaauacaagcggagaacaaaugcuaauaauuuggggggugcaccaucccaaugaugagacagaacaaagaacauuguaccagaaugugggaaccuauguuuccguaggcacaucaacauugaacaaaaggucaaccccagaaauagcaacaaggccuaaagugaauggacuaggaaguagaauggaauucucuuggacccucuuggauaugugggacaccauaaauuuugagaguacugguaaucuaauugcaccagaguauggauucaaaauaucgaaaagagguaguucagggaucaugaaaacagaaggaacacuugagaacugugagaccaaaugccaaacuccuuugggagcaauaaauacaacauugccuuuucacaauguccacccacugacaauaggugagugccccagauauguaaaaucggagaaguuggucuuagcaacaggacuaaggaauguuccccagauugaaucaagaggauuguuuggggcaauagcugguuuuauagaaggaggauggcaaggaaugguugaugguugguauggauaccaucacagcaaugaccagggaucaggguaugcagcagacaaagaauccacucaaaaggcauuugauggaaucaccaacaagguaaauucugugauugaaaagaugaacacccaauuugaagcuguugggaaagaauucaguaacuuagagagaagacuggagaacuugaacaaaaagauggaagacggguuucuagauguguggacauacaaugcugagcuucuaguucugauggaaaaugagaggacacuugacuuucaugauucuaaugucaagaaucuguaugauaaagucagaaugcagcugagagacaacgucaaagaacuaggaaauggauguuuugaauuuuaucacaaaugugaugaugaaugcaugaauagugugaaaaacgggacguaugauuaucccaaguaugaagaagagucuaaacuaaauagaaaugaaaucaaagggguaaaauugagcagcauggggguuuaucaaauccuugccauuuaugcuacaguagcagguucucugucacuggcaaucaugauggcugggaucucuuucuggaugugcuccaacgggucucugcagugcaggaucugcauauga

SEQ ID NO: 32016 - RNA, 1689 nt, Artificial Sequence
  derived and/or modified CDS sequence (wt) from hemagglutinin__InfluenzaA__AAA64363
auggccaucauuuaucucauucuccuguucacagcagugagaggggaccagauaugcauuggauaccaugccaauaauuccacagagaaggucgacacaauucuagagcggaacgucacugugacucaugccaaggacauucuugagaagacccauaacggaaaguuaugcaaacuaaacggaaucccuccacuugaacuaggggacuguagcauugccggauggcuccuuggaaauccagaaugugauaggcuucuaagugugccagaaugguccuauauaauggagaaagaaaacccgagagacgguuuguguuauccaggcagcuucaacgauuaugaagaauugaaacaucuccucagcagcgugaaacauuucgagaaaguaaagauucugcccaaagauagauggacacagcauacaacaacuggagguucacgggccugcgcggugucugguaauccaucauucuucaggaacauggucuggcugacaaagaaaggaucaaauuauccgguugccaaaggaucguacaacaauacaagcggagaacaaaugcuaauaauuuggggggugcaccaucccaaugaugagacagaacaaagaacauuguaccagaaugugggaaccuauguuuccguaggcacaucaacauugaacaaaaggucaaccccagacauagcaacaaggccuaaagugaauggacaaggagguagaauggaauucucuuggacccuauuggauaugugggacaccauaaauuuugagaguacugguaaucuaauugcaccagaguauggauucaaaauaucgaaaagagguaguucagggaucaugaaaacagaaggaacacuugggaacugugagaccaaaugccaaacuccuuugggagcaauaaauacaacauugccuuuucacaauguccacccacugacaauaggugagugccccaaauauguaaaaucggagaaguuggucuuagcaacaggacuaaggaauguuccccagauugaaucaagaggauuguuuggggcaauagcugguuuuauagaaggaggauggcaaggaaugguugaugguugguauggauaccaucacagcaaugaccagggaucaggguaugcagcagacaaagaauccacucaaaaggcauuugauggaaucaccaacaagguaaauucugugauugaaaagauaaacacccaauuugaagcuguugagaaagaauucaguaacuuagagagaagacuggagaacuugaacaaaaagauggaagacggguuucuagauguguggacauacaaugcugagcuucuaguucugauggaaaaugagaggacacuugacuuucaugauucuagugucaagaaucuguaugauaaagucagaaugcagcugagagacaacgucaaagaacuaggaaauggauguuuugaauuuuaucacaaaugugaugaugaaugcaugaauagugugaaaaacgggacguaugauuaucccaaguaugaagaagagucuaaacuaaauagaaaugaaaucaaagggguaaaauugagcagcauggggauuuaucaaauccuugccauuuaugcuacaguagcagguucucugucacuggcaaucaugauggcugggaucucuuucuggaugugcuccaacgggucucugcagugcaggaucugcauauga

SEQ ID NO: 32017 - RNA, 1689 nt, Artificial Sequence
  derived and/or modified CDS sequence (wt) from hemagglutinin__InfluenzaA__AAA64365
auggccaucauuuaucucauucuccuguucacagcagugagaggggaccagauaugcauuggauaccaugccaauaauuccacagagaaggucgacacaauucuagagcggaacgucacugugacucaugccaaggacauucuugagaagacccauaacggaaaguuaugcaaacuaaacggaaucccuccacuugaacuaggggacuguagcauugccggauggcuccuuggaaauccagaaugugauaggcuucuaagugugccagaaugguccuauauaauggagaaagaaaacccgagagacgguuuguguuauccaggcagcuucaacgauuaugaagaauugaaacaucuccucagcagcgugaaacauuucgagaaaguaaagauucugcccaaagauagauggacacagcauacaacaacuggagguucacgggccugcgcggugucugguaauccaucauucuucaggaacauggucuggcugacaaagaaaggaucaaauuauccgguugccaaaggaucguacaacaauacaagcggagaacaaaugcuaauaauuuggggggugcaccaucccaaugaugagacagaacaaagaacauuguaccagaaugugggaaccuauguuuccguaggcacaucaacauugaacaaaaggucaaccccagacauagcaacaaggccuaaaguggauggacuaggaaguagaauggaauucucuuggacccuauuggauaugugggacaccauaaauuuugagaguacugguaaucuaauugcaccagaguauggauucaaaauaucgaaaagagguaguucagggaucaugaaaacagaaggaacacuugggaacugugagaccaaaugccaaacuccuuugggagcaauaaauacaacauugccuuuucacaauguccacccacugacaauaggugagugccccaaauauguaaaaucggagaaguuggucuuagcaacaggacuaaggaauguuccccagauugaaucaagaggauuguuuggggcaauagcugguuuuauagaaggaggauggcaaggaaugguugaugguugguauggauaccaucacagcaaugaccagggaucaggguaugcagcagacaaagaauccacucaaaaggcauuugauggaaucaccaacaagguaaauucugugauugaaaagaugaacacccaauuugaagcuguugagaaagaauucaguaacuuagagagaagacuggagaacuugaacaaaaagauggaagacggguuucuagauguguggacauacaaugcugagcuucuaguucugauggaaaaugagaggacacuugacuuucaugauucuaaugucaagaaucuguauaauaaagucagaaugcagcugagagacaacgucaaagaacuaggaaauggauguuuugaauuuuaucacaaaugugaugaugaaugcaugaauagugugaaaaacgggacguaugauuaucccaaguaugaagaagagucuaaacuaaauagaaaugaaaucaaagggguaaaauugagcagcauggggauuuaucaaauccuugccauuuaugcuacaguagcagguucucugucacuggcaaucaugauggcugggaucucuuucuggaugugcuccaacgggucucugcagugcaggaucugcauauga

SEQ ID NO: 32018 - RNA, 1689 nt, Artificial Sequence
  derived and/or modified CDS sequence (wt) from hemagglutinin__InfluenzaA__AAA64366
auggccaucauuuaucuaauucuccuguucacagcagugagaggggaccaaauaugcauuggauaccaugccaauaauuccacagagaaggucgacacaauucuagagcggaacgucacugugacucaugccaaggacauucuugagaagacccauaacggaaaguuaugcaaacuaaacggaaucccuccacuugaacuaggggacuguagcauugccggauggcuccuuggaaauccagaaugugauaggcuucuaagugugccagaaugguccuauauaauggagaaagaaaacccgagagacgguuuguguuauccaggcagcuucaaugauuaugaagaauugaaacaucuccucagcagcgugaaacauuucgagaaaguaaagauucugcccaaagauagauggacacagcauacaacaacuggagguucacgggccugcgcggugucugguaauccaucauucuucaggaacauggucuggcugacaaagaaagaaucaaauuauccgguugccaaaggaucguacaacaauacaagcggagaacaaaugcuaauaauuuggggggugcaccaucccaaugaugagacagaacaaagaacauuguaccagaaugugggaaccuauguuuccguaggcacaucaacauugaacaaaaggucaaccccagacauagcaacaaggccuaaagugaauggacuaggaaguagaauggaauucucuuggacccuauuggauaugugggacaccauaaauuuugagaguacugguaaucuaauugcaccagaguauggauucaaaauaucgaaaagagguaguucagggaucaugaaaacagaaggaacacuugagaacugugagaccaaaugccaaacuccuuugggagcaauaaauacaacauugccuuuucacaauguccacccacugacaauaggugagugccccaaauauguaaaaucggagaaguuggucuuagcaacaggacuaaggaauguuccccagauugaaucaagaggauuguuuggggcaauagcugguuuuauagaaggaggauggcaaggaaugguugaugguugguauggauaccaucacagcaaugaccagggaucaggguaugcagcagacaaagaauccacucaaaaggcauuugauggaaucaccaacaagguaaauucugugauugaaaagaugaacacccaauuugaagcuguugggaaagaauucaguaacuuagagagaagacuggagaacuugaacaaaaagauggaagacggguuucuagauguguggacauacaaugcugagcuucuaguucugauggaaaaugagaggacacuugacuuucaugauucuaaugucaagaaucuguaugauaaagucagaaugcagcugagagacaacgucaaagaacuaggaaauggauguuuugaauuuuaucacaaaugugaugaugaaugcaugaauagugugaaaaacgggacguaugauuaucccaaguaugaagaagagucuaaacuaaauagaaaugaaaucaaagggguaaaauugagcagcauggggguuuaucaaauccuugccauuuaugcuacaguagcagguucucugucacuggcaaucaugauggcugggaucucuuucuggaugugcuccaacgggucucugcagugcaggaucugcauauga

SEQ ID NO: 32019 - RNA, 1701 nt, Artificial Sequence
  derived and/or modified CDS sequence (wt) from hemagglutinin__InfluenzaA__AAA85781
augaagacuaucauugcuuugagcuacauuuucugucugguuuucgcccaagaccuuccaggaaaugacaacagcacagcaacucuuugccugggacaucaugcggugccaaacggaacgcuagugaaaacaaucacgaaugaucagauugaagugacuaaugcuacugaacugguucagaguuccucaacggguaaaauaugcgacaauccucaucgaauccuugauggaauaaacugcacacugauagaugcucuauugggggacccucauugugauggcuuucaaaaugagaaaugggaccuuuucguugaacgcagcaaagcuuucagcaacuguuacccuuaugaugugccagauuaugccucccuuaggucacuaguugccucgucaggcacucuggaguuuaucaaugaaggcuucaauuggacuggggucacucagaaugggggaagcagugcuugcaaaaggggaccugauaacgguuuuuucaguagacugaacugguuguacaaaucaggaagcacauauccagugcagaacgugaccaugccaaacaaugacaacucugacaaacuauacauuugggggguucaccacccgagcacggacaaagaacaaaccaaccuauauguucaagcaucagggaaagucacagucuccaccaagagaagccagcaaacuguaaucccgaaugucgggucuagacccuggguaaggggucuaucuaguagaguaagcaucuauuggacaauaguuaaaccgggagacauacugguaauuaauaguaauggaaaccuaauugcuccucgggguuacuacaaaaugcgcacugggaaaagcucaauaaugaggucagaugcaccuauuggcacuugcagcucugaaugcaucacuccaaauggaagcauucccaaugacaagcccuuucaaaacguaaacaagaucacauauggggcaugucccaaguauguuaagcaaaacacucuaaaguuggcaacagggaugcggaauguaccagagaaacaaaucagaggcauauucggcgcaauagcagguuucauagaaaaugguugggagggaaugauagacgguugguacgguuucaggcaucaaaauucugagggcacaggacaagcagcagaucuuaaaagcacucaagcagccaucgaccaaaucaaugggaaacugaauaggguaaucgagaagacgaacgagaaauuccaucaaaucgaaaaggaauucucagaaguagaagggagaauucaggaccucgagaaauacguugaagacacuaaaauagaucucuggucuuacaaugcggagcuucuugucgcucuggagaaccaacauacaauugaucugacugacucggaaaugaacaaacuguuugaaaaaacaaggaggcaacugagggaaaaugcugaggacaugggcaaugguugcuucaaaauauaccacaaaugugacaauccuugcauagggucaaucagaaaugggacuuaugaccaugauguauacagagacgaagcauuaaacaaccgguuucagaucaaagguguugaacugaagucaggauacaaagacuggauccuguggauuuccuuugccauaucaugcuuuuugcuuuguguuguuuugcugggguucaucaugugggccugccagaaaggcaacauuaggugcaacauuugcauuuga

SEQ ID NO: 32020 - RNA, 1707 nt, Artificial Sequence
  derived and/or modified CDS sequence (wt) from hemagglutinin__InfluenzaA__AAC14418
auggagagaauagugcuucuucuugcaacagucagucuuguuaaaagugaccagauuugcauugguuaccaugcaaacaacucgacagagcagguugacacaauaauggaaaagaauguuacuguuacacaugcccaagacauacuggaaaggacacacaacgggaagcucugcgaucuaaauggagugaagccucugauuuugagggauuguaguguagcuggauggcuccucggaaacccuaugugugacgaauucaucaaugugccggaauggucuuacauaguggagaaggccaguccagccaaugaccucuguuauccagggaauuucaacgacuaugaagaacugaaacaccuauugagcagaauaaaccauuuugagaaaauucagaucauccccaaaaguucuugguccaaucaugaugccucaucagggguaagcucagcauguccauaccuugggagguccuccuuuuucagaaaugugguauggcuuaucaaaaagaacaguacauacccaacaauaaagaggagcuacaauaauaccaaccaagaagaucuuuugguacugugggggauucaccauccuaaugaugcggcagagcagacaaagcucuaucaaaacccaaccaccuacauuuccguuggaacaucaacacugaaccagagauugguuccagaaauagcuacuagacccaaaguaaacgggcaaaguggaagaauggaguucuucuggacaauuuuaaagccgaaugaugccaucaauuucgagaguaauggaaauuucauugcuccagaauaugcauacaaaauugucaagaaaggggacucaacaauuaugaaaagugaauuggaauaugguaacugcaacaccaagugucaaacuccaaugggggcgauaaacucuaguaugccauuccacaacauacacccccucaccaucggggaaugccccaaauaugugaaaucaaacagauuaguccuugcgacuggacucagaaaugccccucaaagagagagaagaagaaaaaagagaggacuauuuggagcuauagcagguuuuauagagggaggauggcagggaaugguagaugguugguauggguaccaccauagcaaugagcaggggaguggauacgcugcagaccaagaauccacucaaaaggcaauagauggagucaccaauaaggucaacucgaucauuaacaaaaugaacacucaguuugaggccguuggaagggaauuuaauaacuuggaaaggaggauagagaauuuaaacaagaagauggaagacggauuccuagaugucuggacuuacaaugccgaacuucugguucucauggaaaaugagagaacucuagacuuucaugacucaaaugucaagaaccuuuacgacaagguccgacuacagcuuagggauaaugcaaaggagcuggguaaugguuguuucgaauucuaucacaaaugugauaacgaauguauggaaaguguaaaaaacggaacguaugacuacccgcaguauucagaagaagcaagacuaaacagagaggaaauaaguggaguaaaauuggaaucaaugggaacuuaccaaauacugucaauuuauucaacaguggcgaguucccuagcacuggcaaucaugguagcuggucuaucuuuauggaugugcuccaauggaucguuacaaugcagaauuugcauuuaa

SEQ ID NO: 32021 - RNA, 1707 nt, Artificial Sequence
  derived and/or modified CDS sequence (wt) from hemagglutinin__InfluenzaA__AAC40508
auggaaagaacagugcuucuucuugcaacagucagucuuguuaaaagugaucagauuugcauugguuaccaugcaaacaacucgacagagcagguugacacaauaauggaaaagaauguuacuguuacacaugcccaagacauacuggaaaggacacacaacgggaagcucugcgaucuaaauggagugaagccucucauuuugagggauuguaguguagcuggauggcuccucggaaacccuaugugugacgaauucaucaaugugccggaauggucuuacauaguggagaaggccaguccagccaaugaccucuguuauccagggaauuucaacgacuaugaagaacugaaacaccuauugagcagaauaaaccauuuugagaaaauucagaucauccccaaaaguucuugguccaaucaugaugccucaucaggggugagcucagcauguccauaccuugggagguccuccuuuuucagaaaugugguauggcuuaucaaaaagaacagugcauacccaacaauaaagaggagcuacaauaauaccaaccaagaagaucuuuugguacugugggggguucaccauccuaaugaugcggcagagcagacaaagcucuaucaaaauccaaccaccuacauuuccguuggaacaucaacacugaaccagagauugguuccagaaauagcuacuagacccaaaguaaacgggcaaaguggaagaauggaguucuucuggacaauuuuaaagccgaaugaugccaucaauuucgagaguaauggaaauuucauugcuccagaauaugcauacaaaauugucaagaaaggggacucaacaauuaugaaaagugaauuggaauaugguaacugcaacaccaagugucaaacuccaaugggggcgauaaacucuaguaugccauuccacaacauacacccccucaccaucggggaaugccccaaauaugugaaaucaaacagauuaguccuugcgacuggacucagaaauaccccucaaagagagagaagaagaaaaaagagaggacuauuuggagcuauagcagguuuuauagagggaggauggcagggaaugguagaugguugguauggguaccaccauagcaaugagcaggggaguugcuacucugcagacaaagaauccacucaaaaggcaauagauggagucaccaauaaggucaacucgaucauuaacaaaaugaacacucaguuugaggccguuggaagggaauuuaauaacuuggaaaggaggauagagaauuuaaacaagaagauggaagacggauuccuagaugucuggacuuacaaugcugaacuucugguucucauggaaaaugagagaacucucgacuuucaugacucaaaugucaagaaccuuuacgacaagguccgacuacagcuuagggauaaugcaaaggagcuggguaaugguuguuucgaauucuaucacaaaugugauaaugaauguauggaaaguguaaaaaacggaacguaugacuacccgcaguauucagaagaagcaagacuaaacagagaggaaauaaguggaguaaaauuggaaucaaugggaacuuaccaaauacugucaauuuauucaacaguggcgaguucccuagcacuggcaaucaugguagcuggucuaucuuuauggaugugcuccaauggaucguuacaaugcagaauuugcauuuaa

SEQ ID NO: 32022 - RNA, 1701 nt, Artificial Sequence
  derived and/or modified CDS sequence (wt) from hemagglutinin__InfluenzaA__AAF87274
augaaggcaauacuaguagucuugcuauauacauuuacaaccgcaaaugcagacacauuauguauagguuaccaugcaaauaauucaacugacacuguugacacaguacuagaaaaaaauguaacaguaacacacucuguuaaccuucuagaaaacagacauaacgggaaacuauguaaacuaaaagggguagccccauugcauuuggguaaauguaacauugcuggauggcuccugggaaacccagagugugaauuacuauucacagcaagcucauggucuuacauuguggaaacuucuaauucagacaaugggacauguuacccaggagauuucaucaauuaugaagagcuaagagagcaguugagcucagugucaucauuugaaagauuugagauauuccccaaggcaaauucauggcccaaucaugaaacgaacagaggugugacaucagcguguccuuaugcuggagcaaacagcuucuacagaaacuuaauauggcugguaaaaaaaggaaauucauacccaaaacucagcaaauccuauauuaacaauaaggggaaggaaguccucgugcuauggggcauucaccauccaccuaccaguaaugaucaacaaagucucuaccagaaugcagaugccuauguuuuuguggggucaucaaaauacaacaagaaauucaugccagaaauagcaacaagacccaaagugagaggucaagcagggagaaugaacuauuacuggacacuaauagagccuggagacacaauaacauucgaagcaacuggaaaccuaguggcaccaagauaugccuucgcaauggaaagaggcucuggaucugguauuaucauuucagauacaccaguccacgauuguaaugcgaccugucaaacacccaaaggugcuauaaacaccaaucuuccauuucaaaauauacauccagucacgauuggagaauguccaaaauaugucaaaagcacaagauugagaauggcuacaggauuaaggaauaucccgucuauucaaucuagaggccuguuuggagccauugcuggcuuuauugaggggggauggacaggaaugauagauggaugguaugguuaccaucaccaaaaugagcagggaucaggauaugcagcagaccgaaagagcacacagaaugccauagacgggaucacuaacaaaguaaacucuguuauugaaaagaugaacacacaauucacagcaguggguaaagaauucaaucaccuggaaaaaagaauaaagaauuuaaacaaaaagguugaugaugguuuucuggauguuuggacuuacaaugccgaacuguugguucuauuggaaaaugaaagaacuuuggauuaucacgauucaaaugugaagaaccuauaugagaaaguaagaagccaacuaagaaacaaugccaaggaaauuggaaauggcugcuuugaauuuuaccacaaaugugaugacacgugcauggagagcaucaaaaaugggacuuaugauuauccaaaauacucagaagaagcaaaacuaaccagagaagagauagauggaguaaagcuggaaucaacaaggauuuaucagauuuuggcgaucuauucaacuaucgccaguucauugguacuguuagucucccugggggcaaucaguuucuggaugugcuccaaugggucuuuacagugcagaauauguauuuaa

SEQ ID NO: 32023 - RNA, 1701 nt, Artificial Sequence
  derived and/or modified CDS sequence (wt) from hemagglutinin__InfluenzaA__AAF87275
augaaggcaauacuaguagucuugcuauauacauuuacaaccgcaaaugcagacacauuauguauagguuaccaugcaaauaauucaacugacacuguugacacaguacuagaaaaaaauguaacaguaacacacucuguuaaccuucuagaaaacagacauaacgggaaacuauguaaacuaaaagggguagccccauugcauuuggguaaauguaacauugcuggauggcuccugggaaacccagagugugaauuacuauucacagcaagcucauggucuuacauuguggaaacuucuaauucagacaaugggacauguuacccaggagauuucaucaauuaugaagagcuaagagagcaguugagcucagugucaucauuugaaagauuugagauauuccccaaggcaaauucauggcccaaucaugaaacgaacagaggugugacaucagcguguccuuaugcuggagcaaacagcuucuacagaaacuuaauauggcugguaaaaaaaggaaauucauacccaaaacucagcaaauccuauauuaacaauaaggggaaggaaguccucgugcuauggggcauucaccauccaccuaccaguaaugaucaacaaagucucuaccagaaugcagaugccuauguuuuuguggggucaucaaaauacaacaagaaauucaugccagaaauagcaacaagacccaaagugagaggucaagcagggagaaugaacuauuacuggacacuaauagagccuggagacacaauaacauucgaagcaacuggaaaccuaguggcaccaagauaugccuucgcaauggaaagaggcucuggaucugguauuaucauuucagauacaccaguccacgauuguaaugcgaccugucaaacacccaaaggugcuauaaacaccaaucuuccauuucaaaauauacauccagucacgauuggagaauguccaaaauaugucaaaagcacaagauugagaauggcuacaggauuaaggaauaucccgucuauucaaucuagaggccuguuuggagccauugcuggcuuuauugaggggggauggacaggaaugauagauggaugguaugguuaccaucaccaaaaugagcagggaucaggauaugcagcagaccgaaagagcacacagaaugccauagacgggaucacuaacaaaguaaacucuguuauugaaaagaugaacacacaauucacagcaguggguaaagaauucaaucaccuggaaaaaagaauagagaauuuaaacaaaaagguugaugaugguuuucuggauguuuggacuuacaaugccgaacuguugguucuauuggaaaaugaaagaacuuuggauuaucacgauucaaaugugaagaaccuauaugagaaaguaagaagccaacuaagaaacaaugccaaggaaauuggaaauggcugcuuugaauuuuaccacaaaugugaugacacgugcauggagagcaucaaaaaugggacuuaugauuauccaaaauacucagaagaagcaaaacuaaccagagaagagauagauggaguaaagcuggaaucaacaaggauuuaucagauuuuggcgaucuauucaacuaucgccaguucauugguacuguuagucucccugggggcaaucaguuucuggaugugcuccaaugggucuuuacagugcagaauauguauuuaa

SEQ ID NO: 32024 - RNA, 1701 nt, Artificial Sequence
  derived and/or modified CDS sequence (wt) from hemagglutinin__InfluenzaA__AAF87277
augaaggcaauacuauuagucuugcuauauacauucacagccgcaaaugcagacacauuauguauaggcuaucaugcaaauaauucaacugacacuguugauacaguacuagaaaagaauguaacaguaacacacucuguuaaccuucuagaagacagacauaacggaaaacuauguaagcuaagggggauagccccauugcauuuggguaaauguaacauugcuggauggcuccugggaaacccagaaugugaauuacuauucacagcaagcucauggucuuacauuguggaaacaucuaauucagacaaugggacauguuacccaggagauuucaucaauuaugaagagcuaagagagcaguugagcucagugucaucauuugaaagguuugagauauucccuaaggcaaguucauggcccgaucaugaaacgaacagaggugugacggcagcauguccuuaugcaggagcaaacagcuucuacagaaauuuaauauggcugguaaaaaaaggaaauucauacccaaagcucagcaaauccuauauuaacaauaaagagaaagaaguccucgugcuaugggguauccaccauccaccuaccaguacugaccaacaaagucucuaccagaaugcagaugccuauguuuuuguggggucuucaaaguacaacaagaaauucaagccagaaauagcaucaagacccaaggugagaggucaagcagggaggauggacuauuacuggacacuaguugagccuggagacacaauaacauucgaagcaacuggaaaucuaguggugccaagauaugccuucgcaaugaaaagagguucuggaucugguauuaucauuucagauacaccaguccacgauuguaauacgacuugucaaacacccaaaggugcuauaaacaccagccucccauuucagaauauacauccagucacaauuggagaauguccaaaauaugucaaaaguacaaaauugagaauggcuacaggauuaaggaauaucccgucuauucagucuaggggucuauuuggagccauugcuggcuuuauugaggggggauggacaggaaugauagauggaugguacgguuaucaccaucaaaaugagcagggaucaggauaugcagccgaccgaaagagcacacagaaugccauugacggggucacuaacaaaguaaacucuguuauugaaaagaugaacacacaauucacagcaguggguaaagaauucaaucaccuggaaaaaagaauagaaaauuuaaauaaaaagguugaugaugguuuucuggauguuuggacuuacaaugccgaauuguugguucuauuggaaaaugagagaaccuuggauuaccaugauucaaaugugaagaaccuauaugagaaaguaagaagccagcuaaaaaacaaugccaaggaaauuggaaauggcugcuuugaauuuuaccacaaaugugaugacacgugcauggagagcgucaaaaaugggacuuaugauuaccccaaauacucagaagaaucaaaacuaaacagagaggagauagauggaguaaagcuggaaucaacaaggauuuaccagauuuuggcgauauauucaacugucgccaguucauugauacuguuagucucccugggggcaaucaguuucuggaugugcuccaaugggucuuuacagugcagaauauguauuuaa

SEQ ID NO: 32025 - RNA, 1701 nt, Artificial Sequence
  derived and/or modified CDS sequence (wt) from hemagglutinin__InfluenzaA__AAF87278
augaaggcaauacuauuagucuugcuauauacauucacagccgcaaaugcagacacauuauguauaggcuaucaugcaaauaauucaacugacacuguugauacaguacuagaaaagaauguaacaguaacacacucuguuaaccuucuagaagacagacauaacggaaaacuauguaagcuaagggggauagccccauugcauuuggguaaauguaacauugcuggauggcuccugggaaacccagaaugugaauuacuauucacagcaagcucauggucuuacauuguggaaacaucuaauucagacaaugggacauguuacccaggagauuucaucaauuaugaagagcuaagagagcaguugagcucagugucaucauuugaaagguuugagauauucccuaaggcaaguucauggcccaaucaugaaacgaacagaggugugacggcagcauguccuuaugcaggagcaaacagcuucuacagaaauuuaauauggcugguaaaaaaaggaaauucauacccaaagcucagcaaauccuauauuaacaauaaagagaaagaaguccucgugcuaugggguauccaccauccaccuaccaguacugaccaacaaagucucuaccagaaugcagaugccuauguuuuuguggggucuucaaaguacaacaagaaauucaagccagaaauagcaucaagacccaaggugagaggucaagcagggaggauggacuauuacuggacacuaguugagccuggagacacaauaacauucgaagcaacuggaaaucuaguggugccaagauaugccuucgcaaugaaaagagguucuggaucugguauuaucauuucagauacaccaguccacgauuguaauacgacuugucaaacacccaaaggugcuauaaacaccagccucccauuucagaauauacauccagucacaauuggagaauguccaaaauaugucaaaaguacaaaauugagaauggcuacaggauuaaggaauaucccgucuauucagucuaggggucuauuuggagccauugcuggcuuuauugaggggggauggacaggaaugauagauggaugguacgguuaucaccaucaaaaugagcagggaucaggauaugcagccgaccgaaagagcacacagaaugccauugacggggucacuaacaaaguaaacucuguuauugaaaagaugaacacacaauucacagcaguggguaaagaauucaaucaccuggaaaaaagaauagaaaauuuaaauaaaaagguugaugaugguuuucuggauguuuggacuuacaaugccgaauuguugguucuauuggaaaaugagagagccuuggauuaccaugauucaaaugugaagaaccuauaugagaaaguaagaagccagcuaaaaaacaaugccaaggaaauuggaaauggcugcuuugaauuuuaccacaaaugugaugacacgugcauggagagcgucaaaaaugggacuuaugauuaccccaaauacucagaagaaucaaaacuaaacagagaggagauagauggaguaaagcuggaaucaacaaggauuuaccagauuuuggcgauauauucaacugucgccaguucauugauacuguuagucucccugggggcaaucaguuucuggaugugcuccaaugggucuuuacagugcagaauauguauuuaa

SEQ ID NO: 32026 - RNA, 1701 nt, Artificial Sequence
  derived and/or modified CDS sequence (wt) from hemagglutinin__InfluenzaA__AAF87279
augaaggcaauacuauuagucuugcuauauacauucacagccgcaaaugcagacacauuauguauaggcuaucaugcaaauaauucaacugacacuguugauacaguacuagaaaagaauguaacaguaacacacucuguuaaccuucuagaagacagacauaacggaaaacuauguaagcuaagggggauagccccauugcauuuggguaaauguaacauugcuggauggcuccugggaaacccagaaugugaauuacuauucacagcaagcucauggucuuacauuguggaaacaucuaauucagacaaugggacauguuacccaggagauuucaucaauuaugaagagcuaagagagcaguugagcucagugucaucauuugaaagguuugagauauucccuaaggcaaguucauggcccaaucaugaaacgaacagaggugugacggcagcauguccuuaugcaggagcaaacagcuucuacagaaauuuaauauggcugguaaaaaaaggaaauucauacccaaagcucagcaaauccuauauuaacaauaaagagaaagaaguccucgugcuaugggguauccaccauccaccuaccaguacugaccaacaaagucucuaccagaaugcagaugccuauguuuuuguggggucuucaaaguacaacaagaaauucaagccagaaauagcaucaagacccaaggugagaggucaagcagggaggauggacuauuacuggacacuaguugagccuggagacacaauaacauucgaagcaacuggaaaucuaguggugccaagauaugccuucgcaaugaaaagagguucuggaucugguauuaucauuucagauacaccaguccacgauuguaauacgacuugucaaacacccaaaggugcuauaaacaccagccucccauuucagaauauacauccagucacaauuggagaauguccaaaauaugucaaaaguacaaaauugagaauggcuacaggauuaaggaauaucccgucuauucagucuaggggucuauuuggagccauugcuggcuuuauugaggggggauggacaggaaugauagauggaugguacgguuaucaccaucaaaaugagcagggaucaggauaugcagccgaccgaaagagcacacagaaugccauugacggggucacuaacaaaguaaacucuguuauugaaaagaugaacacacaauucacagcaguggguaaagaauucaaucaccuggaaaaaagaauagaaaauuuaaauaaaaagguugaugaugguuuucuggauguuuggacuuacaaugccgaauuguugguucuauuggaaaaugagagaaccuuggauuaccaugauucaaaugugaagaaccuauaugagaaaguaagaagccagcuaaaaaacaaugccaaggaaauuggaaauggcugcuuugaauuuuaccacaaaugugaugacacgugcauggagagcgucaaaaaugggacuuaugauuaccccaaauacucagaagaaucaaaacuaaacagagaggagauagauggaguaaagcuggaaucaacaaggauuuaccagauuuuggcgauauauucaacugucgccaguucauugauacuguuagucucccugggggcaaucaguuucuggaugugcuccaaugggucuuuacagugcagaauauguauuuaa

SEQ ID NO: 32027 - RNA, 1701 nt, Artificial Sequence
  derived and/or modified CDS sequence (wt) from hemagglutinin__InfluenzaA__AAF87281
augaaggcaauacuaguagucuugcuauauacauuuacaaccgcaaaugcagacacauuauguauagguuaccaugcaaauaauucaacugacacuguugacacaguauuagaaaagaauguaacaguaacacacucuguuaaccuucuagaagacagacauaacgggaaacuauguaaacuaaaagggauagccccauugcauuuggguaaauguaacauugcuggauggcuccugggaaacccagagugugaauuacuauucacagcaagcucauggucuuauauuguggaaacuucuaauucagacaaugggacauguuacccaggagauuucaucaauuaugaagagcuaagagagcaguugagcucagugucaucauuugaaagauuugagauauuccccaaggcaaguucauggcccaaucaugaaacgaacagaggugugacaucagcguguccuuaugcuggagcaaacagcuucuacagaaacuuaauauggcugguaaaaaaaggaaauucauacccaaaacucagcaaauccuauauuaacaauaaggggaagaaaguccucgugcuauggggcauucaccauccaccuaccaguacugaccaacaaagucucuaccagaaugcagaugccuauguuuuuguggggucaucaaaauacaacaagaaauucaugccagaaauagcaacaagacccaaagugagaggucaagcagggagaaugaacuauuacuggacacuaauagagccuggagacacaauaacauucgaagcaacuggaaaucuagugguaccaagauaugccuuugcaauggaaagaggcuauggaucugguauuaucauuucagauacaccaguccaugauuguaauacgacuugucagacacccaaaggugcuauaaacaccagccuuccauuucaaaauauacauccagucacaauuggagaauguccaaaauaugucaaaagcacaaaauugagaauggcuacaggguuaaggaauaucccgucuauacaaucuagaggccuguuuggagccauugcuggcuuuauugaggggggauggacaggaaugauugauggaugguacgguuaucaucaccaaaaugagcagggaucaggguaugcagcagaccgaaagagcacacagaaugccauagacgggaucacuaacaaaguaaacucuguuauugaaaagaugaacacacaauucacagcaguggguaaagaauucaaucaccuggagaaaagaauagagaauuuaaacaaaaagguugaugaugguuuucuggauguuuggacuuacaaugccgaacuguuaguucuauuggaaaaugaaagaacuuuggauuaucacgauucgaaugugaagaaccuauaugagaaaguaaaaagccaacuaaaaaacaaugccaaggaaauuggaaauggcugcuuugaauuuuaccacaaaugugaugacacgugcauggagagcgucaaaaaugggacuuaugauuauccaaaauacucagaagaagcaaaacuaaacagagaagagauagaugggguaaagcuggaaucaacaaggauuuaccagauuuuggcgaucuauucaacuaucgccaguucauugguacuguuagucucccugggggcaaucaguuuuuggaugugcuccaaugggucuuuacagugcagaauauguauuuaa

SEQ ID NO: 32028 - RNA, 1701 nt, Artificial Sequence; identical to SEQ ID NO: 32026
  derived and/or modified CDS sequence (wt) from hemagglutinin__InfluenzaA__AAF87282

SEQ ID NO: 32029 - RNA, 1701 nt, Artificial Sequence
  derived and/or modified CDS sequence (wt) from hemagglutinin__InfluenzaA__AAF87283
augaaggcaauacuaguagucuugcuauaugcauuuacaaccgcaaaugcagacacauuauguauagguuaccaugcaaauaauucaacugacacuguugacacaguacuagaaaagaauguaacaguaacacacucuguuaaccuuuuagaagacagacauaacgggaaacuauguaaacuaaaagggguagccccauugcauuuggguaaauguaacauugcuggauggcuacugggaaacccagagugugaauuacuauucacagcaagcucauggucuuacauuguggaaacuucuaauucagacaaugggacauguuacccaggagauuucaucaauuaugaagagcuaagagagcaguugagcucagugucaucauuugaaagauuugagauauuccccaaggcaaguucauggcccaaucaugaaacgaacagaggugugacaucagcauguccuuauucuggagcaaacagcuucuacagaaacuuaauauggcugguaaaaaaaggaaauucauacccaaaacucagcaaauccuauauuaacaauaaggggaaggaaguucuuguucuauggggcauucaccauccaccuaccaguacugaccaacaaagucucuaccagaaugcagaugccuauguuuuuguggggucaucaaaauacaacaagaaauucaugccagaaauagcaacaagacccaaagugagaggucaagcagggagaaugaacuauuacuggacacuaauugagccuggagacacaauaacauucgaagcaacuggaaaucuaguggcaccaagauaugccuucgcaauggaaagaggcucuggaucugguauuauaauuucagauacaccagucuacgauuguaauacggcuugucaaacacccaaaggugcuauaaacaccagucuuccauuucaaaauauacauccagucacaauuggagaauguccaaaauaugucaaaagcacaaaauugagaauggcuacaggauuaaggaacaucccgucuauucaaucuagaggccuguuuggagccauugcuggcuuuauugaggggggguggacaggaaugauagauggaugguaugguuaucaucaccaaaaugagcaggggucaggauaugcaccagaccgaaagagcacacagaaugccauagacgggaucacuaacaaaguaaacucuguuauugaaaagaugaacacacaauucacagcaguggguaaagaauucaaucacuuggagaaaagaauagagaauuuaaacaaaaagguugaugaugguuuucugaauguuuggacuuacaaugccgaacuguugguucuauuggaaaaugaaagaacuuuggauuaucacgauucaaaugugaagaaccuauaugagaaaguaagaagccaacuaaaaaacaaugccaaggaaauuggaaauggcugcuuugaauuuuaccacaaaugugaugacacgugcauggagagcgucaaaaaugggacuuaugauuauccaaaauacucagaagaagcaagacuaaacagagaagagauagaugggguaaagcuggaaucaacaaggauuuaccagauuuuggcgaucuauucaacuaucgccaguucauugguacuguuagucucccugggggcaaucaguuucuggaugugcuccaaugggucuuuacagugcagaauauguauuuaa

SEQ ID NO: 32030 - RNA, 1701 nt, Artificial Sequence
  derived and/or modified CDS sequence (wt) from hemagglutinin__InfluenzaA__AAF87284
augaaggcaauacuaguagucuugcuauaugcauuuacaaccgcaaaugcagacacauuauguauagguuaccaugcaaauaauucaacugacacuguugacacaguacuagaaaagaauguaacaguaacacacucuguuaaccuuuuagaagacagacauaacgggaaacuauguaaacuaaaagggguagccccauugcauuuggguaaauguaacauugcuggauggcuacugggaaacccagagugugaauuacuauucacagcaagcucauggucuuacauuguggaaacuucuaauucagacaaugggacauguuacccaggagauuucaucaauuaugaagagcuaagagagcaguugagcucagugucaucauuugaaagauuugagauauuccccaaggcaaguucauggcccaaucaugaaacgaacagaggugugacaucagcaugucucuuauucuggagcaaacagcuucuacagaaacuuaauauggcugguaaaaaaggaaauucauacccaaaacucagcaaauccuauauuaacaauaaggggaaggaaguucuuguucuauggggcauucaccauccaccuaccaguacugaccaacaaagucucuaccagaaugcagaugccuauguuuuuguggggucaucaaaauacaacaagaaauucaugccagaaauagcaacaagacccaaagugagaggucaagcagggagaaugaacuauuacuggacacuaauugagccuggagacacaauaacauucgaagcaacuggaaaucuaguggcaccaagauaugccuucgcaauggaaagaggcucuggaucugguauuauaauuucagauacaccagucuacgauuguaauacggcuugucaaacacccaaaggugcuauaaacaccagucuuccauuucaaaauauacauccagucacaauuggagaauguccaaaauaugucaaaagcacaaaauugagaauggcuacaggauuaaggaacaucccgucuauucaaucuagaggccuguuuggagccauugcuggcuuuauugaggggggguggacaggaaugauagauggaugguaugguuaucaucaccaaaaugagcaggggucaggauaugcagcagaccgaaagagcacacagaaugccauagacgggaucacuaacaaaguaaacucuguuauugaaaagaugaacacacaauucacagcaguggguaaagaauucaaucacuuggagaaaagaauagagaauuuaaacaaaaagguugaugaugguuuucugaauguuuggacuuacaaugccgaacuguugguucuauuggaaaaugaaagaacuuuggauuaucacgauucaaaugugaagaaccuauaugagaaaguaagaagccaacuaaaaaacaaugccaaggaaauuggaaauggcugcuuugaauuuuaccacaaaugugaugacacgugcauggagagcgucaaaaaugggacuuaugauuauccaaaauacucagaagaagcaagacuaaacagagaagagauagaugggguaaagcuggaaucaacaaggauuuaccagauuuuggcgaucuauucaacuaucgccaguucauugguacuguuagucucccugggggcaaucaguuucuggaugugcuccaaugggucuuuacagugcagaauauguauuuaa

SEQ ID NO: 32031 - RNA, 1701 nt, Artificial Sequence
  derived and/or modified CDS sequence (wt) from hemagglutinin__InfluenzaA__AAG01749
augagcacuaucauugcuuugagcuacauuuuaugucugguuuucgcucaaaaacuucccggaaaugacaacagcacggcaacgcugugccugggacaccaugcagugccaaacggaacgcuagugaaaacaaucacaaaugaccaaauugaagugacuaaugcuacugagcugguucagaguuccucaacagguagaauaugcgacaguccucaccgaauccuugauggaaaaaacugcacacugauagaugcucuauugggagacccucauugugauggcuuccaaaauaaggaaugggaccuuuuuguugaacgcagcaaagcuuacagcaacuguuacccuuaugaugugccggauuaugccucccucaggucacuaguugccucauccggcacccuggaguuuaccaaugaaggcuucaauuggacuggaguugcucaggauggaacaagcuaugcuugcaaaaggggaucuguuaaaaguuucuuuaguagauugaauugguugcacaaauuagaauacaaauauccagcacugaacguuacuaugccaaacaaugacaaauuugacaaauuguacauuugggggguucaccacccgaguacggacagugaccaaaccagccuauauguucaagcaucagggagagucacagucucuaccaaaagaagccaacaaacuguaaucccgaauaucgggucuagacccuggguuagggguaucuccagcagaauaagcaucuauuggacaauaguaaaaccgggagacauacuuuugauuaacagcacagggaaucuaauugcuccucgggguuacuucaaaauacgaagugggaaaagcucaauaaugaggucagaugcacccauugacaacugcaauucugaaugcaucacuccaaauggaagcauucccaaugaaaaaccuuuucaaaauguaaacaggaucacauauggggccugucccagauauguuaagcaaaacacucugaaauuggcaacagggaugcggaauguaccagagaaacaaacuagaggcauauucggcgcaaucgcagguuucauagaaaaugguugggagggaaugguagacgguugguacgguuucaggcaucaaaauucugagggcacaggacaagcagcagaucuuaaaagcacucaagcagcaaucaaccaaaucaacgggaaacugaauagguuaaucgagaaaacgaacgagaaauuccaucaaaucgaaaaagaauucucagaaguagaagggagaauucaggaccucgagaaauauguugaagacacuaaaauagaucucuggucuuacaacgcggagcuucuuguugcccuggagaaccaacauacaauugaucuaacugacucagaaaugaacaaacuguuugaaagaacaaggaagcaacugagggaaaaugcugaggacaugggcaaugguugcuucaaaauauaccacaaaugugacaaugccugcauagggucaaucagaaauggaacuuaugaccaugauguauacagagacgaagcauuaaacaaccgguuccagaucaaagguguugagcugaagucaggauacaaagauuggauccuauggauuuccuuugccauaucaugcuuuuugcuuuguguuguuuugcugggguucaucaugugggccugccaaaaaggcaacauuaggugcaacauuugcauuuga

SEQ ID NO: 32032 - RNA, 1701 nt, Artificial Sequence
  derived and/or modified CDS sequence (wt) from hemagglutinin__InfluenzaA__AAG01767
augaauacuaucauugcuuugagcuacauuuuaugucugguuuucgcucaaaaacuucccggaaaugacaacagcacagcaacgcugugccugggacaccaugcagugccaaacggaacccuagugaaaacaaucacgaaugaucaaauugaagugacuaaugcuacugagcugguucagaguuccucaacagguagaauaugcgacaguccucaccgaauccuugauggaaaaaacugcacauugauagaugcucuacuaggagacccucauugcgauggcuuucaaaauaaggaaugggaccuuuuuauugaacgcagcaaagcuuacagcaacuguuacccuuaugaugugccggauuauuccucccuuaggucacuaguugccucaucaggcacccuggaguuuaccaaugaagacuucaauuggacuggggucgcucaggaugggggaagcuauucuugcaaaagggaaucuguuaaaaguuucuuuaguagauugaauugguugcacaaauuagaauacaaauauccagcacugaacgugacuaugccaaacaaugacaaauuugacaaauuguacauuugggggguucaccauccgagcacggacagugaacaaaccagccuauauguucaagcaauagggagagucacagucucuaccaaaaguagccaacaaacuguaaucccgaacaucggguccagacccugggugaggggcaucuccaguagaauaagcaucuauuggacaauaguaaaaccgggagacauacuuuugauuagcagcacagggaaucuaauugcuccucgggguuacuucaaaauacgaaaugggaaaagcucaauaaugaggucagaugcacccauugacaacugcuauucugaaugcaucacuccaaauggaagcauucccaaugacaagccuuuucaaaauguaaacaggaucacauauggggccugucccaaauauguuaagcaaaaaacucugaaauuggcaacagggaugcggaauguaccagagaaacaaacuagaggcauauucggcgcaaucgcagguuucauagaaaaugguugggagggaaugguagacgguugguacgguuucaggcaucaaaauucugagggcacaggacaagcagcagaucuuaaaagcacucaagcagcaaucgaucaagucaacgggaaauugaauagguuaaucgagaaaacgaacgagaaauuccaucaaaucgaaaaagaauuuucagaaguagaagggagaauucaggaccucgagaaauauguugaagacacuaaaauagaucucuggucuuacaacgcggagcuccuuguugcccuggagaaucaacauacaauugaucuaacugacucagaaaugaacaaacuguuugaaaaaacaaggaagcaacugagggaaaaugcugaggacaugggcaaugguuguuucaaaauauaccacaaaugugacaaugccugcauagggucaaucagaaauggaacuuaugaccaugauguauacagagacgaagcauuaaacaaccgguuccagaucaaagguguugagcugaaaucaggauacaaagauuggauccuauggauuuccuuugccauaucaugcuuuuugcuuuguguuguuuugcuggguuucaucaugugggccugccaaaaaggcaacauuaggugcaacauuugcauuuga

SEQ ID NO: 32033 - RNA, 1701 nt, Artificial Sequence
  derived and/or modified CDS sequence (wt) from hemagglutinin__InfluenzaA__AAG01776
augaauacuaucauugcuuugagcuacauuuuaugucugguuuucgcucaaaaacuucccggaaaugacaacagcacagcaacgcugugccugggacaccaugcagugccaaacggaacccuagugaaaacaaucacgaaugaucaaauugaagugacuaaugcuacugagcugguucagaguuccucaacagguagaauaugcgacaguccucaccgaauccuugauggaaaaaacugcacauugauagaugcucuacuaggagacccucauugcgauggcuuucaaaauaaggaaugggaccuuuuuauugaacgcagcaaagcuuacagcaacuguuacccuuaugaugugccggauuauuccucccuuaggucacuaguugccucaucaggcacccuggaguuuaccaaugaagacuucaauuggacuggggucgcucaggaugggggaagcuauucuugcaaaagggaaucuguuaaaaguuucuuuaguagauugaauugguugcacaaauuagaauacaaauauccagcacugaacgugacuaugccaaacaaugacaaauuugacaaauuguacauuugggggguucaccauccgagcacggacagugaacaaaccagccuauauguucaagcaauagggagagucacagucucuaccaaaaguagccaacaaacuguaaucccgaacaucggguccagacccugggugaggggcaucuccaguagaauaagcaucuauuggacaauaguaaaaccgggagacauacuuuugauuagcagcacagggaaucuaauugcuccucgggguuacuucaaaauacgaaaugggaaaagcucaauaaugaggucagaugcacccauugacaacugcuauucugaaugcaucacuccaaauggaagcauucccaaugacaagccuuuucaaaauguaaacaggaucacauauggggccugucccaaauauguuaagcaaaaaacucugaaauuggcaacagggaugcggaauguaccagagaaacaaacuagaggcauauucggcgcaaucgcagguuucauagaaaaugguugggagggaaugguagacgguugguacgguuucaggcaucaaaauucugagggcacaggacaagcagcagaucuuaaaagcacucaagcagcaaucgaucaagucaacgggaaauugaauugguuaaucgagaaaacgaacgagaaauuccaucaaaucgaaaaagaauuuucagaaguagaagggagaauucaggaccucgagaaauauguugaagacacuaaaauagaucucuggucuuacaacgcggagcuccuuguugcccuggagaaucaacauacaauugaucuaacugacucagaaaugaacaaacuguuugaaaaaacaaggaagcaacugagggaaaaugcugaggacaugggcaaugguuguuucaaaauauaccacaaaugugacaaugccugcauagggucaaucagaaauggaacuuaugaccaugauguauacagagacgaagcauuaaacaaccgguuccagaucaaagguguugagcugaaaucaggauacaaagauuggauccuauggauuuccuuugccauaucaugcuuuuugcuuuguguuguuuugcuggguuucaucaugugggccugccaaaaaggcaacauuaggugcaacauuugcauuuga

SEQ ID NO: 32034 - RNA, 1701 nt, Artificial Sequence
  derived and/or modified CDS sequence (wt) from hemagglutinin__InfluenzaA__AAG01785
augaagacuaucauugcuuugagcuacauuuuaugucugguuuucgcucaaaaacuucccggaaaugacaacagcacagcaacgcugugccugggacaccaugcagugccaaacggaacccuagugaaaacaaucacgaaugaucaaauugaagugacuaaugcuacugagcugguucagaguuccucaacagguagaauaugcgacaguccucaccgaauccuugauggaaaaaacugcacauugauagaugcucuacuaggagacccucauugcgauggcuuucaaaauaaggaaugggaccuuuuuauugaacgcagcaaagcuuacagcaacuguuacccuuaugaugugccggauuauuccucccuuaggucacuaguugccucaucaggcacccuggaguuuaccaaugaagacuucaauuggacuggggucgcucaggaugggggaagcuauucuugcaaaagggaaucuguuaaaaguuucuuuaguagauugaauugguugcacaaauuagaauacaaauauccagcacugaacgugacuaugccaaacaaugacaaauuugacaaauuguacauuugggggguucaccauccgagcacggacagugaacaaaccagccuauauguucaagcaauagggagagucacagucucuaccaaaaguagccaacaaacuguaaucccgaacaucggguccagacccugggugaggggcaucuccaguagaauaagcaucuauuggacaauaguaaaaccgggagacauacuuuugauuagcagcacagggaaucuaauugcuccucgggguuacuucaaaauacgaaaugggaaaagcucaauaaugaggucagaugcacccauugacaacugcuauucugaaugcaucacuccaaauggaagcauucccaaugacaagccuuuucaaaauguaaacaggaucacauauggggccugucccaaauauguuaagcaaaaaacucugaaauuggcaacagggaugcggaauguaccagagaaacaaacuagaggcauauucggcgcaaucgcagguuucauagaaaaugguugggagggaaugguagacgguugguacgguuucaggcaucaaaauucugagggcacaggacaagcagcagaucuuaaaagcacucaagcagcaaucgaucaagucaacgggaaauugaauagguuaaucgagaaaacgaacgagaaauuccaucaaaucgaaaaagaauuuucagaaguagaagggagaauucaggaccucgagaaauauguugaagacacuaaaauagaucucuggucuuacaacgcggagcuccuuguugcccuggagaaucaacauacaauugaucuaacugacucagaaaugaacaaacuguuugaaaaaacaaggaagcaacugagggaaaaugcugaggacaugggcaaugguuguuucaaaauauaccacaaaugugacaaugccugcauagggucaaucagaaauggaacuuaugaccaugauguauacagagacgaagcauuaaacaaccgguuccagaucaaagguguugagcugaaaucaggauacaaagauuggauccuauggauuuccuuugccauaucaugcuuuuugcuuuguguuguuuugcuggguuucaucaugugggccugccaaaaaggcaacauuaggugcaacauuugcauuuga

SEQ ID NO: 32035 - RNA, 1701 nt, Artificial Sequence
  derived and/or modified CDS sequence (wt) from hemagglutinin__InfluenzaA__AAK52911
augaagacuaucauugcuuugagcuacauuuuaugucugguuuucgcucaaaaacuucccggaaaugacaacagcacggcaacgcugugccugggacaccaugcagugccaaacggaacgcuagugaaaacaaucacgaaugaccaaauugaagugacuaaugcuacugagcugguucagaguuccucaacagguagaauaugcgacaguccucaccaaauccuugauggaaaaaacugcacacugauagaugcucuauugggagauccucauugugauggcuuccaaaauaaggaaugggaccuuuuuguugaacgcagcacagcuuacagcaacuguuacccuuaugaugugccggauuaugccucccuuaggucacuaguugccucauccggcacccuggaguuuaccaaagaaggcuucaauuggacuggagucgcucaggauggaacaagcuaugcuugcaaaaggggaucuguuaaaaguuucuuuaguagauugaauugguugcacaaauuagaauacaaauauccagcacugaacgugacuaugccaaacaaugacaaauuugacaaauuguacauuugggggguucaccacccgaguacggacagugaccaaaccagccuauauguucaagcaucagggagagucacagucucuaccaaaagaagccaacaaacuguaaucccgaauaucgggucuagacccuggguaaggggugucuccagcagaauaagcaucuauuggacaauaguaaaaccgggagacauacuuuugauuaacagcacagggaaucuaauugcuccucgggguuacuucaaaauacgaagugggaaaagcucaauaaugaggucggaugcacccauugacaacugcaauucugaaugcauuacuccaaauggaagcauucccaaugacaaaccuuuucaaaauguaaacaggaucacauauggggccugucccagauauguuaagcaaaacacucugaaauuggcaacagggaugcggaauguaccagagaaacaaacuagaggcauauucggcgcaaucgcagguuucauagaaaaugguugggagggaaugguagacgguugguacgguuucaggcaucaaaauucugaaggcacaggacaagcagcagaucuuaaaagcacucaagcagcaaucaaccaaaucaacgggaaacugaauagguuaaucgagaaaacgaacgagaaauuccaucaaaucgaaaaagaauucucagaaguagaagggagaauucaggaccucgagaaauauguugaagacacuaaaauagaucucuggucuuacaacgcggagcuucuuguugcccuggagaaccaacauacaauugaucuaacugacucagaaaugaacaaacuguuugaaagaacaagaaagcaacugagggaaaaugcugaggacaugggcaaugguugcuucaaaauauaccacaaaugugacaaugccugcauagggucaaucagaaauggaacuuaugaccaugauguauacagagaugaagcauuaaacaaccgguuccagaucaaagguguugagcugaagucaggauacaaagauuggauccuauggauuuccuuugccauaucaugcuuuuugcuuuguguuguuuugcugggguucauuaugugggccugccaaaaaggcaacauuaggugcaacauuugcauuuga

SEQ ID NO: 32036 - RNA, 1701 nt, Artificial Sequence
  derived and/or modified CDS sequence (wt) from hemagglutinin__InfluenzaA__AAK52912
augaagacuaucauugcuuugagcuacauuuuaugucugguuuucgcucaaaaacuucccggaaaugacaacagcacggcaacgcugugccugggacaccaugcagugccaaacggaacgcuagugaaaacaaucacgaaugaccaaauugaagugacuaaugcuacugagcugguucagaguuccucaacagguagaauaugcgacaguccucaccgaauccuugauggaaaaaacugcacacugauagaugcucuauugggagacccucauugugauggcuuccaaaauaaagaaugggaccuuuuuguugaacgcaccaaagcuuacagcaacuguuacccuuaugaugugccggauuaugccucccuuaggucacuaguugccucauccggcacccuggaguuuaccaaugaaggcuucaauuggacuggagucgcccagaauggaacaagcuaugcuugcaaaaggggaucuguuaaaaguuucuuuaguagauugaauugguugcacaaauuagaauacaaauauccagcacugaacgugacuaugccaaacaaugacaaauuugacaaauuguacauuugggggguucaccacccgaguacggacagugaccaaaccagccuauauguucaagcaucagggagagucacagucucuaccaaaagaagccaacaaacuguaaucccgaauaucgggucuagacccuggguaaggggugucuccagcagaauaagcaucuauuggacaauaguaaaaccgggagacauacuuuugauuaacagcacagggaaucuaauugcuccucgggguuacuucaaaauacgaagugggaaaagcucaauaaugaggucagaugcacccauuggcaacugcaauucugaaugcaucacuccaaauggaagcauucccaaugacaaaccuuuucaaaauguaaacaggaucacauauggggccugucccagauauguuaagcaaaacacucugaaauuggcaacagggaugcggaauguaccagagaaacaaacuagaggcauauucggcgcaauugcagguuucauagaaaaugguugggagggaaugguagacgguugguacgguuucaggcaucaaaauucugagggcacaggacaagcagcagaucuuaaaagcacucaagcagcaaucaaccaaaucaacgggaaacugaauagguuaaucgagaaaacgaacgagaaauuccaucaaaucgaaaaagaauucucagaaguagaaggaagaauucaggaccucgagaaauauguugaagacacuaaaauagaucucuggucuuacaacgcggagcuucuuguugcccuggagaaccaacauacaauugaucuaacugacucagaaaugaacaaacuguuugaaagaacaaggaagcaacugagggaaaaugcugaggacaugggcaaugguugcuucaaaauauaccacaaaugugacaaugccugcauagggucaaucagaaauggaacuuaugaccaugauguauacagagacgaagcauuaaacaaccgguuccagaucaaagguguugagcugaagucaggauacaaagauuggauccuauggauuuccuuugccauaucaugcuuuuugcuuuguguuguuuugcugggguucaucaugugggccugccaaaaaggcaacauuaggugcaacauuugcauuuga

SEQ ID NO: 32037 - RNA, 1701 nt, Artificial Sequence
  derived and/or modified CDS sequence (wt) from hemagglutinin__InfluenzaA__AAK71687
augaaggcaauacuaguaguccugcuauauacauuuacaaccgcaaaugcagacacauuauguauagguuaucaugcgaacaauucaacugacacuguagacacaguacuagaaaagaauguaacaguaacacacucuguuaaccuucuagaagacaggcauaacgggaaacuauguaaacuaagagggguagccccauugcauuuggguaaauguaacauugcuggcuggcuccugggaaauccagagugugaaucacucuucacagcaagcucaugguccuacauuguggaaacaucuaauucagacaaugggacguguuacccaggagauuucaucaauuaugaagagcuaagagagcaauugagcucagugucaucauuugaaagauuugagauauuccccgagacaaguucauggcccaaucaugacacgaacagaggugugacggcagcauguccucaugcuggagcaaauagcuucuacagaaauuuaauauggcuggccaaaaaaggagauucauacccaaagcucagcaaauccuauauuaacaauaaggggaaggaaguccucgugcuauggggcauucaccauccaccuaccagugccgaccaacaaagucucuaccagaaugcagaugcauauguuuuuguggggucaucaagauacagcaagaaguucaagccagaaauagcaacaagacccaaggugaggggccaagcagggagaaugaacuauuacuggacacuaguagagccuggagacaaaauaacauucgaggcaacuggaaaucuagugguaccgagauaugccuucgcaaugaaaagaaauucugaaucugguauuaucauuucagauauaucaguccacgauuguaauacgacuugucagacacccaagggugcuauaaacaccagccucccauuucagaauauacauccagucacaauuggagaauguccaaaauauguaaaaagcacaaaauugagaauggcuacaggauuaaggaaugucccgucuauucaaucuagaggccuguuuggggccauugccggcuuuauugaggggggauggacaggaaugauagauggaugguacgguuaucaccaucaaaaugagcagggaucaggauaugcagccgaccugaagagcacacagaaugccauugacgggaucacuaacaaaguaaauucuguuaucgaaaagaugaacacacaauucacaguaguagguaaagaguucaaccaccuggaaaaaagaauagagaauuuaaauaaaaagguugaugaugguuuucuggauauuuggacuuacaaugccgaacuguugguucuguuggaaaaugaaagaaccuuggauuaccacgauucaaaugugaagaacuuauaugaaaagguaagaagccagcuaaaaaacaaugccaaggaaauuggaaauggcugcuuugaauuuuaccacaaaugugaugacacgugcauggaaagcgucaaaaaugggacuuaugauuacccaaaauacucagaggaagcaaaacuaaacagagaggaaauagaugggguaaagcuggaaucaacaaggauuuaccagauuuuggcgaucuauucaacugucgccaguucauugguacugguagucucccuggggacaaucaguuucuggaugugcucuaaugggucucuacaguguagaauauguauuuaa

SEQ ID NO: 32038 - RNA, 1707 nt, Artificial Sequence
  derived and/or modified CDS sequence (wt) from hemagglutinin__InfluenzaA__AAS65618
auggagaaaauagugcuucuuuuugcaauagucagucuuguuaaaagugaucagauuugcauugguuaccaugcaaacaacucgacagagcagguugacacaauaauggaaaagaacguuacuguuacacaugcccaagacauacuggaaaagacacacaacgggaagcucugcgaucuagauggagugaagccucuaauuuugagagauuguaguguagcuggauggcuccucggaaacccaaugugugacgaauucaucaaugugccggaauggucuuacauaguggagaaggccaauccagucaaugaccucuguuacccaggggauuucaaugacuaugaagaauugaaacaccuauugagcagaauaaaccauuuugagaaaauucagaucauccccaaaaguucuugguccagucaugaagucucauuaggggugagcucagcauguccauaccagggaaaguccuccuuuuucagaaaugugguauggcuuaucaaaaagaacaguacauacccaacaauaaagaggagcuacaauaauaccaaccaagaagaucuuuugguacugugggggauucaccauccuaaugaugcggcagagcagacaaagcucuaucaaaacccaaccaccuauauuuccguugggacaucaacacuaaaccagagauugguaccaagaauagcuacuagauccaaaguaaacgggcaaaguggaaggauggaguucuucuggacaauuuuaaaaccgaaugaugcaaucaacuucgagaguaauggaaauuucauugcuccagaauaugcauacaaaauugucaagaaaggggacucaacaauuaugaaaagugaauuggaauaugguaacugcaacaccaagugucaaacuccaaugggggcgauaaacucuaguaugccauuccacaauauacacccucucaccaucggggaaugccccaaauaugugaaaucaaacagauuaguccuugcgacugggcucagaaauagcccucaaagagagagaagaagaaaaaagagaggauuauuuggagcuauagcagguuuuauagagggaggauggcagggaaugguagaugguugguauggguaccaccauagcaaugagcaggggaguggguacgcugcagccaaagaauccacucaaaaggcaauagauggagucaccaauaaggucaacucgaucauugacaaaaugaacacucaguuugaggccguuggaagggaauuuaacaacuuagaaaggagaauagagaauuuaaacaagaagauggaagacggguuccuagaugucuggacuuauaaugcugaacuucugguucucauggaaaaugagagaacucuagacuuucacgacucaaaugucaagaaccuuuacgacaagguccgacuacagcuuaaggauaaugcaaaggagcuggguaacgguuguuucgaguucuaucauaaaugugauaaugaauguauggaaaguguaagaaacggaacguaugacuacccgcaguauucagaagaagcaagacuaaaaagagaggaaauaaguggaguaaaauuggaaucaauaggaauuuaccaaauacugucaauuuauucuacaguggcgaguucccuagcacuggcaaucaugguagcuggucuauccuuauggaugugcuccaaugggucguuacaaugcagaauuugcauuuaa

SEQ ID NO: 32039 - RNA, 1704 nt, Artificial Sequence
  derived and/or modified CDS sequence (wt) from hemagglutinin__InfluenzaA__AAT38819
augaauacucaaauuuuggcauucauugcuuguaugcugauuggaacuaaaggagacaaaauaugucuugggcaccaugcuguggcaaaugggacaaaagugaacacacuaacagagaggggaauugaaguagucaaugccacggagacgguggaaacuguaaauauuaagaaaauaugcacucaaggaaaaaggccaacagaucugggacaauguggacuucuaggaacccuaauaggaccuccccaaugcgaucaauuucuggaguuugacgcuaauuugauaauugaacgaagagaaggaaccgaugugugcuaucccgggaaguucacaaaugaagaaucacugaggcagauccuucgagggucaggaggaauugauaaagagucaauggguuucaccuauaguggaauaagaaccaauggggcgacgagugccugcagaagaucagguucuucuuucuaugcggagaugaagugguuacugucgaauucagacaaugcggcauuuccccaaaugacuaagucguauaggaaucccaggaacaaaccagcucugauaaucuggggagugcaucacucuggaucagcuacugagcagaccaaacucuauggaaguggaaacaaguugauaacaguaggaagcucgaaauaccagcaaucauucacuccaaguccgggagcacggccacaagugaauggacaaucaggaaggauugauuuucauuggcuacuccuugaccccaaugacacagugaccuucacuuucaauggggcauucauagccccugacagggcaaguuucuuuagaggagaaucgcuaggaguccagagugauguuccuuuggauucugguugugaaggggauugcuuccacaguggggguacgauagucaguucccugccauuccaaaacaucaacccuagaacaguggggaaaugcccucgauaugucaaacagacaagccuccuuuuggcuacaggaaugagaaacgucccagagaaccccaagcaggccuaccagaaacagaugaccagaggccuuuuuggagcgauugcuggauucauagagaauggaugggaaggucucaucgauggaugguaugguuucagacaucaaaaugcacaaggagaaggaacugcagcugacuacaaaagcacccaaucugcaauagaucagaucacaggcaaauugaaucgucugauugacaaaacaaaccagcaguuugaacugauagacaaugaauucagugagauagaacaacaaaucgggaaugucauuaacuggacacgagacucaaugacugagguauggucguauaaugcugagcuguugguggcaauggagaaucagcauacaauagaucuugcagacucagaaaugaacaaacuuuacgaacgcgucagaaaacaacuaagggaaaaugcugaagaagauggaacuggaugcuuugagauauuccauaagugugaugaucaguguauggagagcauaaggaacaacacuuaugaccauacccaauacaggacagagucauugcagaauagaauacagauagacccagugaaauugaguaguggauacaaagacauaaucuuaugguuuagcuucggggcaucauguuuucuucuucuagccauugcaaugggauugguuuucauuugcauaaagaauggaaacaugcggugcacuauuuguauauag

SEQ ID NO: 32040 - RNA, 1707 nt, Artificial Sequence
  derived and/or modified CDS sequence (wt) from hemagglutinin__InfluenzaA__AAV32636
auggagaaaauagugcuucuuuuugcaauagucagucuuguuaaaagugaucagauuugcauugguuaccaugcaaacaacucgacagagcagguugacacaauaauggaaaagaacguuacuguuacacaugcccaagacauacuggaaaagacacacaacgggaagcucugcgaucuagauggagugaagccucuaauuuugagagauuguaguguagcuggauggcuccucggaaacccaaugugugacgaauucaucaaugugccggaauggucuuacauaguggagaaggccaauccagucaaugaccucuguuacccaggggauuucaaugacuaugaagaauugaaacaccuauugagcagaauaaaccauuuugagaaaauucagaucauucccaaaaguucuugguccagucaugaagccucauuaggggugagcucagcauguccauaccagggaaaguccuccuuuuucagaaaugugguauggcuuaucaaaaagaacaguacauacccaacaauaaagaggagcuacaauaauaccaaccaagaagaucuuuugguacugugggggauucaccauccuaaugaugcggcagagcagacaaagcucuaucaaaacccaaccaccuauauuuccguugggacaucaacacuaaaccagagauugguaccaagaauagcuacuagauccaaaguaaacgggcaaaguggaaggauggaguucuucuggacaauuuuaaaaccgaaugaugcaaucaacuucgagaguaauggaaauuucauugcuccagaauaugcauacaaaauugucaagaaaggggacucaacaauuaugaaaagugaauuggaauaugguaacugcaacaccaagugucaaacuccaaugggggcgauaaacucuaguaugccauuccacaauauacacccucucaccaucggggaaugccccaaauaugugaaaucaaacagauuaguccuugcgacugggcucagaaauagcccucaaagagagagaagaagaaaaaagagaggauuauuuggagcuauagcagguuuuauagagggaggauggcagggaaugguagaugguugguauggguaccaccauagcaaugagcaggggaguggguacgcugcagacaaagaauccacucaaaaggcaauagauggagucaccaauaaggucaacucgaucauugacaaaaugaacacucaguuugaggccguuggaagggaauuuaacaacuuagaaaggagaauagagaauuuaaacaagaagauggaagacggguuccuagaugucuggacuuauaaugcugaacuucugguucucauggaaaaugagagaacucuagacuuucaugacucaaaugucaagaaccuuuacgacaagguccgacuacagcuuagggauaaugcaaaggagcuggguaacgguuguuucgaguucuaucauaaaugugauaaugaauguauggaaaguguaagaaacggaacguaugacuacccgcaguauucagaagaagcaagacuaaaaagagaggaaauaaguggaguaaaauuggaaucaauaggaauuuaccaaauacugucaauuuauucuacaguggcgaguucccuagcacuggcaaucaugguagcuggucuauccuuauggaugugcuccaaugggucguuacaaugcagaauuugcauuuaa

SEQ ID NO: 32041 - RNA, 1707 nt, Artificial Sequence
  derived and/or modified CDS sequence (wt) from hemagglutinin__InfluenzaA__AAV34704
auggagaaaauagugcuucuuuuugcaauagucagucuuguuaaaagugaucagauuugcauugguuaccaugcaaacaacucgacagagcagguugacacaauaauggaaaagaacguuacuguuacacaugcccaagacauacuggaaaagacacacaacgggaagcucugcgaucuagauggagugaagccucuaauuuugagagauuguaguguagcuggauggcuccucggaaacccaaugugugacgaauucaucaaugugccggaauggucuuacauaguggagaaggccaauccagucaaugaccucuguuacccaggggauuucaaugacuaugaagaauugaaacaccuauugagcagaauaaaccauuuugagaaaauucagaucauccccaaaaguucuugguccagucaugaagccucauuaggggugagcucagcaugcccauaccagggaaaguccuccuuuuucagaaaugugguauggcuuaucaaaaagaacaguacauacccaacaauaaagaggagcuacaauaauaccaaccaagaagaucuuuugguacugugggggauucaccauccuaaugaugcggcagagcagacaaagcucuaucaaaacccaaccaccuauauuuccguugggacaucaacacuaaaccagagauugguaccaagaauagcuacuagauccaaaguaaacgggcaaaguggaaggauggaguucuucuggacaauuuuaaagccgaaugaugcaaucaacuucgagaguaauggaaauuucauugcuccagaauaugcauacaaaauugucaagaaaggggacucaacaauuaugaaaagugaauuggaauaugguaacugcaacaccaagugucaaacuccaaugggggcgauaaacucuaguaugccauuccacaauauacacccucucaccaucggggaaugccccaaauaugugaaaucaaacagauuaguccuugccacugggcucagaaauagcccucaaagagagagaagaagaaaaaagagaggauuauuuggagcuauagcagguuuuauagagggaggauggcagggaaugguagaugguugguauggguaccaccauagcaaugagcaggggaguggguacgcugcagacaaagaauccacucaaaaggcaauagauggagucaccaauaaggucaacucgaucauugacaaaaugaacacucaguuugaggccguuggaagggaauuuaacaacuuagaaaggagaauagagaauuuaaacaagaagauggaagacggguuccuagaugucuggacuuauaaugcugaacuucugguucucauggaaaaugagagaacucuagacuuucaugacucaaaugucaagaaccuuuacgacaagguccgacuacagcuuagggauaaugcaaaggagcuggguaacgguuguuucgaguucuaucauaaaugugauaaugaauguauggaaaguguaagaaacggaacguaugacuacccgcaguauucagaagaagcaagacuaaaaagagaggaaauaaguggaguaaaauuggaaucaauaggaauuuaccaaauacugucaauuuauucuacaguggcgaguucccuagcacuggcaaucaugguagcuggucuauccuuauggaugugcuccaaugggucguuacaaugcagaauuugcauuuaa

SEQ ID NO: 32042 - RNA, 1707 nt, Artificial Sequence
  derived and/or modified CDS sequence (wt) from hemagglutinin__InfluenzaA__AAV65826
auggagaaaauagugcuucuuuuugcaauagucagucuuguuaaaagugaucagauuugcauugguuaccaugcgaacaacucgacagagcagguugacacaauaauggaaaagaacguuacuguuacacaugcccaagacauacuggaaaagacacacaacgggaagcucugcgaucuagauggagugaagccucuaauuuugagagauuguaguguagcuggauggcuccucggaaacccaaugugugacgaauucaucaaugugccggaauggucuuacauaguggagaaggccaauccagucaaugaccucuguuacccaggggauuucaaugacuaugaagaauugaaacaccuauugagcagaauaaaccauuuugagaaaauucagaucauccccaaaaguucuugguccagucaugaagccucauuaggggugagcucagcauguccauaccagggaaaguccuccuuuuucagaaaugugguauggcuuaucaaaaagaacaguacauacccaacaauaaagaggagcuacaauaauaccaaccaagaagaucuuuugguacugggggggauucaccauccuaaugaugcggcagagcagacaaagcucuaucaaaacccaaccaccuauauuuccguugggacaucaacacuaaaccagagauugguaccaagaauagcuacuagauccaaaguaaacgggcaaaguggaaggauggaguucuucuggacaauuuuaaaaccgaaugaugcaaucaacuucgagaguaauggaaauuucauugcuccagaauaugcauacaaaauugucaagaaaggggacucaacaauuaugaaaagugaauuggaauaugguaacugcaacaccaagugucaaacuccaaugggggcgauaaacucuaguaugccauuccacaauauacacccucucaccaucggggaaugccccaaauaugugaaaucaaacagauuaguccuugcgacugggcucagaaauagcccucaaagagagagaagaagaaaaaagagaggauuauuuggagcuauagcagguuuuauagagggaggauggcagggaaugguagaugguugguauggguaccaccauagcaaugagcaggggaguggcuacgcugcagacaaagaauccacucaaaaggcaauagauggagucaccaauaaggucaacucgaucauugacaaaaugaacacucaguuugaggccguuggaagggaauuuaacaacuuagaaaggagaauagagaauuuaaacaagaagauggaagacggguuccuagaugucuggacuuauaaugcugaacuucugguucucauggaaaaugagagaacucuagacuuucaugacucaaaugucaagaaccuuuacgacaagguccgacuacagcuuagggauaaugcaaaggagcuggguaacgguuguuucgaguucuaucauaaaugugauaaugaauguauggaaaguguaagaaacggaacguaugacuacccgcaguauucagaagaagcaagacuaaaaagagaggaaauaaguggaguaaaauuggaaucaauaggaauuuaccaaauacugucaauuuauucuacaguggcgaguucccuagcacuggcaaucaugguagcuggucuauccuuauggaugugcuccaaugggucguuacaaugcagaauuugcauuuaa

SEQ ID NO: 32043 - RNA, 1701 nt, Artificial Sequence
  derived and/or modified CDS sequence (wt) from hemagglutinin__InfluenzaA__AAX11505
augaagacuaucauugcuuugagcuacauucuaugucugguuuucgcucaaaaacuucccggaaaugacaacagcacggcaacgcugugccuugggcaccaugcaguaccaaacggaacgauagugaaaacaaucacgaaugaccaaauugaaguuacuaaugcuacugagcugguucagaguuccucaacagguggaauaugcgacaguccucaucagauccuugauggagaaaacugcacacuaauagaugcucuauugggagacccucagugugauggcuuccaaaauaagaaaugggaccuuuuuguugaacgcagcaaagccuacagcaacuguuacccuuaugaugugccggauuaugccucccuuaggucacuaguugccucauccggcacacuggaguuuaacaaugaaagcuucaauuggacuggagucacucagaauggaacaagcucugcuugcgaaaggagaucuaauaaaaguuucuuuaguagauugaauugguugacccacuuaaaauacaaauacccagcauugaacgugacuaugccaaacaaugaaaaauuugacaaauuguacauuugggggguucaccacccggguacggacagugaccaaaucagccuauaugcucaagcaucaggaagaaucacagucucuaccaaaagaagccaacaaacuguaaucccgaauaucggaucuagacccaggguaagggaugucuccagccgaauaagcaucuauuggacaauaguaaaaccgggagacauacuuuugauuaacagcacagggaaucuaauugcuccucgggguuacuucaaaauacgaagugggaaaagcucaauaaugagaucagaugcacccauuggcaaaugcaauucugaaugcaucacuccaaauggaagcauucccaaugacaaaccauuucaaaauguaaacaggauuacauauggggccugucccagauauguuaagcaaaacacucugaaauuggcaacagggaugcgaaauguaccagagaaacaaacuagaggcauauuuggcgcaaucgcggguuucauagaaaaugguugggagggaaugguggacgguugguacgguuucaggcaucaaaauucugagggcacaggacaagcagcagaucucaaaagcacucaagcagcaaucaaccaaaucaaugggaaacugaauagguuaaucgggaaaacaaacgagaaauuccaucagauugaaaaagaauucucagaaguagaagggagaauucaggaccucgagaaauauguugaggacacuaaaauagaucucuggucauacaacgcggagcuucuuguugcccuggagaaccaacauacaauugaucuaacugacucagaaaugaacaaacuguuugaaagaacaaagaagcaacugagggaaaaugcugaggauaugggcaaugguuguuucaaaauauaccacaaaugugacaaugccugcauagggucaaucagaaauggaacuuaugaccaugauguguacagagaugaagcauuaaacaaccgguuccagaucaaagguguugagcugaagucaggauacaaagauuggauccuauggauuuccuuugccauaucauguuuuuugcuuuguguugcuuuguugggguucaucaugugggccugccaaaaaggcaacauuaggugcgacauuugcauuuga

SEQ ID NO: 32044 - RNA, 1701 nt, Artificial Sequence
  derived and/or modified CDS sequence (wt) from hemagglutinin__InfluenzaA__AAX11525
augaagacuaucauugcuuugagcuacauucuaugucugguuuucgcucaaaaacuucccggaaaugacaacagcacggcaacgcugugccuugggcaccaugcaguaccaaacggaacgauagugaaaacaaucacgaaugaccaaauugaaguuacuaaugcuacugagcugguacagaguuccucaacagguggaauaugcgacaguccucaucagauccuugauggagaaaacugcacacuaauagaugcucuauugggagacccucagugugauggcuuccaaaauaagaaaugggaccuuuuuguugaacgcagcaaagccuacagcaacuguuacccuuaugaugugccggauuaugccucccuuaggucacuaguugccucauccggcacacuggaguuuaacaaugaaagcuucgauuggacuggagucacucagaauggaacaagcucugcuugcaaaaggagaucuaauaaaaguuucuuuaguagauugaauugguugacccacuuaaaauacaaauacccagcauugaacgugacuaugccaaacaaugaaaaauuugacaaauuguacauuugggggguucaccacccggguacggacagugaccaaaucagccuauaugcucaagcaucaggaagaaucacagucucuaccaaaagaagccaacaaacuguaaucccgaauaucggaucuagacccaggguaagggaugucucuagccgaauaagcaucuauuggacaauaguaaaaccgggagacauacuuuugauuaacagcacagggaaucuaauugcuccucgggguuacuucaaaauacgaagugggaaaagcucaauaaugagaucagaugcacccauuggcaaaugcaauuccgaaugcaucacuccaaauggaagcauucccaaugacaaaccauuucaaaauguaaacaggaucacauauggggccugucccagauauguuaagcaaaacacuuugaaauuggcaacagggaugcgaaauguaccagagaaacaaacuagaggcauauuuggcgcaaucgcgggcuucauagaaaaugguugggagggaaugguggacgguugguacgguuucaggcaucaaaauucugagggcacaggacaagcagcagaucucaaaagcacucaagcagcaaucaaccaaaucaaugggaaacugaauagguuaaucgggaaaacaaacgagaaauuccaucagauugaaaaagaauucucagaaguagaagggagaauucaggaccucgagaaauauguugaggacacuaaaauagaucucuggucauacaacgcggagcuucuuguugcccuggagaaccaacauacaauugaucuaacugacucagaaaugaacaaacuguuugaaagaacaaagaagcaacugagggaaaaugcugaggauaugggcaaugguuguuucaaaauauaccacaaaugugacaaugccugcauagggucaaucagaaauggaacuuaugaccaugauguguacagagaugaagcauuaaacaaccgguuccagaucaaagguguugagcugaagucaggauacaaagauuggauccuauggauuuccuuugccauaucauguuuuuugcuuuguguugcuuuguugggguucaucaugugggccugccaaaaaggcaacauuaggugcaacauuugcauuuga

SEQ ID NO: 32045 - RNA, 1701 nt, Artificial Sequence
  derived and/or modified CDS sequence (wt) from hemagglutinin__InfluenzaA__AAX11535
augaagacuaucauugcuuugagcuacauucuaugucugguuuucgcucaaaaacuucccggaaaugacaacagcacggcaacgcugugccuugggcaccaugcaguaccaaacggaacgauagugaaaacaaucacgaaugaccaaauugaaguuacuaaugcuacugagcugguacagaguuccucaacagguggaauaugcgacaguccucaucagauccuugauggagaaaacugcacacuaauagaugcucuauugggagacccucagugugauggcuuccaaaauaagaaaugggaccuuuuuguugaacgcagcaaagccuacagcaacuguuacccuuaugaugugccggauuaugccucccuuaggucacuaguugccucauccggcacacuggaguuuaacaaugaaagcuucgauuggacuggagucacucagaauggaacaagcucugcuugcaaaaggagaucuaauaaaaguuucuuuaguagauugaauugguugacccacuuaaaauacaaauacccagcauugaacgugacuaugccaaacaaugaaaaauuugacaaauuguacauuugggggguucaccacccggguacggacagugaccaaaucagccuauaugcucaagcaucaggaagaaucacagucucuaccaaaagaagccaacaaacuguaaucccgaauaucggaucuagaccaaggguaagggaugucuccagccgaauaagcaucuauuggacaauaguaaaaccgggagacauacuuuugauuaacagcacagggaaucuaauugcuccucgggguuacuucaaaauacgaagugggaaaagcucaauaaugagaucagaugcacccauuggcaaaugcaauuccgaaugcaucacuccaaauggaagcauucccaaugacaaaccauuucaaaauguaaacaggaucacauauggggccugucccagauauguuaagcaaaacacuuugaaauuggcaacagggaugcgaaauguaccagagaaacaaacuagaggcauauuuggcgcaaucgcgggcuucauagaaaaugguugggagggaaugguggacgguugguacgguuucaggcaucaaaauucugagggcacaggacaagcagcagaucucaaaagcacucaagcagcaaucaaccaaaucaaugggaaacugaauagguuaaucgggaaaacaaacgagaaauuccaucagauugaaaaagaauucucagaaguagaagggagaauucaggaccucgagaaauauguugaggacacuaaaauagaucucuggucauacaacgcggagcuucuuguugcccuggagaaccaacauacaauugaucuaacugacucagaaaugaacaaacuguuugaaagaacaaagaagcaacugagggaaaaugcugaggauaugggcaaugguuguuucaaaauauaccacaaaugugacaaugccugcauagggucaaucagaaauggaacuuaugaccaugauguguacagagaugaagcauuaaacaaccgguuccagaucaaagguguugagcugaagucaggauacaaagauuggauccuauggauuuccuuugccauaucauguuuuuugcuuuguguugcuuuguugggguucaucaugugggccugccaaaaaggcaacauuaggugcaacauuugcauuuga

SEQ ID NO: 32046 - RNA, 1701 nt, Artificial Sequence
  derived and/or modified CDS sequence (wt) from hemagglutinin__InfluenzaA__AAX11545
augaagacuaucauugcuuugagcuacauucuaugucugguuuucgcucaaaaacuucccggaaaugacaacagcacggcaacgcugugccuugggcaccaugcaguaccaaacggaacgauagugaaaacaaucacgaaugaccaaauugaaguuacuaaugcuacugagcugguacagaguuccucaacagguggaauaugcgacaguccucaucagauccuugauggagaaaacugcacacuaauagaugcucuauugggagacccucagugugauggcuuccaaaauaagaaaugggaccuuuuuguugaacgcagcaaagccuacagcaacuguuacccuuaugaugugccggauuaugccucccuuaggucacuaguugccucauccggcacacuggaguuuaacaaugaaagcuucgauuggacuggagucacucagaauggaacaagcucugcuugcaaaaggagaucuaauaaaaguuucuuuaguagauugaauugguugacccacuuaaaauacaaauacccagcauugaacgugacuaugccaaacaaugaaaaauuugacaaauuguacauuugggggguucaccacccggguacggacagugaccaaaucagccuauaugcucaagcaucaggaagaaucacagucucuaccaaaagaagccaacaaacuguaaucccgaauaucggaucuagacccaggguaagggaugucucuagccgaauaagcaucuauuggacaauaguaaaaccgggagacauacuuuugauuaacagcacagggaaucuaauugcuccucgggguuacuucaaaauacgaagugggaaaagcucaauaaugagaucagaugcacccauuggcaaaugcaauuccgaaugcaucacuccaaauggaagcauucccaaugacaaaccauuucaaaauguaaacaggaucacauauggggccugucccagauauguuaagcaaaacacuuugaaauuggcaacagggaugcgaaauguaccagagaaacaaacuagaggcauauuuggcgcaaucgcgggcuucauagaaaaugguugggagggaaugguggacgguugguacgguuucaggcaucaaaauucugagggcacagggcaagcagcagaucucaaaagcacucaagcagcaaucaaccaaaucaaugggaaacugaauagauuaaucgggaaaacaaacgagaaauuccaucagauugaaaaagaauucucagaaguagaagggagaauucaggaccucgagaaauauguugaggacacuaaaauagaucucuggucauacaacgcggagcuucuuguugcccuggagaaccaacauacaauugaucuaacugacucagaaaugaacaaacuguuugaaagaacaaagaagcaacugagggaaaaugcugaggauaugggcaaugguuguuucaaaauauaccacaaaugugacaaugccugcauagggucaaucagaaauggaacuuaugaccaugauguguacagagaugaagcauuaaacaaccgguuccagaucaaagguguugagcugaagucaggauacaaagauuggauccuauggauuuccuuugccauaucauguuuuuugcuuuguguugcuuuguugggguucaucaugugggccugccaaaaaggcaacauuaggugcaacauuugcauuuga

SEQ ID NO: 32047 - RNA, 1701 nt, Artificial Sequence
  derived and/or modified CDS sequence (wt) from hemagglutinin__InfluenzaA__AAX11555
augaagacuaucauugcuuugagcuacauucuaugucugguuuucgcucaaaaacuucccggaaaugacaacagcacggcaacgcugugccuugggcaccaugcaguaccaaacggaacgauagugaaaacaaucacgaaugaccaaauugaaguuacuaaugcuacugagcugguucagaguuccucaacagguggaauaugcgacaguccucaucagauccuugauggagaaaacugcacacuaauagaugcucuauugggagacccucagugugauggcuuccaaaauaagaaaugggaccuuuuuguugaacgcagcaaagccuacagcaacuguuacccuuaugaugugccggauuaugccucccuuaggucacuaguugccucauccggcacacuggaguuuaacaaugaaagcuucaauuggacuggagucacucagaauggaacaagcucugcuugcgaaaggagaucuaauaaaaguuucuuuaguagauugaauugguugacccacuuaaaauacaaauacccagcauugaacgugacuaugccaaacaaugaaaaauuugacaaauuguacauuugggggguucaccacccggguacggacagugaccaaaucagccuauaugcucaagcaucaggaagaaucacagucucuaccaaaagaagccaacaaacuguaaucccgaauaucggaucuagacccaggguaagggaugucuccagccgaauaagcaucuauuggacaauaguaaaaccaggagacauacuuuugauuaacagcacagggaaucuaauugcuccucgggguuacuucaaaauacgaagugggaaaagcucaauaaugagaucagaugcacccauuggcaaaugcaauucugaaugcaucacuccaaauggaagcauucccaaugacaaaccauuucaaaauguaaacaggauuacauauggggccugucccagauauguuaagcaaaacacucugaaauuggcaacagggaugcgaaauguaccagagaaacaaacuagaggcauauuuggcgcaaucgcggguuucauagaaaaugguugggagggaaugguggacgguugguacgguuucaggcaucaaaauucugagggcacaggacaagcagcagaucucaaaagcacucaagcagcaaucaaccaaaucaaugggaaacugaauagguuaaucgggaaaacaaacgagaaauuccaucagauugaaaaagaauucucagaaguagaagggagaauucaggaccucgagaaauauguugaggacacuaaaauagaucucuggucauacaacgcggagcuucuuguugcccuggagaaccaacauacaauugaucuaacugacucagaaaugaacaaacuguuugaaagaacaaagaagcaacugagggaaaaugcugaggauaugggcaaugguuguuucaaaauauaccacaaaugugacaaugccugcauagggucaaucagaaauggaacuuaugaccaugauguguacagagaugaagcauuaaacaaccgguuccagaucaaagguguugagcugaagucaggauacaaagauuggauccuauggauuuccuuugccauaucauguuuuuugcuuuguguugcuuuguugggguucaucaugugggccugccaaaaaggcaacauuaggugcgacauuugcauuuga

SEQ ID NO: 32048 - RNA, 1701 nt, Artificial Sequence
  derived and/or modified CDS sequence (wt) from hemagglutinin__InfluenzaA__AAX11565
augaagacuaucauugcuuugagcuacauucuaugucugguuuucgcucaaaaacuucccggaaaugacaacagcacggcaacgcugugccuugggcaccaugcaguaccaaacggaacgauagugaaaacaaucacgaaugaccaaauugaaguuacuaaugcuacugagcugguacagaguuccucaacagguggaauaugcgacaguccucaucagauccuugauggagaaaacugcacacuaauagaugcucuauugggagacccucagugugauggcuuccaaaauaagaaaugggaccuuuuuguugaacgcagcaaagccuacagcaacuguuacccuuaugaugugccggauuaugccucccuuaggucacuaguugccucauccggcacacuggaguuuaacaaugaaagcuucgauuggacuggagucacucagaauggaacaagcucugcuugcaaaaggagaucuaauaaaaguuucuuuaguagauugaauugguugacccacuuaaaauacaaauacccagcauugaacgugacuaugccaaacaaugaaaaauuugacaaauuguacauuugggggguucaccacccggguacggacagugaccaaaucagccuauaugcucaagcaucaggaagaaucacagucucuaccaaaagaagccaacaaacuguaaucccgaauaucggaucuagacccaggguaagggaugucuccagccgaauaagcaucuauuggacaauaguaaaaccgggagacauacuuuugauuaacagcacagggaaucuaauugcuccucgggguuacuucaaaauacgaagugggaaaagcucaauaaugagaucagaugcacccauuggcaaaugcaauucugaaugcaucacuccaaauggaagcauucccaaugacaaaccauuucaaaauguaaacaggaucacauauggggccugucccagauauguuaagcaaaacacucugaaauuggcaacagggaugcgaaauguaccagagaaacaaacuagaggcauauuuggcgcaaucgcggguuucauagaaaaugguugggagggaaugguggacgguugguacgguuucaggcaucaaaauucugagggcacaggacaagcagcagaucucaaaagcacucaagcagcaaucaaccaaaucaaugggaaacugaauagguuaaucgggaaaacaaacgagaaauuccaucagauugaaaaagaauucucagaaguagaagggagaauucaggaccucgagaaauauguugaggacacuaaaauagaucucuggucauacaacgcggagcuucuuguugcccuggagaaccaacauacaauugaucuaacugacucagaaaugaacaaacuguuugaaagaacaaagaagcaacugagggaaaaugcugaggauaugggcaaugguuguuucaaaauauaccacaaaugugacaaugccugcauagggucaaucagaaauggaacuuaugaccaugauguguacagagaugaagcauuaaacaaccgguuccagaucaaagguguugagcugaagucaggauacaaagauuggauccuauggauuuccuuugccauaucauguuuuuugcuuuguguugcuuuguugggguucaucaugugggccugccaaaaaggcaacauuaggugcaacauuugcauuuga

SEQ ID NO: 32049 - RNA, 1701 nt, Artificial Sequence
  derived and/or modified CDS sequence (wt) from hemagglutinin__InfluenzaA__AAX11585
augaagacuaucauugcuuugagcuacauucuaugucugguuuucgcucaaaaacuucccggaaaugacaacagcacggcaacgcugugccuugggcaccaugcaguaccaaacggaacgauagugaaaacaaucacgaaugaccaaauugaaguuacuaaugcuacugagcugguucagauuuccucaacagguggaauaugcgacaguccucaucagauccuugauggagaaaacugcacacuaauagaugcucuauugggagacccucagugugauggcuuccaaaauaagaaaugggaccuuuuuguugaacgcagcaaagccuacagcaacuguuacccuuaugaugugccggauuaugccucccuuaggucacuaguugccucauccggcacacuggaguuuaacaaugaaagcuucgauuggacuggagucacucagaauggaacaagcucugcuugcaaaaggagaucuaauaaaaguuucuuuaguagauugaauugguugacccacuuaaaauacaaauacccagcauugaacgugacuaugccaaacaaugaaaaauuugacaaauuguacauuugggggguucaccacccggguacggacaaugaccaaaucagccuauaugcucaagcaucaggaagaaucacagucucuaccaaaagaagccaacaaacuguaaucccgaauaucggaucuagacccaggguaagggaugucuccagccaaauaagcaucuauuggacaauaguaaaaccgggagacauacuuuugauuaacagcacagggaaucuaauugcuccucgggguuacuucaaaauacgaagugggaaaagcucaauaaugagaucagaugcacccauuggcaaaugcaauucugaaugcaucacuccaaauggaagcauucccaaugacaaaccauuucaaaauguaaacaggaucacauauggggccugucccagauauguuaagcaaaacacucugaaauuggcaacagggaugcgaaauguaccagagaaacaaacuagaggcauauuuggcgcaaucgcggguuucauagaaaaugguugggagggaaugguggacgguugguacgguuucaggcaucaaaauucugagggcacaggacaagcagcagaucucaaaagcacucaagcagcaaucaaccaaaucaaugggaaacugaauagguuaaucgggaaaacaaacgagaaauuccaucagauugaaaaagaauucucggaaguagaaggaagaauucaggaccucgagaaguauguugaggacacuaaaauagaucucuggucauacaacgcggagcuucuuguugcccuggagaaccaacauacaauugaucuaacugacucagaaaugaacaaacuguuugaaagaacaaagaagcaacugagggaaaaugcugaggauaugggcaaugguuguuucaaaauauaccacaaaugugacaaugccugcauagggucaaucagaaauggaacuuaugaccaugauguguacagagaugaagcauuaaacaaccgguuccagaucaaagguguugagcugaagucaggauacaaagauuggauccuauggauuuccuuugccauaucauguuuuuugcuuuguguugcuuuguugggguucaucaugugggccugccaaaaaggcaacauuaggugcaacauuugcauuuga

SEQ ID NO: 32050 - RNA, 1701 nt, Artificial Sequence; identical to SEQ ID NO: 32044
  derived and/or modified CDS sequence (wt) from hemagglutinin__InfluenzaA__AAX11605

SEQ ID NO: 32051 - RNA, 1701 nt, Artificial Sequence
  derived and/or modified CDS sequence (wt) from hemagglutinin__InfluenzaA__AAX11615
augaagacuaucauugcuuugagcuacauucuaugucugguuuucgcucaaaaacuucccggaaaugacaacagcacggcaacgcugugccuugggcaccaugcaguaccaaacggaacgauagugaaaacaaucacgaaugaccaaauugaaguuacuaaugcuacugagcugguacagaguuccucaacagguggaauaugcgacaguccucaucagauccuugauggagaaaacugcacacuaauagaugcucuauugggagacccucagugugauggcuuccaaaauaagaaaugggaccuuuuuguugaacgcagcaaagccuacagcaacuguuacccuuaugaugugccggauuaugccucccuuaggucacuaguugccucauccggcacacuggaguuuaacaaugaaagcuucgauuggacuggagucacucagaauggaacaagcucugcuugcaaaaggagaucuaauaaaaguuucuuuaguagauugaauugguugacccacuuaaaauacaaauacccagcauugaacgugacuaugccaaacaaugaaaaauuugacaaauuguacauuugggggguucaccacccggguacggacagugaccaaaucagccuauaugcucaagcaucaggaagaaucacagucucuaccaaaagaagccaacaaacugugaucccgaauaucggaucuagacccaggguaagggaugucuccagccgaauaagcaucuauuggacaauaguaaaaccgggagacauacuuuugauuaacagcacagggaaucuaauugcuccucgggguuacuucaaaauacgaagugggaaaagcucaauaaugagaucagaugcacccauuggcaaaugcaauuccgaaugcaucacuccaaauggaagcauucccaaugacaaaccauuucaaaauguaaacaggaucacauauggggccugucccagauauguuaagcaaaacacuuugaaauuggcaacagggaugcgaaauguaccagagaaacaaacuagaggcauauuuggcgcaaucgcgggcuucauagaaaaugguugggagggaaugguggacgguugguacgguuucaggcaucaaaauucugagggcacaggacaagcagcagaucucaaaagcacucaagcagcaaucaaccaaaucaaugggaaacugaauagguuaaucgggaaaacaaacgagaaauuccaucagauugaaaaagaauucucagaaguagaagggagaauucaggaccucgagaaauauguugaggacacuaaaauagaucucuggucauacaacgcggagcuucuuguugcccuggagaaccaacauacaauugaucuaacugacucagaaaugaacaaacuguuugaaagaacuaagaagcaacugagggaaaaugcugaggauaugggcaaugguuguuucaaaauauaccacaaaugugacaaugccugcauagggucaaucagaaauggaacuuaugaccaugauguguacagagaugaagcauuaaacaaccgguuccagaucaaagguguugagcugaagucaggauacaaagauuggauccuauggauuuccuuugccauaucauguuuuuugcuuuguguugcuuuguugggguucaucaugugggccugccaaaaaggcaacauuaggugcaacauuugcauuuga

SEQ ID NO: 32052 - RNA, 1701 nt, Artificial Sequence
  derived and/or modified CDS sequence (wt) from hemagglutinin__InfluenzaA__AAX11625
augaagacuaucauugcuuugagcuacauuuuaugccugguuuucgcucaaaaacuucccggaaaugacaacagcacggcaacgcugugccuggggcaccaugcagugccaaacggaacgcuagugaaaacaaucacgaaugaccaaauugaaguaacuaaugcuacugagcugguucagaguuccucaacaaguagaauaugcgacaguccucaccaaauccuugauggagaaaacugcacacuaauagaugcucuauugggagacccucauugugauggcuuccaaaauaaggaaugggaccuuuuuguugaacgcagcaaagccuacagcaacuguuacccuuaugaugugccggauuaugucucccuuaggucacuaguugccucaucaggcacgcuggaguuuaacaaugaaagcuucaauuggacuggagucgcucagaauggaacaagcucugcuugcaaaaggagaucugauaaaaguuucuuuaguagauugaauugguugcaccaauuaaaauacaaauauccagcacugaacgugacuaugccaaacaaugaaaaauuugacaaauuguacauuugggggguucaccacccggguacagacagugaccaaaucagccuauaugcucaagcaucagggagagucacagucucuaccaaaagaagccaacaaacuguaaucccgaauaucggaucuggacccuggguaaggggugucuccagcagaauaagcaucuauuggacaauaguaaaaccgggagacauacuuuugauuaacagcacagggaaucuaauugcuccucgggguuacuucaaaauacgaagugggaaaagcucaauaaugaggucagaugcacccauuggcaaaugcaauucugaaugcaucacuccaaauggaagcauucccaaugacaaaccauuucaaaauguaaacaggaucacauauggggccugucccagauauguuaagcaaaacacucugaaauuggcaacagggaugcggaauguaccagagaaacaagcuagaggcauauucggugcaaucgcgggcuucauagaaaaugguugggagggaaugauggacgguugguacgguuucaggcaucaaaauucugagggcacagggcaagcagcagaucuuaaaagcacucaagcagcaaucaaccaaaucaacgggaaacugaauagguuaaucgagaaaacgaacgagaaauuccaucaaauugaaaaagaauucucagaaguagaagggagaauucaggaccucgagaaauauguugaggacacuaaaauagaucucuggucguacaaugcggagcuucuuguugcccuggagaaccaacauacaauugaucuaacugacucagaaaugaacaaacuguuugaaagaacaaagaagcaacugagggaaaaugcugaggauaugggcaaugguuguuucaaaauauaccacaaaugugacaaugccugcauagggucaaucagaaauggaacuuaugaccaugauguauacagagacgaagcauugaacaaccgguuccagaucaaagguguugagcugaagucaggauacaaagauuggauccuauggauuuccuuugccauaucauguuuuuugcuuuguauuguuuugcugggguucaucaugugggccugccaaaaaggcaacauuaggugcaacauuugcauuuga

SEQ ID NO: 32053 - RNA, 1701 nt, Artificial Sequence
  derived and/or modified CDS sequence (wt) from hemagglutinin__InfluenzaA__AAX12731
augaagacuaucauugcuuugagcuacauucuaugucugguuuucgcucaaaaacuucccggaaaugacaacagcacggcaacgcugugccuugggcaccaugcaguaccaaacggaacgauagugaaaacaaucacgaaugaccaaauugaaguuacuaaugcuacugagcugguucagaguuccucaacagguggaauaugcgacaguccucaucagauccuugauggagaaaacugcacacuaauagaugcucuauugggagauccucagugugauggcuuccaaaauaagaaaugggaccuuuuuguugaacgcagcaaagccuacagcaacuguuacccuuaugaugugccggauuaugccucccuuaggucacuaguugccucauccggcacacuggaguuuaacaaugaaagcuucgauuggacuggagucacucagaauggaacaagcucugcuugcaaaaggagaucuaauaaaaguuucuuuaguagauugaauugguugacccacuuaaaauacaaauacccagcauugaacgugacuaugccaaacaaugaaaaauuugacaaauuguacauuugggggguucaccacccggguacggacagugaccaaaucagccuauaugcucaagcaucaggaagaaucacagucucuaccaaaagaagccaacaaacuguaaucccgaauaucggaucuagacccaggguaagggaugucuccagccgaauaagcaucuauuggacaauaguaaaaccgggagacauacuuuugauuaacagcacagggaaucuaauugcuccucgggguuacuucaaaauacgaagugggaaaagcucaauaaugagaucagaugcacccauuggcaaaugcaauucugaaugcaucacuccaaauggaagcauucccaaugacaaaccauuucaaaauguaaacaggaucacauauggggccugucccagauauguuaagcaaaacacucugaaauuggcaacagggaugcgaaauguaccagagaaacaaacuagaggcauauuuggcgcaaucgcggguuucauagaaaaugguugggagggaaugguggacgguugguacgguuucaggcaucaaaauucugagggcacaggacaagcagcagaucucaaaagcacucaagcagcaaucaaccaaaucaaugggaaacugaauagguuaaucgggaaaacaaacgagaaauuccaucagauugaaaaagaauucucagaaguagaagggagaauucaggaccucgagaaauauguugaggacacuaaaauagaucucuggucauacaacgcggagcuucuuguugcccuggagaaccaacauacaauugaucuaacugacucagaaaugaacaaacuguuugaaagaacaaagaagcaacugagggaaaaugcugaggauaugggcaaugguuguuucaaaauauaccacaaaugugacaaugccugcauagggucaaucagaaauggaacuuaugaccaugauguguacagagaugaagcauuaaacaaccgguuccagaucaaagguguugagcugaagucaggguacaaagauuggauccuauggauuuccuuugccauaucauguuuuuugcuuuguguugcuuuguugggguucaucaugugggccugccaaaaaggcaacauuaggugcaacauuugcauuuga

SEQ ID NO: 32054 - RNA, 1701 nt, Artificial Sequence
  derived and/or modified CDS sequence (wt) from hemagglutinin__InfluenzaA__AAX12741
augaagacuaucauugcuuugagcuacauucuaugucugguuuucgcucaaaaacuucccggaaaugacaacagcacggcaacgcugugccuugggcaccaugcaguaccaaacggaacgauagugaaaacaaucacgaaugaccaaauugaaguuacuaaugcuacugagcugguacagaguuccucaacagguggaauaugcgacaguccucaucagauccuugauggagaaaacugcacacuaauagaugcucuauugggagacccucagugugauggcuuccaaaauaagaaaugggaccuuuuuguugaacgcagcaaagccuacagcaacuguuacccuuaugaugugccggauuaugccucccuuaggucacuaguugccucauccggcacacuggaguuuaacaaugaaagcuucgauuggacuggagucacucagaauggaacaagcucugcuugcaaaaggagaucuaauaaaaguuucuuuaguagauugaauugguugacccacuuaaaauacaaauacccagcauugaacgugacuaugccaaacaaugaaaaauuugacaaauuguacauuugggggguucaccacccggguacggacagugaccaaaucagccuauaugcucaagcaucaggaagaaucacagucucuaccaaaagaagccaacaaacuguaaucccgaauaucggaucuagacccaggguaagggaugucuccagccgaauaagcaucuauuggacaauaguaaaaccgggagacauacuuuugauuaacagcacagggaaucuaauugcuccucgggguuacuucaaaauacgaagugggaaaagcucaauaaugagaucagaugcacccauuggcaaaugcaauucugaaugcaucacuccaaauggaagcauucccaaugacaaaccauuucaaaauguaaacaggaucacauauggggccugucccagauauguuaagcaaaacacucugaaauuggcaacagggaugcgaaauguaccagagaaacaaacuagaggcauauuuggcgcaaucgcggguuucauagaaaaugguugggagggaaugguggacgguugguacgguuucaggcaucaaaauucugagggcacaggacaagcagcagaucucaaaagcacucaagcagcaaucaaccaaaucaaugggaaacugaauagguuaaucgggaaaacaaacgagaaauuccaucagauugaaaaagaauucucagaaguagaagggagaauucaggaccucgagaaauauguugaggacacuaaaauagaucucuggucauacaacgcggagcuucuuguugcccuggagaaccaacauacaauugaucuaacugacucagaaaugaacaaacuguuugaaagaacaaagaagcaacugagggaaaaugcugaggauaugggcaaugguuguuucaaaauauaccacaaaugugacaaugccugcauagggucaaucagaaauggaacuuaugaccaugauguguacagagaugaagcauuaaacaaccgguuccagaucaaagguguugagcugaagucaggauacaaagauuggauccuauggauuuccuuugccacaucauguuuuuugcuuuguguugcuuuguugggguucaucaugugggccugccaaaaaggcaacauuaggugcaacauuugcauuuga

SEQ ID NO: 32055 - RNA, 1701 nt, Artificial Sequence
  derived and/or modified CDS sequence (wt) from hemagglutinin__InfluenzaA__AAX12751
augaagacuaucauugcuuugagcuacauucuaugucugguuuucgcucaaaaacuucccggaaaugacaacagcacggcaacgcugugccuugggcaccaugcaguaccaaacggaacgauagugaaaacaaucacgaaugaccaaauugaaguuacuaaugcuacugagcugguacagaguuccucaacagguggaauaugcgacaguccucaucagauccuugauggagaaaacugcacacuaauagaugcucuauugggagacccucagugugauggcuuccaaaauaagaaaugggaccuuuuuguugaacgcagcaaagccuacagcaacuguuacccuuaugaugugccggauuaugccucccuuaggucacuaguugccucauccggcacacuggaguuuaacaaugaaagcuucgauuggacuggagucacucagaauggaacaagcucugcuugcaaaaggagaucuaauaaaaguuucuuuaguagauugaauugguugacccacuuaaaauacaaauacccagcauugaacgugacuaugccaaacaaugaaaaauuugacaaauuguacauuugggggguucaccacccggguacggacagugaccaaaucagccuauaugcucaagcaucaggaagaaucacagucucuaccaaaagaagccaacaaacuguaaucccgaauaucggaucuagacccaggguaagggaugucucuagccgaauaagcaucuauuggacaauaguaaaaccgggagacauacuuuugauuaacagcacagggaaucuaauugcuccucgggguuacuucaaaauacgaagugggaaaagcucaauaaugagaucagaugcacccauuggcaaaugcaauuccgaaugcaucacuccaaauggaagcauucccaaugacaaaccauuucaaaauguaaacaggaucacauauggggccugucccagauauguuaagcaaaacacuuugaaauuggcaacagggaugcgaaauguaccagagaaacaaacuagaggaauauuuggcgcaaucgcgggcuucauagaaaaugguugggagggaaugguggacgguugguacgguuucaggcaucaaaauucugagggcacaggacaagcagcagaucucaaaagcacucaagcagcaaucaaccaaaucaaugggaaacugaauagguuaaucgggaaaacaaacgagaaauuccaucagauugaaaaagaauucucagaaguagaagggagaauucaggaccucgagaaauauguugaggacacuaaaauagaucucuggucauacaacgcggagcuucuuguugcccuggagaaccaacauacaauugaucuaacugacucagaaaugaacaaacuguuugaaagaacaaagaagcaacugagggaaaaugcugaggauaugggcaaugguuguuucaaaauauaccacaaaugugacaaugccugcauagggucaaucagaaauggaacuuaugaccaugauguguacagagaugaagcauuaaacaaccgguuccagaucaaagguguugagcugaagucaggauacaaagauuggauccuauggauuuccuuugccauaucauguuuuuugcuuuguguugcuuuguugggguucaucaugugggccugccaaaaaggcaacauuaggugcaacauuugcauuuga

SEQ ID NO: 32056 - RNA, 1701 nt, Artificial Sequence
  derived and/or modified CDS sequence (wt) from hemagglutinin__InfluenzaA__AAX12761
augaagacuaucauugcuuugagcuacauuuuaugucugguuuucgcucaaaaacuucccggaaaugacaacagcacggcaacgcugugccuggggcaccaugcagugccaaacggaacgcuagugaaaacaaucacgaaugaccaaauugaagugacuaaugcuacugagcugguucagaguuccucaacagguagaauaugcgacaguccucaccaaauccuugauggagaaaacugcacacuaauagaugcucuauugggagacccucauugugauggcuuccaaaauaaggaaugggaccuuuuuguugaacgcagcaaagccuacagcaacuguuacccuuaugaugugccggauuaugucucccuuaggucacuaguugccucaucaggcacgcuggaguuuaacaaugaaagcuucaauuggacuggagucgcucagaauggaacaagcucugcuugcaaaaggagaucugauaaaaguuucuuuaguagauugaauugguugcaccaauuaaaauacaaauauccagcacugaacgugacuaugccaaacaaugaaaaauuugacaaauuguacauuugggggguucaccacccggguacagacagugaccaaaucagccuauaugcucaagcaucagggagagucacagucucuaccaaaagaagccaacaaacuguaaucccgaauaucggaucuagacccuggguaaggggugucuccagcagaauaagcaucuauuggacaauaguaaaaccgggagacauacuuuugauuaacagcacagggaaucuaauugcuccucgggguuacuucaaaauacgaagugggaaaagcucaauaaugaggucagaugcacccauuggcaaaugcaauucugaaugcaucacuccaaauggaagcauucccaaugacaaaccauuucaaaauguaaacaggaucacauaugggcccugucccagauauguuaagcaaaacacucugaaauuggcaacagggaugcggaaugugccagagaaacaaacuagaggcauauucggugcaaucgcgggcuucauagaaaaugguugggagggaaugauggacgguugguacgguuucaggcaucaaaauucugagggcacagggcaagcagcagaucuuaaaagcacucaagcagcaaucaaccaaaucaacgggaaacugaauagguuaaucgagaaaacgaacgagaaauuccaucaaauugaaaaagaauucucagaaguagaagggagaauucaggaccucgagaaauauguugaggacacuaaaauagaucucuggucguacaaugcggagcuucuuguugcccuggagaaccaacauacaauugaucuaacugacucagaaaugaacaaacuguuugaaagaacaaagaagcaacuaagggaaaaugcugaggauaugggcaaugguuguuucaaaauauaccacaaaugugacaaugucugcauagggucaaucagaaauggaacuuaugaccaugauguauacagagacgaagcauugaacaaccgguuccagaucaaagguguugagcugaagucaggauacaaagauuggauccuauggauuuccuuugccauaucauguuuuuugcuuuguauuguuuugcugggguucaucaugugggccugccaaaaaggcaacauuaggugcaacauuugcauuuga

SEQ ID NO: 32057 - RNA, 1701 nt, Artificial Sequence
  derived and/or modified CDS sequence (wt) from hemagglutinin__InfluenzaA__AAX12791
augaagacuaucauugcuuugagcuacauuuuaugucugguuuucgcucaaaaacuucccggaaaugacaacagcauggcaacgcugugccuggggcaccaugcagugccaaacggaacgcuagugaaaacaaucacgaaugaccaaauugaagugacuaaugcuacugagcugguucagaguuccucaacagguagaauaugcgacaguccucaccaaauccuugauggagaaaacugcacacuaauagaugcucuauugggagacccucauugugauggcuuccaaaauaaggaaugggaccuuuuuguugaacgcagcaaagccuacagcaacuguuacccuuaugaugugccggauuaugucucccuuaggucacuaguugccucaucaggcacgcuggaguuuaacaaugaaagcuucaauuggacuggagucgcucagaauggaacaagcucugcuugcaaaaggagaucugauaaaaguuucuuuaguagauugaauugguugcaccaauuaaaauacaaauauccagcacugaacgugacuaugccaaacaaugaaaaauuugacaaauuguacauuugggggguucaccacccggguacagacagugaccaaaucagccuauaugcucaagcaucagggagagucacagucucuaccaaaagaagccaacaaacuguaaucccgaauaucggaucuggacccuggguaaggggugucuccagcagaauaagcaucuauuggacaauaguaaaaccgggagacauacuuuugauuaacagcacagggaaucuaauugcuccucgggguuacuucaaaauacgaagugggaaaagcucaauaaugaggucagaugcacccauugacaaaugcaauucugaaugcaucacuccaaauggaagcauucccaaugacaaaccauuucaaaauguaaacaggaucacauaugggcucugucccagauauguuaagcaaaacacucugaaauuggcaacagggaugcggaaugugccagagaaacaaacuagaggcauauucggugcaaucgcgggcuucauagaaaaugguugggagggaaugauggacgguugguacgguuucaggcaucaaaauucugagggcacagggcaagcagcagaucuuaaaagcacucaagcagcaaucaaccaaaucaacgggaaacugaauagguuaaucgaaaaaacgaacgagaaauuccaucaaauugaaaaagaauucucagaaguagaagggagaauucaggaccucgagaaauauguugaggacacuaaaauagaucucuggucguacaaugcggagcuucuuguugcccuggagaaccaacauacaauugaucuaacugacucagaaaugaacaaacuguuugaaagaacaaagaagcaacugagggaaaaugcugaggauaugggcaaugguuguuucaaaauauaccacaaaugugacaaugccugcauagggucaaucagaaauggaacuuaugaccaugauguauacagagacgaagcauugaacaaccgguuccagaucaaagguguugagcugaagucaggauacaaagauuggauccuauggauuuccuuugccauaucauguuuuuugcuuuguauuguuuugcugggguucaucaugugggccugccaaaaaggcaacauuaggugcaacauuugcauuuga

SEQ ID NO: 32058 - RNA, 1701 nt, Artificial Sequence
  derived and/or modified CDS sequence (wt) from hemagglutinin__InfluenzaA__AAX12801
augaagacuaucauugcuuugagcuacauuuuaugccugguuuucgcucaaaaauuucccggaaaugacaacagcacggcaacgcugugccuggggcaucaugcagugccaaacggaacgcuagugaaaacaaucacgaaugaccaaauugaaguaacuaaugcuacugagcugguucagaguuccucaacagauagaauaugcgacaguccucaccaaauccuugauggagaaaacugcacacuaauagaugcucuauugggagacccucauugugauggcuuccaaaauaaggaaugggaccuuuuuguugaacgcagcaaagccuacagcaacuguuacccuuaugaugugccggauuaugucucccuuaggucacuaguugccucaucaggcacgcuggaguuuaacaaugaaagcuucaauuggacuggagucgcucagaauggaacaagcucugcuugcaaaaggagaucugauaaaaguuucuuuaguagauugaauugguugcaccaauuaaaauacaaauauccagcacugaacgugacuaugccaaacaaugaaaaauuugacaaauuguacauuugggggguucaccacccggguacagacagugaccaaaucagccuauaugcucaagcaucagggagagucacagucucuaccaaaagaagccaacaaacuguaaucccgaauaucggaucuagacccuggguaaggggugucuccagcagaauaagcaucuauuggacaauaguaaaaccgggagacauacuuuugauuaacagcacagggaaucuaauugcuccucgggguuacuucaaaauacgaagugggaaaagcucaauaaugaggucagaugcacccauuggcaaaugcaauucugaaugcaucacuccaaauggaagcauucccaaugacaaaccauuucaaaauguaaacaggaucacauauggggccugucccagauauguuaagcaaaacacucugaaauuggcaacagggaugcggaaugugccagagaaacaaacuagaggcauauucggugcaaucgcgggcuucauagaaaaugguugggagggaaugauggacgguugguacgguuucaggcaucaaaauucugagggcacagggcaagcagcagaucuuaaaagcacucaagcagcaaucaaccaaaucaacgggaaacugaauagguuaaucgagaaaacgaacgagaaauuccaucaaauugaaaaagaauucucagaaguagaagggagaauucaggaccucgagaaauauguugaggacacuaaaauagaucucuggucguacaaugcggagcuucuuguugcccuggagaaccaacauacaauugaucuaacugacucagaaaugaacaaacuguuugaaagaacaaagaagcaacugagggaaaaugcugaggauaugggcaaugguuguuucaaaauauaccacaaaugugacaaugccugcauagggucaaucagaaauggaacuuaugaccaugauguauacagagacgaagcauugaacaaccgguuccagaucaaagguguugagcugaagucaggauacaaagauuggauccuauggauuuccuuugccauaucauguuuuuugcuuuguauuguuuugcugggguucaucaugugggccugccaaaaaggcaacauuaggugcaacauuugcauuuga

SEQ ID NO: 32059 - RNA, 1701 nt, Artificial Sequence
  derived and/or modified CDS sequence (wt) from hemagglutinin__InfluenzaA__AAX12811
augaagacuaucauugcuuugagcuacauuuuaugccugguuuucgcucaaaaacuucccggaaaugacaacagcacggcaacgcugugccuggggcaccaugcagugccaaacggaacgcuagugaaaacaaucacgaaugaccaaauugaaguaacuaaugcuacugagcugguucagaguuccucaacaaguagaauaugcgacaguccucaccaaauccuugauggagaaaacugcacacuaauagaugcucuauugggagacccucauugugauggcuuccaaaauaaggaaugggaccuuuuuguugaacgcagcaaagccuacagcaacuguuacccuuaugaugugccggauuaugucucccuuaggucacuaguugccucaucaggcacgcuggaguuuaacaaugaaagcuucaauuggacuggagucgcucagaauggaacaagcucugcuugcaaaaggagaucugauaaaaguuucuuuaguagauugaauugguugcaccaauuaaaauacaaauauccagcacugaacgugacuaugccaaacaaugaaaaauuugacaaauuguacauuugggggguucaccacccggguacagacagugaccaaaucagccuauaugcucaagcaucagggagagucacagucucuaccaaaagaagccaacaaacuguaaucccgaauaucggaucuagacccuggguaaggggugucuccagcagaauaagcaucuauuggacaauaguaaaaccgggagacauacuuuugauuaacagcacagggaaucuaauugcuccucgggguuacuucaaaauacgaagugggaaaagcucaauaaugaggucagaugcacccauuggcaaaugcaauucugaaugcaucacuccaaauggaagcauucccaaugacaaaccauuucaaaauguaaacaggaucacauauggggccugucccagauauguuaagcaaaacacucugaaauuggcaacagggaugcggaauguaccagagaaacaaacuagaggcauauucggugcaaucgcgggcuucauagaaaaugguugggagggaaugauggacgguugguacgguuucaggcaucaaaauucugagggcacagggcaagcagcagaucuuaaaagcacucaagcagcaaucaaccaaaucaacgggaaacugaauagguuaaucgagaaaacgaacgagaaauuccaucaaauugaaaaagaauucucagaaguagaagggagaauucaggaccucgagaaauauguugaggacacuaaaauagaucucuggucguacaaugcggagcuucuuguugcccuggagaaccaacauacaauugaucuaacugacucagaaaugaacaaacuguuugaaagaacaaagaagcaacugagggaaaaugcugaggauaugggcaaugguuguuucaaaauauaccacaaaugugacaaugccugcauagggucaaucagaaauggaacuuaugaccaugauguauacagagacgaagcauugaacaaccgguuccagaucaaagguguugagcugaagucaggauacaaagauuggauccuauggauuuccuuugccauaucauguuuuuugcuuuguauuguuuugcugggguucaucaugugggccugccaaaaaggcaacauuaggugcaacauuugcauuuga

SEQ ID NO: 32060 - RNA, 1701 nt, Artificial Sequence
  derived and/or modified CDS sequence (wt) from hemagglutinin__InfluenzaA__AAX34061
augaagacuaucauugcuuugagcuacauucuaugucugguuuucgcucaaaaacuucccggaaaugacaacagcacggcaacgcugugccuugggcaccaugcaguaccaaacggaacgauagugaaaacaaucacgaaugaccaaauugaaguuacuaaugcuacugagcugguacagaguuccucaacaggugaaauaugcgacaguccucaucagauccuugauggagaaaacugcacacuaauagaugcucuauugggagacccucagugugauggcuuccaaaauaagaaaugggaccuuuuuguugaacgcagcaaagccuacagcaacuguuacccuuaugaugugccggauuaugccucccuuaggucacuaguugccucauccggcacacuagaguuuaacaaugaaagcuucgauuggacuggagucacucagaauggaacaagcucugcuugcaaaaggagaucuaauaaaaguuucuuuaguagauugaauugguugacccacuuaaaauacaaauacccagcauugaacgugacuaugccaaacaaugaaaaauuugacaaauuguacauuugggggguucaccacccggguacggacagugaccaaaucagccuauaugcucaagcaucaggaagaaucacagucucuaccaaaagaagccaacaaacuguaaucccgaauaucggaucuagacccaggguaagggaugucuccagccgaauaagcaucuauuggacaauaguaaaaccgggagacauacuuuugauuaacagcacagggaaucuaauugcuccucgggguuacuucaaaauacgaagugggaaaagcucaauaaugagaucagaugcacccauuggcaaaugcaauucugaaugcaucacuccaaauggaagcauucccaaugacaaaccauuucaaaauguaaacaggaucacauauggggccugucccagauauauuaagcaaaacacucugaaauuggcaacagggaugcgaaauguaccagagaaacaaacuagaggcauauuuggcgcaaucgcggguuucauagaaaaugguugggagggaaugguggacgguugguacgguuucaggcaucaaaauucugagggcacaggacaagcagcagaucucaaaagcacucaagcagcaaucaaccaaaucaaugggaaacugaauagguuaaucgggaaaacaaacgagaaauuccaucagauugaaaaagaauucucagaaguagaagggagaauucaggaccucgagaaauauguugaggacacuaaaauagaucucuggucauacaacgcggagcuucuuguugcccuggagaaccaacauacaauugaucuaacugacucagaaaugaacaaacuguuugaaagaacaaagaagcaacugagggaaaaugcugaggauaugggcaaugguuguuucaaaauauaccacaaaugugacaaugccugcauagggucaaucagaaauggaacuuaugaccaugauguguacagagaugaagcauuaaacaaccgguuccagaucaaagguguugagcugaagucaggauacaaagauuggauccuauggauuuccuuugccauaucauguuuuuugcuuuguguugcuuuguugggguucaucaugugggccugccaaaaaggcaacauuaggugcaacauuugcauuuga

SEQ ID NO: 32061 - RNA, 1701 nt, Artificial Sequence
  derived and/or modified CDS sequence (wt) from hemagglutinin__InfluenzaA__AAX35821
augaagacuaucauugcuuugagcuacauucuaugucugguuuucgcucaaaaacuucccggaaaugacaacagcacggcaacgcugugccuugggcaccaugcaguaccaaacggaacgauagugaaaacaaucacgaaugaccaaauugaaguuacuaaugcuacugagcugguucagaguuccucaacagguggaauaugcgacaguccucaucagauccuugauggagaaaacugcacacuaauagaugcucuauugggagacccucagugugauggcuuccaaaauaagaaaugggaccuuuuuguugaacgcagcaaagccuacagcaacuguuacccuuaugaugugccggauuaugccucccuuaggucacuaguugccucauccggcacacuggaguuuaacaaugaaagcuucaacuggacuggagucacucagaauggaacaagcucugcuugcaaaaggaaaucuaauaaaaguuucuuuaguagauugaauugguugacccacuuaaaauacaaauacccagcauugaacgugacuaugccaaacaaugaaaaauuugacaaauuguacauuugggggguucaccacccggguacggacaaugaccaaaucagccuauaugcucaagcaucaggaagaaucacagucucuaccaaaagaagccaacaaacuguaaucccgaauaucggaucuagacccaggguaagggacgucuccagcagaauaagcaucuauuggacaauaguaaaaccgggagacauacuuuugauuaacagcacagggaaucuaauugcuccucgggguuacuucaaaauacgaagugggaaaagcucaauaaugagaucagaugcacccauuggcaaaugcaauucugaaugcaucacuccaaauggaagcauucccaaugacaaaccauuucaaaauguaaacaggaucacauauggggccugucccagauauguuaagcaaaacacucugaaauuggcaacagggaugcgaaauguaccagagagacaaacuagaggcauauuuggcgcaaucgcggguuucauagaaaaugguugggagggaaugguggacgguugguacgguuucaggcaucaaaauucugagggcacaggacaagcagcagaucucaaaagcacucaagcagcaaucaaccaaaucaaugggaaacugaauagguuaaucgggaaaacaaacgagaaauuccaucagauugaaaaagaauucucagaaguagaggggagaauucaggaccucgagaaauauguugaggacacuaaaauagaucucuggucauacaacgcggagcuucuuguugcccuggagaaccaacauacaauugaucuaacugacucagaaaugaacaaacuguuugaaagaacaaagaagcaacugagggaaaaugcugaggauaugggcaaugguuguuucaaaauauaccacaaaugugacaaugccugcauagggucaaucagaaauggaacuuaugaccaugauguauacagagaugaagcauuaaacaaccgguuccagaucaaagguguugagcugaagucaggauacaaagauuggauccuauggauuuccuuugccauaucauguuuuuugcuuuguguugcuuuguugggguucaucaugugggccugccaaaaaggcaacauuaggugcaacauuugcauuuga

SEQ ID NO: 32062 - RNA, 1701 nt, Artificial Sequence; identical to SEQ ID NO: 32043
  derived and/or modified CDS sequence (wt) from hemagglutinin__InfluenzaA__AAX35831

SEQ ID NO: 32063 - RNA, 1701 nt, Artificial Sequence
  derived and/or modified CDS sequence (wt) from hemagglutinin__InfluenzaA__AAX35851
augaagacuaucauugcuuugagcuacauuuuaugucugguuuucgcucaaaaacuucccggaaaugacaacagcacggcaacgcugugccuggggcaccaugcagugccaaacggaacgcuagugaaaacaaucacgaaugaccaaauugaagugacuaaugcuacugagcugguucagaguuccucaacagguagaauaugcgacaguccucaccaaauccuugauggagaaaacugcacacuaauagaugcucuauugggagacccucauugugauggcuuccaaaauaaggaaugggaccuuuuuguugaacgcagcaaagccuacagcaacuguuacccuuaugaugugccggauuaugucucccuuaggucacuaguugccucaucaggcacgcuggaguuuaacaaugaaagcuucaauuggacuggagucgcucagaauggaacaagcucugcuugcaaaaggagaucugauaaaaguuucuuuaguagauugaauugguugcaccaauuaaaauacaaauauccagcacugaacgugacuaugccaaacaaugaaaaauuugacaaauuguacauuugggggguucaccacccggguacagacagugaccaaaucagcuuauaugcucaagcaucagggagagucacagucucuaccaaaagaagccaacaaacuguaaucccgaauaucggaucuagacccuggguaaggggugucuccagcagaauaagcaucuauuggacaauaguaaaaccgggagacauacuuuugauuaacagcacagggaaucuaauugcuccucgggguuacuucaaaauacgaagugggaaaagcucaauaaugaggucagaugcacccauuggcaaaugcaauucugaaugcaucacuccaaauggaagcauucccaaugacaaaccauuucaaaauguaaacaggaucacauaugggcccugucccagauauguuaagcaaaacacucugaaauuggcaacagggaugcggaaugugccagagaaacaaacuagaggcauauucggugcaaucgcgggcuucauagaaaaugguugggagggaaugauggacgguugguacgguuucaggcaucaaaauucugagggcacagggcaagcagcagaucuuaaaagcacucaagcagcaaucaaccaaaucaacgggaaacugaauagguuaaucgagaaaacgaacgagaaauuccaucaaauugaaaaagaauucucagaaguagaagggagaauucaggaccucgagaaauauguugaggacacuaaaauagaucucuggucguacaaugcggagcuucuuguugcccuggagaaccaacauacaauugaucuaacugacucagaaaugaacaaacuguuugaaagaacaaagaagcaacugagggaaaaugcugaggauaugggcaaugguuguuucaaaauauaccacaaaugugacaaugccugcauagggucaaucagaaauggaacuuaugaccaugauguauacagagacgaagcauugaacaaccgguuccagaucaaagguguugagcugaagucaggauacaaagauuggauccuauggauuuccuuugccauaucauguuuuuugcuuuguauuguuuugcugggguucaucaugugggccugccaaaaaggcaacauuaggugcaacauuugcauuuga

SEQ ID NO: 32064 - RNA, 1701 nt, Artificial Sequence
  derived and/or modified CDS sequence (wt) from hemagglutinin__InfluenzaA__AAX35861
augaagacuaucauugcuuugagcuacauuuuaugccugguuuucgcucaaaaacuucccggaaaugacaacagcacggcaacgcugugccuggggcaccaugcagugccaaacggaacgcuagugaaaacaaucacgaaugaccaaauugaaguaacuaaugcuacugagcugguucagaguuccucaacaaguagaauaugcgacaguccucaccaaauccuugauggagaaaacugcacacuaauagaugcucuauugggagacccucauugugauggcuuccaaaauaaggaaugggaccuuuuuguugaacgcagcaaagccuacagcaacuguuacccuuaugaugugccggauuaugucucccuuaggucacuaguugccucaucaggcacgcuggaauuuaacaaugaaagcuucaauuggacuggagucgcucagaauggaacaagcucugcuugcaaaaggagaucugauaaaaguuucuuuaguagauugaauugguugcaccaauuaaaauacaaauauccagcacugaacgugacuaugccaaacaaugaaaaauuugacaaauuguacauuugggggguucaccacccggguacagacagugaccaaaucagccuauaugcucaagcaucagggagaaucacagucucuaccaaaagaagccaacaaacuguaaucccgaauaucggaucuggacccuggguaaggggugucuccagcagaauaagcaucuauuggacaauaguaaaaccgggagacauacuuuugauuaacagcacagggaaucuaauugcuccucgggguuacuucaaaauacgaagugggaaaagcucaauaaugaggucagaugcacccauuggcaaaugcaauucugaaugcaucacuccaaauggaagcauucccaaugacaaaccauuucaaaauguaaacaggaucacauauggggccugucccagauauguuaagcaaaacacucugaaauuggcaacagggaugcggaauguaccagagaaacaaacuagaggcauauucggugcaaucgcgggcuucauagaaaaugguugggagggaaugauggacgguugguacgguuucaggcaucaaaauucugagggcacagggcaagcagcagaucuuaaaagcacucaagcagcaaucaaccaaaucaacgggaaacugaauagguuaaucgagaaaacgaacgagaaauuccaucaaauugaaaaagaauucucagaaguagaagggagaauucaggaccucgagaaauauguugaggacacuaaaauagaucucuggucguacaaugcggagcuucuuguugcccuggagaaccaacauacaauugaucuaacugacucagaaaugaacaaacuguuugaaagaacaaagaagcaacugagggaaaaugcugaggauaugggcaaugguuguuucaaaauauaccacaaaugugacaaugccugcauagggucaaucagaaauggaacuuaugaccaugauguauacagagacgaagcauugaacaaccgguuccagaucaaagguguugagcugaagucaggauacaaagauuggauccuauggauuuccuuugccauaucauguuuuuugcuuuguauuguuuugcugggguucaucaugugggccugccaaaaaggcaacauuaggugcaacauuugcauuuga

SEQ ID NO: 32065 - RNA, 1701 nt, Artificial Sequence
  derived and/or modified CDS sequence (wt) from hemagglutinin__InfluenzaA__AAX35871
augaagacuaucauugcucugagcuacauuuuaugccugguuuucgcucaaaaacuucccggaaaugacaacagcacggcaacgcugugccuggggcaccaugcagugccaaacggaacgcuagugaaaacaaucacgaaugaccaaauugaaguaacuaaugcuacugagcugguucagaguuccucagcaaguagaauaugcgacaguccucaccaaauccuugauggagaaaacugcacacuaauagaugcucuauugggagacccucauugugauggcuuccaaaauaaggaaugggaccuuuuuguugaacgcagcaaagccuacagcaacuguuacccuuaugaugugccggauuaugucucccuuaggucacuaguugccucaucaggcacgcuggaguuuaacaaugaaagcuucaauuggacuggagucgcucagaauggaacaagcuuugcuugcaaaaggagaucugauaaaaguuucuuuaguagauugaauugguugcaccaauuaaaauacaaauauccagcacugaacgugacuaugccaaacaaugaaaaauuugacaaauuguacauuugggggguucaccacccggguacagacagugaccaaaucagccuauaugcucaagcaucagggagagucacagucucuaccaaaagaagccaacaaacuguaaucccgaauaucggaucuggacccuggguaaggggugucuccagcagaauaagcaucuauuggacaauaguaaaaccgggagacauacuuuugauuaacagcacagggaaucuaauugcuccucgggguuacuucaaaauacgaagugggaaaagcucaauaaugaggucagaugcacccauuggcaaaugcaauucugaaugcaucacuccaaauggaagcauucccaaugacaaaccauuucaaaauguaaacaggaucacauauggggccugucccagauauguuaagcaaaacacucugaaauuggcaacagggaugcggaauguaccagagaaacaaacuagaggcauauucggugcaaucgcgggcuucauagaaaaugguugggagggaaugauggacgguugguacgguuucaggcaucaaaauucugagggcacagggcaagcagcagaucuuaaaagcacucaagcagcaaucaaccaaaucaacgggaaacugaauagguuaaucgagaaaacgaacgagaaauuccaucaaauugaaaaagaauucucagaaguagaagggagaauucaggaccucgagaaauauguugaggacacuaaaauagaucucuggucguacaaugcggagcuucuuguugcccuggagaaccaacauacaauugaucuaacugacucagaaaugaacaaacuguuugaaagaacaaagaagcaacugagggaaaaugcugaggauaugggcaaugguuguuucaaaauauaccacaaaugugacaaugccugcauagggucaaucagaaauggaacuuaugaccaugauguauacagagacgaagcauugaacaaccgguuccagaucaaagguguugagcugaagucaggauacaaagauuggauccuauggauuuccuuugccauaucauguuuuuugcuuuguauuguuuugcugggguucaucaugugggccugccaaaaaggcaacauuaggugcaacauuugcauuuga

SEQ ID NO: 32066 - RNA, 1701 nt, Artificial Sequence
  derived and/or modified CDS sequence (wt) from hemagglutinin__InfluenzaA__AAX38237
augaagacuaucauugcuuugagcuacauuuuaugccugguuuucgcucaaaaacuucccggaaaugacaacagcacggcgacgcugugccuggggcaccaugcagugccaaacggaacgcuagugaaaacaaucacgaaugaccaaauugaaguaacuaaugcuacugagcugguucagaguuccucaacaaguagaauaugcgacaguccucaccaaauccuugauggagaaaacugcacacuaauagaugcucuauugggagacccucauugugauggcuuccaaaauaaggaaugggaccuuuuuguugaacgcagcaaagccuacagcaacuguuacccuuaugaugugccggauuaugucucccuuaggucacuaguugccucaucaggcacgcuggaguuuaacaaugaaagcuucaauuggacuggagucgcucagaauggaacaagcucugcuugcaaaaggagaucugauaaaaguuucuuuaguagauugaauugguugcaccaauuaaaauacaaauauccagcacugaacgugacuaugccaaacaaugaaaaauuugacaaauuguacauuugggggguucaccacccggguacagacagugaccaaaucagccuauaugcucaagcaucagggagagucacagucucuaccaaaagaagccaacaaacuguaaucccgaauaucggaucuagacccuggguaaggggugucuccagcagaauaagcaucuauuggacaauaguaaaaccgggagacauacuuuugauuaacagcacagggaaucuaauugcuccucgggguuacuucaaaauacgaagugggaaaagcucaauaaugaggucagaugcacccauuggcaaaugcaauucugaaugcaucacuccaaauggaagcauucccaaugacaaaccauuucaaaauguaaacaggaucacauauggggccugucccagauauguuaagcaaaacacucugaaauuggcaacagggaugcggaauguaccagagaaacaaacuagaggcauauucggugcaaucgcgggcuucauagaaaaugguugggaggggaugauggacgguugguacgguuucaggcaucaaaauucugagggcacagggcaagcagcagaucuuaaaagcacucaagcagcaaucaaccaaaucaacgggaaacugaauagguuaaucgagaaaacgaacgagaaauuccaucaaauugaaaaagaauucucagaaguagaagggagaauucaggaccucgagaaauauguugaggacacuaaaauagaucucuggucguacaaugcggagcuucuuguugcccuggagaaccaacauacaauugaucuaacugacucagaaaugaacaaacuguuugaaagaacaaagaagcaacugagggaaaaugcugaggauaugggcaaugguuguuucaaaauauaccacaaaugugacaaugccugcauagggucaaucagaaauggaacuuaugaccaugauguauacagagacgaagcauugaacaaccgguuccagaucaaagguguugagcugaagucaggauacaaagauuggauccuauggauuuccuuugccauaucauguuuuuugcuuuguauuguuuugcugggguucaucaugugggccugccaaaaaggcaacauuaggugcaacauuugcauuuga

SEQ ID NO: 32067 - RNA, 1701 nt, Artificial Sequence
  derived and/or modified CDS sequence (wt) from hemagglutinin__InfluenzaA__AAX47515
augaaggcuaucauugcuuugagcuacauuuuaugccugguuuucgcucaaaaacuucccggaaaugacaacagcacggcaacgcugugccuggggcaucaugcagugccaaacggaacgcuagugaaaacaaucacgaaugaccaaauugaaguaacuaaugcuacugagcugguucagaguuccucaacagguagaauaugcgacaguccucaccaaauccuugauggagaaaacugcacacuaauagaugcucuauugggagacccucauugugauggcuuccaaaauaaggaaugggaccuuuuuguugaacgcagcaaagccuacagcaacuguuacccuuaugaugugccggauuaugucucccuuaggucacuaguugccucaucaggcacgcuggaguuuaacaaugaaagcuucaauuggacuggagucgcucagaauggaacaagcucugcuugcaaaaggagaucugauaaaaguuucuuuaguagauugaauugguugcaccaauuaaaauacaaauauccagcacugaacgugacuaugccaaacaaugaaaaauuugacaaauuguacauuugggggguucaccacccggguacagacagugaccaaaucagccuauaugcucaagcaucagggagagucacagucucuaccaaaagaagccaacaaacuguaaucccgaauaucggaucuagacccuggguaaggggugucuccagcagaauaagcaucuauuggacaauaguaaaaccgggagacauacuuuugauuaacagcacagggaaucuaauugcuccucgggguuacuucaaaauacgaagugggaaaagcucaauaaugaggucagaugcacccauuggcaaaugcaauucugaaugcaucacuccaaauggaagcauucccaaugacaaaccauuucaaaauguaaacaggaucacauauggggccugucccagauauguuaagcaaaacacucugaaauuggcaacagggaugcggaaugugccagagaaacaaacuagaggcauauucggugcaaucgcgggcuucauagaaaaugguugggagggaaugauggacgguugguacgguuucaggcaucaaaauucugagggcacagggcaagcagcagaucuuaaaagcacucaagcagcaaucaaccaaaucaacgggaaacugaauagguuaaucgagaaaacgaacgagaaauuccaucaaauugaaaaagaauucucagaaguagaagggagaauucaggaccucgagaaauauguugaggacacuaaaauagaucucuggucguacaaugcggagcuucuuguugcccuggagaaccaacauacaauugaucuaacugacucagaaaugaacaaacuguuugaaagaacaaagaagcaacugagggaaaaugcugaggauaugggcaaugguuguuucaaaauauaccacaaaugugacaaugccugcauagggucaaucagaaauggaacuuaugaccaugauguauacagagacgaagcauugaacaaccgguuccagaucaaagguguugagcugaagucaggauacaaagauuggauccuauggauuuccuuugccauaucauguuuuuugcuuuguauuguuuugcugggguucaucaugugggccugccaaaaaggcaacauuaggugcaacauuugcauuuga

SEQ ID NO: 32068 - RNA, 1701 nt, Artificial Sequence
  derived and/or modified CDS sequence (wt) from hemagglutinin__InfluenzaA__AAX47525
augaagacuaucauugcuuugagcuacauuuuaugucugguuuucgcucaaaaacuucccggaaaugacaacagcacggcaacgcugugcauggggcaccaugcagugccaaacggaacgcuagugaaaacaaucacgaaugaccaaauugaagugacuaaugcuacugagcugguucagaguuccucaacagguagaauaugcgacaguccucaccaaauccuugauggagaaaacugcacacuaauagaugcucuauugggagacccucauugugauggcuuccaaaauaaggaaugggaccuuuuuguugaacgcagcaaagccuacagcaacuguuacccuuaugaugugccggauuaugucucccuuaggucacuaguugccucaucaggcacgcuggaguuuaacaaugaaagcuucaauuggacuggagucgcucagaauggaacaagcucugcuugcaaaaggagaucuaauaaaaguuucuuuaguagauugaauugguugcaccaauuaaaauacaaauauccagcacugaacgugacuaugccaaacaaugaaaaauuugacaaauuguacauuugggggguucaccacccggauacagacaguaaccaaaucagccuauaugcucaagcaucagggagagucacagucucuaccaaaagaagccaacaaacuguaaucccaaauaucggaucuggacccuggguaaggggugucuccagcagaauaagcaucuauuggacaauaguaaaaccgggagacauacuuuuaauuaacagcacagggaaucuaauugcuccucgggguuacuucaaaauacgaagugggaaaagcucaauaaugaggucagaugcacccauuggcaaaugcaauucugaaugcaucacuccaaauggaagcauucccaaugacaaaccauuucaaaauguaaacaggaucacauauggggccugucccagauauguuaagcaaaacacucugaaauuggcaacagggaugcggaaugugccagagaaacaaacuagaggcauauucggugcaaucgcgggcuucauagaaaaugguugggagggaaugauggacgguugguacgguuucaggcaucaaaauucugaaggcacagggcaagcagcagaucuuaaaagcacucaagcagcaaucaaccaaaucaacgggaaacuaaauagguuaaucgagaaaacgaacgagaaauuccaucaaauugaaaaagaauucucagaaguagaagggagaauucaggaccucgagaaauauguugaggacacuaaaauagaucucuggucguacaaugcggagcuucuuguugcccuggagaaccaacacacaauugaucuaacugacucagaaaugaacaaacuguuugaaagaacaaagaagcaacugagggaaaaugcugaggauaugggcaaugguuguuucaaaauauaccacaaaugugacaaugccugcauagggucaaucagaaauggaacuuaugaccaugauguauacagagacgaagcauugaacaaccgguuccagaucaaagguguugagcugaagucaggauacaaagauuggauccuauggauuuccuuugccauaucauguuuuuugcuuuguauuguuuugcugggguucaucaugugggccugccaaaaaggcaacauuaggugcaacauuugcauuuga

SEQ ID NO: 32069 - RNA, 1701 nt, Artificial Sequence; identical to SEQ ID NO: 32059
  derived and/or modified CDS sequence (wt) from hemagglutinin__InfluenzaA__AAX47535

SEQ ID NO: 32070 - RNA, 1701 nt, Artificial Sequence
  derived and/or modified CDS sequence (wt) from hemagglutinin__InfluenzaA__AAX56380
augaagacuaucauugcuuugagcuacauucuaugucugguuuucgcucaaaaacuucccggaaaugacaacagcacggcaacgcugugccuugggcaccaugcaguaccaaacggaacgauagugaaaacaaucacgaaugaccaaauugaaguuacuaaugcuacugagcugguucagaguuccucaacagguggaauaugcgacaguccucaucagauccuugauggagaaaacugcacacuaauagaugcucuauugggagacccucagugugauggcuuccaaaauaagaaaugggaccuuuuuguugaacgcagcaaagccuacagcaacuguuacccuuaugaugugccggauuaugccucccuuaggucacuaguugccucauccggcacacuggaguuuaacaaugaaagcuucaauuggacuggagucacucagaauggaacaagcucugcuugcgaaaggagaucuaauaaaaguuucuuuaguagauugaauugguugacccacuuaaaauacaaauacccagcauugaacgugacuaugccaaacaaugaaaaauuugacaaauuguacauuugggggguucaccacccggguacggacagugaccaaaucagccuauaugcucaagcaucaggaagaaucacagucucuaccaaaagaagccaacaaacuguaaucccgaauaucggaucuagacccaggguaagggaugucuccagccgaauaagcaucuauuggacaauaguaaaaccgggagacauacuuuugauuaacagcacagggaaucuaauugcuccucgggguuacuucaaaauacgaagugggaaaagcucaauaaugagaucagaugcacccauuggcaaaugcaauucugaaugcaucacuccaaauggaagcauucccaaugacaaaccauuucaaaauguaaacaggaucacauauggggccugucccagauauguuaagcaaaacacucugaaauuggcaacagggaugcgaaauguaccagagaaacaaacuagaggcauauuuggcgcaaucgcggguuucauagaaaaugguugggagggaaugguggacgguugguacgguuucaggcaucaaaauucugagggcacaggacaagcagcagaucucaaaagcacucaagcagcaaucaaccaaaucaaugggaaacugaauagguuaaucgggaaaacaaacgagaaauuccaucagauugaaaaagaauucucagaaguagaagggagaauucaggaccucgagaaauauguugaggacacuaaaauagaucucuggucauacaacgcggagcuucuuguugcccuggagaaccaacauacaauugaucuaacugacucagaaaugaacaaacuguuugaaagaacaaagaagcaacugagggaaaaugcugaggauaugggcaaugguuguuucaaaauauaccacaaaugugacaaugccugcauagggucaaucagaaauggaacuuaugaccaugauguguacagagaugaagcauuaaacaaccgguuccagaucaaagguguugagcugaagucaggauacaaagauuggauccuauggauuuccuuugccauaucauguuuuuugcuuuguguugcuuuguugggguucaucaugugggccugccaaaaaggcaacauuaggugcgacauuugcauuuga

SEQ ID NO: 32071 - RNA, 1701 nt, Artificial Sequence; identical to SEQ ID NO: 32043
  derived and/or modified CDS sequence (wt) from hemagglutinin__InfluenzaA__AAX56390

SEQ ID NO: 32072 - RNA, 1701 nt, Artificial Sequence
  derived and/or modified CDS sequence (wt) from hemagglutinin__InfluenzaA__AAX56400
augaagacuaucauugcuuugagcuacauucuaugucugguuuucgcucaaaaacuucccggaaaugacaacagcacggcaacgcugugccuugggcaccaugcaguaccaaacggaacgauagugaaaacaaucacgaaugaccaaauugaaguuacuaaugcuacugagcugguucagaguuccucaacagguggaauaugcgacaguccucaucagauccuugauggagaaaacugcacacuaauagaugcucuauugggagacccucagugugauggcuuccaaaauaagaaaugggaccuuuuuguugaacgcagcaaagccuacagcaacuguuacccuuaugaugugccggauuaugccucccuuaggucacuaguugccucauccggcacacuggaguuuaacaaugaaagcuucaauuggacuggagucacucagaauggaacaagcucugcuugcgaaaggagaucuaauaaaaguuucuuuaguagauugaauugguugacccacuuaaaauacaaauacccagcauugaacgugacuaugccaaacaaugaaaaauuugacaaauuguacauuugggggguucaccacccggguacggacagugaccaaaucagccuauaugcucaagcaucaggaagaaucacagucucuaccaaaagaagccaacaaacuguaaucccgaauaucggaucuagacccaggguaagggauaucuccagccgaauaagcaucuauuggacaauaguaaaaccgggagacauacuuuugauuaacagcacagggaaucuaauugcuccucgggguuacuucaaaauacgaagugggaaaagcucaauaaugagaucagaugcacccauuggcaaaugcaauucugaaugcaucacuccaaauggaagcauucccaaugacaaaccauuucaaaauguaaacaggauuacauauggggccugucccagauauguuaagcaaaacacucugaaauuggcaacagggaugcgaaauguaccagagaaacaaacuagaggcauauuuggcgcaaucgcggguuucauagaaaaugguugggagggaaugguggacgguugguacgguuucaggcaucaaaauucugagggcacaggacaagcagcagaucucaaaagcacucaagcagcaaucaaccaaaucaaugggaaacugaauagguuaaucgggaaaacaaacgagaaauuccaucagauugaaaaagaauucucagaaguagaagggagaauucaggaccucgagaaauauguugaggacacuaaaauagaucucuggucauacaacgcggagcuucuuguugcccuggagaaccaacauacaauugaucuaacugacucagaaaugaacaaacuguuugaaagaacaaagaagcaacugagggaaaaugcugaggauaugggcaaugguuguuucaaaauauaccacaaaugugacaaugccugcauagggucaaucagaaauggaacuuaugaccaugauguguacagagaugaagcauuaaacaaccgguuccagaucaaagguguugagcugaagucaggauacaaagauuggauccuauggauuuccuuugccauaucauguuuuuugcuuuguguugcuuuguugggguucaucaugugggccugccaaaaaggcaacauuaggugcgacauuugcauuuga

SEQ ID NO: 32073 - RNA, 1701 nt, Artificial Sequence; identical to SEQ ID NO: 32070
  derived and/or modified CDS sequence (wt) from hemagglutinin__InfluenzaA__AAX56410

SEQ ID NO: 32074 - RNA, 1701 nt, Artificial Sequence
  derived and/or modified CDS sequence (wt) from hemagglutinin__InfluenzaA__AAX56420
augaagacuaucauugcuuugagcuacuuucuaugucugguuuucgcucaaaaacuucccggaaaugacaacagcacggcaacgcugugccuugggcaccaugcaguaccaaacggaacgauagugaaaacaaucacgaaugaccaaauugaaguuacuaaugcuacugagcugguacagaguuccucaacagguggaauaugcgacaguccucaucagauccuugauggagaaaacugcacacuaauagaugcucuauugggagacccucagugugauggcuuccaaaauaagaaaugggaccuuuuuguugaacgcagcaaagccuacagcaacuguuacccuuaugaugugccggauuaugccucccuuaggucacuaguugccucauccggcacacuggaguuuaacaaugaaagcuucgauuggacuggagucacucagaauggaacaagcucugcuugcaaaaggagaucuaauaaaaguuucuuuaguagauugaauugguugacccacuuaaaauacaaauacccagcauugaacgugacuaugccaaacaaugaaaaauuugacaaauuguacauuugggggguucaccacccggguacggacagugaccaaaucagccuauaugcucaagcaucaggaagaaucacagucucuaccaaaagaagccaacaaacuguaaucccgaauaucggaucuagacccaggguaagggaugucucuagccgaauaagcaucuauuggacaauaguaaaaccgggagacauacuuuugauuaacagcacagggaaucuaauugcuccucgggguuacuucaaaauacgaagugggaaaagcucaauaaugagaucagaugcacccauuggcaaaugcaauuccgaaugcaucacuccaaaugggagcauucccaaugacaaaccauuucaaaauguaaacaggaucacauauggggccugucccagauauguuaagcaaaacacuuugaaauuggcaacagggaugcgaaauguaccagagaaacaaacuagaggaauauuuggcgcaaucgcgggcuucauagaaaaugguugggagggaaugguggacgguugguacgguuucaggcaucaaaauucugagggcacaggacaagcagcagaucucaaaagcacucaagcagcaaucaaccaaaucaaugggaaacugaauagguuaaucgggaaaacaaacgagaaauuccaucagauugaaaaagaauucucagaaguagaagggagaauucaggaccucgagaaauauguugaggacacuaaaauagaucucuggucauacaacgcggagcuucuuguugcccuggagaaccaacauacaauugaucuaacugacucagaaaugaacaaacuguuugaaagaacaaagaagcaacugagggaaaaugcugaggauaugggcaaugguuguuucaaaauauaccacaaaugugacaaugccugcauagggucaaucagaaauggaacuuaugaccaugauguguacagagaugaagcauuaaacaaccgguuccagaucaaagguguugagcugaagucaggauacaaagauuggauccuauggauuuccuuugccauaucauguuuuuugcuuuguguugcuuuguuggguuucaucaugugggccugccaaaaaggcaacauuaggugcaacauuugcauuuga

SEQ ID NO: 32075 - RNA, 1701 nt, Artificial Sequence
  derived and/or modified CDS sequence (wt) from hemagglutinin__InfluenzaA__AAX56430
augaagacuaucauugcuuugagcuacauucuaugucugguuuucacucaaaaacuucccggaaaugacaacagcacggcaacgcugugccuugggcaccaugcaguaccaaacggaacgauagugaaaacaaucacgaaugaccaaauugaaguuacuaaugcuacugagcugguucagaguuccucaacagguggaauaugcgacaguccucaucagauccuugauggagaaaacugcacacuaauagaugcucuauugggagacccucagugugauggcuuccaaaauaagaaaugggaccuuuuuguugaacgcagcaaagccuacagcaacuguuacccuuaugaugugccggauuaugccucccuuaggucacuaguugccucauccggcacacuggaguuuaacaaugaaagcuucaauuggacuggagucacucagaauggaacaagcucugcuugcgaaaggagaucuaauaaaaguuucuuuaguagauugaauugguugacccacuuaaaauacaaauacccagcauugaacgugacuaugccaaacaaugaaaaauuugacaaauuguacauuugggggguucaccacccggguacggacagugaccaaaucagccuauaugcucaagcaucaggaagaaucacagucucuaccaaaagaagccaacaaacuguaaucccgaauaucggaucuagacccaggguaagggaugucuccagccgaauaagcaucuauuggacaauaguaaaaccgggagacauacuuuugauuaacagcacagggaaucuaauugcuccucgggguuacuucaaaauacgaagugggaaaagcucaauaaugagaucagaugcacccauuggcaaaugcaauucugaaugcaucacuccaaauggaagcauucccaaugacaaaccauuucaaaauguaaacaggauuacauauggggccugucccagauauguuaagcaaaacacucugaaauuggcaacagggaugcgaaauguaccagagaaacaaacuagaggcauauuuggcgcaaucgcggguuucauagaaaaugguugggagggaaugguggacgguugguacgguuucaggcaucaaaauucugagggcacaggacaagcagcagaucucaaaagcacucaagcagcaaucaaccaaaucaaugggaaacugaauagguuaaucgggaaaacaaacgagaaauuccaucagauugaaaaagaauucucagaaguagaagggagaauucaggaccucgagaaauauguugaggacacuaaaauagaucucuggucauacaacgcggagcuucuuguugcccuggagaaccaacauacaauugaucuaacugacucagaaaugaacaaacuguuugaaagaacaaagaagcaacugagggaaaaugcugaggauaugggcaaugguuguuucaaaauauaccacaaaugugacaaugccugcauagggucaaucagaaauggaacuuaugaccaugauguguacagagaugaagcauuaaacaaccgguuccagaucaaagguguugagcugaagucaggauacaaagauuggauccuauggauuuccuuugccauaucauguuuuuugcuuuguguugcuuuguugggguucaucaugugggccugccaaaaaggcaacauuaggugcgacauuugcauuuga

SEQ ID NO: 32076 - RNA, 1701 nt, Artificial Sequence
  derived and/or modified CDS sequence (wt) from hemagglutinin__InfluenzaA__AAX56440
augaagacuaucauugcuuugagcuacauuuuaugucugguuuucgcucaaaaacuucccggaaaugacaacagcacggcaacgcugugccuggggcaccaugcagugccaaacggaacgcuagugaaaacaaucacgaaugaccaaauugaagugacuaaugcuacugagcugguucagaauuccucaacagguagaauaugcgacaguccucaccaaauccuugauggagaaaacugcacacuaauagaugcucuauugggagacccucauugugauggcuuccaaaauaaggaaugggaccuuuuuguugaacgcagcaaagccuacagcaacuguuacccuuaugaugugccggauuaugucucccuuaggucacuaguugccucaucaggcacgcuggaguuuaacaaugaaagcuucaauuggacuggagucgcucagaaugggacaagcucugcuugcaaaaggagaucugauaaaaguuucuuuaguagauugaauugguugcaccaauuaaaauacaaauauccagcacugaacgugacuaugccaaacaaugaaaaauuugacaaauuguacauuugggggguucaccacccggguacagacaaugaccaaaucagccuauaugcucaagcaucagggagagucacagucucuaccaaaagaagccaacaaacuguaaucccgaauauuggaucuggacccuggguaaggggugucuccagcagaauaagcaucuauuggacaauaguaaaaccgggagacauacuuuugauuaacagcacagggaaucuaauugcuccucgggguuacuucaaaauacgaagugggaaaagcucaauaaugaggucagaugcacccauuggcaaaugcaauucugaaugcaucacuccaaauggaagcauucccaaugacaaaccauuucaaaauguaaacaggaucacauaugggcccugucccagauauguuaagcaaaacacucugaaauuggcaacagggaugcggaaugugccagagaaacaaacuagaggcauauucggugcaaucgcgggcuucauagaaaaugguugggagggaaugauggacgguugguacgguuucaggcaucaaaauucugagggcacagggcaagcagcagaucuuaaaagcacucaagcagcaaucaaccaaaucaacgggaaacugaauagguuaaucgagaaaacgaacgagaaauuccaucaaauugaaaaagaauucucagaaguagaagggagaauucaggaccucgagaaauauguugaggacacuaaaauagaucucuggucguacaaugcggagcuucuuguugcccuggagaaccaacauacaauugaucuaacugacucagaaaugaacaaacuguuugaaagaacaaagaagcaacugagggaaaaugcugaggauaugggcaaugguuguuucaaaauauaccacaaaugugacaaugccugcauagggucaaucagaaauggaacuuaugaccaugauguauacagagacgaagcauugaacaaccgauuccagaucaaagguguugagcugaagucaggauacaaagauuggauccuauggauuuccuuugccauaucauguuuuuugcuuuguauuguuuugcugggguucaucaugugggccugccaaaaaggcaacauuaggugcaacauuugcauuuga

SEQ ID NO: 32077 - RNA, 1701 nt, Artificial Sequence
  derived and/or modified CDS sequence (wt) from hemagglutinin__InfluenzaA__AAX56450
augaagacuaucauugcuuugagcuacauuuuaugccugguuuucgcucaaaaacuucccggaaaugacaacagcacggcaacgcugugccuggggcaccaugcagugccaaacggaacgcuagugaaaacaaucacgaaugaccaaauugaaguaacuaaugcuacugagcugguucagaguuccucaacaaguagaauaugcgacaguccucaucaaauccuugauggagaaaacugcacacuaauagaugcucuauugggagacccucauugugauggcuuccaaaauaaggaaugggaccuuuuuguugaacgcagcaaagccuacagcaacuguuacccuuaugaugugccggauuaugucucccuuaggucacuaguugccucaucaggcacgcuggaguuuaacaaugaaagcuucaauuggacuggagucgcucagaauggaacaagcucugcuugcaaaaggagaucugauaaaaguuucuuuaguagauugaauugguugcaccaauuaaaauacaaauauccagcacugaacgugacuaugccaaacaaugaaaaauuugacaaauuguacauuugggggguucaccacccggguacagacagugaccaaaucagccuauaugcucaagcaucagggagagucacagucucuaccaaaagaagccaacaaacuguaaucccgaauaucggaucuagacccuggguaaggggugucuccagcagaauaagcaucuauuggacaauaguaaaaccgggagacauacuuuugauuaacagcacagggaaucuaauugcuccucgggguuacuucaaaauacgaagugggaaaagcucaauaaugaggucagaugcacccauuggcaaaugcaauucugaaugcaucacuccaaauggaagcauucccaaugacaaaccauuucaaaauguaaacaggaucacauauggggccugucccagauauguuaagcaaaacacucugaaauuggcaacagggaugcggaauguaccagagaaacaaacuagaggcauauucggugcaaucgcgggcuucauagaaaaugguugggagggaaugauggacgguugguacgguuucaggcaucaaaauucugagggcacagggcaagcagcagaucuuaaaagcacucaagcagcaaucaaccaaaucaacgggaaacugaauagguuaaucgagaaaacgaacgagaaauuccaucaaauugaaaaagaauucucagaaguagaagggagaauucaggaccucgagaaauauguugaggacacuaaaauagaucucuggucguacaaugcggagcuucuuguugcccuggagaaccaacauacaauugaucuaacugacucagaaaugaacaaacuguuugaaagaacaaagaagcaacugagggaaaaugcugaggauaugggcaaugguuguuucaaaauauaccacaaaugugacaaugccugcauagggucaaucagaaauggaacuuaugaccaugauguauacagagacgaagcauugaacaaccgguuccagaucaaagguguugagcugaagucaggauacaaagauuggauccuauggauuuccuuugccauaucauguuuuuugcuuuguauuguuuugcugggguucaucaugugggccugccaaaaaggcaacauuaggugcaacauuugcauuuga

SEQ ID NO: 32078 - RNA, 1701 nt, Artificial Sequence
  derived and/or modified CDS sequence (wt) from hemagglutinin__InfluenzaA__AAX56460
augaagacuaucauugcuuugagcuacauuuuaugucugguuuucgcucaaaaacuucccgaaaaugacaacagcacggcaacgcugugccuggggcaccaugcagugccaaacggaacgcuagugaaaacaaucacgaaugaccaaauugaagugacuaaugcuacugagcugguucagaguuccucaacagguagaauaugcgacaguccucaccaaauccuugauggagaaaacugcacacuaauagaugcucuauugggagacccucauugugauggcuuccaaaauaaggaaugggaccuuuuuguugaacgcagcaaagccuacagcaacuguuacccuuaugaugugccggauuaugucucccuuaggucacuaguugccucaucaggcacgcuggaguuuaacaaugaaagcuucaauuggacuggagucgcucagaauggaacaagcucugcuugcaaaaggagaucugauaaaaguuucuuuaguagauugaauugguugcaccaauuaaaauacaaauauccagcacugaacgugacuaugccaaacaaugaaaaauuugacaaauuguacauuugggggguucaccacccggguacagacagugaccaaaucagccuauaugcucaagcaucagggagagucacagucucuaccaaaagaagccaacaaacuguaaucccgaauaucggaucuagacccuggguaaggggugucuccagcagaauaagcaucuauuggacaauaguaaaaccgggagacauacuuuugauuaacagcacagggaaucuaauugcuccucgggguuacuucaaaauacgaagugggaaaagcucaauaaugaggucagaugcacccauuggcaaaugcaauucugaaugcaucacuccaaauggaagcauucccaaugacaaaccauuucaaaauguaaacaggaucacacaugggcccugucccagauauguuaagcaaaacacucugaaauuggcaacagggaugcggaaugugccagagaaacaaacuagaggcauauucggugcaaucgcgggcuucauagaaaaugguugggagggaaugauggacgguugguacgguuucaggcaucaaaauucugagggcacagggcaagcagcagaucuuaaaagcacucaagcagcaaucaaccaaaucaacgggaaacugaauagguuaaucgagaaaacgaacgagaaauuccaucaaauugaaaaggaauucucagaaguagaagggagaauucaggaccucgagaaauauguugaggacacuaaaauagaucucuggucguacaaugcggagcuucuuguugcccuggagaaccaacauacaauugaucuaacugacucagaaaugaacaaacuguuugaaagaacaaagaagcaacugagggaaaaugcugaggauaugggcaaugguuguuucaaaauauaccacaaaugugacaaugccugcauagggucaaucagaaauggaacuuaugaccaugauguauacagagacgaagcauugaacaaccgguuccagaucaaagguguugagcugaagucaggauacaaagauuggauccuauggauuuccuuugccauaucauguuuuuugcuuuguauuguuuugcugggguucaucaugugggccugccaaaaaggcaacauuaggugcaacauuugcauuuga

SEQ ID NO: 32079 - RNA, 1701 nt, Artificial Sequence
  derived and/or modified CDS sequence (wt) from hemagglutinin__InfluenzaA__AAX56470
augaagacuaucauugcuuugagcuacauuuuaugucugguuuucgcucaaaaacuucccggaaaugacaacagcacggcaacgcugugccuggggcaccaugcagugccaaacggaacgcuagugaaaacaaucacgaaugaccaaauugaagugacuaaugcuacugagcugguucagaguuccucaacagguagaauaugcgacaguccucaccaaauccuugauggagaaaacugcacacuaauagaugcucuauugggagacccucauugugauggcuuccaaaauaaggaaugggaccuuuuuguugaacgcagcaaagccuacagcaacuguuacccuuaugaugugccggauuaugucucccuuaggucacuaguugccucaucaggcacgcuggaguuuaacaaugaaagcuucaauuggacuggagucgcucagaauggaacaagcucugcuugcaaaaggagaucugauaaaaguuucuuuaguagauugaauugguugcaccaauuaaaauacaaauauccagcacugaacgugacuaugccaaacaaugaaaaauuugacaaauuguacauuugggggguucaccacccggguacagacagugaccaaaucagccuauaugcucaagcaucagggagagucacagucucuaccaaaagaagccaacaaacuguaaucccgaauaucggaucuagacccuggguaaggggugucuccagcagaauaagcaucuauuggacaauaguaaaaccgggagacauacuuuugauuaacagcacagggaaucuaauugcuccucgggguuacuucaaaaugcgaagugggaaaagcucaauaaugaggucagaugcacccauuggcaaaugcaauucugaaugcaucacuccaaauggaagcauucccaaugacaaaccauuucaaaauguaaacaggaucacauaugggcccugucccagauauguuaagcaaaacacucugaaauuggcaacagggaugcggaaugugccagagaaacaaacuagaggcauauucggugcaaucgcgggcuucauagaaaaugguugggagggaaugauggacgguugguacgguuucaggcaucaaaauucugagggcacagggcaagcagcagaucuuaaaagcacucaagcagcaaucaaccaaaucaacgggaagcugaauagguuaaucgagaaaacgaacgagaaauuccaucaaauugaaaaagaauucucagaaguagaagggagaauucaggaccucgagaaauauguugaggacacuaaaauagaucucuggucguacaaugcggagcuucuuguugcccuggagaaccaacauacaauugaucuaacugacucagaaaugaacaaacuguuugaaagaacaaagaagcaacugagggaaaaugcugaggauaugggcaaugguuguuucaaaauauaccacaaaugugacaaugccugcauagggucaaucagaaacggaaccuaugaccaugauguauacagagacgaagcauugaacaaccgguuccagaucaaagguguugagcugaagucaggauacaaagauuggauccuauggauuuccuuugccauaucauguuuuuugcuuuguauuguuuugcugggguucaucaugugggccugccaaaaaggcaacauuaggugcaacauuugcauuuga

SEQ ID NO: 32080 - RNA, 1701 nt, Artificial Sequence
  derived and/or modified CDS sequence (wt) from hemagglutinin__InfluenzaA__AAX56480
augaagacuaucauugcuuugagcuacauuuuaugucugguuuucgcucaaaaacuucccggaaaugacaacagcacggcaacgcugugccuggggcaccaugcagugccaaacggaacgcuagugaaaacaaucacgaaugaccaaauugaagugacuaaugcuacugagcugguucagaguuccucaacagguagaauaugcgacaguccucaccaaauccuugauggagaaaacugcacacuaauagaugcucuauugggagacccucauugugauggcuuccaaaauaaggaaugggaccuuuuuguugaacgcagcaaagccuacagcaacuguuacccuuaugaugugccggauuaugucucccuuaggucacuaguugccucaucaggcacgcuggaguuuaacaaugaaagcuucaauuggacuggagucgcucagaauggaacaagcucugcuugcaaaaggagaucugauaaaaguuucuuuaguagauugaauugguugcaccaauuaaaauacaaauauccagcacugaacgugacuaugccaaacaaugaaaaauuugacaaauuguacauuugggggguucaccacccggguacagacagugaccaaaucagccuauaugcucaagcaucagggagagucacagucucuaccaaaagaagccaacaaacuguaaucccgaauaucggaucuagacccuggguaaggggugucuccagcagaauaagcaucuauuggacaauaguaaaaccgggagacauacuuuugauuaacagcacagggaaucuaauugcuccucgggguuacuucaaaauacgaagugggaaaagcucaauaaugaggucagaugcacccauuggcaaaugcaauucugaaugcaucacuccaaauggaagcauucccaaugacaaaccauuucaaaauguaaacaggaucacauaugggcccugucccagauauguuaagcaaaacacucugaaauuggcaacagggaugcggaaugugccagagaaacaaacuagaggcauauucggugcaaucgcgggcuucauagaaaaugguugggagggaaugauggacgguugguacgguuucaggcaucaaaauucugagggcacagggcaagcagcagaucuuaaaagcacucaagcagcaaucaaccaaaucaacgggaaacugaauagguuaaucgagaaaacgaacgagaaauuccaucaaauugaaaaggaauucucagaaguagaagggagaauucaggaccucgagaaauauguugaggacacuaaaauagaucucuggucguacaaugcggagcuucuuguugcccuggagaaccaacauacaauugaucuaacugacucagaaaugaacaaacuguuugaaagaacaaagaagcaacugagggaaaaugcugaggauaugggcaaugguuguuucaaaauauaccacaaaugugacaaugccugcauagggucaaucagaaauggaacuuaugaccaugauguauacagagacgaagcauugaacaaccgguuccagaucaaagguguugagcugaagucaggauacaaagauuggauccuauggauuuccuuugccauaucauguuuuuugcuuuguauuguuuugcugggguucaucaugugggccugccaaaaaggcaacauuaggugcaacauuugcauuuga

SEQ ID NO: 32081 - RNA, 1701 nt, Artificial Sequence
  derived and/or modified CDS sequence (wt) from hemagglutinin__InfluenzaA__AAX56510
augaagacuaucauugcuuugagcuacauuuuaugccugguuuucgcucaaaaacuucccggaaaugacaacagcacggcaacgcugugccuggggcaucaugcagugccaaacggaacgcuagugaaaacaaucacgaaugaccaaauugaaguaacuaaugcuacugagcugguucagaguuccucaacagguagaauaugcgacaguccucaccaaauccuugauggagaaaacugcacacuaauagaugcucuauugggagacccucauugugauggcuuccaaaauaaggaaugggaccuuuuuguugaacgcagcaaagccuacagcaacuguuacccuuaugaugugccggauuaugucucccuuaggucacuaguugccucaucaggcacgcuggaguuuaacaaugaaagcuucaauuggacuggagucgcucagaauggaacaagcucugcuugcaaaaggagaucugauaaaaguuucuuuaguagauugaauugguugcaccaauuaaaauacaaauauccagcacugaacgugacuaugccaaacaaugaaaaauuugacaaauuguacauuugggggguucaccacccggguacagacagugaccaaaucagccuauaugcucaagcaucagggagagucacagucucuaccaaaagaagccaacaaacuguaaucccgaauaucggaucuagacccuggguaaggggugucuccagcaaaauaagcaucuauuggacaauaguaaaaccgggagacauacuuuugauuaacagcacagggaaucuaauugcuccucgggguuacuucaaaauacgaagugggaaaagcucaauaaugaggucagaugcacccauuggcaaaugcaauucugaaugcaucacuccaaauggaagcauucccaaugacaaaccauuucaaaauguaaacaggaucacauauggggccugucccagauauguuaagcaaaacacucugaaauuggcaacagggaugcggaaugugccagagaaacaaacuagaggcauauucggugcaaucgcgggcuucauagaaaaugguugggagggaaugauggacgguugguacgguuucaggcaucaaaauucugagggcacagggcaagcagcagaucuuaaaagcacucaagcagcaaucaaccaaaucaacgggaaacugaauagguuaaucgagaaaacgaacgagaaauuccaucaaauugaaaaagaauucucagaaguagaagggagaauucaggaccucgagaaauauguugaggacacuaaaauagaucucuggucguacaaugcggagcuucuuguugcccuggagaaccaacauacaauugaucuaacugacucagaaaugaacaaacuguuugaaagaacaaagaagcaacugagggaaaaugcugaggauaugggcaaugguuguuucaaaauauaccacaaaugugacaaugccugcauagggucaaucagaaauggaacuuaugaccaugauguauacagagacgaagcauugaacaaccgguuccagaucaaagguguugagcugaagucaggauacaaagauuggauccuauggauuuccuuugccauaucauguuuuuugcuuuguauuguuuugcugggguucaucaugugggccugccaaaaaggcaacauuaggugcaacauuugcauuuga

SEQ ID NO: 32082 - RNA, 1701 nt, Artificial Sequence
  derived and/or modified CDS sequence (wt) from hemagglutinin__InfluenzaA__AAX56520
augaagacuaucauugcuuugagcuacauuuuaugccugguuuucgcucaaaaacuucccggaaaugacaacagcacggcaacgcugugccuggggcaccaugcagugccaaacggaacgcuagugaaaacaaucacgaaugaccaaauugaaguaacuaaugcuacugagcugguucagaguuccucaacaaguagaauaugcgacaguccucaccaaauccuugauggagaaaacugcacacuaauagaugcucuauugggagacccucauugugauggcuuccaaaauaaggaaugggaccuuuuuguugaacgcagcaaagccuacagcaacuguuacccuuaugaugugccggauuaugucucccuuaggucacuaguugccucaucaggcacgcuggaguuuaacaaugaaagcuucaauuggacuggagucgcucagaauggaacaagcucugcuugcaaaaggagaucugauaaaaguuucuuuaguagauugaauugguugcaccaauuaaaauacaaauauccagcacugaacgugacuaugccaaacaaugaaaaauuugacaaauuguacauuugggggguucaccacccggguacagacagugaccaaaucagccuauaugcucaagcaucagggagagucacagucucuaccaagagaagccaacaaacuguaaucccgaauaucggaucuagacccuggguaaggggugucuccagcagaauaagcaucuauuggacaauaguaaaaccgggagacauacuuuugauuaacagcacagggaaucuaauugcuccucgggguuacuucaaaauacgaagugggaaaagcucaauaaugagguccgaugcacccauuggcaaaugcaauucugaaugcaucacuccaaauggaagcauucccaaugacaaaccauuucaaaauguaaacaggaucacauauggggccugucccagauauguuaagcaaaacacucugaaauuggcaacagggaugcggaauguaccagagaaacaaacuagaggcauauucggugcaaucgcgggcuucauagaaaaugguugggagggaaugauggacgguugguacgguuucaggcaucaaaauucugagggcacagggcaagcagcagaucuuaaaagcacucaagcagcaaucaaccaaaucaacgggaaacugaauagguuaaucgagaaaacgaacgagaaauuccaucaaauugaaaaagaauucucagaaguagaagggagaauucaggaccucgagaaauauguugaggacacuaaaauagaucucuggucguacaaugcggagcuucuuguugcccuggagaaccaacauacaauugaucuaacugacucagaaaugaacaaacuguuugaaagaacaaagaagcaacugagggaaaaugcugaggauaugggcaaugguuguuucaaaauauaccacaaaugugacaaugccugcauagggucaaucagaaauggaacuuaugaccaugauguauacagagacgaagcauugaacaaccgguuccagaucaaagguguugagcugaagucaggauacaaagauuggauccuauggauuuccuuugccauaucauguuuuuugcuuuguauuguuuugcugggguucaucaugugggccugccaaaaaggcaacauuaggugcaacauuugcauuuga

SEQ ID NO: 32083 - RNA, 1701 nt, Artificial Sequence
  derived and/or modified CDS sequence (wt) from hemagglutinin__InfluenzaA__AAX56530
augaaagcaaaacuacuaguucuguugugugcauuuacagcuacauaugcagacacaauauguauaggcuaccaugcgaacaacucaacugacacuguugacacaguacuugagaagaacgugacagugacacacucugucaaccuacuugaggacagucacaacggaaaacuaugccgacuaaaaggaacagccccacuacaauuggguaauugcagcauugccggauggaucuuaggaaauccagaaugcgaaucacuguuuucuaaggaaucauggucuuacauugcagaaacaccaaacccuaaaaauggaacauguuacccaggguauuucgccgacuaugaggaacugagggagcaauugagcucaguaucaucauucgagagauuugaaauauuccccaaggauagcucauggcccaaccacacuguaaccaaaggagugacggcaucaugcucccauaaugggaaaagcagcuuuuacaaaaauuugcuauggcugacggagaagaauggcuuguacccaaaucugagcaaguccuauguaaacaaaaagggaaaagaaguccuugugcuaugggguguucaucacccgucuaacaugggggaccaacgggccaucuaucauaaagaaaaugcuuauguuucuguguugucuucacauuauagcagaagauucaccccagaaauagcaaaaagaccaaaaguaagagaucaagaagggagaauuaacuacuacuggacucugcuggaacccggggacacaauaauauuugaggcaaauggaaaucuaauagcgccgugguacgcuuucgcacugaguagaggcuuugggucaggaaucaucaucucaaacgcaucaaugggugaaugugacgcuaagugucaaacaccccaaggagcuauaaacaguagucuccccuuccagaauguacacccagucacaauaggagaguguccaaaguaugucaggaguacaaaauuaaggaugguuacaggacuaaggaacgucccauccauucaauccagagguuuguuuggagccauugccgguuucauugaaggaggguggacuggaaugauagauggaugguaugguuaucaucaucaaaaugaacaaggaucuggcuaugcugcggaccaaaaaagcacacaaaaugccauuaaugggauuacaaacaaggugaauucuauaaucgagaaaaugaacacucaauucacagcuguaggcaaagaauucaacaaauuagaaaaaaggauggaaaacuuaaauaagaaaguugaugauggauuucuggacauuuggacauauaaugcagaauuguuaguucuccuggaaaaugaaaggacuuuggauuuucaugacuuaaaugugaagaaccuguaugagaaagugaaaaaccaauugaagaauaaugccaaagaaauagggaacggguguuuugaauucuaucacaaguguaacaaugaaugcauggaaagugugaaaaauggaacuuaugacuauccaaaauauuccaaagaaucaaaguuaaacagggaaaaaauugauggagugaaauuggaaucaaugggagucuaucagauucuggcgaucuacucaacugucgccaguucgcuggugcuuuuggucucccugggggcaaucagcuucuggauguguucuaaugggucuuugcaguguagaauaugcaucuga

SEQ ID NO: 32084 - RNA, 1701 nt, Artificial Sequence
  derived and/or modified CDS sequence (wt) from hemagglutinin__InfluenzaA__AAX56550
augaagacuaucauugcuuugagcuacauuuuaugucugguuuucgcucaaaaacuucccguaaaugacaacagcacggcaacgcugugccugggacaccaugcagugccaaacggaacgcuagugaaaacaaucacgaaugaccacauugaagugacuaaugcuacugagcugguucagaguuccucaacagguagaauaugcgacaguccucaccaaauccuugauggagaaaacugcacacuaauagaugcucuauugggagacccucauugugauggcuuccaaaauaaggaaugggaccuuuuuguugaacgcagcacagccuacagcaacuguuacccuuaugaugugccggauuaugccucccuuaggucacuaguugccucauccggcacacuggaguuuaacaaugaaagcuucaauuggacuggagucgcucagaauggaacaagcucugcuugcaaaaggagaucuauuaaaaguuucuuuaguagauugaauugguugcaccaauuaaaauacaaauauccagcacugaacgugacuaugccaaacaaugaaaaauuugacaaauuguacauuugggggguucaccacccgaguacggacagugaccaaaucagccuauaugcucaagcaucagggagagucacagucucuaccaaaagaagccaacaaacuguaaucccgaauaucggaucuagacccuggguaaggggugucuccagcagaauaagcaucuauuggacaauaguaaaaccgggagacauacuuuugauuaacagcacagggaaucuaauugcuccucgggguuacuuuaaaauacgaagugggaaaagcucaauaaugaggucaaaugcacccauuggcaaaugcaauucugaaugcaucacuccaaauggaagcauucccaaugacaaaccauuucaaaauguaaacaggaucacauauggggccugucccagauauguuaagcaaaacacucugaaauuggcaacagggaugcggaauguaccagagaaacaaacuagaggcauauucggcgcaaucgcggguuucauagaaaaugguugggagggaaugguggacgguugguacgguuucaggcaucaaaauucugagggcacaggacaagcagcagaucuuaaaagcacucaagcagcaaucaaccaaaucaacgggaaacugaauagguuaaucgagaaaacaaacgagaaauuccaucaaauugaaaaagaauucucagaaguagaagggagaauucaggaccucgagaaauauguugaggacacuaaaauagaucucuggucguacaacgcggagcuucuuguugcccuggagaaccaacauacaauugaucuaacugacucagaaaugaacaaacuguuugaaagaacaaggaagcaacugagggaaaaugcugaggauaugggcaaugguuguuucaaaauauaccacaaaugugacaaugccugcauagggucaaucagaaauggaacuuaugaccaugauguauacagagacgaagcauuaaacaaccgguuccagaucaaagguguugagcugaagucaggauacaaagauuggauccuauggauuuccuuugccauaucauguuuuuugcuuuguguuguuuugcugggguucaucaugugggccugccaaaaaggcaacauuaggugcaacauuugcauuuga

SEQ ID NO: 32085 - RNA, 1701 nt, Artificial Sequence
  derived and/or modified CDS sequence (wt) from hemagglutinin__InfluenzaA__AAX56560
augaagacuaucauugcuuugagcuacauucuaugucugguuuucgcucaaaaacuucccggaaaugacaacagcacggcaacgcugugccuugggcaccaugcaguaccaaacggaacgauagugaaaacaaucacgaaugaccaaauugaaguuacuaaugcuacugagcugguucagauuuccucaacagguggaauaugcgacaguccucaucagauccuugauggagaaaacugcacacuaauagaugcucuauugggagacccucagugugauggcuuccaaaauaagaaaugggaccuuuuuguugaacgcagcaaagccuacagcaacuguuacccuuaugaugugccggauuaugccucccuuaggucacuaguugccucauccggcacacuggaguuuaacaaugaaagcuucgauuggacuggagucacucagaauggaacaagcucugcuugcaaaaggagaucuaauaaaaguuucuuuaguagauugaauugguugacccacuuaaaauacaaauacccagcauugaacgugacuaugccaaacaaugaaaaauuugacaaauuguacauuugggggguucaccacccggguacggacagugaccaaaucagccuauaugcucaagcaucaggaagaaucacagucucuaccaaaagaagccaacaaacugugaucccgaauaucggaucuagacccaggguaagggaugucuccagccgaauaagcaucuauuggacaauaguaaaaccgggagacauacuuuugaucaacagcacagggaaucuaauugcuccucgggguuacuucaaaauacgaagugggaaaagcucaauaaugagaucagaugcacccauuggcaaaugcaauucugaaugcaucacuccaaauggaagcauucccaaugacaaaccauuucaaaauguaaacaggaucacauauggggccugucccagauauguuaagcaaaacacucugaaauuggcaacagggaugcgaaauguaccagagaaacaaacuagaggcauauuuggcgcaaucgcggguuucauagaaaaugguugggagggaaugguggacgguugguacgguuucaggcaucaaaauucugagggcacaggacaagcagcagaucucaaaagcacucaagcagcaaucaaccaaaucaaugggaaacugaauagguuaaucgggaaaacaaacgagaaauuccaucagauugaaaaagaauucucggaaguagaaggaagaauucaggaccucgagaaauauguugaggacacuaaaauagaucucuggucauacaacgcggagcuucuuguugcccuggagaaccaacauacaauugaucuaacugacucagaaaugaacaaacuguuugaaagaacaaagaagcaacugagggaaaaugcugaggauaugggcaaugguuguuucaaaauauaccacaaaugugacaaugccugcauagggucaaucagaaauggaacuuaugaccaugauguguacagagaugaagcauuaaacaaccgguuccagaucaaagguguugagcugaagucaggauacaaagauuggauccuauggauuuccuuugccauaucauguuuuuugcuuuguguugcuuuguugggguucaucaugugggccugccaaaaaggcaacauuaggugcaacauuugcauuuga

SEQ ID NO: 32086 - RNA, 1701 nt, Artificial Sequence
  derived and/or modified CDS sequence (wt) from hemagglutinin__InfluenzaA__AAX56570
augaagacuaucauugcuuugagcuacauuuuaugccugguuuucgcucaaaaacuucccggaaaugacaacagcacggcaacgcugugccuggggcaccaugcagugccaaacggaacgcuagugaaaacaaucacgaaugaccaaauugaaguaacuaaugcuacugagcugguucagaguucuucaacaaguagaauaugcgacaguccucaccaaauccuugauggagaaaauugcacacuaauagaugcucuauugggagacccucauugugauggcuuccaaaauaaggaaugggaccuuuuuguugaacgcagcaaagccuacagcaacuguuacccuuaugaugugccggauuaugucucccuuaggucacuaguugccucaucaggcacgcuggaguuuaacaaugaaagcuucaauuggacuggagucgcucagaauggaacaagcucugcuugcaaaaggagaucugauaaaaguuucuuuaguagauugaauugguugcaccaauuaaaauacaaauauccagcacugaacgugacuaugccaaacaaugaaaaauuugacaaauuguacauuugggggguucaccacccggguacagacagugaccaaaucagccuauaugcucaagcaucagggagagucacagucucuaccaaaagaagccaacaaacuguaaucccgaauaucggaucuagacccuggguaaggggugucuccagcggaauaagcaucuauuggacaauaguaaaaccgggagacauacuuuugauuaacagcacagggaaucuaauugcuccucgggguuacuucaaaauacgaagugggaaaagcucaauaaugaggucagaugcacccauuggcaaaugcaauucugaaugcaucacuccaaauggaagcauucccaaugacaaaccauuucaaaauguaaacaggaucacauauggggccugucccagauauguuaagcaaaacacucugaaauuggcaacagggaugcggaauguaccagagaaacaaacuagaggcauauucggugcaaucgcgggcuucauagaaaaugguugggagggaaugauggacgguugguacgguuucaggcaucaaaauucugagggcacagggcaagcagcagaucuuaaaagcacucaagcagcaaucaaccaaaucaacgggaaacugaauagguuaaucgagaaaacgaacgagaaauuccaucaaauugaaaaagaauucucagaaguagaagggagaauucaggaccucgagaaauauguugaggacacuaaaauagaucucuggucguacaaugcggagcuucuuguugcccuggagaaccaacauacaauugaucuaacugacucagaaaugaacaaacuguuugaaagaacaaagaagcaacugagggaaaaugcugaggauaugggcaaugguuguuucaaaauauaccacaaaugugacaaugccugcauagggucaaucagaaauggaacuuaugaccaugauguauacagagacgaagcauugaacaaccgguuccagaucaaagguguugagcugaagucaggauacaaagauuggauccuauggauuuccuuugccauaucauguuuuuugcuuuguauuguuuugcugggguucaucaugugggccugccaaaaaggcaacauuaggugcaacauuugcauuuga

SEQ ID NO: 32087 - RNA, 1701 nt, Artificial Sequence
  derived and/or modified CDS sequence (wt) from hemagglutinin__InfluenzaA__AAX56590
augaagacuaucauugcuuugagcuacauuuuaugccugguuuucgcucaaaaacuucccggaaaugacaacagcacggcaacgcugugccuggggcaccaugcagugccaaacggaacgcuagugaaaacaaucacgaaugaccaaauugaaguaacuaaugcuacugagcugguucagaguuccucaacaaguagaauaugcgacaguccucaccaaauccuugauggagaaaacugcacacuaauagaugcucuauugggagacccucauugugauggcuuccaaaauaaggaaugggaccuuuuuguugaacgcagcaaagccuacagcaacuguuacccuuaugaugugccggauuaugucucccuuaggucacuaguugccucaucaggcacgcuggaguuuaacaaugaaagcuucaauuggacuggagucgcucagaauggaacaagcucugcuugcaaaaggagaucugauaaaaguuucuuuaguagauugaauugguugcaccaauuaaaauacaaauauccagcacugaacgugacuaugccaaacaaugaaaaauuugacaaauuguacauuugggggguucaccacccgaguacagacagugaccaaaucagccuauaugcucaagcaucagggagagucacagucucuaccaagagaagccaacaaacuguaaucccgaauaucggaucuagacccuggguaaggggugucuccagcagaauaagcaucuauuggacaauaguaaaaccgggagacauacuuuugauuaacagcacagggaaucuaauugcuccucgggguuacuucaaaauacgaagugggaaaagcucaauaaugagguccgaugcacccauuggcaaaugcaauucugaaugcaucacuccaaauggaagcauucccaaugacaaaccauuucaaaauguaaacaggaucacauauggggccugucccagauauguuaagcaaaacacucugaaauuggcaacaggaaugcggaauguaccagagaaacaaacuagaggcauauucggugcaaucgcgggcuucauagaaaaugguugggagggaaugauggacgguugguacgguuucaggcaucaaaauucugagggcacagggcaagcagcagaucuuaaaagcacucaagcagcaaucaaccaaaucaacgggaaacugaauagguuaaucgagaaaacgaacgagaaauuccaucaaauugaaaaagaauucucagaaguagaagggagaauucaggaccucgagaaauauguugaggacacuaaaauagaucucuggucguacaaugcggagcuucuuguugcccuggagaaccaacauacaauugaucuaacugacucagaaaugaacaaacuguuugaaagaacaaagaagcaacugagggaaaaugcugaggauaugggcaaugguuguuucaaaauauaccacaaaugugacaaugccugcauagggucaaucagaaauggaacuuaugaccaugauguauacagagacgaagcauugaacaaccgguuccagaucaaagguguugagcugaagucaggauacaaagauuggauccuauggauuuccuuugccauaucauguuuuuugcuuuguauuguuuugcugggguucaucaugugggccugccaaaaaggcaacauuaggugcaacauuugcauuuga

SEQ ID NO: 32088 - RNA, 1701 nt, Artificial Sequence
  derived and/or modified CDS sequence (wt) from hemagglutinin__InfluenzaA__AAX56600
augaagacuaucauugcuuugagcuacauucuaugucugguuuucgcucaaaaacuucccggaaaugacaacagcacggcaacgcugugccuugggcaccaugcaguaccaaacggaacgauagugaaaacaaucacgaaugaccaaauugaaguuacuaaugcuacugagcugguucagauuuccucaacagguggaauaugcgacaguccucaucagauccuugauggagaaaacugcacacuaauagaugcucuauugggagacccucagugugauggcuuccaaaauaagaaaugggaccuuuuuguugaacgcagcaaagccuacagcaacuguuacccuuaugaugugccggauuaugccucccuuaggucacuaguugccucauccggcacacuggaguuuaacaaugaaagcuucgauuggacuggagucacucagaauggaacaagcucugcuugcaaaaggagaucuaauaaaaguuucuuuaguagauugaauugguugacccacuuaaaauacaaauacccagcauugaacgugacuaugccaaacaaugaaaaauuugacaaauuguacauuugggggguucaccacccggguacggacagugaccaaaucagccuauaugcucaagcaucaggaagaaucacagucucuaccaaaagaagccaacaaacuguaaucccgaauaucggaucuagacccaggguaagggaugucuccagccgaauaagcaucuauuggacaauaguaaaaccgggagacauacuuuugaucaacagcacagggaaucuaauugcuccucgggguuacuucaaaauacgaagugggaaaagcucaauaaugagaucagaugcacccauuggcaaaugcaauucugaaugcaucacuccaaauggaagcauucccaaugacaaaccauuucaaaauguaaacaggaucacauauggggccugucccagauauguuaagcaaaacacucugaaauuggcaacagggaugcgaaauguaccagagaaacaaacuagaggcauauuuggcgcaaucgcggguuucauagaaaaugguugggagggaaugguggacgguugguacgguuucaggcaucaaaauucugagggcacaggacaagcagcagaucucaaaagcacucaagcagcaaucaaccaaaucaaugggaaacugaauagguuaaucgggaaaacaaacgagaaauuccaucagauugaaaaagaauucucggaaguagaaggaagaauucaggaccucgagaaauauguugaggacacuaaaauagaucucuggucauacaacgcggagcuucuuguugcccuggagaaccaacauacaauugaucuaacugacucagaaaugaacaaacuguuugaaagaacaaagaagcaacugagggaaaaugcugaggauaugggcaaugguuguuucaaaauauaccacaaaugugacaaugccugcauagggucaaucagaaauggaacuuaugaccaugauguguacagagaugaagcauuaaacaaccgguuccagaucaaagguguugagcugaagucaggauacaaagauuggauccuauggauuuccuuugccauaucauguuuuuugcuuuguguugcuuuguugggguucaucaugugggccugccaaaaaggcaacauuaggugcaacauuugcauuuga

SEQ ID NO: 32089 - RNA, 1701 nt, Artificial Sequence
  derived and/or modified CDS sequence (wt) from hemagglutinin__InfluenzaA__AAX57644
augaagacuaucauugcuuugagcuacauucuaugucugguuuucgcucaaaaacuucccggaaaugacaacagcacggcaacgcugugccuugggcaccaugcaguaccaaacggaacgauagugaaaacaaucacgaaugaccaaauugaaguuacuaaugcuacugaacugguucagaguuccucaacagguggaauaugcgacaguccucaucagauccuugauggagaaaacugcacacuaauagaugcucuauugggagacccucagugugauggcuuccaaaauaagaaaugggaccuuuuuguugaacgcagcaaagccuacagcaacuguuacccuuaugaugugccggauuaugccucccuuaggucacuaguugccucauccggcacacuggaguuuaacaaugaaagcuucgauuggacuggagucacucagaauggaacaagcucugcuugcaaaaggagaucuaauaaaaguuucuuuaguagauugaauugguugacccacuuaaaauacaaauacccagcauugaacgugacuaugccaaacaaugaaaaauuugacaaauuguacauuugggggguucaccacccggguacggacagugaccaaaucagccuauaugcucaagcaucaggaagaaucacagucucuaccaaaagaagccaacaaacuguaaucccgaauaucggaucuagacccaggguaagggaugucuccagccgaauaagcaucuauuggacaguaguaaaaccgggagacauacuuuugauuaacagcacagggaaucuaauugcuccucgggguuacuucaaaaugcgaagugggaaaagcucaauaaugagaucagaugcacccauuggcaaaugcaauucugaaugcaucacuccaaauggaagcauucccaaugacaaaccauuucaaaauguaaacaggaucacauauggggccugucccagauauguuaagcaaaacacucugaaauuggcaacagggaugcgaaauguaccagagaaacaaacuagaggcauauuuggcgcaaucgcggguuucauagaaaaugguugggagggaaugguggacgguugguacggcuucaggcaucaaaauucugagggcacaggacaagcagcagaucucaaaagcacucaagcagcaaucaaccaaaucaaugggaaacugaauagguuaaucgggaaaacaaacgagaaauuccaucagauugaaaaagaauucucagaaguagaagggagaauucaggaccucgagaaauauguugaggacacuaaaauagaucucuggucauacaacgcggagcuucuuguugcccuggagaaccaacauacaauugaucuaacugacucagaaaugaacaaacuguuugaaagaacaaagaagcaacugagggaaaaugcugaggauaugggcaaugguuguuucaaaauauaccacaaaugugacaaugccugcauagggucaaucagaaauggaacuuaugaccaugauguguacagagaugaagcauuaaacaaccgguuccagaucaaagguguugagcugaagucaggauacaaagauuggauccuauggauuuccuuugccauaucauguuuuuugcuuuguguugcuuuguugggguucaucaugugggccugccaaaaaggcaacauuaggugcaacauuugcauuuga

SEQ ID NO: 32090 - RNA, 1701 nt, Artificial Sequence; identical to SEQ ID NO: 32043
  derived and/or modified CDS sequence (wt) from hemagglutinin__InfluenzaA__AAX57654

SEQ ID NO: 32091 - RNA, 1701 nt, Artificial Sequence; identical to SEQ ID NO: 32082
  derived and/or modified CDS sequence (wt) from hemagglutinin__InfluenzaA__AAX57664

SEQ ID NO: 32092 - RNA, 1701 nt, Artificial Sequence
  derived and/or modified CDS sequence (wt) from hemagglutinin__InfluenzaA__AAX57684
augaagacuaucauugcuuugagcuacauuuuaugccugguuuucgcucaaaaacuucccggaaaugacaacagcacggcaacgcugugccuggggcaccaugcagugccaaacggaacgcuagugaaaacaaucacgaaugaccaaauugaaguaacuaaugcuacugagcugguucagaguuccucaacaaguagaauaugcgacaguccucaccaaauccuugauggagaaaacugcacacuaauagaugcucuauugggagacccucauugugauggcuuccaaaauaaggaaugggaccuuuuuguugaacgcagcaaagccuacagcaacuguuacccuuaugaugugccggauuaugucucccuuaggucacuaguugccucaucaggcacgcuggaguuuaacaaugaaagcuucaauuggacuggagucgcucagaauggaacaagcucugcuugcaaaaggagaucugauaaaaguuucuuuaguagauugaauugguugcaccaauuaaaauacaaauauccagcacugaacgugacuaugccaaacaaugaaaaauuugacaaauuguacauuugggggguucaccacccggguacagacagugaccaaaucagccuauaugcucaagcaucagggagagucacagucucuaccaaaagaagccaacaaacuguaaucccgaauaucggaucuggacccuggguaaggggugucuccagcagaauaagcaucuauuggacaauaguaaaaccgggagacauacuuuugauuaacagcacagggaaucuaauugcuccucgggguuacuucaaaauacgaagugggaaaagcucaauaaugaggucagaugcacccauuggcaaaugcaauucugaaugcaucacuccaaauggaagcauucccaaugacaaaccauuucaaaauguaaacaggaucacauauggggccugucccagauauguuaagcaaaacacucugaaauuggcaacagggaugcggaauguaccagagaaacaaacuagaggcauauucggugcaaucgcgggcuucauagaaaaugguugggagggaaugauggacgguugguacgguuucaggcaucaaaauucugagggcacagggcaagcagcagaucuuaaaagcacucaagcagcaaucaaccaaaucaacgggaaacugaauagguuaaucgagaaaacgaacgagaaauuccaucaaauugaaaaagaauucucagaaguagaagggagaauucaggaccucgagaaauauguugaggacacuaaaauagaucucuggucguacaaugcggagcuucuuguugcccuggagaaccaacauacaauugaucuaacugacucagaaaugaacaaacuguuugaaagaacaaagaagcaacugagggaaaaugcugaggauaugggcaaugguuguuucaaaauauaccacaaaugugacaaugccugcauagggucaaucagaaauggaacuuaugaccaugauguauacagagacgaagcauugaacaaccgguuccagaucaaagguguugagcugaagucaggauacaaagauuggauccuauggauuuccuuugccauaucauguuuuuugcuuuguauuguuuugcugggguucaucaugugggccugccaaaaaggcaacauuaggugcaacauuugcauuuga

SEQ ID NO: 32093 - RNA, 1701 nt, Artificial Sequence
  derived and/or modified CDS sequence (wt) from hemagglutinin__InfluenzaA__AAX57694
augaagacuaucauugcuuugagcuacauuuuaugucugguuuucgcucaaaaacuucccggaaaugacaacagcacggcaacgcugugccuggggcaccaugcagugccaaacggaacgcuagugaaaacaaucacgaaugaccaaauugaagugacuaaugcuacugagcugguucagaguuccucaacagguagaauaugcgacaguccucaccaaauccuugauggagaaaacugcacacuaauagaugcucuauugggagacccucauugugauggcuuccaaaauaaggaaugggaccuuuuuguugaacgcagcaaagccuacagcaacuguuacccuuaugaugugccggauuaugucucccuuaggucacuaguugccucaucaggcacgcuggaguuuaacaaugaaagcuucaauuggacuggagucgcucagaauggaacaagcucugcuugcaaaaggagaucugauaaaaguuucuuuaguagauugaauugguugcaccaauuaaaauacaaauauccagcacugaacgugacuaugccaaacaaugaaaaauuugacaaauuguacauuugggggguucaccacccggguacagacagugaccaaaucagccuauaugcucaagcaucagggagagucacagucucuaccaaaagaagccaacaaacuguaaucccgaauaucggaucuagacccuggguaaggggugucuccagcagaauaagcaucuauuggacaauaguaaaaccgggagacauacuuuugauuaacagcacagggaaucuaauugcuccucgggguuacuucaaaauacgaagugggaaaagcucaauaaugaggucagaugcacccauuggcaaaugcaauucugaaugcaucacuccaaauggaagcauucccaaugacaaaccauuucaaaauguaaacaggaucacauaugggcccuguccuagauauguuaagcaaaacacucugaaauuggcaacagggaugcggaaugugccagagaaacaaacuagaggcauauucggugcaaucgcgggcuucauagaaaaugguugggagggaaugauggacgguugguacgguuucaggcaucagaauucugagggcacagggcaagcagcagaucuuaaaagcacucaagcagcaaucaaccaaaucaacgggaaacugaauagguuaaucgaaaaaacgaacgagaaauuccaucaaauugaaaaagaauucucagaaguagaagggagaauucaggaccucgagaaauauguugaggacacuaaaauagaucucuggucguacaaugcggagcuucuuguugcccuggagaaccaacauacaauugaucuaacugacucagaaaugaacaaacuguuugaaagaacaaagaagcaacugagggaaaaugcugaggauaugggcaaugguuguuucaaaauauaccacaaaugugacaaugccugcauagggucaaucagaaauggaacuuaugaccaugauguauacagagacgaagcauugaacaaccgguuccagaucaaagguguugagcugaagucaggauacaaagauuggauccuauggauuuccuuugccauaucauguuuuuugcuuuguauuguuuugcugggguucaucaugugggccugccaaaaaggcaacauuaggugcaacauuugcauuuga

SEQ ID NO: 32094 - RNA, 1701 nt, Artificial Sequence
  derived and/or modified CDS sequence (wt) from hemagglutinin__InfluenzaA__AAX57704
augaagacuaucauugcuuugagcuacauucuaugucugguuuucgcucaaaaacuucccggaaaugacaacagcacggcaacgcugugccuugggcaccaugcaguaccaaacggaacgauagugaaaacaaucacgaaugaccaaauugaaguuacuaaugcuacugagcugguucagauuuccucaacagguggaauaugcgacaguccucaucagauccuugauggagaaaacugcacacuaauagaugcucuauugggagacccucagugugauggcuuccaaaauaagaaaugggaccuuuuuguugaacgcagcaaagccuacagcaacuguuacccuuaugaugugccggauuaugccucccuuaggucacuaguugccucauccggcacacuggaguuuaacaaugaaagcuucgauuggacuggagucacucagaauggaacaagcucugcuugcaaaaggagaucuaauaaaaguuucuuuaguagauugaauugguugacccacuuaaaauacaaauacccagcauugaacgugacuaugccaaacaaugaaaaauuugacaaauuguacauuugggggguucaccacccggguacugacagugaccaaaucagccuauaugcucaagcaucaggaagaaucacagucucuaccaaaagaagccaacaaacuguaaucccgaauaucggaucuagacccaggguaagggaugucuccagccgaauaagcaucuauuggacaauaguaaaaccgggagacauacuuuugauuaacagcacagggaaucuaauugcuccucgggguuacuucaaaauacgaagugggaaaagcucaauaaugagaucagaugcacccauuggcaaaugcaauucugaaugcaucacuccaaauggaagcauucccaaugacaaaccauuucaaaauguaaacaggaucacauauggggccugucccagauauguuaagcaaaacacucugaaauuggcaacagggaugcgaaauguaccagagaaacaaacuagaggcauauuuggcgcaaucgcggguuucauagaaaaugguugggagggaaugguggacgguugguacgguuucaggcaucaaaauucugagggcacaggacaagcagcagaucucaaaagcacucaagcagcaaucaaccaaaucaaugggaaacugaauagguuaaucgggaaaacaaacgagaaauuccaucagauugaaaaagaauucucggaaguagaaggaagaauucaggaccucgagaaauauguugaggacacuaaaauagaucucuggucauacaacgcggagcuucuuguugcccuggagaaccaacauacaauugaucuaacugacucagaaaugaacaaacuguuugaaaggacaaagaagcaacugagggaaaaugcugaggauaugggcaaugguuguuucaaaauauaccacaaaugugacaaugccugcauagggucaaucagaaauggaacuuaugaccaugauguguacagagaugaagcauuaaacaaccgguuccagaucaaagguguugagcugaagucaggauacaaagauuggauccuauggauuuccuuugccauaucauguuuuuugcuuuguguugcuuuguugggguucaucaugugggccugccaaaaaggcaacauuaggugcaacauuugcauuuga

SEQ ID NO: 32095 - RNA, 1701 nt, Artificial Sequence
  derived and/or modified CDS sequence (wt) from hemagglutinin__InfluenzaA__AAX57714
augaagacuaucauugcuuugagcuacauuuuaugccugguuuucgcucaaaaacuucccggaaaugacaacagcacggcaacgcuuugccuggggcaccaugcagugccaaacggaacgcuagugaaaacaaucacgaaugaccaaauugaagugacuaaugcuacugagcugguucagaguuccucaacagguagaauaugcgacaguccucaccaaauccuugauggagaaaacugcacacuaauagaugcucuauugggagacccucauugugauggcuuccaaaauaaggaaugggaccuuuuuguugaacgcagcaaagccuacagcaacuguuacccuuaugaugugccggauuaugucucccuuaggucacuaguugccucaucaggcacgcuggaguuuaacaaugaaagcuucaauuggacuggagucgcucagaauggaacaagcucugcuugcaaaaggagaucugauaaaaguuucuuuaguagauugaauugguugcaccaauuaaaauacaaauauccagcauugaacgugacuaugccaaacaaugaaaaauuugacaaauuguacauuugggggguucaccacccggguacagacagugaccaaaucagccuauaugcucaagcaucagggagagucacagucucuaccaaaagaagccaacaaacuguaaucccgaauaucggaucuagacccuggguaaggggugucuccagcagaauaagcaucuauuggacaauaguaaaaccgggagacauacuuuugauuaacagcacagggaaucuaauugcuccucgggguuacuucaaaauacgaagugggaaaagcucaauaaugaggucagaugcacccauuggcaaaugcaauucugaaugcaucacuccaaauggaagcauucccaaugacaaaccauuucaaaauguaaacaggaucacauaugggcccugucccagauauguuaagcaaaacacucugaaauuggcaacagggaugcgaaaugugccagagaaacaaacuagaggcauauucggugcaaucgcgggcuucauagaaaaugguugggagggaaugauggacgguugguacgguuucaggcaucaaaauucugagggcacagggcaagcagcagaucuuaaaagcacucaagcagcaaucaaccaaaucaacgggaaacugaauagguuaaucgagaaaacgaacgagaaauuccaucaaauugaaaaagaauucucagaaguagaagggagaauucaggaccucgagaaauauguugaggacacuaaaauagaucucuggucguacaaugcggagcuucuuguugcccuggagaaccaacauacaauugaucuaacugacucagaaaugaacaaacuguuugaaagaacaaagaagcaacugagggaaaaugcugaggauaugggcaaugguuguuucaaaauauaccacaaaugugacaaugccugcauagggucaaucagaaauggaacuuaugaccaugauguauacagagacgaagcauugaacaaccgguuccagaucaaagguguugagcugaagucaggauacaaagauuggauccuauggauuuccuuugccauaucauguuuuuugcuuuguauuguuuugcugggguucaucaugugggccugccaaaaaggcaacauuaggugcaacauuugcauuuga

SEQ ID NO: 32096 - RNA, 1701 nt, Artificial Sequence
  derived and/or modified CDS sequence (wt) from hemagglutinin__InfluenzaA__AAX57733
augaagacuaucauugcuuugagcuacauuuuaugccugguuuucgcucaaaaacuucccggaaaugacaacagcacggcaacgcugugccuggggcaccaugcagugccaaacggaacgcuagugaaaacaaucacgaaugaccaaauugaaguaacuaaugcuacugagcugguucagaguuccucaacaaguagaauaugcgacaguccucaccaaauccuugauggagaaaacugcacacuaauagaugcucuauugggagacccucauugugauggcuuccaaaauaaggaaugggaccuuuuuguugaacgcagcaaagccuacagcaacuguuacccuuaugaugugccggauuaugucucccuuaggucacuaguugccucaucaggcacgcuggaguuuaacaaugaaagcuucaauuggacuggagucgcucagaauggaacaagcucugcuugcaaaaggagaucugauaaaaguuucuuuaguagauugaauugguugcaccaauuaaaauacaaauauccagcacugaacgugacuaugccaaacaaugaaaaauuugacaaauuguacauuugggggguucaccacccggguacagacagugaccaaaucagccuauaugcucaagcaucagggagagucacagucucuaccaagagaagccaacaaacuguaaucccgaauaucggaucuggacccuggguaaggggugucuccagcagaauaagcaucuauuggacaauaguaaaaccgggagacauacuuuugauuaacagcacagggaaucuaauugcuccucgggguuacuucaaaauacgaagugggaaaagcucaauaaugagguccgaugcacccauuggcaaaugcaauucugaaugcaucacuccaaauggaagcauucccaaugacaaaccauuucaaaauguaaacaggaucacauauggggccugucccagauauguuaagcaaaacacucugaaauuggcaacagggaugcggaauguaccagagaaacaaacuagaggcauauucggugcaaucgcgggcuucauagaaaaugguugggagggaaugauggacgguugguacgguuucaggcaucaaaauucugagggcacagggcaagcagcagaucuuaaaagcacucaagcagcaaucaaccaaaucaacgggaaacugaauagguuaaucgagaaaacgaacgagaaauuccaucaaauugaaaaagaauucucagaaguagaagggagaauucaggaccucgagaaauauguugaggacacuaaaauagaucucuggucguacaaugcggagcuucuuguugcccuggagaaccaacauacaauugaucuaacugacucagaaaugaacaaacuguuugaaagaacaaagaagcaacugagggaaaaugcugaggauaugggcaaugguuguuucaaaauauaccacaaaugugacaaugccugcauagggucaaucagaaauggaacuuaugaccaugauguauacagagacgaagcauugaacaaccgguuccagaucaaagguguugagcugaagucaggauacaaagauuggauccuauggauuuccuuugccauaucauguuuuuugcuuuguauuguuuugcugggguucaucaugugggccugccaaaaaggcaacauuaggugcaacauuugcauuuga

SEQ ID NO: 32097 - RNA, 1701 nt, Artificial Sequence
  derived and/or modified CDS sequence (wt) from hemagglutinin__InfluenzaA__AAX57734
augaagacuaucauugcuuugagcuacauuuuaugccugguuuucgcucaaaaacuucccggaaaugacaacagcacggcaacgcugugccuggggcaccaugcagugccaaacggaacgcuagugaaaacaaucacgaaugaccaaauugaaguaacuaaugcuacugagcugguucagaguuccucaacaaguagaauaugcaacaguccucaccaaauccuugauggagaaaacugcacacuaauagaugcucuauugggagacccucauugugauggcuuccaaaauaaggaaugggaccuuuuuguugaacgcagcaaagccuacagcaacuguuacccuuaugaugugccggauuaugucucccuuaggucacuaguugccucgucaggcacgcuggaguuuaacaaugaaagcuucaauuggacuggagucgcucagaauggaacaagcucugcuugcaaaaggagaucugauaaaaguuucuuuaguagauugaauugguugcaccaauuaaaauacaaauauccagcacugaacgugacuaugccaaacaaugaaaaauuugacaaauuguacauuugggggguucaccacccggguacagacagugaccaaaucagccuauaugcucaagcaucagggagagucacagucucuaccaagagaagccaacaaacuguaaucccgaauaucggaucuggacccuggguaaggggugucuccagcagaauaagcaucuauuggacaauaguaaaaccgggagacauacuuuugauuaacagcacagggaaucuaauugcuccucgggguuacuucaaaauacgaagugggaaaagcucaauaaugagguccgaugcacccauuggcaaaugcaauucugaaugcaucacuccaaauggaagcauucccaaugacaaaccauuucaaaauguaaacaggaucacauauggggccugucccagauauguuaagcaaaacacucugaaauuggcaacagggaugcggaauguaccagagaaacaaacuagaggcauauucggugcaaucgcgggcuucauagaaaaugguugggagggaaugauggacgguugguacgguuucaggcaucaaaauucugagggcacagggcaagcagcagaucuuaaaagcacucaagcagcaaucaaccaaaucaacgggaaacugaauagguuaaucgagaaaacgaacgagaaauuccaucaaauugaaaaagaauucucagaaguagaagggagaauucaggaccucgagaaauauguugaggacacuaaaauagaucucuggucguacaaugcggagcuucuuguugcccuggagaaccaacauacaauugaucuaacugacucagaaaugaacaaacuguuugaaagaacaaagaagcaacugagggaaaaugcugaggauaugggcaaugguuguuucaaaauauaccacaaaugugacaaugccugcauagggucaaucagaaauggaacuuaugaccaugauguguacagagacgaagcauugaacaaccgguuccagaucaaagguguugagcugaagucaggauacaaagauuggauccuauggauuuccuuugccauaucauguuuuuugcuuuguauuguuuugcugggguucaucaugugggccugccaaaaaggcaacauuaggugcaacauuugcauuuga

SEQ ID NO: 32098 - RNA, 1701 nt, Artificial Sequence
  derived and/or modified CDS sequence (wt) from hemagglutinin__InfluenzaA__AAX57744
augaagacuaucauugcuuugagcuacauuuuaugucugguuuucgcucaaaaacuucccguaaaugacaacagcacggcaacgcugugccugggacaccaugcagugccaaacggaacgcuagugaaaacaaucacgaaugaccacauugaagugacuaaugcuacugagcugguucagaguuccucaacagguagaauaugcgacaguccucaccaaauccuugauggagaaaacugcacacuaauagaugcucuauugggagacccucauugugauggcuuccaaaauaaggaaugggaccuuuuuguugaacgcagcacagccuacagcaacuguuacccuuaugaugugccggauuaugccucccuuaggucacuaguugccucauccggcacacuggaguuuaacaaugaaagcuucaauuggacuggagucgcucagaauggaacaagcucugcuugcaaaaggagaucuauuaaaaguuucuuuaguagauugaauugguugcaccaauuaaaauacaaauauccagcacugaacgugacuaugccaaacaaugaaaaauuugacaaauuguacauuugggggguucaccacccgaguacggacagugaccaaaucagccuauaugcucaagcaucagggagagucacagucucuaccaaaagaagccaacaaacuguaaucccgaauaucggaucuagacccuggguaaggggugucuccagcagaauaagcaucuauuggacaauaguaaaaccgggagacauacuuuugauuaacagcacagggaaucuaauugcuccucgggguuacuuuaaaauacgaagugggaaaagcucaauaaugaggucaaaugcacccauuggcaaaugcaauucugaaugcaucacuccaaauggaagcauucccaaugacaaaccauuucaaaauguaaacaggaucacauauggggccugucccagauauguuaagcaaaacacucugaaauuggcaacagggaugcggaauguaccagagaaacaaacuagaggcauauucggcgcaaucgcggguuucauagaaaaugguugggagggaaugguggacgguugguacgguuucaggcaucaaaauucugagggcacaggacaagcagcagaucuuaaaagcacucaagcagcaaucaaccaaaucaacgggaaacugaauagguuaaucgagaaaacaaacgagaaauuccaucaaauugaaaaagaauucucagaaguagaagggagaauucaggaccucgagaaauauguugaggacacuaaaauagaucucuggucguacaacgcggagcuucuuguugcccuggagaaccaacauacaauugaucuaacugacucagaaaugaacaaacuguuugaaagaacaaggaagcaacugagagaaaaugcugaggauaugggcaaugguuguuucaaaauauaccacaaaugugacaaugccugcauagggucaaucagaaauggaacuuaugaccaugauguauacagagacgaagcauuaaacaaccgguuccagaucaaagguguugagcugaagucaggauacaaagauuggauccuauggauuuccuuugccauaucauguuuuuugcuuuguguuguuuugcugggguucaucaugugggccugccaaaaaggcaacauuaggugcaacauuugcauuuga

SEQ ID NO: 32099 - RNA, 1701 nt, Artificial Sequence
  derived and/or modified CDS sequence (wt) from hemagglutinin__InfluenzaA__AAX57764
augaagacuaucauugcuuugagcuacauuuuaugucugguuuucgcucaaaaacuucccguaaaugacaacagcacggcaacgcugugccugggacaccaugcagugccaaacggaacgcuagugaaaacaaucacgaaugaccacauugaagugacuaaugcuacugagcugguucagaguuccucaacagguagaauaugcgacaguccucaccaaauccuugauggagaaaacugcacacuaauagaugcucuauugggagacccucauugugauggcuuccaaaauaaggaaugggaccuuuuuguugaacgcagcacagccuacagcaacuguuacccuuaugaugugccggauuaugccucccuuaggucacuaguugccucauccggcacacuggaguuuaacaaugaaagcuucaauuggacuggagucgcucagaauggaacaagcucugcuugcaaaaggagaucuauuaaaaguuucuuuaguagauugaauugguugcaccaauuaaaauacaaauauccagcacugaacgugacuaugccaaacaaugaaaaauuugacaaauuguacauuugggggguucaccacccgaguacggacagugaccaaaucagccuauaugcucaagcaucagggagagucacagucucuaccaaaagaagccaacaaacuguaaucccgaauaucggaucuagacccuggguaaggggugucuccagcagaauaagcaucuauuggacaauaguaaaaccgggagacauacuuuugauuaacagcacagggaaucuaauugcuccucgggguuacuuuaaaauacgaagugggaaaagcucaauaaugaggucaaaugcacccauuggcaaaugcaauucugaaugcaucacuccaaauggaagcauucccaaugacaaaccauuucaaaauguaaacaggaucacauauggggccugucccagauauguuaagcaaaacacucugaaauuggcaacagggaugcggaauguaccagagaaacaaacuagaggcauauucggcgcaaucgcggguuucauagaaaaugguugggagggaaugguggacgguugguacgguuucaggcaucaaaauucugagggcacgggacaagcagcagaucuuaaaagcacucaagcagcaaucaaccaaaucaacgggaaacugaauagguuaaucgagaaaacaaacgagaaauuccaucaaauugaaaaagaauucucagaaguagaagggagaauucaggaccucgagaaauauguugaggacacuaaaauagaucucuggucguacaacgcggagcuucuuguugcccuggagaaccaacauacaauugaucuaacugacucagaaaugaacaaacuguuugaaagaacaaggaagcaacugagggaaaaugcugaggauaugggcaaugguuguuucaaaauauaccacaaaugugacaaugccugcauagggucaaucagaaauggaacuuaugaccaugauguauacagagacgaagcauuaaacaaccgguuccagaucaaagguguugagcugaagucaggauacaaagauuggauccuauggauuuccuuugccauaucauguuuuuugcuuuguguuguuuugcugggguucaucaugugggccugccaaaaaggcaacauuaggugcaacauuugcauuuga

SEQ ID NO: 32100 - RNA, 1701 nt, Artificial Sequence
  derived and/or modified CDS sequence (wt) from hemagglutinin__InfluenzaA__AAX57774
augaagacuaucauugcuuugagcuacauuuuaugucugguuuucgcucaaaaacuucccguaaaugacaacagcacggcaacgcugugccugggacaccaugcagugccaaacggaacgcuagugaaaacaaucacgaaugaccacauugaagugacuaaugcuacugagcugguucagaguuccucaacagguagaauaugcgacaguccucaccaaauccuugauggagaaaacugcacacuaauagaugcucuauugggagacccucauugugauggcuuccaaaauaaggaaugggaccuuuuuguugaacgcagcacagccuacagcaacuguuacccuuaugaugugccggauuaugccucccuuaggucacuaguugccucauccggcacacuggaguuuaacaaugaaagcuucaauuggacuggagucgcucagaauggaacaagcucugcuugcaaaaggagaucuauuaaaaguuucuuuaguagauugaauugguugcaccaauuaaaauacaaauauccagcacugaacgugacuaugccaaacaaugaaaaauuugacaaauuguacauuugggggguucaccacccgaguacggacagugaccaaaucagccuauaugcucaagcaucagggagagucacagucucuaccaaaagaagccaacaaacuguaaucccgaauaucggaucuagacccuggguaaggggugucuccagcagaauaagcaucuauuggacaauaguaaaaccgggagacauacuuuugauuaacagcacagggaaucuaauugcuccucgggguuacuucaaaauacgaagugggaaaagcucaauaaugaggucaaaugcacccauuggcaaaugcaauucugaaugcaucacuccaaauggaagcauucccaaugacaaaccauuucaaaauguaaacaggaucacauauggggccugucccagauauguuaagcaaaacacucugaaauuggcaacagggaugcggaauguaccagagaaacaaacuagaggcauauucggcgcaaucgcggguuucauagaaaaugguugggaaggaaugguggacgguugguacgguuucaggcaucaaaacucugagggcacaggacaagcagcagaucuuaaaagcacucaagcagcaaucaaccaaaucaacgggaaacugaauagguuaaucgagaaaacaaacgagaaauuccaucaaauugaaaaagaauucucagaaguagaagggagaauucaggaccucgagaaauauguugaggacacuaaaauagaucucuggucguacaacgcggagcuucuuguugcccuggagaaccaacauacaauugaucuaacugacucagaaaugaacaaacuguuugaaagaacaaggaagcaacugagggaaaaugcugaggauaugggcaaugguuguuucaaaauauaccacaaaugugacaaugccugcauagggucaaucagaaauggaacuuaugaccaugauguauacagagacgaagcauuaaacaaccgguuccagaucaaagguguugagcugaagucaggauacaaagauuggauccuauggauuuccuuugccauaucauguuuuuugcuuuguguuguuuugcugggguucaucaugugggccugccaaaaaggcaacauuaggugcaacauuugcauuuga

SEQ ID NO: 32101 - RNA, 1701 nt, Artificial Sequence
  derived and/or modified CDS sequence (wt) from hemagglutinin__InfluenzaA__AAX57784
augaagacuaucauugcuuugagcuacauuuuaugccugguuuucgcucaaaaacuucccggaaaugacaacagcacggcaacgcugugccuggggcaccaugcagugccaaacggaacgcuagugaaaacaaucacgaaugaccaaauugaaguaacuaaugcuacugagcugguucagaauuccucaacaaguagaauaugcgacaguccucaccaaauccuugauggagaaaacugcacacuaauagaugcucuauugggagacccucauugugauggcuuccaaaauaaggaaugggaccuuuuuguugaacgcagcaaagccuacagcaacuguuacccuuaugaugugccggauuaugucucccuuaggucacuaguugccucaucaggcacgcuggaguuuaacaaugaaagcuucaauuggacuggagucgcucagaauggaacaagcucugcuugcaaaaggagaucugauaaaaguuucuuuaguagauugaauugguugcaccaauuaaaauacaaauauccagcacugaacgugacuaugccaaacaaugaaaaauuugacaaauuguacauuugggggguucaccacccggguacagacagugaccaaaucagccuauaugcucaagcaucagggagagucacagucucuaccaagagaagccaacaaacuguaaucccgaauaucggaucuagacccuggguaaggggugucuccagcagaauaagcaucuauuggacaauaguaaaaccgggagacauacuuuugauuaacagcacagggaaucuaauugcuccucgggguuacuucaaaauacgaagugggaaaagcucaauaaugagguccgaugcacccauuggcaaaugcaauucugaaugcaucacuccaaauggaagcauccccaaugacaaaccauuucaaaauguaaacaggaucacauauggggccugucccagauauguuaagcaaaacacucugaaauuggcaacagggaugcggaauguaccagagaaacaaacuagaggcauauucggugcaaucgcgggcuucauagaaaaugguugggagggaaugauggacgguugguacgguuucaggcaucaaaauucugagggcacagggcaagcagcagaucuuaaaagcacucaagcagcaaucaaccaaaucaacgggaaacugaauagguuaaucgagaaaacgaacgagaaauuccaucaaauugaaaaagaauucucagaaguagaagggagaauucaggaccucgagaaauauguugaggacacuaaaauagaucucuggucguacaaugcggagcuucuuguugcccuggagaaccaacauacaauugaucuaacugacucagaaaugaacaaacuguuugaaagaacaaagaagcaacugagggaaaaugcugaggauaugggcaaugguuguuucaaaauauaccacaaaugugacaaugccugcauagggucaaucagaaauggaacuuaugaccaugauguauacagagacgaagcauugaacaaccgguuccagaucaaagguguugagcugaagucaggauacaaagauuggauccuauggauuuccuuugccauaucauguuuuuugcuuuguauuguuuugcugggguucaucaugugggccugccaaaaaggcaacauuaggugcaacauuugcauuuga

SEQ ID NO: 32102 - RNA, 1701 nt, Artificial Sequence
  derived and/or modified CDS sequence (wt) from hemagglutinin__InfluenzaA__AAX57794
augaagacuaucauugcuuugagcuacauuuuaugucugguuuucgcucaaaaacuucccguaaaugacaacagcacggcaacgcugugccugggacaccaugcagugccaaacggaacgcuagugaaaacaaucacgaaugaccacauugaagugacuaaugcuacugagcugguucagaguuccucaacagguagaauaugcgacaguccucaccaaauccuugauggagaaaacugcacacuaauagaugcucuauugggagacccucauugugauggcuuccaaaauaaggaaugggaccuuuuuguugaacgcagcacagccuacagcaacuguuacccuuaugaugugccggauuaugccucccuuaggucacuaguugccucauccggcacacuggaguuuaacaaugaaagcuucaauuggacuggagucgcucagaauggaacaagcucugcuugcaaaaggagaucuauuaaaaguuucuuuaguagauugaauugguugcaccaauuaaaauacaaauauccagcacugaacgugacuaugccaaacaaugaaaaauuugacaaauuguacauuugggggguucaccacccgaguacggacagugaccaaaucagccuauaugcucaagcaucagggagagucacagucucuaccaaaagaagccaacaaacuguaaucccgaauaucggaucuagacccuggguaaggggugucuccagcagaauaagcauccauuggacaauaguaaaaccgggagacauacuuuugauuaacagcacagggaaucuaauugcuccucgggguuacuuuaaaauacgaagugggaaaagcucaauaaugaggucaaaugcacccauuggcaaaugcaauucugaaugcaucacuccaaauggaagcauucccaaugacaaaccauuucaaaauguaaacaggaucacauauggggccugucccagauauguuaagcaaaacacucugaaauuggcaacagggaugcggaauguaccagagaaacaaacuagaggcauauucggcgcaaucgcggguuucauagaaaaugguugggagggaaugguggacgguugguacgguuucaggcaucaaaauucugagggcacaggacaagcagcagaucuuaaaagcacucaagcagcaaucaaccaaaucaacgggaaacugaauagguuaaucgagaaaacaaacgagaaauuccaucaaauugaaaaagaauucucagaaguagaagggagaauucaggaccucgagaaauauguugaggacacuaaaauagaucucuggucguacaacgcggagcuucuuguugcccuggagaaccaacauacaauugaucuaacugacucagaaaugaacaaacuguuugaaagaacaaggaagcaacugagggaaaaugcugaggauaugggcaaugguuguuucaaaauauaccacaaaugugacaaugccugcauagggucaaucagaaauggaacuuaugaccaugauguauacagagacgaagcauuaaacaaccgguuccagaucaaagguguugagcugaagucaggauacaaagauuggauccuauggauuuccuuugccauaucauguuuuuugcuuuguguuguuuugcugggguucaucaugugggccugccaaaaaggcaacauuaggugcaacauuugcauuuga

SEQ ID NO: 32103 - RNA, 1701 nt, Artificial Sequence
  derived and/or modified CDS sequence (wt) from hemagglutinin__InfluenzaA__AAX57814
augaagacuaucauugcuuugagcuacauuuuaugucugguuuucgcucaaaaacuucccguaaaugacaacagcacggcaacgcugugccugggacaccaugcagugccaaacggaacgcuagugaaaacaaucacgaaugaccacauugaagugacuaaugcuacugagcugguucagaguuccucaacagguagaauaugcgacaguccucaccaaauccuugauggagaaaacugcacacuaauagaugcucuauugggagacccucauugugauggcuuccaaaauaaggaaugggaccuuuuuguugaacgcagcacagccuacagcaacuguuacccuuaugaugugccggauuaugccucccuuaggucacuaguugccucauccggcacacuggaguuuaacaaugaaagcuucaauuggacuggagucgcucagaauggaacaagcucugcuugcaaaaggagaucuauuaaaaguuucuuuaguagauugaauugguugcaccaauuaaaauacaaauauccagcacugaacgugaccaugccaaacaaugagaaauuugacaaauuguacauuugggggguucaccacccgaguacggacagugaccaaaucagccuauaugcucaagcaucagggagagucacagucucuaccaaaagaagccaacaaacuguaaucccgaauaucggaucuagacccuggguaaggggugucuccagcagaauaagcaucuauuggacaauaguaaaaccgggagacauacuuuugauuaacagcacagggaaucuaauugcuccucgggguuacuucaaaauacgaagugggaaaagcucaauaaugaggucaaaugcacccauuggcaaaugcaauucugaaugcaucacuccaaauggaagcauucccaaugacaaaccauuucaaaauguaaacaggaucacauauggggccugucccagauauguuaagcaaaacacucugaaauuggcaacagggaugcggaauguaccagagaaacaaacuagaggcauauucggcgcaaucgcggguuucauagaaaaugguugggaaggaaugguggacgguugguacgguuucaggcaucaaaauucugagggcacaggacaagcagcagaucuuaaaagcacucaagcagcaaucaaccaaaucaacgggaaacugaauagguuaaucgagaaaacaaacgagaaauuccaucaaauugaaaaagaauucucagaaguagaagggagaauucaggaccucgagaaauauguugaggacacuaaaauagaucucuggucguacaacgcggagcuucuuguugcccuggagaaccaacauacaauugaucuaacugacucagaaaugaacaaacuguuugaaagaacaaggaagcaacugagggaaaaugcugaggauaugggcaaugguuguuucaaaauauaccacaaaugugacaaugccugcauagggucaaucagaaauggaacuuaugaccaugauguauacagagacgaagcauuaaacaaccgguuccagaucaaagguguugagcugaagucaggauacaaagauuggauccuauggauuuccuuugccauaucauguuuuuugcuuuguguuguuuugcugggguucaucaugugggccugccaaaaaggcaacauuaggugcaacauuugcauuuga

SEQ ID NO: 32104 - RNA, 1701 nt, Artificial Sequence
  derived and/or modified CDS sequence (wt) from hemagglutinin__InfluenzaA__AAX57824
augaagacuaucauugcuuugagcuacauuuuauguaugguuuucgcucaaaaacuucccguaaaugacaacagcacggcaacgcugugccugggacaccaugcagugccaaacggaacgcuagugaaaacaaucacgaaugaccacauugaagugacuaaugcuacugagcugguucagaguuccucaacagguagaauaugcgacaguccucaccaaauccuugauggagaaaacugcacacuaauagaugcucuauugggagacccucauugugauggcuuccaaaauaaggaaugggaccuuuuuguugaacgcagcacagccuacagcaacuguuacccuuaugaugugccggauuaugccucccuuaggucacuaguugccucauccggcacacuggaguuuaacaaugaaagcuucaauuggacuggagucgcucagaauggaacaagcucugcuugcaaaaggagaucuauuaaaaguuucuuuaguagauugaauugguugcaccaauuaaaauacaaauauccagcacugaacgugaccaugccaaacaaugaaaaauuugacaaauuguacauuugggggguucaccacccgaguacggacagugaccaaaucagccuauaugcucaagcaucagggagagucacagucucuaccaaaagaagccaacaaacuguaaucccgaauaucggaucuagacccuggguaaggggugucuccagcagaauaagcaucuauuggacaauaguaaaaccgggagacauacuuuugauuaacagcacagggaaucuaauugcuccucgggguuacuucaaaauacgaagugggaaaagcucaauaaugaggucaaaugcacccauuggcaaaugcaauucugaaugcaucacuccaaauggaagcauucccaaugacaaaccauuucaaaauguaaacaggaucacauauggggccugucccagauauguuaagcaaaacacucugaaauuggcaacagggaugcggaauguaccagagaaacaaacuagaggcauauucggcgcaaucgcggguuucauagaaaaugguugggaaggaaugguggacgguugguacgguuucaggcaucaaaauucugagggcacaggacaagcagcagaucuuaaaagcacucaagcagcaaucaaccaaaucaacgggaaacugaauagguuaaucgagaaaacaaacgagaaauuccaucaaauugaaaaagaauucucagaaguagaagggagaauucaggaccucgagaaauauguugaggacacuaaaauagaucucuggucguacaacgcggagcuucuuguugcccuggagaaccaacauacaauugaucuaacugacucagaaaugaacaaacuguuugaaagaacaaggaagcaacugagggaaaaugcugaggauaugggcaaugguuguuucaaaauauaccacaaaugugacaaugccugcauagggucaaucagaaauggaacuuaugaccaugauguauacagagacgaagcauuaaacaaccgguuccagaucaaagguguugagcugaagucaggauacaaagauuggauccuauggauuuccuuugccauaucauguuuuuugcuuuguguuguuuugcugggguucaucaugugggccugccaaaaaggcaacauuaggugcaacauuugcauuuga

SEQ ID NO: 32105 - RNA, 1701 nt, Artificial Sequence
  derived and/or modified CDS sequence (wt) from hemagglutinin__InfluenzaA__AAX57834
augaagacuaucauugcuuugagcuacauuuuaugucugguuuucgcucaaaaacuucccguaaaugacaacagcacggcaacgcugugccugggacaccaugcagugccaaacggaacgcuagugaaaacaaucacgaaugaccacauugaagugacuaaugcuacugagcuaguucagaguuccucaacagguagaauaugcgacaguccucaccagauccuugauggagaaaacugcacacuaauagaugcucuauugggagacccucauugugauggcuuccaaaauaaggaaugggaccuuuuuguugaacgcagcacagccuacagcaacuguuacccuuaugaugugccggauuaugccucccuuaggucacuaguugccucauccggcacacuggaguuuaacaaugaaagcuucaauuggacuggagucgcucagaauggaacaagcucugcuugcaaaaggagaucuauuaaaaguuucuuuaguagauugaauugguugcaccaauuaaaauacaaauauccagcacugaacgugacuaugccaaacaaugaaaaauuugacaaauuguacauuugggggguucaccacccgaguacggacagugaccaaaucagccuauaugcucaagcaucagggagagucacagucucuaccaaaagaagccaacaaacuguaaucccgaauaucggaucuagacccuggguaaggggugucuccagcagaauaagcaucuauuggacaauaguaaaaccgggagacauacuuuugauuaacagcacagggaaucuaauugcuccucgggguuacuuuaaaauacgaagugggaaaagcucaauaaugaggucaaaugcacccauuggcaaaugcaauucugaaugcaucacuccaaauggaagcauucccaaugacaaaccauuucaaaauguaaacaggaucacauauggggccugucccagauacguuaagcaaaacacucugaaauuggcaacagggaugcggaauguaccagagaaacaaacuagaggcauauucggcgcaaucgcggguuucauagaaaaugguugggagggaaugguggacgguugguacgguuucaggcaucaaaauucugagggcacaggacaagcagcagaucuuaaaagcacucaagcagcaaucaaccaaaucaacgggaaacugaauagguuaaucgagaaaacaaacgagaaauuccaucaaauugaaaaagaauucucagaaguagaagggagaauucaggaccucgagaaauauguugaggacacuaaaauagaucucuggucguacaacgcggagcuucuuguugcccuggagaaccaacauacaauugaucuaacugacucagaaaugaacaaacuguuugaaagaacaaggaagcaacugagggaaaaugcugaggauaugggcaaugguuguuucaaaauauaccacaaaugugacaaugccugcauagggucaaucagaaauggaacuuaugaccaugauguauacagagacgaagcauuaaacaaccgguuccagaucaaagguguugagcugaagucaggauacaaagauuggauccuauggauuuccuuugccauaucauguuuuuugcuuuguguuguuuugcugggguucaucaugugggccugccaaaaaggcaacauuaggugcaacauuugcauuuga

SEQ ID NO: 32106 - RNA, 1701 nt, Artificial Sequence
  derived and/or modified CDS sequence (wt) from hemagglutinin__InfluenzaA__AAX57844
augaagacuaucauugcuuugagcuacauuuuaugucugguuuucgcucaaaaacuucccguaaaugacaacagcacggcaacgcugugccugggacaccaugcagugccaaacggaacgcuagugaaaacaaucacgaaugaccacauugaagugacuaaugcuacugagcugguucagaguuccucaacagguagaauaugcgacaguccucaccaaauccuugauggagaaaacugcacacuaauagaugcucuauugggagacccucauugugauggcuuccaaaauaaggaaugggaccuuuuuguugaacgcagcacagccuacagcaacuguuacccuuaugaugugccggauuaugccucccuuaggucacuaguugccucauccggcacacuggaguuuaacaaugaaagcuucaauuggacuggagucgcucagaauggaacaagcucugcuugcaaaaggagaucuauuaaaaguuucuuuaguagauugaauugguugcaccaauuaaaauacaaauauccagcacugaacgugacuaugccaaacaaugaaaaauuugacaaauuguacauuugggggguucaccauccgaguacggacagugaccaaaucagccuauaugcucaagcaucagggagagucacagucucuaccaaaagaagccaacaaacuguaaucccgaauaucggaucuagacccuggguaaggggugucuccagcagaauaagcaucuauuggacaauaguaaaaccgggagacauacuuuugauuaacagcacagggaaucuaauugcuccucgggguuacuuuaaaauacgaagugggaaaagcucaauaaugaggucaaaugcacccauuggcaaaugcaauucugaaugcaucacuccaaauggaagcauucccaaugacaaaccauuucaaaauguaaacaggaucacauauggggcaugucccagauauguuaagcaaaacacucugaaauuggcaacagggaugcggaauguaccagagaaacaaacuagaggcauauucggcgcaaucgcggguuucauagaaaaugguugggagggaaugguggacgguugguacgguuucaggcaucaaaauucugagggcacaggacaagcagcagaucuuaaaagcacucaagcagcaaucaaccaaaucaacgggaaacugaauagguuaaucgagaaaacaaacgagaaauuccaucaaauugaaaaagaauucucagaaguagaagggagaauucaggaccucgagaaauauguugaggacacuaaaauagaucucuggucguacaacgcggagcuucuuguugcccuggagaaccaacauacaauugaucuaacugacucagaaaugaacaaacuguuugaaagaacaaggaagcaacugagggaaaaugcugaggauaugggcaaugguuguuucaaaauauaccacaaaugugacaaugccugcauagggucaaucagaaauggaacuuaugaccaugauguauacagagacgaagcauuaaacaaccgguuccagaucaaagguguugagcugaagucaggauacaaagauuggauccuauggauuuccuuugccauaucauguuuuuugcuuuguguuguuuugcugggguucaucaugugggccugccaaaaaggcaacauuaggugcaacauuugcauuuga

SEQ ID NO: 32107 - RNA, 1701 nt, Artificial Sequence
  derived and/or modified CDS sequence (wt) from hemagglutinin__InfluenzaA__AAX57864
augaagacuaucauugcuuugagcuacuuucuaugucugguuuucgcucaaaaacuucccguaaaugacaacagcacggcaacgcugugccugggacaccaugcagugccaaacggaacgcuagugaaaacaaucacgaaugaccacauugaagugacuaaugcuacugagcugguucagaguuccucaacagguagaauaugcgacaguccucaccaaauccuugauggagaaaacugcacacuaauagaugcucuauugggagacccucauugugauggcuuccagaauaaggaaugggaccuuuuuguugaacgcagcacagccuacagcaacuguuacccuuaugaugugccggauuaugccucccuuaggucacuaguugccucauccggcacacuggaguuuaacaaugaaagcuucaauuggacuggagucgcucagaauggaacaagcucugcuugcaaaaggagaucuauuaaaaguuucuuuaguagauugaauugguugcaccaauuaaaauacaaauauccagcacugaacgugacuaugccaaacaaugaaaaauuugacaaauuguacauuugggggguucaccacccgaguacggacagugaccaaaucagccuauaugcucaagcaucagggagagucacagucucuaccaaaagaagccaacaaacuguaaucccgaauaucggaucuagacccuggguaaggggugucuccagcagaauaagcaucuauuggacaauaguaaaaccgggagacauacuuuugauuaacagcacagggaaucuaauugcuccucgggguuacuuuaaaauacgaagugggaaaagcucaauaaugaggucaaaugcacccauuggcaaaugcaauucugaaugcaucacuccaaauggaagcauucccaaugacaaaccauuucaaaauguaaacaggaucacauauggggccugucccagauauguuaagcaaaacacucugaaauuggcaacagggaugcggaauguaccagagaaacaaacuagaggcauauucggcgcaaucgcggguuucauagaaaaugguugggagggaaugguggacgguugguacgguuucaggcaucaaaauucugagggcacaggacaagcagcagaucuuaaaagcacucaagcagcaaucaaccaaaucaacgggaaacugaauagguuaaucgagaaaacaaacgagaaauuccaucaaauugaaaaagaauucucagaaguagaagggagaauucaggaccucgagaaauauguugaggacacuaaaauagaucucuggucguacaacgcggagcuucuuguugcccuggagaaccaacauacaauugaucuaacugacucagaaaugaacaaacuguuugaaagaacaaggaagcaacugagggaaaaugcugaggauaugggcaaugguuguuucaaaauauaccacaaaugugacaaugccugcauagggucaaucagaaauggaacuuaugaccaugauguauacagagacgaagcauuaaacaaccgguuccagaucaaagguguugagcugaagucaggauacaaagauuggauccuauggauuuccuuugccauaucauguuuuuugcuuuguguuguuuugcugggguucaucaugugggccugccaaaaaggcaacauuaggugcaacauuugcauuuga

SEQ ID NO: 32108 - RNA, 1701 nt, Artificial Sequence
  derived and/or modified CDS sequence (wt) from hemagglutinin__InfluenzaA__AAX57874
augaagacuaucauugcuuugagcuacauuuuaugucugguuuucgcucaaaaacuucccguaaaugacaacagcacggcaacgcugugccugggacaccaugcagugccaaauggaacgcuagugaaaacaaucacgaaugaccacauugaagugacuaaugcuacugagcugguucagaguuccucaacagguagaauaugcgacaguccucaccaaauccuugauggagaaaacugcacacuaauagaugcucuauugggagacccucauugugauggcuuccaaaauaaggaaugggaccuuuuuguugaacgcagcacagccuacagcaacuguuacccuuaugaugugccggauuaugccucccuuaggucacuaguugccucauccggcacacuggaguuuaacaaugaaagcuucaauuggacuggagucgcucagaauggaacaagcucugcuugcaaaaggagaucuauuaaaaguuucuuuaguagauugaauugguugcaccaauuaaaauacaaauauccagcacugaacgugacuaugccaaacaaugaaaaauuugacaaauuguacauuugggggguucaccacccgaguacggacagugaccaaaucagccuauaugcucaagcaucagggagagucacagucucuaccaaaagaagccaacaaacuguaaucccgaauaucggaucuagacccuggguaaggggugucuccagcagaauaagcaucuauuggacaauaguaaaaccgggagacauacuuuugauuaacagcacagggaaucuaauugcuccucgggguuacuucaaaauacgaagugggaaaagcucaauaaugaggucaaaugcacccauuggcaaaugcaauucugaaugcaucacuccaaauggaagcauucccaaugacaaaccauuucaaaauguaaacaggaucacauauggggccugucccagauauguuaagcaaaacacucugaaauuggcaacagggaugcggaauguaccagagaaacaaacuagaggcauauucggcgcaaucgcggguuucauagaaaaugguugggaaggaaugguggacgguugguacgguuucaggcaucaaaauucugagggcacaggacaagcagcagaucuuaaaagcacucaagcagcaaucaaccaaaucaacgggaaacugaauagguuaaucgagaaaacaaacgagaaauuccaucaaauugaaaaagaauucucagaaguagaagggagaauucaggaccucgagaaauauguugaggacacuaaaauagaucucuggucguacaacgcggagcuucuuguugcccuggagaaccaacauacaauugaucuaacugacucagaaaugaacaaacuguuugaaagaacaaggaagcaacugagggaaaaugcugaggauaugggcaaugguuguuucaaaauauaccacaaaugugacaaugccugcauagggucaaucagaaauggaacuuaugaccaugauguauacagagacgaagcauuaaacaaccgguuccagaucaaagguguugagcugaagucaggauacaaagauuggauccuauggauuuccuuugccauaucauguuuuuugcuuuguguuguuuugcugggguucaucaugugggccugccaaaaaggcaacauuaggugcaacauuugcauuuga

SEQ ID NO: 32109 - RNA, 1701 nt, Artificial Sequence
  derived and/or modified CDS sequence (wt) from hemagglutinin__InfluenzaA__AAX57884
augaagacuaucauugcuuugagcuacauuuuaugucugguuuucgcucaaaaacuucccguaaaugacaacagcacggcaacgcugugccugggacaccaugcagugccaaacggaacgcuagugaaaacaaucacgaaugaccacauugaagugacuaaugcuacugagcugguucagaguuccucaacagguagaauaugcgacaguccucaccaaauccuugauggagaaaacugcacacuaauagaugcucuauugggagacccucauugugauggcuuccaaaauaaggaaugggaccuuuuuguugaacgcagcacagccuacagcaacuguuacccuuaugaugugccggauuaugccucccuuaggucacuaguugccucauccggcacacuggaguuuaacaaugaaagcuucaauuggacuggagucgcucagaauggaacaagcucugcuugcaaaaggagaucuauuaaaaguuucuuuaguagauugaauugguugcaccaauuaaaauacaaauauccagcacugaacgugacuaugccaaacaaugaaaaauuugacaaauuguacauuugggggguucaccacccgaguacggacagugaccaaaucagccuauaugcucaagcaucaggaagagucacagucucuaccaaaagaagccaacaaacuguaaucccgaauaucggaucuagacccuggguaaggggugucuccagcagaauaagcaucuauuggacaauaguaaaaccgggagacauacuuuugauuaacagcacagggaaucuaauugcuccucgggguuacuuuaaaauacgaagugggaaaagcucaauaaugaggucaaaugcacccauuggcaaaugcaauucugaaugcaucacuccaaauggaagcauucccaaugacaaaccauuucaaaauguaaacaggaucacauauggggccugucccagauauguuaagcaaaacacucugaaauuggcaacagggaugcggaauguaccagagaaacaaacuagaggcauauucggcgcaaucgcggguuucauagaaaaugguugggagggaaugguggacgguugguacgguuucaggcaucaaaauucugagggcacaggacaagcagcagaucuuaaaagcacucaagcagcaaucaaccaaaucaacgggaaacugaauagguuaaucgagaaaacaaacgagaaguuccaucaaauugaaaaagaauucucagaaguagaagggagaauucaggaccucgagaaauauguugaggacacuaaaauagaucucuggucguacaacgcggagcuucuuguugcccuggagaaccaacauacaauugaucuaacugacucagaaaugaacaaacuguuugaaagaacaaggaagcaacugagggaaaaugcugaggauaugggcaaugguuguuucaaaauauaccacaaaugugacaaugccugcauagggucaaucagaaauggaacuuaugaccaugauguauacagagacgaagcauuaaacaaccgguuccagaucaaagguguugagcugaagucaggauacaaagauuggauccuauggauuuccuuugccauaucauguuuuuugcuuuguguuguuuugcugggguucaucaugugggccugccaaaaaggcaacauuaggugcaacauuugcauuuga

SEQ ID NO: 32110 - RNA, 1701 nt, Artificial Sequence
  derived and/or modified CDS sequence (wt) from hemagglutinin__InfluenzaA__AAX57894
augaagacuaucauugcuuugagcuacauuuuaugucugguuuucgcucaaaaacuucccguaaaugacaacagcacggcaacgcugugccugggacaccaugcagugccaaacggaacgcuagugaaaacaaucacgaaugaccacauugaagugacuaaugcuacugagcugguucagaguuccucaacagguagaauaugcgacaguccucaccaaguccuugauggagaaaacugcacacuaauagaugcucuauugggagacccucauugugauggcuuccaaaauaaggaaugggaccuuuuuguugaacgcagcacagccuacagcaacuguuacccuuaugaugugccggauuaugccucccuuaggucacuaguugccucauccggcacacuggaguuuaacaaugaaagcuucaauuggacuggagucgcucagaauggaacaagcucugcuugcaaaaggagaucuauuaaaaguuucuuuaguagauugaauugguugcaccaauuaaaauacaaauauccagcacugaacgugacuaugccaaacaaugaaaaauuugacaaauuguacauuugggggguucaccacccgaguacggacagugaccaaaucagccuauaugcucaagcaucagggagagucacagucucuaccaaaagaagccaacaaacuguaaucccgaauaucggaucuagacccuggguaaggggugucuccagcagaauaagcaucuauuggacaauaguaaaaccgggagacauacuuuugauuaacagcacagggaaucuaauugcuccucgggguuacuucaaaauacgaagugggaaaagcucaauaaugaggucaaaugcacccauuggcaaaugcaauucugaaugcaucacuccaaauggaagcauucccaaugacaaaccauuucaaaauguaaacaggaucacauauggggccugucccagauauguuaagcaaaacacucugaaauuggcaacagggaugcggaauguaccagagaaacaaacuagaggcauauucggcgcaaucgcggguuucauagaaaaugguugggaaggaaugguggacgguugguacgguuucaggcaucaaaauucugagggcacaggacaagcagcagaucuuaaaagcacucaagcagcaaucaaccaaaucaacgggaaacugaauagguuaaucgagaaaacaaacgagaaauuccaucaaauugaaaaagaauucucagaaguagaagggagaauucaggaccucgagaaauauguugaggacacuaaaauagaucucuggucguacaacgcggagcuucuuguugcccuggagaaccaacauacaauugaucuaacugacucagaaaugaacaaacuguuugaaagaacaaggaagcaacugagggaaaaugcugaggauaugggcaaugguuguuucaaaauauaccacaaaugugacaaugccugcauagggucaaucagaaauggaacuuaugaccaugauguauacagagacgaagcauuaaacaaccgguuccagaucaaagguguugagcugaagucaggauacaaagauuggauccuauggauuuccuuugccauaucauguuuuuugcuuuguguuguuuugcugggguucaucaugugggccugccaaaaaggcaacauuaggugcaacauuugcauuuga

SEQ ID NO: 32111 - RNA, 1701 nt, Artificial Sequence
  derived and/or modified CDS sequence (wt) from hemagglutinin__InfluenzaA__AAX57924
augaagacuaucauugcuuugagcuacauuuuaugucugguuuucgcucaaaaacuucccguaaaugacaacagcacggcaacgcugugccugggacaccaugcagugccaaacggaacgcuagugaaaacaaucacgaaugaccacauugaagugacuaaugcuacugagcugguucagaguuccucaacagguagaauaugcgacaguccucaccaaauccuugauggagaaaacugcacacuaauagaugcucuauugggagacccucauugugauggcuuccaaaauaaggaaugggaccuuuuuguugaacgcagcacagccuacagcaacuguuacccuuaugaugugccggauuaugccucccuuaggucacuaguugccucauccggcacacuggaguuuaacaaugaaagcuucaauuggacuggagucgcucagaauggaacaagcuuugcuugcaaaaggagaucuauuaaaaguuucuuuaguagauugaauugguugcaccaauuaaaauacaaauauccagcacugaacgugacuaugccaaacaaugaaaaauuugacaaauuguacaucugggggguucaccacccgaguacggacagugaccaaaucagccuauaugcucaagcaucagggagagucacagucucuaccaaaagaagccaacaaacuguaaucccgaauaucggaucuagacccuggguaaggggugucuccagcagaauaagcaucuauuggacaauaguaaaaccgggagacauacuuuugauuaacagcacagggaaucuaauugcuccucgggguuacuuuaaaauacgaagugggaaaagcucaauaaugaggucaaaugcacccauuggcaaaugcaauucugaaugcaucacuccaaauggaagcauucccaaugacaaaccauuucaaaauguaaacaggaucacauauggggccugucccagauauguuaagcaaaacacucugaaauuggcaacagggaugcggaauguaccagagaaacaaacuagaggcauauucggcgcaaucgcggguuucauagaaaaugguugggagggaaugguggacgguugguacgguuucaggcaucaaaauucugagggcacaggacaagcagcagaucuuaaaagcacucaagcagcaaucaaccaaaucaacgggaaacugaauagguuaaucgagaaaacaaacgagaaauuccaucaaauugaaaaagaauucucagaaguagaagggagaauucaggaccucgagaaauauguugaggacacuaaaauagaucucuggucguacaacgcggagcuucuuguugcccuggagaaccaacauacaauugaucuaacugacucagaaaugaacaaacuguuugaaagaacaaggaagcaacugagggaaaaugcugaggauaugggcaaugguuguuucaaaauauaccacaaaugugacaaugccugcauagggucaaucagaaauggaacuuaugaccaugauguauacagagacgaagcauuaaacaaccgguuccagaucaaagguguugagcugaagucaggauacaaagauuggauccuauggauuuccuuugccauaucauguuuuuugcuuuguguuguuuugcugggguucaucaugugggccugccaaaaaggcaacauuaggugcaacauuugcauuuga

SEQ ID NO: 32112 - RNA, 1701 nt, Artificial Sequence; identical to SEQ ID NO: 32084
  derived and/or modified CDS sequence (wt) from hemagglutinin__InfluenzaA__AAX57934

SEQ ID NO: 32113 - RNA, 1701 nt, Artificial Sequence
  derived and/or modified CDS sequence (wt) from hemagglutinin__InfluenzaA__AAX57944
augaagacuaucauugcuuugagcuacauuuuaugccugguuuucgcucaaaaacuucccggaaaugacaacagcacggcaacgcugugccuggggcaccaugcagugccaaacggaacgcuagugaaaacaaucacgaaugaccaaauugaagugacuaaugcuacugagcugguucagaguuccucaacagguagaauaugcgacaguccucaccaaauccuugauggagaaaacugcacacuaauagaugcucuauugggagacccucauugugauggcuuccaaaauaaggaaugggaccuuuuuguugaacgcagcaaagccuacagcaauuguuacccuuaugaugugccggauuaugucucccuuaggucacuaguugccucaucaggcacgcuggaguuuaacaaugaaagcuucaauuggacuggagucgcucagaauggaacaagcucugcuugcaaaaggagaucugauaaaaguuucuuuaguagauugaauugguugcaccaauuaaaauacaaauauccagcacugaacgugacuaugccaaacaaugaaaaauuugacaaauuguacauuugggggguucaccacccggguacagacagugaccaaaucagccuauaugcucaagcaucagggagagucacagucucuaccaaaagaagccaacaaacuguaaucccgaauaucggaucuggacccuggguaaggggugucuccagcagaauaagcaucuauuggacaauaguaaaaccuggagacauacuuuugauuaacagcacagggaaucuaauugcuccucgggguuacuucaaaauacgaagugggaaaagcucaauaaugcggucagaugcacccauuggcaaauguaauucugaaugcaucacuccaaauggaagcauucccaauggcaaaccauuucaaaauguaaacaggaucacauauggggccugucccagauauguuaagcaaaacacucugaaauuggcaacagggaugcggaaugugccagagaaacaaacuagaggcauauucggugcaaucgcgggcuucauagaaaaugguugggagggaaugauggacgguugguacgguuucaggcaucagaauucugagggcacagggcaagcagcagaucuuaaaagcacucaagcagcaaucaaccaaaucaacgggaaacugaauagguuaaucgagaaaacgaacgagaaauuccaucaaauugaaaaagaauucucagaaguagaagggagaauucaggaccucgagaaauaugucgaggacacuaaaauagaucucuggucguacaaugcggagcuucuuguugcccuggagaaccaacauacaauugaucuaacugacucagaaaugaacaaacuguuugaaagaacaaagaagcaacugagggaaaaugcugaggauaugggcaaugguuguuucaaaauauaccacaaaugugacaaugccugcauagggucaaucagaaaugggacuuaugaccaugauguauacagagacgaagcauugaacaaccgguuccagaucaaaaguguugagcugaagucaggauacaaagauuggauccuauggauuuccuuugccauaucauguuuuuugcuuuguauuguuuuacugggguucaucaugugggccugccaaaaaggcaacauuaggugcaacauuugcauuuga

SEQ ID NO: 32114 - RNA, 1701 nt, Artificial Sequence
  derived and/or modified CDS sequence (wt) from hemagglutinin__InfluenzaA__AAX76623
augaagacuaucauugcuuugagcuacauucuaugucugguuuucgcucaaaaacuucccggaaaugacaaaagcacggcaacgcugugccuugggcaccaugcaguaccaaacggaacgauagugaaaacaaucacgaaugaccaaauugaaguuacuaaugcuacugagcugguacagaguuccucaacagguggaauaugcgacaguccucaucagauccuugauggagaaaacugcacacuaauagaugcucuauugggagacccucagugugauggcuuccaaaauaagaaaugggaccuuuuuguugaacgcagcaaagccuacagcaacuguuacccuuaugaugugccggauuaugccucccuuaggucacuaguugccucauccggcacacuggaguuuaacaaugaaagcuucgauuggacuggagucacucagaauggaacaagcucugcuugcaaaaggagaucuaauaaaaguuucuuuaguagauugaauugguugacccacuuaaaauacaaauacccagcauugaacgugacuaugccaaacaaugaaaaauuugacaaauuguacauuugggggguucaccacccggguacggacagugaccaaaucagccuauaugcucaagcaucaggaagaaucacagucucuaccaaaagaagccaacaaacuguaaucccgaauaucggaucuagacccaggguaagggauaucuccagccgaauaagcaucuauuggacaauaguaaaaccgggagacauacuuuugauuaacagcacagggaaucuaauugcuccucgggguuacuucaaaauacgaagugggaaaagcucaauaaugagaucagaugcacccauuggcaaaugcaauucugaaugcaucacuccaaauggaagcauucccaaugacaaaccauuucaaaauguaaacaggaucacauauggggccugucccagauauguuaagcaaaacacucugaaauuggcaacagggaugcgaaauguaccagagaaacaaacuagaggcauauuuggcgcaaucgcggguuucauagaaaaugguugggagggaaugguggacgguugguacgguuucaggcaucaaaauucugagggcacaggacaagcagcagaucucaaaagcacucaagcagcaaucaaccaaaucaaugggaaacugaauagguuaaucgggaaaacaaacgagaaauuccaucagauugaaaaagaauucucagaaguagaagggagaauucaggaccucgagaaauauguugaggacacuaaaauagaucucuggucauacaacgcggagcuucuuguugcccuggagaaccaacauacaauugaucuaacugacucagaaaugaacaaacuguuugaaagaacaaagaagcaacugagggaaaaugcugaggauaugggcaaugguuguuucaaaauauaccacaaaugugacaaugccugcauagggucaaucagaaauggaacuuaugaccaugauguguacagagaugaagcauuaaacaaccgguuccagaucaaagguguugagcugaggucaggauacaaagauuggauccuauggauuuccuuugccauaucauguuuuuugcuuuguguugcuucguugggguucaucaugugggccugccaaaaaggcaacauuaggugcaacauuugcauuuga

SEQ ID NO: 32115 - RNA, 1701 nt, Artificial Sequence
  derived and/or modified CDS sequence (wt) from hemagglutinin__InfluenzaA__AAX76643
augaagacuaucauugcuuugagcuacuuucuaugucugguuuucgcucaaaaacuucccggaaaugacaacagcacggcaacgcugugccuugggcaccaugcaguaccaaacggaacgauagugaaaacaaucacgaaugaccaaauugaaguuacuaaugcuacugagcugguucagaguuccucaacagguggaauaugcgacaguccucaucagauccuugauggagaaaacugcacacuaauagaugcucuauugggagacccucagugugauggcuuccaaaauaagaaaugggaccuuuuuguugaacgcagcaaagccuacagcaacuguuacccuuaugaugugccggauuaugccucccuuaggucacuaguugccucauccggcacacuggaguuuaacaaugaaagcuucaauuggacuggagucacucagaauggaacaagcucugcuugcgaaaggagaucuaauaaaaguuucuuuaguagauugaauugguugacccacuuaaaauacaaauacccagcauugaacgugacuaugccaaacaaugaaaaauuugacaaauuguacauuugggggguucaccacccggguacggacagugaccaaaucagccuauaugcucaagcaucaggaagaaucacagucucuaccaaaagaagccaacaaacuguaaucccgaauaucggaucuagacccaggguaagggaugucuccagccgaauaagcaucuauuggacaauaguaaaaccgggagacauacuuuugauuaacagcacagggaaucuaauugcuccucgggguuacuucaaaauacgaagugggaaaagcucaauaaugagaucagaugcacccauuggcaaaugcaauucugaaugcaucacuccaaauggaagcauucccaaugacaaaccauuucaaaauguaaacaggaucacauauggggccugucccagauauguuaagcaaaacacucugaaauuggcaacagggaugcgaaauguaccagagaaacaaacuagaggcauauuuggcgcaaucgcggguuucauagaaaaugguugggagggaaugguggacgguugguacgguuucaggcaucaaaauucugagggcacaggacaagcagcagaucucaaaagcacucaagcagcaaucaaccaaaucaaugggaaacugaauagguuaaucgggaaaacaaacgagaaauuccaucagauugaaaaagaauucucagaaguagaagggagaauucaggaccucgagaaauauguugaggacacuaaaauagaucucuggucauacaacgcggagcuucuuguugcccuggagaaccaacauacaauugaucuaacugacucagaaaugaacaaacuguuugaaagaacaaagaagcaacugagggaaaaugcugaggauaugggcaaugguuguuucaaaauauaccacaaaugugacaaugccugcauagggucaaucagaaauggaacuuaugaccaugauguguacagagaugaagcauuaaacaaccgguuccagaucaaagguguugagcugaagucaggauacaaagauuggauccuauggauuuccuuugccauaucauguuuuuugcuuuguguugcuuuguugggguucaucaugugggccugccaaaaaggcaacauuaggugcgacauuugcauuuga

SEQ ID NO: 32116 - RNA, 1701 nt, Artificial Sequence
  derived and/or modified CDS sequence (wt) from hemagglutinin__InfluenzaA__AAX76653
augaagacaaucauugcuuugagcuacuuucuaugucugguuuucgcucaaaaacuucccggaaaugacaacagcacggcaacgcugugccuugggcaccaugcaguaccaaacggaacgauagugaaaacaaucacgaaugaccaaauugaaguuacuaaugcuacugagcugguucagaguuccucaacagguggaauaugcgacaguccucaucagauccuugauggagaaaacugcacacuaauagaugcucuauugggagacccucagugugauggcuuccaaaauaagaaaugggaccuuuuuguugaacgcagcaaagccuacagcaacuguuacccuuaugaugugccggauuaugccucccuuaggucacuaguugccucauccggcacacuggaguuuaacaaugaaagcuucaauuggacuggagucacucagaauggaacaagcucugcuugcgaaaggagaucuaauaaaaguuucuuuaguagauugaauugguugacccacuuaaaauacaaauacccagcauugaacgugacuaugccaaacaaugaaaaauuugacaaauuguacauuugggggguucaccacccggguacggacagugaccaaaucagccuauuugcucaagcaucaggaagaaucacagucucuaccaaaagaagccaacaaacuguaaucccgaauaucggaucuggacccaggguaagggaugucuccagccgaauaagcaucuauuggacaauaguaaaaccgggagacauacuuuugauuaacagcacagggaaucuaauugcuccucgggguuacuucaaaauacgaagugggaaaagcucaauaaugagaucagaugcacccauuggcaaaugcaauucugaaugcaucacuccaaauggaagcauucccaaugacaaaccauuucaaaauguaaacaggaucacauauggggccugucccagauauguuaagcaaaacacucugaaauuggcaacagggaugcgaaauguaccagagaaacaaacuagaggcauauuuggcgcaaucgcggguuucauagaaaaugguugggagggaaugguggacgguugguacgguuucaggcaucaaaauucugagggcacaggacaagcagcagaucucaaaagcacucaagcagcaaucaaccaaaucaaugggaaacugaauagguuaaucgggaaaacaaacgagaaauuccaucagauugaaaaagaauucucagaaguagaagggagaauucaggaccucgagaaauauguugaggacacuaaaauagaucucuggucauacaacgcggagcuucuuguugcccuggagaaccaacauacaauugaucuaacugacucagaaaugaacaaacuguuugaaagaacaaagaagcaacugagggaaaaugcugaggauaugggcaaugguuguuucaaaauauaccacaaaugugacaaugccugcauagggucaaucagaaauggaacuuaugaccaugauguguacagagaugaagcauuaaacaaccgguuccagaucaaagguguugagcugaagucaggauacaaagauuggauccuauggauuuccuuugccauaucauguuuuuugcuuuguguugcuuuguugggguucaucaugugggccugccaaaaaggcaacauuaggugcgacauuugcauuuga

SEQ ID NO: 32117 - RNA, 1701 nt, Artificial Sequence
  derived and/or modified CDS sequence (wt) from hemagglutinin__InfluenzaA__AAX76663
augaagacuaucauugcuuugagcuacauuuuaugucugguuuucgcucaaaaacuucccggaaaugacaacagcacggcaacgcugugccuggggcaccaugcagugccaaacggaacgcuagugaaaacaaucacgaaugaccaaauugaagugacuaaugcuacugagcugguucagaguuccucaacagguagaauaugcgacaguccucaccaaauccuugauggagaaaacugcacacuaauagaugcucuauugggagacccucauugugauggcuuccaaaauaaggaaugggaccuuuuuguugaacgcagcaaagccuacagcaacuguuacccuuaugaugugccggauuaugucucccuuaggucacuaguugccucaucaggcacgcuggaguuuaacaaugaaagcuucaauuggacuggagucgcucagaauggaacaagcucugcuugcaaaaggagaucugauaaaaguuucuuuaguagauugaauugguugcaccaauuaaaauacaaauauccagcacugaacgugacuaugccaaacaaugaaaaauuugacaaauuguacauuugggggguucaccacccggguacagacagugaccaaaucagccuauaugcucaagcaucagggagagucacagucucuaccaaaagaagccaacaaacuguaaucccgaauaucggaucuggacccuggguaaggggugucuccagcagaauaagcaucuauuggacaauaguaaaaccgggagacauacuuuugauuaacagcacagggaaucuaauugcuccucgggguuacuucaaaauacgaagugggaaaagcucaauaaugaggucagaugcacccauuggcaaaugcaauucugaaugcaucacuccaaauggaagcauucccaaugacaaaccauuucaaaauguaaacaggaucacauaugggcccuguccuagauauguuaagcaaaacacucugaaauuggcaacagggaugcggaaugugccagagaaacaaacuagaggcauauucggugcaaucgcgggcuucauagaaaaugguugggagggaaugauggacgguugguacgguuucaggcaucagaauucugagggcacagggcaagcagcagaucuuaaaagcacucaagcagcaaucaaccaaaucaacgggaaacugaauagguuaaucgaaaaaacgaacgagaaauuccaucaaauugaaaaagaauucucagaaguagaagggagaauucaggaccucgagaaauauguugaggacacuaaaauagaucucuggucguacaaugcggagcuucuuguugcccuggagaaccaacauacaauugaucuaacugacucagaaaugaacaaacuguuugaaagaacaaagaagcaacugagggaaaaugcugaggauaugggcaaugguuguuucaaaauauaccacaaaugugacaaugccugcauagggucaaucagaaauggaacuuaugaccaugauguauacagagacgaagcauugaacaaccgguuccagaucaaagguguugagcugaagucaggauacaaagauuggauccuauggauuuccuuugccauaucauguuuuuugcuuuguauuguuuugcugggguucaucaugugggccugccaaaaaggcaacauuaggugcaacauuugcauuuga

SEQ ID NO: 32118 - RNA, 1701 nt, Artificial Sequence
  derived and/or modified CDS sequence (wt) from hemagglutinin__InfluenzaA__AAX76673
augaagacuaucauugcuuugagcuacauuuuaugucugguuuucgcucaaaaacuucccguaaaugacaacagcacggcaacgcugugccugggacaccaugcagugccaaacggaacgcuagugaaaacaaucacgaaugaccacauugaagugacuaaugcuacugagcugguucagaguuccucaacagguagaauaugcgacaguccucaccaaauccuugauggagaaaacugcacacuaauagaugcucuauugggagacccucauugugauggcuuccagaauaaggaaugggaccuuuuuguugaacgcagcacagccuacagcaacuguuacccuuaugaugugccggauuaugccucccuuaggucacuaguugccucauccggcacacuggaguuuaacaaugaaagcuucaauuggacuggagucgcucagaauggaacaagcucugcuugcaaaaggagaucuauuaaaaguuucuuuaguagauugaauugguugcaccaauuaaaauacaaauauccagcacugaacgugacuaugccaaacaaugaaaaauuugacaaauuguacauuugggggguucaccacccgaguacggacagugaccaaaucagccuauaugcucaagcaucagggagagucacagucucuaccaaaagaagccaacaaacuguaaucccgaauaucggaucuagacccuggguaaggggugucuccagcagaauaagcaucuauuggacaauaguaaaaccgggagacauacuuuugauuaacagcacagggaaucuaauugcuccucgggguuacuuuaaaauacgaagugggaaaagcucaauaaugaggucaaaugcacccauuggcaaaugcaauucugaaugcaucacuccaaauggaagcauucccaaugacaaaccauuucaaaauguaaacaggaucacauauggggccugucccagauauguuaagcaaaacacucugaaauuggcaacagggaugcggaauguaccagagaaacaaacuagaggcauauucggcgcaaucgcggguuucauagaaaaugguugggagggaaugguggacgguugguacgguuucaggcaucaaaauucugagggcacaggacaagcagcagaucuuaaaagcacucaagcagcaaucaaccaaaucaacgggaaacugaauagguuaaucgagaaaacaaacgagaaauuccaucaaauugaaaaagaauucucagaaguagaagggagaauucaggaccucgagagauauguugaggacacuaaaauagaucucuggucguacaacgcggagcuucuuguugcccuggagaaccaacauacaauugaucuaacugacucagaaaugaacaaacuguuugaaagaacaaggaagcaacugagggaaaaugcugaggauaugggcaaugguuguuucaaaauauaccacaaaugugacaaugccugcauagggucaaucagaaauggaacuuaugaccaugauguauacagagacgaagcauuaaacaaccgguuucagaucaaagguguugagcugaagucaggauacaaagauuggauccuauggauuuccuuugccauaucauguuuuuugcuuuguguuguuuugcugggguucaucaugugggccugccaaaaaggcaacauuaggugcaacauuugcauuuga

SEQ ID NO: 32119 - RNA, 1701 nt, Artificial Sequence
  derived and/or modified CDS sequence (wt) from hemagglutinin__InfluenzaA__AAX76683
augaagacuaucauugcuuugagcuacauuuuaugucugguuuucgcucaaaaacuucccguaaaugacaacagcacggcaacgcugugccugggacaccaugcagugccaaacggaacgcuagugaaaacaaucacgaaugaccacauugaagugacuaaugcuacugagcugguucagaguuccucaacagguagaauaugcgacaguccucaccaaauccuugauggagaaaacugcacacuaauagaugcucuauugggagacccucauugugauggcuuccaaaauaaggaaugggaccuuuuuguugaacgcagcacagccuacagcaacuguuacccuuaugaugugccggauuaugccucccuuaggucacuaguugccucauccggcacacuggaguuuaacaaugaaagcuucaauuggacuggagucgcucagaauggaacaagcucugcuugcaaaaggagaucuauuaaaaguuucuuuaguagauugaauugguugcaccaauuaaaauacaaauauccagcacugaacgugacuaugccaaacaaugaaaaauuugacaaauuguacauuugggggguucaccacccgaguacggacagugaccaaaucagccuauaugcucaagcaucagggagagucacagucucuaccaaaagaagccaacaaacuguaaucccgaauaucggaucuagacccuggguaaggggugucuccagcagaauaagcaucuauuggacaauaguaaaaccgggagacauacuuuugauuaacagcacagggaaucuaauugcuccucgggguuacuuuaaaauacgaagugggaaaagcucaguaaugaggucaaaugcacccauuggcaaaugcaauucugaaugcaucacuccaaauggaagcauucccaaugacaaaccauuucaaaauguaaacaggaucacauauggggccugucccagauauguuaagcaaaacacucugaaauuggcaacagggaugcggaauguaccagagaaacaaacuagaggcauauucggcgcaaucgcggguuucauagaaaaugguugggagggaaugguggacgguugguacgguuucaggcaucaaaauucugagggcacaggacaagcagcagaucuuaaaagcacucaagcagcaaucaaccaaaucaacgggaaacugaauagguuaaucgagaaaacaaacgagaaauuccaucaaauugaaaaagaauucucagaaguagaagggagaauucaggaccucgagaaauauguugaggacacuaaaauagaucucuggucguacaacgcggagcuucuuguugcccuggagaaccaacauacaauugaucuaacugacucagaaaugaacaaacuguuugaaagaacaaggaagcaacugagggaaaaugcugaggauaugggcaaugguuguuucaaaauauaccacaaaugugacaaugccugcauagggucaaucagaaauggaacuuaugaccaugauguauacagagacgaagcauuaaacaaccgguuccagaucaaagguguugagcugaagucaggauacaaagauuggauccuauggauuuccuuugccauaucauguuuuuugcuuuguguuguuuugcugggguucaucaugugggccugccaaaaaggcaacauuaggugcaacauuugcauuuga

SEQ ID NO: 32120 - RNA, 1701 nt, Artificial Sequence
  derived and/or modified CDS sequence (wt) from hemagglutinin__InfluenzaA__AAX76713
augaagacuaucauugcuuugagcuacauuuuaugucugguuuucgcucaaaaacuucccguaaaugacaacagcacggcaacgcugugccugggacaccaugcagugccaaacggaacgcuagugaaaacaaucacgaaugaccacauugaagugacuaaugcuacugagcugguucagaguuccucaacagguagaauaugcgacaguccucaccaaauccuugauggagaaaacugcacacuaauagaugcucuauugggagacccucauugugauggcuuccaaaauaaggaaugggaccuuuuuguugaacgcagcacagccuacagcaacuguuacccuuaugaugugccggauuaugccucccuuaggucacuaguugccucauccggcacacuggaguuuaacaaugaaagcuucaauuggacuggagucgcucagaauggaacaagcucugcuugcaaaaggagaucuauuaaaaguuucuuuaguagauugaauugguugcaccaauuaaaauacaaauauccagcacugaacgugaccaugccaaacaaugaaaaauuugacaaauuguacauuugggggguucaccacccgaguacggacagugaccaaaucagccuauaugcucaagcaucagggagagucacagucucuaccaaaagaagccaacaaacuguaaucccgaauaucggaucuagacccuggguaaggggugucuccagcagaauaagcaucuauuggacaauaguaaaaccgggagacauacuuuugauuaacagcacagggaaucuaauugcuccucgggguuacuucaaaauacgaagugggaaaagcucaauaaugaggucaaaugcacccauuggcaaaugcaauucugaaugcaucacuccaaauggaagcauucccaaugacaaaccauuucaaaauguaaacaggaucacauauggggccugucccagauauguuaagcaaaacacucugaaauuggcaacagggaugcggaauguaccagagaaacaaacuagaggcauauucggcgcaaucgcggguuucauagaaaaugguugggaaggaaugguggacgguugguacgguuucaggcaucaaaauucugagggcacaggacaagcagcagaucuuaaaagcacucaagcagcaaucaaccaaaucaacgggaaacugaauagguuaaucgagaaaacaaacgagaaauuccaucaaauugaaaaagaauucucagaaguagaagggagaauucaggaccucgagaaauauguugaggacacuaaaauagaucucuggucguacaacgcggagcuucuuguugcccuggagaaccaacauacaauugaucuaacugacucagaaaugaacaaauuguuugaaagaacaaggaagcaacugagggaaaaugcugaggauaugggcaaugguuguuucaaaauauaccacaaaugugacaaugccugcauagggucaaucagaaauggaacuuaugaccaugauguauacagagacgaagcauuaaacaaccgguuccagaucaaagguguugagcugaagucaggauacaaagauuggauccuauggauuuccuuugccauaucauguuuuuugcuuuguguuguuuugcugggguucaucaugugggccugccaaaaaggcaacauuaggugcaacauuugcauuuga

SEQ ID NO: 32121 - RNA, 1701 nt, Artificial Sequence
  derived and/or modified CDS sequence (wt) from hemagglutinin__InfluenzaA__AAX76723
augaagacuaucauugcuuugagcuacauuuuaugucugguuuucgcucaaaaacuucccguaaaugacaacagcacggcaacgcugugccugggacaccaugcagugccaaacggaacgcuagugaaaacaaucacgaaugaccacauugaagugacuaaugcuacugagcugguucagaguuccucaacagguagaauaugcgacaguccucaccaaauccuugauggagaaaacugcacacuaauagaugcucuauugggagacccucauugugauggcuuccaaaauaaggaaugggaccuuuuuguugaacgcagcacagccuacagcaacuguuacccuuaugaugugccggauuaugccucccuuaggucacuaguugccucauccggcacacuggaguuuaacaaugaaagcuucaauuggacuggagucgcucagaauggaacaagcucugcuugcaaaaggagaucuauuaaaaguuucuuuaguagauugaauugguugcaccaauuaaaauacaaauauccagcacugaacgugacuaugccaaacaaugaagaauuugacaaauuguacauuugggggguucaccacccgaguacggacagugaccaaaucagccuauaugcucaagcaucagggagagucacagucucuaccaaaagaagccaacaaacuguaaucccgaauaucggaucuagacccuggguaaggggugucuccagcauaauaagcaucuauuggacaauaguaaaaccgggagacauacuuuugauuaacagcacagggaaucuaauugcuccucgggguuacuucaaaauacgaagugggaaaagcucaauaaugaggucaaaugcacccauuggcaaaugcaauucugaaugcaucacuccaaauggaagcauucccaaugacaaaccauuucaaaauguaaacaggaucacauauggggccugucccagauauguuaagcaaaacacucugaaauuggcaacagggaugcggaauguaccagagaaacaaacuagaggcauauucggcgcaaucgcggguuucauagaaaaugguugggaaggaaugguggacgguugguacgguuucaggcaucaaaauucugagggcacaggacaagcagcagaucuuaaaagcacucaagcagcaaucaaccaaaucaacgggaaacugaauagguuaaucgagaaaacaaacgagaaauuccaucaaauugaaaaagaauucucagaaguagaagggagaauucaggaccucgagaaauauguugaggacacuaaaauagaucucuggucguacaacgcggagcuucuuguugcccuggagaaccaacauacaauugaucuaacugacucagaaaugaacaaacuguuugaaagaacaaggaagcaacugagggaaaaugcugaggauaugggcaaugguuguuucaaaauauaccacaaaugugacaaugccugcauagggucaaucagaaauggaacuuaugaccaugauguauacagagacgaagcauuaaacaaccgguuccagaucaaagguguugagcugaagucaggauacaaagauuggauccuauggauuuccuuugccauaucauguuuuuugcuuuguguuguuuugcugggguucaucaugugggccugccaaaaaggcaacauuaggugcaacauuugcauuuga

SEQ ID NO: 32122 - RNA, 1701 nt, Artificial Sequence
  derived and/or modified CDS sequence (wt) from hemagglutinin__InfluenzaA__AAX76733
augaagacuaucauagcuuugagcuacauuuuaugucugguuuucgcucaaaaacuucccggaaaugacaacagcacggcaacgcugugccuggggcaccaugcagugccaaacggaacgcuagugaaaacaaucacgaaugaccaaauugaagugacuaaugcuacugagcugguucagaguuccucaacagauagaauaugcgacaguccucaccaaauccuugauggaggaaacugcacacuaauagaugcucuauugggagacccucauugugauggcuuccaaaauaaggaaugggaccuuuuuguugaacgcagcaaagccuacagcaacuguuacccuuaugaugugccggauuaugucucccuuaggucacuaguugccucaucaggcacgcuggaguuuaacaaugaaagcuucaauuggacuggagucgcucagaauggaacaagcucugcuugcaaaaggagaucugauaaaaguuucuuuaguagauugaauugguugcaccaauuaaaaaacaaauauccagcacugaacguggcuaugccaaacaaugaaaaauuugacaaauuguacauuugggggguucaccacccggguacagacagugaccaaaucagccuauaugcucaagcaucagggagagucacagucucuaccaaaagaagccaacaaacuguaauuccgaauaucggaucuagacccaggguaagggauauauccagcagaauaagcaucuauuggacaauaguaaaaccgggagacauacuuuugauuaacagcacagggaaucuaauugcuccucgagguuacuucaaaauacgaagugggaaaagcucaauaaugaggucagaugcacccauuggcaaaugcaauucugaaugcaucacuccaaauggaagcauuccuaaugacaaaccauuucaaaauguaaacaggaucacauauggggccugucccagauauguuaagcaaaacacucugaaauuggcaacagggaugcggaaugugccggagaaacaaacuagaggcauauucggugcaaucgcgggcuucauagaaaaugguugggagggaaugguggacgguugguacgguuucaggcaucaaaauuaugagggcacaggacaagcagcagaucuuaaaagcacucaagcagcaaucaaccaaaucaacgggaaacugaauagguuaaucgagaaaacgaacgagaaauuccaccaaauugaaaaagaauucucagaaguagaagggagaauucaggaccucgagaaauauguugaggacacuaaaauagaucucuggucguacaaugcggagcuucuuguugcccuagagaaccaacauacaauugaucuaacugacucagaaaugaacaaacuguuugaaagaacaaagaagcaacugagggaaaaugcugaggauaugggcaaugguuguuucaaaauauaccacaaaugugacaaugccugcauagggucaaucagaaauggaacuuaugaccaugauguauacagagacgaagcauuaaacaaccgguuccagaucaaagguguugagcugaaaucaggauacaaagauuggauccuauggauuuccuuugccauaucauguuuuuugcuuuguauuguuuugcugggguucaucaugugggccugccaaaaaggcaacauuaggugcaacauuugcauuuga

SEQ ID NO: 32123 - RNA, 1701 nt, Artificial Sequence
  derived and/or modified CDS sequence (wt) from hemagglutinin__InfluenzaA__AAX76743
augaagacuaucauagcuuugagcuacauuuuaugucugguuuucgcucaaaaacuucccggaaaugacaacagcacggcaacgcugugccugggacaccaugcagugccaaacggaacgcuagugaaaacaaucacgaaugaccaaauugaagugacuaaugcuacugagcugguucagaguuccucaacagguagaauaugcgacaguccucaccaaauccuugauggagaaaacugcacacuaauagaugcucuauugggagacccucauugugauggcuuccaaaauaaggaaugggaccuuuuuguugaacgcagcaaagccuacagcaacuguuacccuuaugaugugccggauuaugucucccuuaggucacuaguugccucaucaggcacgcuggaguuuaacaaugaaagcuucaauuggacuggagucgcucagaauggaacaagcucugcuugcaaaaggagaucuaauaaaaguuucuuuaguagauugaauugguugcaccaauuaaaaaacaaauauccagcgcugaacguggcuaugccaaacaaugaaaaauuugacaaauuguacauuugggggguucaccacccgggcacagacagugaccaaaucagccuauaugcucaagcaucagggagagucacagucucuaccaaaagaagccaacaaacuguaaucccgaauaucggaucuagacccaggguaagggauaucuccagcagaauaagcaucuauuggacaauaguaaaaccgggagacauacuuuugauuaacagcacagggaaucuaauugcuccucgggguuacuucaaaauacgaagugggaaaagcucaauaaugaggucagaugcacccauuggcaaaugcaauucugaaugcaucacuccaaauggaagcauuccuaaugacaaaccauuucaaaauguaaacaggaucacauauggggccugucccagauauguuaagcaaaacacucugaaauuggcaacagggaugcgaaaugugccagagaaacaaacuagaggcauauucggugcaaucgcgggcuucauagaaaaugguugggagggaaugauggacgguugguacgguuucaggcaucaaaauucugagggcacaggacaagcagcagaucuuaaaagcacucaagcagcaaucaaccaaaucaacgggaaacugaauagguuaaucgagaaaacgaacgagaaauuccaccaaauugaaaaagaauucucagaaguagaagggagaauucaggaccucgagaaauauguugaggacacuaaaauagaucucuggucguacaaugcggagcuucuuguugcccuggagaaccaacauacaauugaucuaacugacucagaaaugaacaaacuguuugaaagaacaaagaagcaacugagggaaaaugcugaggauaugggcaaugguuguuucaaaauauaccacaaaugugacaaugccugcauagggucaaucagaaauggaacuuaugaccaugauguauacagagacgaagcauuaaacaaccgguuccagaucaaagguguugagcugaagucaggauacaaagauuggauccuauggauuuccuuugccauaucauguuuuuugcuuuguauuguuuugcugggguucaucaugugggccugccaaaaaggcaacaucaggugcaacauuugcauuuga

SEQ ID NO: 32124 - RNA, 1701 nt, Artificial Sequence
  derived and/or modified CDS sequence (wt) from hemagglutinin__InfluenzaA__AAX76763
augaagacuaucauugcuuugagcuacauucuaugucugguuuucgcucaaaaacuucccggaaaugacaacagcacggcaacgcugugccuugggcaccaugcaguaccaaacggaacgauagugaaaacaaucacgaaugaccaaauugaaguuacuaaugcuacugagcugguacagaguuccucaacagguggaauaugcgacaguccucaucagauccuugauggagaaaacugcacacuaauagaugcucuauugggagacccucagugugauggcuuccaaaauaagaaaugggaccuuuuuguugaacgcagcaaagccuacagcaacuguuacccuuaugaugugccggauuaugccucccuuaggucacuaguugccucauccggcacacuggaguuuaacaaugaaagcuucgauuggacuggagucacucagaauggaacaagcucugcuugcaaaaggagaucuaauaaaaguuucuuuaguagauugaauugguugacccacuuaaaauacaaauacccagcauugaacgugacuaugccaaacaaugaaaaauuugacaaauuguacauuugggggguucaccacccggguacggacagugaccaaaucagccuauaugcucaagcaucaggaagaaucacagucucuaccaaaagaagccaacaaacuguaaucccgaauaucggaucuagacccaggguaagggauaucuccagccgaauaagcaucuauuggacaauaguaaaaccgggagacauacuuuugauuaacagcacagggaaucuaauugcuccucgggguuacuucaaaauacgaagugggaaaagcucaauaaugagaucagaugcacccauuggcaaaugcaauucugaaugcaucacuccaaauggaagcauucccaaugacaaaccauuucaaaauguaaacaggaucacauauggggccugucccagauauguuaagcaaaacacucugaaauuggcaacagggaugcgaaauguaccagagaaacaaacuagaggcauauuuggcgcaaucgcggguuucauagaaaaugguugggagggaaugguggacgguugguacgguuucaggcaucaaaauucugagggcacaggacaagcagcagaucucaaaagcacucaagcagcaaucaaccaaaucaaugggaaacugaauagguuaaucgggaaaacaaacgagaaauuccaucagauugaaaaagaauucucagaaguagaagggagaauucaggaccucgagaaauauguugaggacacuaaaauagaucucuggucauacaacgcggagcuucuuauugcccuggagaaccaacauacaauugaucuaacugacucagaaaugaacaaacuguuugaaagaacaaagaagcaacugagggaaaaugcugaggauaugggcaaugguuguuucaaaauauaccacaaaugugacaaugccugcauagggucaaucagaaauggaacuuaugaccaugauguguacagagaugaagcauuaaacaaccgguuccagaucaaagguguugagcugaagucaggauacaaagauuggauccuauggauuuccuuugccauaucauguuuuuugcuuuguguugcuuuguugggguucaucaugugggccugccaaaaaggcaacauuaggugcaacauuugcauuuga

SEQ ID NO: 32125 - RNA, 1701 nt, Artificial Sequence
  derived and/or modified CDS sequence (wt) from hemagglutinin__InfluenzaA__AAY18086
augaagacuaucauugcuuugagcuacauucuaugucugguuuucgcucaaaaacuucccggaaaugacaacagcacggcaacgcugugccuugggcaccaugcaguaccaaacggaacgauagugaaaacaaucacgaaugaccaaauugaaguuacuaaugcuacugagcugguacagaguuccucaacagguggaauaugcgacaguccucaucagauccuugauggagaaaacugcacacuaauagaugcucuauugggagacccucagugugauggcuuccaaaauaagaaaugggaccuuuuuguugaacgcagcaaagccuacagcaacuguuacccuuaugaugugccggauuaugccucccuuaggucacuaguugccucauccggcacacuggaguuuaacaaugaaagcuucgauuggacuggagucacucagaauggaacaagcucugcuugcaaaagaagauccaauaaaaguuucuuuaguagauugaauugguugacccacuuaaaauacaaauacccagcauugaacgugacuaugccaaacaaugaaaaauuugacaaauuguacauuugggggguucaccacccggguacggacagugaccaaaucagccuauaugcucaagcaucaggaagaaucacagucucuaccaaaagaagccaacaaacuguaaucccgaauaucggaucuagacccaggguaagggaugucucuagccgaauaagcaucuauuggacaauaguaaaaccgggagacauacuuuugauuaacagcacagggaaucuaauugcuccucgggguuacuucaaaauacgaagugggaaaagcucaauaaugagaucagaugcacccauuggcaaaugcaauuccgaaugcaucacuccaaauggaagcauucccaaugacaaaccauuucaaaauguaaacaggaucacauauggggccugucccagauauguuaagcaaaacacuuugaaauuggcaacagggaugcgaaauguaccagagaaacaaacuagaggcauauuuggcgcaaucgcgggcuucauagaaaaugguugggagggaaugguggacgguugguacgguuucaggcaucaaaauucugagggcacaggacaagcagcagaucucaaaagcacucaagcagcaaucaaccaaaucaaugggaaacugaauagguuaaucgggaaaacaaacgagaaauuccaucagauugaaaaagaauucucagaaguagaagggagaauucaggaccucgagaaauauguugaggacacuaaaauagaucucuggucauacaacgcggagcuucuuguugcccuggagaaccaacauacaauugaucuaacugacucagaaaugaacaaacuguuugaaagaacaaagaagcaacugagggaaaaugcugaggauaugggcaaugguuguuucaaaauauaccacaaaugugacaaugccugcauagggucaaucagaaauggaacuuaugaccaugauguguacagagaugaagcauuaaacaaccgguuccagaucaaagguguugagcugaagucaggauacaaagauuggauccuauggauuuccuuugccauaucauguuuuuugcuuuguguugcuuuguugggguucaucaugugggccugccaaaaaggcaacauuaggugcaacauuugcauuuga

SEQ ID NO: 32126 - RNA, 1701 nt, Artificial Sequence
  derived and/or modified CDS sequence (wt) from hemagglutinin__InfluenzaA__AAY18096
augaagacuaucauugcuuugagcugcauucuaugucugguuuucgcucaaaaacuucccggaaaugacaacagcacggcaacgcugugccuugggcaccaugcaguaccaaacggaacgauagugaaaacaaucacgaaugaccaaauugaagucacuaaugcuacugagcugguucagaguuccucaacagguggaauaugcgacaguccucaucagauccuugauggagaaaacugcacacuaauagaugcucuauugggagacccucagugugauggcuuccaaaauaagaaaugggaccuuuuuguugaacgcagcaaagccuacagcaacuguuacccuuaugaugugccggauuaugccucccuuaggucacuaguugccucauccggcacacuggaguuuaacaaugaaagcuucaauuggacuggagucacucagaauggaacaagcucugcuugcgaaaggagaucuaauaaaaguuucuuuaguagauugaauugguugacccacuuaaaauacaaauacccagcauugaacgugacuaugccaaacaaugaaaaauuugacaaauuguacauuugggggguucaccacccggguacggacagugaccaaaucagccuauaugcucaagcaucaggaagaaucacagucucuaccaaaagaagccaacaaacuguaaucccgaauaucggaucuagacccaggguaagggaugucuccagccgaauaagcaucuauuggacaauaguaaaaccgggagacauacuuuugauuaacagcacagggaaucuaauugcuccucgggguuacuucaaaauacgaagugggaaaagcucaauaaugagaucagaugcacccauuggcaaaugcaauucugaaugcaucacuccaaauggaagcauucccaaugacaaaccauuucaaaauguaaacaggauuacauauggggccugucccagauauguuaagcaaaacacucugaaauuggcaacagggaugcgaaauguaccagagaaacaaacuagaggcauauuuggcgcaaucgcggguuucauagaaaaugguugggagggaaugguggacgguugguacgguuucaggcaucaaaauucugagggcacaggacaagcagcagaucucaaaagcacucaagcagcaaucaaccaaaucaaugggaaacugaauagguuaaucgggaaaacaaacgagaaauuccaucagauugaaaaagaauucucagaaguagaagggagaauucaggaccucgagaaauauguugaggacacuaaaauagaucucuggucauacaacgcggagcuucuuguugcccuggagaaccaacauacaauugaucuaacugacucagaaaugaacaaacuguuugaaagaacaaagaagcaacugagggaaaaugcugaggauaugggcaaugguuguuucaaaauauaccacaaaugugacaaugccugcauagggucaaucagaaauggaacuuaugaccaugauguguacagagaugaagcauuaaacaaccgguuccagaucaaagguguugagcugaagucaggauacaaagauuggauccuauggauuuccuuugccauaucauguuuuuugcuuuguguugcuuuguugggguucaucaugugggccugccaaaaaggcaacauuaggugcgacauuugcauuuga

SEQ ID NO: 32127 - RNA, 1701 nt, Artificial Sequence
  derived and/or modified CDS sequence (wt) from hemagglutinin__InfluenzaA__AAY18106
augaagacuaucauugcuuugagcuacauuuuaugccugguuuucgcucaaaaacuucccggaaaugacaacagcacggcaacgcugugccuggggcaccaugcagugccaaacggaacgcuagugaaaacaaucacgaaugaccaaauugaaguaacuaaugcuacugagcugguucagaguuccucaacaaguagaauaugcgacaguccucaccaaauccuugauggagaaaacugcacacuaauagaugcucuauugggagacccucauugugauggcuuccaaaauaaggaaugggaccuuuuuguugaacgcagcaaagccuacagcaacuguuacccuuaugaugugccggauuaugucucccuuaggucacuaguugccucaucaggcacgcuggaguuuaacaaugaaagcuucaauuggacuggagucgcucagaauggaacaagcucugcuugcaaaaggagaucugauaaaaguuucuuuaguagauugaauugguugcaccaauuaaaauacaaauauccagcacugaacgugacuaugccaaacaaugaaaaauuugacaaauuguacauuugggggguucaccacccgggcacagacagugaccaaaucagccuauaugcucaagcaucagggagagucacagucucuaccaaaagaagccaacaaacuguaaucccgaauaucggaucuagacccuggguaaggggugucuccagcagaauaagcaucuauuggacaauaguaaaaccgggagacauacuuuugauuaacagcacagggaaucuaauugcuccucgggguuacuucaaaauacgaagugggaaaagcucaauaaugaggucagaugcacccauuggcaaaugcaauucugaaugcaucacuccaaauggaagcauucccaaugacaaaccauuucaaaauguaaacaggaucacauauggggccugucccagauauguuaagcaaaacacucugaaauuggcaacagggaugcggaauguaccagagaaacaaacuagaggcauauucggugcaaucgcgggcuucauagaaaaugguugggagggaaugauggacgguugguacgguuucaggcaucaaaauucugagggcacagggcaagcagcagaucuuaaaagcacucaagcagcaaucaaccaaaucaacgggaaacugaauagauuaaucgagaaaacgaacgagaaauuccaucaaauugaaaaagaauucucagaaguagaagggagaauucaggaccucgagaaauauguugaggacacuaaaauagaucucuggucguacaaugcggagcuucuuguugcccuggagaaccaacauacaauugaucuaacugacucagaaaugaacaaacuguuugaaagaacaaagaagcaacugagggaaaaugcugaggauaugggcaaugguuguuucaaaauauaccacaaaugugacaaugccugcauagggucaaucagaaauggaacuuaugaccaugauguauacagagacgaagcauugaacaaccgguuccagaucaaagguguugagcugaagucaggauacaaagauuggauccuauggauuuccuuugccauaucauguuuuuugcuuuguauuguuuugcugggguucaucaugugggccugccaaaaaggcaacauuaggugcaacauuugcauuuga

SEQ ID NO: 32128 - RNA, 1701 nt, Artificial Sequence
  derived and/or modified CDS sequence (wt) from hemagglutinin__InfluenzaA__AAY18116
augaagacuaucauugcuuugagcuacauuuuaugccugguuuucgcucaaaaacuucccggaaaugacaacagcacggcaacgcugugccuggggcaccaugcagugccaaacggaacgcuagugaaaacaaucacgaaugaccaaauugaaguaacuaaugcuacugagcugguucagaguuccucaacaaguagaauaugcgacaguccucaccaaauccuugauggagaaaacugcacacuaauagaugcucuauugggagacccucauugugauggcuuccaaaauaaggaaugggaccuuuuuguugaacgcagcaaagccuacagcaacuguuacccuuaugaugugccggauuaugucucccuuaggucacuaguugccucaucaggcacgcuggaguuuaacaaugaaagcuucaauuggacuggagucgcucagaauggaacaagcucugcuugcaaaaggagaucugauaaaaguuucuuuaguagauugaauugguugcaccaauuaaaauacaaauauccagcacugaacgugacuaugccaaacaaugaaaaauuugacaaauuguacauuugggggguucaccacccggguacagacagugaccaaaucagccuauaugcucaagcaucagggagagucacagucucuaccaagagaagccaacaaacuguaaucccgaauaucggaucuagacccuggguaaggggugucuccagcagaauaagcaucuauuggacaauaguaaaaccgggagacauacuuuugauuaacagcacagggaaucuaauugcuccucgggguuacuucaaaauacgaagugggaaaagcucaauaaugagguccgaugcacccauuggcaaaugcaauucugaaugcaucacuccaaauggaagcauucccaaugacaaaccauuucaaaauguaaacaggaucacauauggggccugucccagauauguuaagcaaaacacucugaaauuggcaacagggaugcggaauguaccagagaaacaaacuagaggcauauucggugcaaucgcgggcuucauagaaaaugguugggagggaaugauggacgguugguacgguuucaggcaucaaaauucugagggcacagggcaagcagcagaucuuaaaagcacucaagcagcaaucaaccaaaucaacgggaaacugaauagguuaaucgagaaaacgaacgagaaauuccaucaaauugaaaaagaauucucagaaguagaagggagaauucaggaccucgagaaauauguugaggacacuaaaauagaucucuggucguacaaugcggagcuucuuguugcccuggagaaccaacauacaauugaucuaacugacucagaaaugaacaaacuguuugaaagaacaaagaagcaacugagggaaaaugcugaggauaugggcaaugguuguuucaaaauauaccacaaaugugacaaugccugcauagggucaaucagaaauggaacuuaugaccaugauguauacagagacgaagcauugaacaaccgauuccagaucaaagguguugagcugaagucaggauacaaagauuggauccuauggauuuccuuugccauaucauguuuuuugcuuuguauuguuuugcugggguucaucaugugggccugccaaaaaggcaacauuaggugcaacauuugcauuuga

SEQ ID NO: 32129 - RNA, 1701 nt, Artificial Sequence
  derived and/or modified CDS sequence (wt) from hemagglutinin__InfluenzaA__AAY18126
augaagacuaucauugcuuugagcuacauucuaugucugguuuucgcucaaaaacuucccggaaaugacaacagcacggcaacgcugugccuugggcaccaugcaguaccaaacggaacgauagugaaaacaaucacgaaugaccaaauugaaguuacuaaugcuacugagcugguccagaguuccucaacagguggaauaugcgacaguccucaucagauccuugauggagaaaacugcacacuaauagaugcucuauugggagacccucagugugauggcuuccaaaauaagaaaugggaccuuuuuguugaacgcagcaaagccuacagcaacuguuacccuuaugaugugccggauuaugccucccuuaggucacuaguugccucauccggcacacuggaguuuaacaaugaaggcuucaacuggacuggagucacucagaauggaacaagcucugcuugcaaaaggaaaucuaauaaaaguuucuuuaguagauugaauugguugacccacuuaaaauacaaauacccagcauugaacgugacuaugccaaacaaugaaaaauuugacaaauuguacauuugggggguucaccacccggguacggacaaugaccaaaucagccuguaugcucaagcaucaggaagaaucacagucucuaccaaaagaagccaacaaacuguaaucccgaauaucggaucuagacccaggguaagggacgucuccagcagaauaagcaucuauuggacaauaguaaaaccgggagacauacuuuugauuaacagcacagggaaucuaauugcuccucgggguuacuucaaaauacgaagugggaaaagcucaauaaugagaucagaugcacccauuggaaaaugcaauucugaaugcaucacuccaaauggaagcauucccaaugacaaaccauuucaaaauguaaacaggaucacauauggggccugucccagauauguuaagcaaaacacucugaaauuggcaacagggaugcgaaauguaccagagaaacaaacuagaggcauauuuggcgcaaucgcggguuucauagaaaaugguugggagggaaugguggacgguugguacgguuucaggcaucaaaauucugagggcacaggacaagcagcagaucucaaaagcacucaagcagcaaucaaccaaaucaaugggaaacugaauagguuaaucgggaaaacaaacgagaaauuccaucagauugaaaaagaauucucagaaguagaggggagaauucaggaccucgagaaauauguugaggacacuaaaauagaucucuggucauacaacgcggagcuucuuguugcccuggagaaccaacauacaauugaucuaacugacucagaaaugaacaaacuguuugaaagaacaaagaagcaacugagggaaaaugcugaggauaugggcaaugguuguuucaaaauauaccacaaaugugacaaugccugcauagggucaaucagaaauggaacuuaugaccaugauguauacagagaugaagcauuaaacaaccgguuccagaucaaagguguugagcugaagucaggauacaaagauuggauccuauggauuuccuuugccauaucauguuuuuugcuuuguguugcuuuguugggguucaucaugugggccugccaaaaaggcaacauuaggugcaacauuugcauuuga

SEQ ID NO: 32130 - RNA, 1701 nt, Artificial Sequence
  derived and/or modified CDS sequence (wt) from hemagglutinin__InfluenzaA__AAY18136
augaagacuaucauugcuuugagcuacauucuaugucugguuuucgcucaaaaacuucccggaaaugacaacagcacggcaacgcugugccuugggcaccaugcaguaccaaacggaacgauagugaaaacaaucacgaaugaccaaauugaaguuacuaaugcuacugagcugguacagaguuccucaacagguggaauaugcgacaguccucaucagauccuugauggagaaaacugcacacuaauagaugcucuauugggagacccucagugugauggcuuccaaaauaagaaaugggaccuuuuuguugaacgcagcaaagccuacagcaacuguuacccuuaugaugugccggauuaugccucccuuaggucacuaguugccucauccggcacacuagaguuuaacaaugaaagcuucgauuggacuggagucacucagaauggaacaagcucugcuugcaaaaggagaucuaauaaaaguuucuuuaguagauugaauugguugacccacuuaaaauacaaauacccagcauugaacgugacuaugccaaacaaugaaaaauuugacaaauuguacauuugggggguucaccacccggguacggacagugaccaaaucagccuauaugcucaagcaucaggaagaaucacagucucuaccaaaagaagccaacaaacuguaaucccgaauaucggaucuagacccaggguaagggaugucuccagccgaauaagcaucuauuggacaauaguaaaaccgggagacauacuuuugauuaacagcacagggaaucuaauugcuccucgggguuacuucaaaauacgaagugggaaaagcucaauaaugagaucagaugcacccauuggcaaaugcaauucugagugcaucacuccaaauggaagcauucccaaugacaaaccauuucaaaauguaaacaggaucacauauggggccugucccagauauauuaagcaaaacacucugaaauuggcaacagggaugcgaaauguaccagagaaacaaacuagaggcauauuuggcgcaaucgcggguuucauagaaaaugguugggagggaaugguggacgguugguacgguuucaggcaucaaaauucugagggcacagggcaagcagcagaucucaaaagcacucaagcagcaaucaaccaaaucaaugggaaacugaauagguuaaucgggaaaacaaacgagaaauuccaucagauugaaaaagaauucucagaaguagaagggagaauucaggaccucgagaaauauguugaggacacuaaaauagaucucuggucauacaacgcggagcuucuuguugcccuggagaaccaacauacaauugaucuaacugacucagaaaugaacaaacuguuugaaagaacaaagaagcaacugagggaaaaugcugaggauaugggcaaugguuguuucaaaauauaccacaaaugugacaaugccugcauagggucaaucagaaauggaacuuaugaccaugauguguacagagaugaagcauuaaacaaccgguuccagaucaaagguguugagcugaagucaggauacaaagauuggauccuauggauuuccuuugccauaucauguuuuuugcuuuguguugcuuuguugggguucaucaugugggccugccaaaaaggcaacauuaggugcaacauuugcauuuga

SEQ ID NO: 32131 - RNA, 1701 nt, Artificial Sequence; identical to SEQ ID NO: 32100
  derived and/or modified CDS sequence (wt) from hemagglutinin__InfluenzaA__AAY18156

SEQ ID NO: 32132 - RNA, 1701 nt, Artificial Sequence
  derived and/or modified CDS sequence (wt) from hemagglutinin__InfluenzaA__AAY18176
augaagacuaucauugcuuugagcuacauuuuaugucugguuuucgcucaaaaacuucccguaaaugacaacagcacggcaacgcugugccugggacaccaugcagugccaaacggaacgcuagugaaaacaaucacgaaugaccacauugaagugacuaaugcuacugagcugguucagaguuccucaacagguagaauaugcgacaguccucaccaaauccuugauggagaaaacugcacacuaauagaugcucuauugggagacccucauugugauggcuuccaaaauaaggaaugggaccuuuuuguugaacgcagcacagccuacagcaacuguuacccuuaugaugugccggauuaugccucccuuaggucacuaguugccucauccggcacacuggaguuuaacaaugaaagcuucaauuggacuggagucgcucagaauggaacaagcucugcuugcaaaaggagaucuauuaaaaguuucuuuaguagauugaauugguugcaccaauuaaaauacaaauauccagcacugaacgugacuaugccaaacaaugaaaaauuugacaaauuguacauuugggggguucaccacccgaguacggacagugaccaaaucagccuauaugcucaagcaucagggagagucacagucucuaccaaaagaagccaacaaacuguaaucccgaauaucggaucuagacccuggguaaggggugucuccagcagaauaagcaucuauuggacaauaguaaaaccgggagacauacuuuugauuaacagcacagggaaucuaauugcuccucgggguuacuuuaaaauacgaagugggaaaagcucaauaaugaggucaaaugcacccauuggcaaaugcaauucugaaugcaucacuccaaauggaagcauucccaaugacaaaccauuucaaaauguaaacaggaucacauauggggccugucccagauauguuaagcaaaacacucugaaauuggcaacagggaugcggaauguaccagagaaacaaacuagaggcauauucggcgcaaucgcggguuucauagaaaaugguugggagggaaugguggacgguugguacgguuucaggcaucaaaauucugagggcacaggacaagcagcagaucuuaaaagcacucaagcagcaaucaaccaaaucaacgggaaacugaauagguuaaucgagaaaacaaaugagaaauuccaucaaauugaaaaagaauucucagaaguagaagggagaauucaggaccucgagaaauauguugaggacacuaaaauagaucucuggucguacaacgcggagcuucuuguugcccuggagaaccaacauacaauugaucuaacugacucagaaaugaacaaacuguuugaaagaacaaggaagcaacugagggaaaaugcugaggauaugggcaaugguuguuucaaaauauaccacaaaugugacaaugccugcauagggucaaucagaaauggaacuuaugaccaugauguauacagagacgaagcauuaaacaaccgguuccagaucaaagguguugagcugaagucaggauacaaagauuggauccuauggauuuccuuugccauaucauguuuuuugcuuuguguuguuuugcugggguucaucaugugggccugccaaaaaggcaacauuaggugcaacauuugcauuuga

SEQ ID NO: 32133 - RNA, 1701 nt, Artificial Sequence; identical to SEQ ID NO: 32084
  derived and/or modified CDS sequence (wt) from hemagglutinin__InfluenzaA__AAY18186

SEQ ID NO: 32134 - RNA, 1701 nt, Artificial Sequence
  derived and/or modified CDS sequence (wt) from hemagglutinin__InfluenzaA__AAY18564
augaagacuaucauugcuuugagcuacauucuaugucugguuuucgcucaaaaacuucccggaaaugacaacagcacggcaacgcuaugccucgggcaccaugcaguaccaaacggaacgauagugaaaacaaucacgaaugaccaaauugaaguuacuaaugcuacugagcugguucagauuuccucaacagguggaauaugcgacaguccucaucagauccuugauggagaaaacugcacacuaauagaugcucuauugggagacccucagugugauggcuuccaaaauaagaaaugggaccuuuuuguugaacgcagcaaagccuacagcaacuguuacccuuaugaugugccggauuaugccucccuuaggucacuaguugccucauccggcacacuggaguuuaacaaugaaagcuucgauuggacuggagucacucagaauggaacaagcucugcuugcaaaaggagaucuaauaaaaguuucuuuaguagauugaauugguugacccacuuaaaauacaaauacccagcauugaacgugacuaugccaaacaaugaaaaauuugacaaauuguacauuugggggguucaccacccggguacggacagugaccaaaucagccuauaugcucaagcaucaggaagaaucacagucucuaccaaaagaagccaacaaacuguaaucccgaauaucggaucuagacccaggguaagggaugucuccagccgaauaagcaucuauuggacaauaguaaaaccgggagacauacuuuugauuaacagcacagggaaucuaauugcuccucgggguuacuucaaaauacgaagugggaaaagcucaauaaugagaucagaugcacccauuggcaaaugcaauucugaaugcaucacuccaaauggaagcauucccaaugacaaaccauuucaaaauguaaacaggaucacauauggggccugucccagauauguuaagcaaaacacucugaaauuggcaacagggaugcgaaauguaccagagaaacaaacuagaggcauauuuggcgcaaucgcggguuucauagaaaaugguugggagggaaugguggacgguugguacgguuucaggcaucaaaauucugagggcacaggacaagcagcagaucucaaaagcacucaagcagcaaucaaccaaaucaaugggaaacugaauagguuaaucgggaaaacaaacgagaaauuccaucagauugaaaaagaauucucggaaguagaaggaagaauucaggaccucgagaaauauguugaggacacuaaaauagaucucuggucauacaacgcggagcuucuuguugcccuggagaaccaacauacaauugaucuaacugacucagaaaugaacaaacuguuugaaagaacaaagaagcaacugagggaaaaugcugaggauaugggcaaugguuguuucaaaauauaccacaaaugugacaaugccugcauagggucaaucagaaauggaacuuaugaccaugauguguacagagaugaagcauuaaacaaccgguuccagaucaaagguguugagcugaagucaggauacaaagauuggauccuauggauuuccuuugccauaucauguuuuuugcuuuguguugcuuuguugggguucaucaugugggccugccaaaaaggcaacauuaggugcaacauuugcauuuga

SEQ ID NO: 32135 - RNA, 1701 nt, Artificial Sequence
  derived and/or modified CDS sequence (wt) from hemagglutinin__InfluenzaA__AAY18585
augaagacuaucauugcuuugagcuacauuuuaugucugguuuucgcucaaaaacuucccgaaaaugacaacagcacggcaacgcugugccuggggcaccaugcagugccaaacggaacgcuagugaaaacaaucacgaaugaccaaauugaagugacuaaugcuacugagcugguucagaguuccucaacagguagaauaugcgacaguccucaccaaauccuugauggagaaaacugcacacuaauagaugcucuauugggagacccucauugugauggcuuccaaaauaaggaaugggaccuuuuuguugaacgcagcaaagccuacagcaacuguuacccuuaugaugugccggauuaugucucccuuaggucacuaguugccucaucaggcacgcuggaguuuaacaaugaaagcuucaauuggacuggagucgcucagaauggaacaagcucugcuugcaaaaggagaucugauaaaaguuucuuuaguagauugaauugguugcaccaauuaaaauacaaauauccagcacugaacgugacuaugccaaacaaugaaaaauuugacaaauuguacauuugggggguucaccacccggguacagacagugaccaaaucagccuauaugcucaagcaucagggagagucacagucucuaccaaaagaagccaacaaacuguaaucccgaauaucggaucuagacccuggguaaggggugucuccagcagaauaagcaucuauuggacaauaguaaaaccgggagacauacuuuugauuaacagcacagggaaucuaauugcuccucgggguuacuucaaaauacgaagugggaaaagcucaauaaugaggucagaugcacccauuggcaaaugcaauucugaaugcaucacuccaaauggaagcauucccaaugacaaaccauuucaaaauguaaacaggaucacauaugggcccugucccagauauguuaagcaaaacacucugaaauuggcaacagggaugcggaaugugccagagaaacaaacuagaggcauauucggugcaaucgcgggcuucauagaaaaugguugggagggaaugauggacgguugguacgguuucaggcaucaaaauucugagggcacagggcaagcagcagaucuuaaaagcacucaagcagcaaucaaccaaaucaacgggaaacugaauagguuaaucgagaaaacgaacgagaaauuccaucaaauugaaaaggaauucucagaaguagaagggagaauucaggaccucgagaaauauguugaggacacuaaaauagaucucuggucguacaaugcggagcuucuuguugcccuggagaaccaacauacaauugaucuaacugacucagaaaugaacaaacuguuugaaagaacaaagaagcaacugagggaaaaugcugaggauaugggcaaugguuguuucaaaauauaccacaaaugugacaaugccugcauagggucaaucagaaauggaacuuaugaccaugauguauacagagacgaagcauugaacaaccgguuccagaucaaagguguugagcugaagucaggauacaaagauuggauccuauggauuuccuuugccauaucauguuuuuugcuuuguauuguuuugcugggguucaucaugugggccugccaaaaaggcaacauuaggugcaacauuugcauuuga

SEQ ID NO: 32136 - RNA, 1701 nt, Artificial Sequence; identical to SEQ ID NO: 32048
  derived and/or modified CDS sequence (wt) from hemagglutinin__InfluenzaA__AAY18611

SEQ ID NO: 32137 - RNA, 1701 nt, Artificial Sequence; identical to SEQ ID NO: 32088
  derived and/or modified CDS sequence (wt) from hemagglutinin__InfluenzaA__AAY27843

SEQ ID NO: 32138 - RNA, 1701 nt, Artificial Sequence
  derived and/or modified CDS sequence (wt) from hemagglutinin__InfluenzaA__AAY27853
augaagacuaucauugcuuugagcuacauucuaugucugguuuucgcucaaaaacuucccggaaaugacaacagcacggcaacgcugugccuugggcaccaugcagugccaaacggaacgauagugaaaacaaucacgaaugaccaaauugaaguuacuaaugcuacugagcugguacagaguuccucaacagguggaauaugcgacaguccucaucagauccuugauggagaaaacugcacacuaauagaugcucuauugggagacccucagugugauggcuuccaaaauaagaaaugggaccuuuuuguugaacgcagcaaagccuacagcaacuguuacccuuaugaugugccggauuaugccucccuuaggucacuaguugccucauccggcacacuggaguuuaacaaugaaagcuucgauuggacuggagucacucagaauggaacaagcucugcuugcaaaaggagaucuaauaaaaguuucuuuaguagauugaauugguugacccacuuaaaauacaaauacccagcauugaacgugacuaugccaaacaaugaaaaauuugacaaauuguacauuugggggguucaccacccggguacggacagugaccaaaucagccuauaugcucaagcaucaggaagaaucacagucucuaccaaaagaagccaacaaacuguaaucccgaauaucggaucuagacccaggguaagggaugucuccagccgaauaagcaucuauuggacaauaguaaaaccgggagacauacuuuugauuaacagcacagggaaucuaauugcuccucgggguuacuucaaaauacgaagugggaaaagcucaauaaugagaucagaugcacccauuggcaaaugcaauuccgaaugcaucacuccaaauggaagcauucccaaugacaaaccauuucaaaauguaaacaggaucacauauggggccugucccagauauguuaagcaaaacacuuugaaauuggcaacagggaugcgaaauguaccagagaaacaaacuagaggcauauuuggcgcaaucgcgggcuucauagaaaaugguugggagggaaugguggacgguugguacgguuucaggcaucaaaauucugagggcacaggacaagcagcagaucucaaaagcacucaagcagcaaucaaccaaaucaaugggaaacugaauagguuaaucgggaaaacaaacgagaaauuccaucagauugaaaaagaauucucagaaguagaagggagaauucaggaccucgagaaauauguugaggacacuaaaauagaucucuggucauacaacgcggagcuucuuguugcccuggagaaccaacauacaauugaucuaacugacucagaaaugaacaaacuguuugaaagaacaaagaagcaacugagggaaaaugcugaggauaugggcaaugguuguuucaaaauauaccacaaaugugacaaugccugcauagggucaaucagaaauggaacuuaugaccaugauguguacagagaugaagcauuaaacaaccgguuccagaucaaagguguugagcugaagucaggauacaaagauuggauccuauggauuuccuuugccauaucauguuuuuugcuuuguguugcuuuguugggguucaucaugugggccugccaaaaaggcaacauuaggugcaacauuugcauuuga

SEQ ID NO: 32139 - RNA, 1701 nt, Artificial Sequence
  derived and/or modified CDS sequence (wt) from hemagglutinin__InfluenzaA__AAY27863
augaagacuaucauugcuuugagcuacauucuaugucugguuuucgcucaaaaacuucccggaaaugacaacagcacggcaacgcugugccuugggcaccaugcaguaccaaacggaacgauagugaaaacaaucacgaaugaccaaauugaaguuacuaaugcuacugagcugguacagaguuccucaacagguggaauaugcgacaguccucaucagaucauugauggagaaaacugcacacuaauagaugcucuauugggagacccucagugugauggcuuccaaaauaagaaaugggaccuuuuuguugaacgcagcaaagccuacagcaacuguuacccuuaugaugugccggauuaugccucccuuaggucacuaguugccucauccggcacacuggaguuuaacaaugaaagcuucgauuggacuggagucacucagaauggaacaagcucugcuugcaaaaggagaucuaauaaaaguuucuuuaguagauugaauugguugacccacuuaaaauacaaauacccagcauugaacgugacuaugccaaacaaugaaaaauuugacaaauuguacauuugggggguucaccacccggguacggacagugaccaaaucagccuauaugcucaagcaucaggaagaaucacagucucuaccaaaagaagccaacaaacuguaaucccgaauaucggaucuagacccaggguaagggaugucuccagccgaauaagcaucuauuggacaauaguaaaaccgggagacauacuuuugauuaacagcacagggaaucuaauugcuccucgggguuacuucaaaauacgaagugggaaaagcucaauaaugauaucagaugcacccauuggcaaaugcaauuccgaaugcaucacuccaaauggaagcauucccaaugacaaaccauuucaaaauguaaacaggaucacauauggggccugucccagauauguuaagcaaaacacucugaaauuggcaacagggaugcgaaauguaccagagaaacaaacuagaggcauauuuggcgcaaucgcggguuucauagaaaaugguugggagggaaugguggacgguugguacgguuucaggcaucaaaauucugagggcacaggacaagcagcagaucucaaaagcacucaagcagcaaucaaccaaaucaaugggaaacugaauagguuaaucgggaaaacaaacgagaaauuccaucagauugaaaaagaauucucagaaguagaagggagaauucaggaccucgagaaauauguugaggacacuaaaauagaucucuggucauacaacgcggagcuucuuguugcccuggagaaccaacauacaauugaucuaacugacucagaaaugaacaaacuguuugaaagaacaaagaagcaacugagggaaaaugcugaggauaugggcaaugguuguuucaaaauauaccacaaaugugacaaugccugcauagggucaaucagaaauggaacuuaugaccaugauguguacagagaugaagcauuaaacaaccgguuccagaucaaagguguugagcugaagucaggauacaaagauuggauccuauggauuuccuuugccauaucauguuuuuugcuuuguguugcuuuguugggguucaucaugugggccugccaaaaaggcaacauuaggugcaacauuugcauuuga

SEQ ID NO: 32140 - RNA, 1701 nt, Artificial Sequence
  derived and/or modified CDS sequence (wt) from hemagglutinin__InfluenzaA__AAY27959
augaagacuaucauugcuuugagcuacauuuuaugccugguuuucgcucaaaaacuucccggaaaugacaacagcacggcaacgcugugccuggggcaucaugcagugccaaacggaacgcuagugaaaacaaucacgaaugaccaaauugaaguaacuaaugcuacugagcugguucagaguuccucaacagguagaauaugcgacaguccucaccaaauccuugauggagaaaacugcacacuaauagaugcucuauugggagacccucauugugauggcuuccaaaauaaggaaugggaccuuuuuguugaacgcagcaaagccuacagcaacuguuacccuuaugauguaccggauuaugucucccuuaggucacuaguugccucaucaggcacgcuggaguuuaacaaugaaagcuucaauuggacuggagucgcucagaauggaacaagcucugcuugcaaaaggagaucugauaaaaguuucuuuaguagauugaauugguugcaccaauuaaaauacaaauauccagcacugaacgugacuaugccaaacaaugaaaaauuugacaaauuguacauuugggggguucaccacccggguacagacagugaccaaaucagccuauaugcucaagcaucagggagagucacagucucuaccaaaagaagccaacaaacuguaaucccgaauaucggaucuagacccuggguaaggggugucuccagcagaauaagcaucuauuggacaauaguaaaaccgggagacauacuuuugauuaacagcacagggaaucuaauugcuccucgggguuacuucaaaauacgaagugggaaaagcucaauaaugaggucagaugcacccauuggcaaaugcaauucugaaugcaucacuccaaauggaagcauucccaaugacaaaccauuucaaaauguaaacaggaucacauaugggccuugucccagauauguuaagcaaaacacucugaaauuggcaacagggaugcggaaugugccagagaaacaaacuagaggcauauucggugcaaucgcgggcuucauagaaaaugguugggagggaaugauggacgguugguacgguuucaggcaucaaaauucugagggcacagggcaagcagcagaucuuaaaagcacucaagcagcaaucaaccaaaucaacgggaaacugaauagguuaaucgagaaaacgaacgagaaauuccaucaaauugaaaaagaauucucagaaguagaagggagaauucaggaccucgagaaauauguugaggacacuaaaauagaucucuggucguacaaugcggagcuucuuguugcccuggagaaccaacauacaauugaucuaacugacucagaaaugaacaaacuguuugaaagaacaaagaagcaacugagggaaaaugcugaggauaugggcaaugguuguuucaaaauauaccacaaaugugacaaugccugcauagggucaaucagaaauggaacuuaugaccaugauguauacagagacgaagcauugaacaaccgguuccagaucaaagguguugagcugaagucaggauacaaagauuggauccuauggauuuccuuugccauaucauguuuuuugcuuugcauuguuuugcugggguucaucaugugggccugccaaaaaggcaacauuaggugcaacauuugcauuuga

SEQ ID NO: 32141 - RNA, 1701 nt, Artificial Sequence; identical to SEQ ID NO: 32043
  derived and/or modified CDS sequence (wt) from hemagglutinin__InfluenzaA__AAY27994

SEQ ID NO: 32142 - RNA, 1701 nt, Artificial Sequence; identical to SEQ ID NO: 32043
  derived and/or modified CDS sequence (wt) from hemagglutinin__InfluenzaA__AAY28004

SEQ ID NO: 32143 - RNA, 1701 nt, Artificial Sequence; identical to SEQ ID NO: 32043
  derived and/or modified CDS sequence (wt) from hemagglutinin__InfluenzaA__AAY28265

SEQ ID NO: 32144 - RNA, 1701 nt, Artificial Sequence
  derived and/or modified CDS sequence (wt) from hemagglutinin__InfluenzaA__AAY28275
augaagacuaucauugcuuugagcuacauuuuaugucugguuuucgcucaaaaacuucccggaaaugacaacagcacggcaacgcugugccuggggcaccaugcagugccaaacggaacgcuagugaaaacaaucacgaaugaccaaauugaagugacuaaugcuacugagcugguucagaguuccucaacagguagaauaugcgacaguccucaccaaauccuugauggagaaaacugcacacuaauagaugcucuauugggagacccucauugugauggcuuccaaaauaaggaaugggaccuuuucguugaacgcagcaaagccuacagcaacuguuacccuuaugaugugccggauuaugccucccuuaggucacuaguugccucauccggcacacuggaguuuaacaaugaaagcuucaauuggacuggagucgcucagaauggaacaagcucugcuugcaaaaggaggucuaauaaaaguuucuuuaguagauugaauugguugcaccaauugaaauacaaauacccagcacugaacgugacuaugccaaacaaugaaaaauuugacaaauuguacauuugggggguucaccacccgaguacggacagugaccaaaucagccuauaugcucaagcaucagggagagucacagucucuaccaaaagaagccaacagacuguaaucccgaauaucggaucuagacccuggguaaggggugucuccagcagaauaagcaucuauuggacaauaguaaaaccgggagacauacuuuugauuaacagcacagggaaucuaauugcuccucgggguuacuucaaaauacgaagugggaaaagcucaguaaugaggucagaugcauccauuggcaaaugcaauucugaaugcaucacuccaaauggaagcauucccaaugacaaaccauuucaaaauguaaacaggaucacauauggggccugucccagauauguuaagcaaaacacucugaaauuggcaacagggaugcggaauguaccagagaaacaaacuagaggcauauucggugcaaucgcggguuucauagaaaaugguugggagggaaugguggacgguugguacgguuucaggcaucaaaauucugagggcacaggacaagcagcagaucuuaaaagcacucaagcagcaaucaaccaaaucaacgggaaacugaauagguuaaucgagaaaacgaacgagaaauuccaucaaauugaaaaagaauucucagaaguagaagggagaauucaggaccucgagaaauauguugaggacacuaaaauagaucucuggucguacaacgcggagcuucuuguugcccuggagaaccaacauacaauugaucuaacugacucagaaaugaacaaacuguuugaaagaacaaagaagcaacugagggaaaaugcugaggauaugggcaauggcuguuucaaaauauaccacaaaugugacaaugccugcauagggucaaucagaaauggaacuuaugaccaugauguauacagagacgaagcauuaaacaaccgguuccagaucaaagguguugagcugaagucaggauacaaagauuggauccuauggauuuccuuugccauaucauguuuuuugcuuuguguuguuuugcugggguucaucaugugggccugccaaaaaggcaacauuaggugcaacauuugcauuuga

SEQ ID NO: 32145 - RNA, 1701 nt, Artificial Sequence
  derived and/or modified CDS sequence (wt) from hemagglutinin__InfluenzaA__AAY28285
augaagacuaucauugcuuugagcuacauuuuaugucugguuuucgcucaaaaacuucccggaaaugacaacagcacggcaacgcugugccuggggcaccaugcagugccaaacggaacgcuagugaaaacaaucacgaaugaccaaauugaagugacuaaugcuacugagcugguucagaauuccucaacagguagaauaugcgacaguccucaccaaauccuugauggagaaaacugcacacuaauagaugcucuauugggagacccucauugugauggcuuccaaaauaaggaaugggaccuuuuuguugaacgcagcaaagccuacagcaacuguuacccuuaugaugugccggauuaugucucccuuaggucacuaguugccucaucaggcacgcuggaguuuaacaaugaaagcuucaauuggacuggagucgcucagaaugggacaagcucugcuugcaaaaggagaucugauaaaaguuucuuuaguagauugaauugguugcaccaauuaaaauacaaauauccagcacugaacgugacuaugccaaacaaugaaaaauuugacaaauuguacauuugggggguucaccacccggguacagacaaugaccaaaucagccuauaugcucaagcaucagggagagucacagucucuaccaaaagaagccaacaaacuguaaucccgaauauuggaucuagacccuggguaaggggugucuccagcagaauaagcaucuauuggacaauaguaaaaccgggagacauacuuuugauuaacagcacagggaaucuaauugcuccucgggguuacuucaaaauacgaagugggaaaagcucaauaaugaggucagaugcacccauuggcaaaugcaauucugaaugcaucacuccaaauggaagcauucccaaugacaaaccauuucaaaauguaaacaggaucacauaugggcccugucccagauauguuaagcaaaacacucugaaauuggcaacagggaugcggaaugugccagagaaacaaacuagaggcauauucggugcaaucgcgggcuucauagaaaaugguugggagggaaugauggacgguugguacgguuucaggcaucaaaauucugagggcacagggcaagcagcagaucuuaaaagcacucaagcagcaaucaaccaaaucaacgggaaacugaauagguuaaucgagaaaacgaacgagaaauuccaucaaauugaaaaagaauucucagaaguagaagggagaauucaggaccucgagaaauauguugaggacacuaaaauagaucucuggucguacaaugcggagcuucuuguugcccuggagaaccaacauacaauugaucuaacugacucagaaaugaacaaacuguuugaaagaacaaagaagcaacugagggaaaaugcugaggauaugggcaaugguuguuucaaaauauaccacaaaugugacaaugccugcauagggucaaucagaaauggaacuuaugaccaugauguauacagagacgaagcauugaacaaccgauuccagaucaaagguguugagcugaagucaggauacaaagauuggauccuauggauuuccuuugccauaucauguuuuuugcuuuguauuguuuugcugggguucaucaugugggccugccaaaaaggcaacauuaggugcaacauuugcauuuga

SEQ ID NO: 32146 - RNA, 1701 nt, Artificial Sequence
  derived and/or modified CDS sequence (wt) from hemagglutinin__InfluenzaA__AAY28295
augaagacuaucauugcuuugagcuacauucuaugucugguuuucgcucaaaaacuucccggaaaugacaacagcacggcaacgcugugccuugggcaccaugcaguaccaaacggaacgauagugaaaacaaucacgaaugaccaaauugaaguuacuaaugcuacugagcugguacagaguuccucaacagguggaauaugcgacaguccucaucagauccuugauggagaaaacugcacacuaauagaugcucuauugggagacccucagugugauggcuuccaaaauaagaaaugggaccuuuuuguugaacgcagcaaagccuacagcaacuguuacccuuaugaugugccggauuaugccucccuuaggucacuaguugccucauccggcacacuggaguuuaacaaugaaagcuucgauuggacuggagucacucagaauggaacaagcucugcuugcaaaaggagaucuaauaaaaguuucuuuaguagauugaauugguugacccacuuaaaauacaaauacccagcauugaacgugacuaugccaaacaaugaaaaauuugacaaauuguacauuugggggguucaccacccggguacggacagugaccaaaucagccuauaugcucaagcaucaggaaaaaucacagucucuaccaaaagaagccaacaaacuguaaucccgaauaucggaucuagacccaggguaagggaugucuccagccgaauaagcaucuauuggacaauaguaaaaccgggagacauacuuuugauuaacagcacagggaaucuaauugcuccucgggguuacuucaaaauacaaagugggaaaagcucaauaaugagaucagaugcacccauuggcaaaugcaauuccgaaugcaucacuccaaauggaagcauucccaaugacaaaccauuucaaaauguaaacaggaucacauauggggccugucccagauauguuaagcaaaaaacucugaaauuggcaacagggaugcgaaauguaccagagaaacaaacuagaggcauauuuggcgcaaucgcggguuucauagaaaaugguugggagggaaugguggacgguugguacgguuucaggcaucaaaauucugagggcacaggacaagcagcagaucucaaaagcacucaagcagcaaucaaccaaaucaaugggaaacugaauagguuaaucgggaaaacaaacgagaaauuccaucagauugaaaaagaauucucagaaguagaagggagaauucaggaccucgagaaauauguugaggacacuaaaauagaucucuggucauacaacgcggagcuucuuguugcccuggagaaccaacauacaauugaucuaacugacucagaaaugaacaaacuguuugaaagaacaaagaagcaacugagggaaaaugcugaggauaugggcaaugguuguuucaaaauauaccacaaaugugacaaugccugcauagggucaaucagaaauggaacuuaugaccaugauguguacagagaugaagcauuaaacaaccgguuccagaucaaagguguugagcugaagucaggauacaaagauuggauccuauggauuuccuuugccauaucauguuuuuugcuuuguguugcuuuguugggguucaucaugugggccugccaaaaaggcaacauuaggugcaacauuugcauuuga

SEQ ID NO: 32147 - RNA, 1701 nt, Artificial Sequence
  derived and/or modified CDS sequence (wt) from hemagglutinin__InfluenzaA__AAY28305
augaaggcuaucauugcuuugagcuacauuuuaugccugguuuucgcucaaaaacuucccggaaaugacaacagcacggcaacgcugugccuggggcaucaugcagugccaaacggaacgcuagugaaaacaaucacgaaugaccaaauugaaguaacuaaugcuacugagcugguucagaguuccucaacagguagaauaugcgacaguccucaccaaauccuugauggagaaaacugcacacuaauagaugcucuauugggagacccucauugugauggcuuccaaaauaaggaaugggaccuuuuuguugaacgcagcaaagccuacagcaacuguuacccuuaugaugugccggauuaugucucccuuaggucacuaguugccucaucaggcacgcuggaguuuaacaaugaaagcuucaauuggacuggagucgcucagaauggaacaagcucugcuugcaaaaggagaucugauaaaaguuucuuuaguagauugaauugguugcaccaauuaaaauacaaauauccagcacugaacgugacuaugccaaacaaugaaaaauuugacaaauuguacauuugggggguucaccacccggguacagacagugaccaaaucagccuauaugcucaagcaucagggagagucacagucucuaccaaaagaagccaacaaacuguaaucccgaauaucggaucuggacccuggguaaggggugucuccagcagaauaagcaucuauuggacaauaguaaaaccgggagacauacuuuugauuaacagcacagggaaucuaauugcuccucgggguuacuucaaaauacgaagugggaaaagcucaauaaugaggucagaugcacccauuggcaaaugcaauucugaaugcaucacuccaaauggaagcauucccaaugacaaaccauuucaaaauguaaacaggaucacauauggggccugucccagauauguuaagcaaaacacucugaaauuggcaacagggaugcggaaugugccagagaaacaaacuagaggcauauucggugcaaucgcgggcuucauagaaaaugguugggagggaaugauggacgguugguacgguuucaggcaucaaaauucugagggcacagggcaagcagcagaucuuaaaagcacucaagcagcaaucaaccaaaucaacgggaaacugaauagguuaaucgagaaaacgaacgagaaauuccaucaaauugaaaaagaauucucagaaguagaagggagaauucaggaccucgagaaauauguugaggacacuaaaauagaucucuggucguacaaugcggagcuucuuguugcccuggagaaccaacauacaauugaucuaacugacucagaaaugaacaaacuguuugaaagaacaaagaagcaacugagggaaaaugcugaggauaugggcaaugguuguuucaaaauauaccacaaaugugacaaugccugcauagggucaaucagaaauggaacuuaugaccaugauguauacagagacgaagcauugaacaaccgguuccagaucaaagguguugagcugaagucaggauacaaagauuggauccuauggauuuccuuugccauaucauguuuuuugcuuuguauuguuuugcugggguucaucaugugggccugccaaaaaggcaacauuaggugcaacauuugcauuuga

SEQ ID NO: 32148 - RNA, 1701 nt, Artificial Sequence
  derived and/or modified CDS sequence (wt) from hemagglutinin__InfluenzaA__AAY28325
augaagacuaucauugcuuugagcuacauuuuaugccugguuuucgcucaaaaacuucccggaaaugacaacagcacggcgacgcugugccuggggcaccaugcagugccaaacggaacgcuagugaaaacaaucacgaaugaccaaauugaaguaacuaaugcuacugagcugguucagaguuccucaacaaguagaauaugcgacaguccucaccaaauccuugauggagaaaacugcacacuaauagaugcucuauugggagacccucauugugauggcuuccaaaauaaggaaugggaccuuuuuguugaacgcagcaaagccuacagcaacuguuacccuuaugaugugccggauuaugucucccuuaggucacuaguugccucaucaggcacgcuggaguuuaacaaugaaagcuucaauuggacuggagucgcucagaauggaacaagcucugcuugcaaaaggagaucugauaaaaguuucuuuaguagauugaauugguugcaccaauuaaaauacaaauauccagcacugaacgugacuaugccaaacaaugaaaaauuugacaaauuguacauuugggggguucaccacccggguacagacagugaccaaaucagccuauaugcucaagcaucagggagagucauagucucuaccaagagaagccaacaaacuguaaucccgaauaucggaucuggacccuggguaaggggugucuccagcagaauaagcaucuauuggacaauaguaaaaccgggagacauacuuuugauuaacagcacagggaaucuaauugcuccucgggguuacuucaaaauacgaagugggaaaagcucaauaaugagguccgaugcacccauuggcaaaugcaauucugaaugcaucacuccaaauggaagcauucccaaugacaaaccauuucaaaauguaaacaggaucacauauggggccugucccagauauguuaagcaaaacacucugaaauuggcaacagggaugcggaauguaccagagaaacaaacuagaggcauauucggugcaaucgcgggcuucauagaaaaugguugggagggaaugauggacgguugguacgguuucaggcaucaaaauucugagggcacagggcaagcagcagaucuuaaaagcacucaagcagcaaucaaccaaaucaacgggaaacugaauagguuaaucgagaaaacgaacgagaaauuccaucaaauugaaaaagaauucgcagaaguagaagggagaauucaggaccucgagaaauauguugaggacacuaaaauagaucucuggucguacaaugcggagcuucuuguugcccuggagaaccaacauacaauugaucuaacugacucagaaaugaacaaacuguuugaaagaacaaagaagcaacuaagggaaaaugcugaggauaugggcaaugguuguuucaaaauauaccacaaaugugacaaugccugcauagggucaaucagaaauggaacuuaugaccaugauguauacagagacgaagcauugaacaaccgguuccagaucaaagguguugagcugaagucaggauacaaagauuggauccuauggauuuccuuugccauaucauguuuuuugcuuuguauuguuuugcugggguucaucaugugggccugccaaaaaggcaacauuaggugcaacauuugcauuuga

SEQ ID NO: 32149 - RNA, 1701 nt, Artificial Sequence
  derived and/or modified CDS sequence (wt) from hemagglutinin__InfluenzaA__AAY28335
augaagacuaucauugcuuugagcuacauuuuaugccugguuuccgcucaaaaacuucccggaaaugacaacagcacggcaacgcugugccuggggcaccaugcagugccaaacggaacgcuagugaaaacaaucacgaaugaccaaauugaaguaacuaaugcuacugagcugguucagaguuccucaacaaguagaauaugcgacaguccucaccaaauccuugauggagaaaacugcacacuaauagaugcucuauuaggagacccucauugugauggcuuccaaaauaaggaaugggaccuuuuuguugaacgcagcaaagccuacagcaacuguuacccuuaugaugugccggauuaugucucccuuaggucacuaguugccucaucaggcacgcuggaguuuaacaaugaaagcuucaauuggacuggagucgcucagaauggaacaagcucugcuugcaaaaggagaucugauaaaaguuucuuuaguagauugaauugguugcaccaauuaaaauacaaauauccagcacugaacgugacuaugccaaacaaugaaaaauuugacaaauuguacauuugggggguucaccacccggguacagacagugaccaaaucagccuauaugcucaagcaucagggagagucacagucucuaccaaaagaagccaacaaacuguaaucccgaauaucggaucuagacccuggguaaggggugucuccagcagaauaagcaucuauuggacaauaguaaaaccgggagacauacuuuugauuaacagcacagggaaucuaauugcuccucgggguuacuucaaaauacgaagugggaaaagcucaauaaugaggucagaugcacccauuggcaaaugcaauucugaaugcaucacuccaaauggaagcauucccaaugacaaaccauuucaaaauguaaacaggaucacauauggggccugucccagauauguuaagcaaaacacucugaaauuggcaacagggaugcggaauguaccagagaaacaaacuagaggcauauucggugcaaucgcgggcuucauagaaaaugguugggagggaaugauggacgguugguacgguuucaggcaucaaaauucugagggcacagggcaagcagcagaucuuaaaagcacucaagcagcaaucaaccaaaucaacgggaaacugaauagguuaaucgagaaaacgaacgagaaauuccaucaaauugaaaaagaauucucagaaguagaagggagaauucaggaccucgagaaauauguugaggacacuaaaguagaucucuggucguacaaugcggagcuucuuguugcccuggagaaccaacauacaauugaucuaacugacucagaaaugaacaaacuguuugaaagaacaaagaagcaacugagggaaaaugcugaggauaugggcaaugguuguuucaaaauauaccacaaaugugacaaugccugcauagggucaaucagaaauggaacuuaugaccaugauguauacagagaugaagcauugaacaaccgguuccagaucaaagguguugagcugaagucaggauacaaagauuggauccuauggauuuccuuugccauaucauguuuuuugcuuuguauuguuuugcugggguucaucaugugggccugccaaaaaggcaacauuaggugcaacauuugcauuuga

SEQ ID NO: 32150 - RNA, 1701 nt, Artificial Sequence; identical to SEQ ID NO: 32048
  derived and/or modified CDS sequence (wt) from hemagglutinin__InfluenzaA__AAY28345

SEQ ID NO: 32151 - RNA, 1701 nt, Artificial Sequence
  derived and/or modified CDS sequence (wt) from hemagglutinin__InfluenzaA__AAY28355
augaagacuaucauugcuuugagcuacauuuuaugucugguuuucgcucaaaaacuucccguaaaugacaacagcacggcaacgcugugccugggacaccaugcagugccaaacggaacgcuagugaaaacaaucacgaaugaccacauugaagugacuaaugcuacugagcugguucagaguuccucaacagguagaauaugcgacaguccucaccaaauccuugauggagaaaacugcacacuaauagaugcucuauugggagacccucauugugauggcuuccaaaauaaggaaugggaccuuuuuguugaacgcagcacagccuacagcaacuguuacccuuaugaugugccggauuaugccucccuuaggucacuaguugccucauccggcacacuggaguuuaacaaugaaagcuucaauuggacuggagucgcucagaauggaacaagcucugcuugcaaaaggagaucuauuaaaaguuucuuuaguagauugaauugguugcaccaauuaaaauacaaauauccagcacugaacgugacuaugccaaacaaugaaaaauuugacaaauuguacauuugggggguucaccacccgaguacggacagugaccaaaucagccuauaugcucaagcaucagggagagucacagucucuaccaaaagaagccaacaaacuguaaucccgaauaucggaucuagacccuggguaaggggugucuccagcagaauaagcaucuauuggacaauaguaaaaccgggagacauacuuuugauuaacagcacagggaaucuaauugcuccucgggguuacuuuaaaauacgaagugggaaaagcucaauaaugaggucaaaugcacccauuggcaaaugcaauucugaaugcaucacuccaaauggaagcauucccaaugacaaaccauuucaaaauguaaacaggaucacauauggggccugucccagauauguuaagcaaaacacucugaaauuggcaacagggaugcggaauguaccagagaaacaaacuagaggcauauucggcgcaaucgcggguuucauagaaaaugguugggagggaaugguggacgguugguaugguuucaggcaucaaaauucugagggcacaggacaagcagcagaucuuaaaagcacucaagcagcaaucaaccaaaucaacgggaaacugaauagguuaaucgagaaaacaaacgagaaauuccaucaaauugaaaaagaauucucagaaguagaagggagaauucaggaccucgagaaauauguugaggacacuaaaauagaucucuggucguacaacgcggagcuucuuguugcccuggagaaccaacauacaauugaucuaacugacucagaaaugaacaaacuguuugaaagaacaaggaagcaacugagggaaaaugcugaggauaugggcaaugguuguuucaaaauauaccacaaaugugacaaugccugcauagggucaaucagaaauggaacuuaugaccaugauguauacagagacgaagcauuaaacaaccgguuccagaucaaagguguugagcugaagucaggauacaaagauuggauccuauggauuuccuuugccauaucauguuuuuugcuuuguguuguuuugcugggguucaucaugugggccugccaaaaaggcaacauuaggugcaacauuugcauuuga

SEQ ID NO: 32152 - RNA, 1701 nt, Artificial Sequence
  derived and/or modified CDS sequence (wt) from hemagglutinin__InfluenzaA__AAY28363
augaagacuaucauugcuuugagcuacauuuuauguaugguuuucgcucaaaaacuucccguaaaugacaacagcacggcaacgcugugccugggacaccaugcagugccaaacggaacgcuagugaaaacaaucacgaaugaccacauugaagugacuaaugcuacugagcugguucagaguuccucaacagguagaauaugcgacaguccucaccaaauccuugauggagaaaacugcacacuaauagaugcucuauugggagacccucauugugauggcuuccaaaauaaggaaugggaccuuuuuguugaacgcagcacagccuacagcaacuguuacccuuaugaugugccggauuaugccucccuuaggucacuaguugccucauccggcacacuggaguuuaacaaugaaagcuucaauuggacuggagucgcucagaauggaacaagcucugcuugcaaaaggagaucuauuaaaaguuucuuuaguagauugaauugguugcaccaauuaaaauacaaauauccaucauugaacgugacuaugccaaacaaugaaaaauuugacaaauuguacauuugggggguucaccacccgaguacggacagugaccaaaucagccuauaugcucaagcaucagggagagucacagucucuaccaaaagaagccaacaaacuguaaucccgaauaucggaucuagacccuggguaaggggugucuccagcagaauaagcaucuauuggacaauaguaaaaccgggagacauacuuuugauuaacagcacagggaaucuaauugcuccucgggguuacuuuaaaauacgaagugggaaaagcucaauaaugaggucaaaugcacccauuggcaaaugcaauucugaaugcaucacuccaaauggaagcauucccaaugacaaaccauuucaaaauguaaacaggaucacauauggggccugucccagauauguuaagcaaaacacucugaaauuggcaacagggaugcggaauguaccagagaaacaaacuagaggcauauucggcgcaaucgcggguuucauagaaaaugguugggagggaaugguggacgguugguacgguuucaggcaucaaaauucugagggcacaggacaagcagcagaucuuaaaagcacucaagcagcaaucaaccaaaucaacgggaaacugaauagguuaaucgagaaaacaaacgagaaauuccaucaaauugaaaaagaauucucagaaguagaagggagaauucaggaccucgagaaauauguugaggacacuaaaauagaucucuggucguacaacgcggagcuucuuguugcccuggagaaccaacauacaauugaucuaacugacucagaaaugaacaaacuguuugaaagaacaaggaagcaacugagggaaaaugcugaggauaugggcaaugguuguuucaaaauauaccacaaaugugacaaugccugcauagggucaaucagaaauggaacuuaugaccaugauguauacagagaugaagcauuaaacaaccgguuccagaucaaagguguugagcugaagucaggauacaaagauuggauccuauggauuuccuuugccauaucauguuuuuugcuuuguguuguuuugcugggguucaucaugugggccugccaaaaaggcaacauuaggugcaacauuugcauuuga

SEQ ID NO: 32153 - RNA, 1701 nt, Artificial Sequence
  derived and/or modified CDS sequence (wt) from hemagglutinin__InfluenzaA__AAY28375
augaagacuaucauugcuuugagcuacauuuuaugucugguuuucgcucaaaaacuucccguaaaugacaacagcacggcaacgcugugccugggacaccaugcagugccaaacggaacgcuagugaaaacaaucacgaaugaccacauugaagugacuaaugcuacugagcuaguucagaguuccucaacagguagaauaugcgacaguccucaccaaauccuugauggagaaaacugcacacuaauagaugcucuauugggagacccucauugugauggcuuccaaaauaaggaaugggaccuuuuuguugaacgcagcacagccuacagcaacuguuacccuuaugaugugccggauuaugccucccuuaggucacuaguugccucauccggcacacuggaguuuaacaaugaaagcuucaauuggacuggagucgcucagaauggaacaagcucugcuugcaaaaggagaucuauuaaaaguuucuuuaguagauugaauugguugcaccaauuaaaauacaaauauccagcacugaacgugacuaugccaaacaaugaaaaauuugacaaauuguacauuugggggguucaccacccgaguacggacagugaccaaaucagccuauaugcucaagcaucagggagagucacagucucuaccaaaagaagccaacaaacuguaaucccgaauaucggaucuagacccuggguaaggggugucuccagcagaauaagcaucuauuggacaauaguaaaaccgggagacauacuuuugauuaacagcacagggaaucuaauugcuccucgggguuacuucaaaauacgaagugggaaaagcucaauaaugaggucaaaugcacccauuggcaaaugcaauucugaaugcaucacuccaaauggaagcauucccaaugacaaaccauuucaaaauguaaacaggaucacauauggggcaugucccagauauguuaagcaaaacacucugaaauuggcaacagggaugcggaauguaccagagaaacaaacuagaggcauauucggcgcaaucgcggguuucauagaaaaugguugggaaggaaugguggacgguugguacgguuucaggcaucaaaauucugagggcacaggacaagcagcagaucuuaaaagcacucaagcagcaaucaaccaaaucaacgggaaacugaauagguuaaucgagaaaacaaacgagaaauuccaucaaauugaaaaagaauucucagaaguagaagggagaauucaggaccucgagaaauauguugaggacacuaaaauagaucucuggucguacaacgcggagcuucuuguugcccuggagaaccaacauacaauugaucuaacugacucagaaaugaacaaacuguuugaaagaacaaggaagcaacugagggaaaaugcugaggauaugggcaaugguuguuucaaaauauaccacaaaugugacaaugccugcauagggucaaucagaaauggaacuuaugaccaugauguauacagagacgaagcauuaaacaaccgguuccagaucaaagguguugagcugaagucaggauacaaagauuggauccuauggauuuccuuugccauaucauguuuuuugcuuuguguuguuuuguugggguucaucaugugggccugccaaaaaggcaacauuaggugcaacauuugcauuuga

SEQ ID NO: 32154 - RNA, 1701 nt, Artificial Sequence; identical to SEQ ID NO: 32048
  derived and/or modified CDS sequence (wt) from hemagglutinin__InfluenzaA__AAY28385

SEQ ID NO: 32155 - RNA, 1701 nt, Artificial Sequence
  derived and/or modified CDS sequence (wt) from hemagglutinin__InfluenzaA__AAY28395
augaagacuaucauugcuuugagcuacauucuaugucugguuuucgcucaaaaacuucccggaaaugacaacagcacggcaacgcugugccuugggcaccaugcaguaccaaacggaacgauagugaaaacaaucacgaaugaccaaauugaaguuacuaaugcuacugagcugguacagaguuccucaacagguggaauaugcgacaguccucaucagauccuugauggagaaaacugcacacuaauagaugcucuauugggagacccucagugugauggcuuccaaaauaagaaaugggaccuuuuuguugaacgcagcaaagccuacagcaacuguuacccuuaugaugugccggauuaugccucccuuaggucacuaguugccucauccggcacacuagaguuuaacaaugaaagcuucgauuggacuggagucacucagaauggaacaagcucugcuugcaaaaggagaucuaauaaaaguuucuuuaguagauugaauugguugacccacuuaaaauacaaauacccagcauugaacgugacuaugccaaacaaugaaaaauuugacaaauuguacauuugggggguucaccacccggguacggacagugaccaaaucaaccuauaugcucaagcaucaggaagaaucacagucucuaccaaaagaagccaacaaacuguaaucccgaauaucggaucuagacccaggguaagggaugucuccagccgaauaagcaucuauuggacaauaguaaaaccgggagacauacuuuugauuaacagcacagggaaucuaauugcuccucgggguuacuucaaaauacgaagugggaaaagcucaauaaugagaucagaugcacccauuggcaaaugcaauucugaaugcaucacuccaaauggaagcauucccaaugacaaaccauuucaaaauguaaacaggaucacauauggggccugucccagauauauuaagcaaaacacucugaaauuggcaacagggaugcgaaauguaccagagaaacaaacuagaggcauauuuggcgcaaucgcggguuucauagaaaaugguugggagggaaugguggacgguugguacgguuucaggcaucaaaauucugagggcacaggacaagcagcagaucucaaaagcacucaagcagcaaucaaccaaaucaaugggaaacugaauagguuaaucgggaaaacaaacgagaaauuccaucagauugaaaaagaauucucagaaguagaagggagaauucaggaccucgagaaauauguugaggacacuaaaauagaucucuggucauacaacgcggagcuucuuguugcccuggagaaccaacauacaauugaucuaacugacucagaaaugaacaaacuguuugaaagaacaaagaagcaacugagggaaaaugcugaggauaugggcaaugguuguuucaaaauauaccacaaaugugacaaugccugcauagggucaaucagaaauggaacuuaugaccaugauguguacagagaugaagcauuaaacaaccgguuccagaucaaagguguugagcugaagucaggauacaaagauuggauccuauggauuuccuuugccauaucauguuuuuugcuuuguguugcuuuguugggguucaucaugugggccugccaaaaaggcaacauuaggugcaacauuugcauuuga

SEQ ID NO: 32156 - RNA, 1701 nt, Artificial Sequence
  derived and/or modified CDS sequence (wt) from hemagglutinin__InfluenzaA__AAY28405
augaagacuaucauugcuuugagcuacauuuuaugucugguuuucgcucaaaaacuucccggaaaugacaacagcacggcaacgcugugccuggggcaccaugcagugccaaacggaacgcuagugaaaacaaucacgaaugaccaaauugaagugacuaaugcuacugagcugguucagauuuccucaacagguagaauaugcgacaauccucaccaaauccuugauggagaaaacugcacacuaauagaugcucuauugggagacccucauugugauggcuuccaaaauaaggaaugggaccuuuuuguugaacgcagcaaagccuacagcaacuguuacccuuaugaugugccggauuaugucucccuuaggucacuaguugccucaucaggcacgcuggaguuuaacaaugaaagcuucaauuggacuggagucgcucagaauggaacaagcucugcuugcaaaaggagaucugauaaaaguuucuuuaguagauugaauugguugcaccaauuaaaauacaaauauccagcacugaacgugacuaugccaaacaaugaaaaauuugacaaauuguacauuugggggguucaccacccggguacagacagugaccaaaucagccuauaugcucaagcaucagggagagucacagucucuaccaaaagaagucaacaaacuguaaucccgaauaucggaucuagacccuggguaaggggugucuccagcagaauaagcaucuauuggacaauaguaaaaccgggagacauacuuuugauuaacagcacagggaaucuaauugcuccucgggguuacuucaaaauacgaagugggaaaagcucaauaaugaggucagaugcacccauuggcaaaugcaauucugaaugcaucacuccaaauggaagcauucccaaugacaaaccauuucaaaauguaaacaggaucacauaugggcccugucccagauauguuaagcaaaacacucugaaauuggcaacagggaugcggaaugugccagagaaacaaacuagaggcauauucggugcaaucgcgggcuucauagaaaaugguugggagggaaugauggacgguugguacgguuucaggcaucaaaauucugagggcacagggcaagcagcagaucuuaaaagcacucaagcagcaaucaaccaaaucaacgggaaacugaauagguuaaucgagaaaacgaacgagaaauuccaucaaauugaaaaggaauucucagaaguagaagggagaauucaggaccucgagaaauauguugaggacacuaaaauagaucucuggucguacaaugcggagcuucuuguugcccuggagaaccaacauacaauugaucuaacugacucagaaaugaacaaacuguuugaaagaacaaagaagcaacugagggaaaaugcugaggauaugggcaaugguuguuucaaaauauaccacaaaugugacaaugccugcauagggucaaucagaaauggaacuuaugaccaugauguauacagagacgaagcauugaacaaccgguuccagaucaaagguguugagcugaagucaggauacaaagauuggauccuauggauuuccuuugccauaucauguuuuuugcuuuguauuguuuugcugggguucaucaugugggccugccaaaaaggcaacauuaggugcaacauuugcguuuga

SEQ ID NO: 32157 - RNA, 1701 nt, Artificial Sequence; identical to SEQ ID NO: 32044
  derived and/or modified CDS sequence (wt) from hemagglutinin__InfluenzaA__AAY28486

SEQ ID NO: 32158 - RNA, 1701 nt, Artificial Sequence; identical to SEQ ID NO: 32044
  derived and/or modified CDS sequence (wt) from hemagglutinin__InfluenzaA__AAY28521

SEQ ID NO: 32159 - RNA, 1701 nt, Artificial Sequence
  derived and/or modified CDS sequence (wt) from hemagglutinin__InfluenzaA__AAY28531
augaagacuaucauugcuuugagcuacauucuaugucugguuuucgcucaaaaacuucccggaaaugacaacagcacggcaacgcugugccuugggcaccaugcaguaccaaacggaacgaucgugaaaacaaucacgaaugaccaaauugaaguuacuaaugcuacugagcugguucagaguuccucaacagguggaauaugcgacaguccucaucagauccuugauggagaaaacugcacacuaauagaugcucuauugggagacccucagugugauggcuuccaaaauaagaaaugggaccuuuuuguugaacgcagcaaagccuacagcaacuguuacccuuaugaugugccggauuaugccucccuuaggucacuaguugccucauccggcacacuggaguuuaacaaugaaagcuucaauuggacuggagucacucagaauggaacaagcucugcuugcgaaaggagaucuaauaaaaguuucuuuaguagauugaauugguugacccacuuaaaauacaaauacccagcauugaacgugacuaugccaaacaaugaaaaauuugacaaauuguacauuugggggguucaccacccggguacggacagugaccaaaucagccuauaugcucaagcaucaggaagaaucacagucucuaccaaaagaagccaacaaacuguaaucccgaauaucggaucuagacccaggguaagggaugucuccagccgaauaagcaucuauuggacaauaguaaaaccgggagacauacuuuugauuaacagcacagggaaucuaauugcuccucgggguuacuucaaaauacgaagugggaaaagcucaauaaugagaucagaugcacccauuggcaaaugcaauucugaaugcaucacuccaaauggaagcauucccaaugacaaaccauuucaaaauguaaacaggauuacauauggggccugucccagauauguuaagcaaaacacucugaaauuggcaacagggaugcgaaauguaccagagaaacaaacuagaggcauauuuggcgcaaucgcggguuucauagaaaaugguugggagggaaugguggacgguugguacgguuucaggcaucaaaauucugagggcacaggacaagcagcagaucucaaaagcacucaagcagcaaucaaccaaaucaaugggaaacugaauagguuaaucgggaaaacaaacgagaaauuccaucagauugaaaaagaauucucagaaguagaagggagaauucaggaccucgagaaauauguugaggacacuaaaauagaucucuggucauacaacgcggagcuucuuguugcccuggagaaccaacauacaauugaucuaacugacucagaaaugaacaaacuguuugaaagaacaaagaagcaacugagggaaaaugcugaggauaugggcaaugguuguuucaaaauauaccacaaaugugacaaugccugcauagggucaaucagaaauggaacuuaugaccaugauguguacagagaugaagcauuaaacaaccgguuccagaucaaagguguugagcugaagucaggauacaaagauuggauccuauggauuuccuuugccauaucauguuuuuugcuuuguguugcuuuguugggguucaucaugugggccugccaaaaaggcaacauuaggugcgacauuugcauuuga

SEQ ID NO: 32160 - RNA, 1701 nt, Artificial Sequence
  derived and/or modified CDS sequence (wt) from hemagglutinin__InfluenzaA__AAY28541
augaagacuaucauugcuuugagcuacauucuaugucugguuuucgcucaaaaacuucccggaaaugacaacagcacggcaacgcugugccuugggcaccaugcaguaccaaacggaacgauagugaaaacaaucacgaaugaccaaauugaaguuacuaaugcuacugagcugguacagaguuccucaacagguggaauaugcgacaguccucaucagauccuugauggagaaaacugcacacuaauagaugcucuauugggagacccucagugugauggcuuccaaaauaagaaaugggaccuuuuuguugaacgcagcaaagccuacagcaacuguuacccuuaugaugugccggauuaugccucccuuaggucacuaguugccucauccggcacacuggaguuuaacaaugaaagcuucgauuggacuggagucacucagaauggaacaagcucugcuugcaaaaggagaucuaauaaaaguuucuuuaguagauugaauugguugacccacuuaaaauacaaauacccagcauugaacgugacuaugccaaacaaugaaaaauuugacaaauuguacauuugggggguucaccacccggguacggacagugaccaaaucagccuauaugcucaagcaucaggaagaaucacagucucuaccaaaagaagccaacaaacuguaaucccgaauaucggaucuagacccaggguaagggaugucuccagccgaauaagcaucuauuggacaauaguaaaaccgggagacauacuuuugauuaacagcacagggaaucuaauugcuccucgggguuacuucaaaauacgaagugggaaaagcucaauaaugagaucagaugcacccauuggcaaaugcaauucugaaugcaucacuccaaauggaagcauucccaaugacaaaccauuucaaaauguaaacaggaucacauauggggccugucccagauauguuaagcaaaacacucugaaauuggcaacagggaugcgaaauguaccagagaaacaaacuagaggcauauuuggcgcaaucgcggguuucauagaaaaugguugggagggaaugguggacgguugguacgguuucaggcaucaaaauucugagggcacaggacaagcagcagaucucaagagcacucaagcagcaaucaaccaaaucaaugggaaacugaauagguuaaucgggaaaacaaacgagaaauuccaucagauugaaaaagaauucucagaaguagaagggagaauucaggaccucgagaaauauguugaggacacuaaaauagaucucuggucauacaacgcggagcuucuuguugcccuggagaaccaacauacaauugaucuaacugacucagaaaugaacaaacuguuugaaagaacaaagaagcaacugagggaaaaugcugaggauaugggcaaugguuguuucaaaauauaccacaaaugugacaaugccugcauagggucaaucagaaauggaacuuaugaccaugauguguacagagaugaagcauuaaacaaccgguuccagaucaaagguguugagcugaagucaggauacaaagauuggauccuauggauuuccuuugccauaucauguuuuuugcuuuguguugcuuuguugggguucaucaugugggccugccaaaaaggcaacauuaggugcaacauuugcauuuga

SEQ ID NO: 32161 - RNA, 1701 nt, Artificial Sequence
  derived and/or modified CDS sequence (wt) from hemagglutinin__InfluenzaA__AAY28551
augaagacuaucauugcuuugagcuacauuuuaugucugguuuucgcucaaaaacuucccguaaaugacaacagcacggcaacgcugugccugggacaccaugcagugccaaacggaacgcuagugaaaacaaucacgaaugaccacauugaagugacuaaugcuacugagcugguucagaguuccucaacagguagaauaugcgacaguccucaccaaauccuugauggagaaaacugcacacuaauagaugcucuauugggagacccucauugugauggcuuccaaaauaaggaaugggaccuuuuuguugaacgcagcacagccuacagcaacuguuacccuuaugaugugccggauuaugccucccuuaggucacuaguugccucauccggcacacuggaguuuaacaaugaaagcuucaauuggacuggagucgcucagaauggaacaagcucugcuugcaaaaggagaucuauuaaaaguuucuuuaguagauugaauugguugcaccaauuaaaauacaaauauccagcacugaacgugacuaugccaaacaaugaaaaauuugacaaauuguacauuugggggguucaccacccgaguacggacagugaccaaaucagccuauaugcucaagcaucagggagagucacagucucuaccaaaagaagccaacaaacuguaaucccgaauaucggaucuggacccuggguaaggggugucuccagcagaauaagcaucuauuggacaauaguaaaaccgggagacauacuuuugauuaacagcacagggaaucuaauugcuccucgggguuacuuuaaaauacgaagugggaaaagcucaauaaugaggucaaaugcacccauuggcaaaugcaauucugaaugcaucacuccaaauggaagcauucccaaugacaaaccauuucaaaauguaaacaggaucacauauggggccugucccagauauguuaagcaaaacacucugaaauuggcaacagggaugcggaauguaccagagaaacaaacuagaggcauauucggcgcaaucgcggguuucauagaaaaugguugggagggaaugguggacgguugguacgguuucaggcaucaaaauucugagggcacaggacaagcagcagaucuuaaaagcacucaagcagcaaucaaccaaaucaacgggaaacugaauagguuaaucgagaaaacaaacgagaaauuccaucaaauugaaaaagaauucucagaaguagaagggagaauucaggaccucgagaaauauguugaggacacuaaaauagaucucuggucguacaacgcggagcuucuuguugcccuggagaaccaacauacaauugaucuaacugacucagaaaugaacaaacuguuugaaagaacaaggaagcaacugagggaaaaugcugaggauaugggcaaugguuguuucaaaauauaccacaaaugugacaaugccugcauagggucaaucagaaauggaacuuaugaccaugauguauacagagacgaagcauuaaacaaccgguuccagaucaaagguguugagcugaagucaggauacaaagauuggauccuauggauuuccuuugccauaucauguuuuuugcuuuguguuguuuugcugggguucaucaugugggccugccaaaaaggcaacauuaggugcaacauuugcauuuga

SEQ ID NO: 32162 - RNA, 1701 nt, Artificial Sequence
  derived and/or modified CDS sequence (wt) from hemagglutinin__InfluenzaA__AAY28561
augaagacuaucauugcuuugagcuauauucuaugucugguuuucgcucaaaaacuucccggaaaugacaacagcacggcaacgcugugccuugggcaccaugcaguaccaaacggaacgauagugaaaacaaucacgaaugaccaaauugaaguuacuaaugcuacugagcugguacagaguuccucaacagguggaauaugcgacaguccucaucagauccuugauggagaaaacugcacacuaauagaugcucuauugggagacccucagugugauggcuuccaaaauaagaaaugggaccuuuuuguugaacgcagcaaagccuacagcaacuguuacccuuaugaugugccggauuaugccucccuuaggucacuaguugccucauccggcacacuggaguuuaacaaugaaagcuucgauuggacuggagucacucagaauggaacaagcucugcuugcaaaaggagaucuaauaaaaguuucuuuaguagauugaauugguugacccacuuaaaauacaaauacccagcauugaacgugacuaugccaaacaaugaaaaauuugacaaauuguacauuugggggguucaccacccggguacggacagugaccaaaucagccuauaugcucaagcaucaggaagaaucacagucucuaccaaaagaagccaacaaacuguaaucccgaauaucggaucuagacccaggguaagggaugucuccagccgaauaagcaucuauuggacaauaguaaaaccgggagacauacuuuugauuaacagcacagggaaucuaauugcuccucgggguuacuucaaaauacgaagugggaaaagcucaauaaugagaucagaugcacccauuggcaaaugcaauuccgaaugcaucacuccaaauggaagcauucccaaugacaaaccauuucaaaauguaaacaggaucacauauggggccugucccagauauguuaagcaaaacacucugaaauuggcaacagggaugcgaaauguaccagagaaacaaacuagaggcauauuuggcgcaaucgcggguuucauagaaaaugguugggagggaaugguggacgguugguacgguuucaggcaucaaaauucugagggcacaggacaagcagcagaucucaaaagcacucaagcagcaaucaaccaaaucaaugggaaacugaauagguuaaucgggaaaacaaacgagaaauuccaucagauugaaaaagaauucucagaaguagaagggagaauucaggaccucgagaaauauguugaggacacuaaaauagaucucuggucauacaacgcggagcuucuuguugcccuggagaaccaacauacaauugaucuaacugacucagaaaugaacaaacuguuugaaagaacaaagaagcaacugagggaaaaugcugaggauaugggcaaugguuguuucaaaauauaccacaaaugugacaaugccugcauagggucaaucagaaauggaacuuaugaccaugauguguacagagaugaagcauuaaacaaccgguuccagaucaaagguguugagcugaagucaggauacaaagauuggauccuauggauuuccuuugccauaucauguuuuuugcuuuguguugcuuuguugggguucaucaugugggccugccaaaaaggcaacauuaggugcaacauuugcauuuga

SEQ ID NO: 32163 - RNA, 1701 nt, Artificial Sequence
  derived and/or modified CDS sequence (wt) from hemagglutinin__InfluenzaA__AAY28581
augaagacuaucauugcuuugagcuacauuuuaugccugguuuucgcucaaaaacuucccggaaaugacaacagcacggcaacgcugugccuggggcaccaugcagugccaaacggaacgcuagugaaaacaaucacgaaugaccaaauugaaguaacuaaugcuacugagcugguucagaguuccucaacaaguagaauaugcgacaguccucaccaaauccuugauggagaaaacugcacacuaauagaugcucuauugggagacccucauugugauggcuuccaaaauaaggaaugggaccuuuuuguugaacgcagcaaagccuacagcaacuguuacccuuaugaugugccggauuaugucucccuuaggucacuaguugccucaucaggcacgcuggaguuuaacaaugaaagcuucaauuggacuggagucgcucagaauggaacaagcucugcuugcaaaaggagaucugauaaaaguuucuuuaguagauugaauugguugcaccaauuaaaauacaaauauccagcacugaacgugacuaugccaaacaaugaaaaauuugacaaauuguacauuugggggguucaccacccggguacagacagugaccaaaucagccuauaugcucaagcaucagggagagucacagucucuaccaaaagaagccaacaaacuguaaucccgaauaucggaucuagacccuggguaaggggugucuccagcagaauaagcaucuauuggacaauaguaaaaccgggagacauacuuuugauuaacagcacagggaaucuaauugcuccucgggguuacuucaaaauacgaagugggaaaagcucaauaaugaggucagaugcacccauuggcaaaugcaauucugaaugcaucacuccaaauggaagcauucccaaugacaaaccauuucaaaauguaaacaggaucacauauggggccugucccagauauguuaagcaaaacacucugaaauuggcaacagggaugcggaauguaccagagaaacaaacuagaggcauauucggugcaaucgcgggcuucauagaaaaugguugggagggaaugauggacgguugguacgguuucaggcaucaaaauucugagggcacagggcaagcagcagaucuuaaaagcacucaagcagcaaucaaccaaaucaacgggaaacugaauagguugaucgagaaaacgaacgagaaauuccaucaaauugaaaaagaauucucagaaguagaagggagaauucaggaccucgagaaauauguugaggacacuaagauagaucucuggucguacaaugcggagcuucuuguugcccuggagaaccaacauacaauugaucuaacugacucagaaaugaacaaacuguuugaaagaacaaagaagcaacugagggaaaaugcugaggauaugggcaaugguuguuucaaaauauaccacaaaugugacaaugccugcauagggucaaucagaaauggaacuuaugaccaugauguauacagagacgaagcauugaacaaccgguuccagaucaaagguguugagcugaagucaggauacaaagauuggauccuauggauuuccuuugccauaucauguuuuuugcuuuguauuguuuugcugggguucaucaugugggccugccaaaaaggcaacauuaggugcaacauuugcauuuga

SEQ ID NO: 32164 - RNA, 1701 nt, Artificial Sequence
  derived and/or modified CDS sequence (wt) from hemagglutinin__InfluenzaA__AAY28591
augaagacuaucauugcuuugagcuacauuuuaugucugguuuucgcucaaaaacuucccguaaaugacaacagcacggcaacgcugugccugggacaccaugcagugccaaacggaacgcuagugaaaacaaucacgaaugaccacauugaagugacuaaugcuacugagcugguucagaguuccucaacagguagaauaugcgacaguccucaccaaauccuugauggagaaaacugcacacuaauagaugcucuauugggagacccucauugugauggcuuccaaaauaaggaaugggaccuuuuuguugaacgcagcacagccuacagcaacuguuacccuuaugaugugccggauuaugccucccuuaggucacuaguugccucauccggcacacuggaguuuaacaaugaaagcuucaauuggacuggagucgcucagaauggaacaagcucugcuugcaaaaggagaucuauuaaaaguuucuuuaguagauugaauugguugcaccaauuaaaauacaaauauccagcacuggacgugacuaugccaaacaaugaaaaauuugacaaauuguacauuugggggguucaccacccgaguacggacagugaccaaaucagccuauaugcucaagcaucagggagagucacagucucuaccaaaagaagccaacaaacuguaaucccgaauaucggaucuagacccuggguaaggggugucuccagcagaauaagcaucuauuggacaauaguaaaaccgggagacauacuuuugauuaacagcacagggaaucuaauugcuccucgggguuacuuuaaaauacgaagugggaaaagcucaauaaugaggucaaaugcacccauuggcaaaugcaauucugaaugcaucacuccaaauggaagcauucccaaugacaaaccauuucaaaauguaaacaggaucacauauggggccugucccagauauguuaagcaaaacacucugaaauuggcaacagggaugcggaauguaccagagaaacaaacuagaggcauauucggcgcaaucgcggguuucauagaaaaugguugggagggaaugguggacgguugguacgguuucaggcaucaaaauucugagggcacaggacaagcagcagaucuuaaaagcacucaagcagcaaucaaccaaaucaacgggaaacugaauagguuaaucgagaaaacaaacgagaaauuccaucaaauugaaaaagaauucucagaaguagaagggagaauucaggaccucgagaaauauguugaggacacuaaaauagaucucuggucguacaacgcggagcuucuuguugcccuggagaaccaacauacaauugaucuaacugacucagaaaugaacaaacuguuugaaagaacaaggaagcaacugagggaaaaugcugaggauaugggcaaugguuguuucaaaauauaccacaaaugugacaaugccugcauagggucaaucagaaauggaacuuaugaccaugauguauacagagacgaagcauuaaacaaccgguuccagaucaaagguguugagcugaagucaggauacaaagauuggauccuauggauuuccuuugccauaucauguuuuuugcuuuguguuguuuugcugggguucaucaugugggccugccaaaaaggcaacauuaggugcaacauuugcauuuga

SEQ ID NO: 32165 - RNA, 1701 nt, Artificial Sequence
  derived and/or modified CDS sequence (wt) from hemagglutinin__InfluenzaA__AAY28608
augaagacuaucauugcuuugagcuacauuuuaugucugguuuucgcucaaaaacuucccguaaaugacaacagcacggcaacgcugugccugggacaccaugcagugccaaacggaacgcuagugaaaacaaucacgaaugaccacauugaagugacuaaugcuacugagcugguucagaguuccucaacagguagaauaugcgacaguccucaccaaauccuugauggagaaaacuguacacuaauagaugcucuauugggagacccucauugugauggcuuccaaaauaaggaaugggaccuuuuuguugaacgcagcacagccuacagcaacuguuacccuuaugaugugccggauuaugccucccuuaggucacuaguugccucauccggcacacuggaguuuaacaaugaaagcuucaauuggacuggagucgcucagaauggaacaagcucugcuugcaaaaggagaucuauuaaaaguuucuuuaguagauugaauugguugcaccaauuaaaauacaaauauccagcacugaacgugacuaugccaaacaaugaaaaauuugacaaauuguacauuugggggguucaccacccgaguacggacagugaccaaaucagccuauaugcucaagcaucagggagagucacagucucuaccaaaagaagccaacaaacuguaaucccgaauaucggaucuagacccuggguaaggggugucuccagcagaauaagcaucuauuggacaauaguaaaaccgggagacauacuuuugauuaacagcacagggaaccuaauugcuccucgggguuacuucaaaauacgaagugggaaaagcucaauaaugaggucaaaugcacccauuggcaaaugcaauucugaaugcaucacuccaaauggaagcauucccaaugacaaaccauuucaaaauguaaacaggaucacauauggggccugucccagauauguuaagcaaaacacucugaaauuggcaacagggaugcggaauguaccagagaaacaaacuagaggcauauucggcgcaaucgcggguuucauagaaaaugguugggaaggaaugguggacgguugguacgguuucaggcaucaaaauucugagggcacaggacaagcagcagaucuuaaaagcacucaagcagcaaucaaccaaaucaacgggaaacugaauagguuaaucgagaaaacaaacgagaaauuccaucaaauugaaaaagaauucucagaaguagaagggagaauucaggaccucgagaaauauguugaggacacuaaaauagaucucuggucguacaacgcggagcuucuuguugcccuggagaaccaacauacaauugaucuaacugacucagaaaugaacaaacuguuugaaagaacaaggaagcaacugagggaaaaugcugaggauaugggcaaugguuguuucaaaauauaccacaaaugugacaaugccugcauagggucaaucagaaauggaacuuaugaccaugauguauacagagacgaagcauuaaacaaccgguuccagaucaaagguguugagcugaagucaggauacaaagauuggauccuauggauuuccuuugccauaucauguuuuuugcuuuguguuguuuugcugggguucaucaugugggccugccaaaaaggcaacauuaggugcaacauuugcauuuga

SEQ ID NO: 32166 - RNA, 1701 nt, Artificial Sequence
  derived and/or modified CDS sequence (wt) from hemagglutinin__InfluenzaA__AAY28618
augaagacuaucauugcuuugagcuacauucuaugucugguuuucgcucaaaagcuucccggaaaugacaacagcacggcaacgcugugccuugggcaccaugcaguaccaaacggaacgauagugaaaacaaucacgaaugaccaaauugaaguuacuaaugcuacugagcugguucagaguuccucaacagguggaauaugcgacaguccucaucagauccuugauggagaaaacugcacacuaauagaugcucuauugggagacccucagugugauggcuuccaaaauaagaaaugggaccuuuuuguugaacgcagcaaagccuacagcaacuguuacccuuaugaugugccggauuaugccucccuuaggucacuaguugccucauccggcacacuggaguuuaacaaugaaagcuucaauuggacuggagucacucagaauggaacaagcucugcuugcaaaaggagaucuaauaaaaguuucuuuaguagauugaauugguugacccacuuaaaauacaaauacccagcauugaacgugacuaugccaaacaaugaaaaauuugacaaauuguacauuugggggguucaccacccggguacggacagugaccaaaucagccuauaugcucaagcaucaggaagaaucacagucucuaccaaaagaagccaacaaacuguaaucccgaauaucggaucuagacccaggguaagggaugucuccagcagaaugagcaucuauuggacaauaguaaaaccgggagacauacuuuugauuaacagcacagggaaucuaauugcuccucgggguuacuucaaaauacgaagugggaaaagcucaauaaugagaucagaugcacccauuggcaaaugcaauucugaaugcaucacuccaaauggaagcauucccaaugacaaaccauuucaaaauguaaacaggaucacauauggggccugucccagauauguuaagcaaaacacucugaaauuggcaacagggaugcgaaauguaccagagaaacaaacuagaggcauauuuggcgcaaucgcggguuucauagaaaaugguugggagggaaugguggacgguugguacgguuucaggcaucaaaauucugagggcacaggacaagcagcagaucucaaaagcacucaagcagcaaucaaccaaaucaaugggaaacugaauagguuaaucgggaaaacaaacgagaaauuccaucagauugaaaaagaauucucagaaguagaagggagaauucaggaccucgagaaauauguugaggacacuaaaauagaucucuggucauacaacgcggagcuucuuguugcccuggagaaccaacauacaauugaucuaacugacucagaaaugaacaaacuguuugaaagaacaaagaagcaacugagggaaaaugcugaggauaugggcaaugguuguuucaaaauauaccacaaaugugacaaugccugcauagagucaaucagaaauggaacuuaugaccaugauguauacagagaugaagcauuaaacaaccgguuccagaucaaagguguugagcugaagucaggauacaaagauuggauccuauggauuuccuuugccauaucauguuuuuugcuuuguguugcuuuguugggguucaucaugugggccugccaaaaaggcaacauuaggugcaacauuugcauuuga

SEQ ID NO: 32167 - RNA, 1701 nt, Artificial Sequence; identical to SEQ ID NO: 32059
  derived and/or modified CDS sequence (wt) from hemagglutinin__InfluenzaA__AAY28638

SEQ ID NO: 32168 - RNA, 1701 nt, Artificial Sequence
  derived and/or modified CDS sequence (wt) from hemagglutinin__InfluenzaA__AAY28648
augaagacuaucauugcuuugagcuacauuuuaugccugguuuucgcucaaaaacuucccggaaaugacaacagcacggcaacgcugugccuggggcaucaugcagugccaaacggaacgcuagugaaaacaaucacgaaugaccaaauugaaguaacuaaugcuacugagcugguucagaguuccucaacagguagaauaugcgacaguccucaccaaauccuugauggagaaaacugcacacuaauagaugcucuauugggagacccucauugugauggcuuccaaaauaaggaaugggaccuuuuuguugaacgcagcaaagccuacagcaacuguuacccuuaugaugugccggauuaugucucccuuaggucacuaguugccucaucaggcacgcuggaguuuaacaaugaaagcuucaauuggacuggagucgcucagaauggaacaagcucugcuugcaaaaggagaucugauaaaaguuucuuuaguagauugaauugguugcaccaauuaaaauacaaauauccagcacugaacgugacuaugccaaacaaugaaaaauuugacaaauuguacauuugggggguucaccacccggguacagacagugaccaaaucagccuauaugcucaagcaucagggagagucacagucucuaccaaaagaagccaacaaacuguaaucccgaauaucggaucuggacccuggguaaggggugucuccagcagaauaagcaucuauuggacaauaguaaaaccgggagacauacuuuugauuaacagcacagggaaucuaauugcuccucgggguuacuucaaaauacgaagugggaaaagcucaauaaugaggucagaugcacccauuggcaaaugcaauucugaaugcaucacuccaaauggaagcauucccaaugacaaaccauuucaaaauguaaacaggaucacauauggggccugucccagauauguuaagcaaaacacucugaaauuggcaacagggaugcggaaugugccagagaaacaaacuagaggcauauucggugcaaucgcgggcuucauagaaaaugguugggagggaaugauggacgguugguacgguuucaggcaucaaaauucugagggcacagggcaagcagcagaucuuaaaagcacucaagcagcaaucaaccaaaucaacgggaaacugaauagguuaaucgagaaaacgaacgagaaauuccaucaaauugaaaaagaauucucagaaguagaagggagaauucaggaccucgagaaauauguugaggacacuaaaauagaucucuggucguacaaugcggagcuucuuguugcccuggagaaccaacauacaauugaucuaacugacucagaaaugaacaaacuguuugaaagaacaaagaagcaacugagggaaaaugcugaggauaugggcaaugguuguuucaaaauauaccacaaaugugacaaugccugcauagggucaaucagaaauggaacuuaugaccaugauguauacagagacgaagcauugaacaaccgguuccagaucaaagguguugagcugaagucaggauacaaagauuggauccuauggauuuccuuugccauaucauguuuuuugcuuuguauuguuuugcugggguucaucaugugggccugccaaaaaggcaacauuaggugcaacauuugcauuuga

SEQ ID NO: 32169 - RNA, 1701 nt, Artificial Sequence
  derived and/or modified CDS sequence (wt) from hemagglutinin__InfluenzaA__AAY44610
augaagacuaucauugcuuugagcuacauucuaugucugguuuucgcucaaaaacuucccggaaaugacaacagcacggcaacgcugugccuugggcaccaugcaguaccaaacggaacgauagugaaaacaaucacgaaugaccaaauugaaguuacuaaugcuacugagcugguacagaguuccucaacagguggaauaugcgacaguccucaucagauccuugauggagaaaacugcacacuaauagaugcucuauugggagacccucagugugauggcuuccaaaauaagaaaugggaccuuuuuguugaacgcaacaaagccuacagcaacuguuacccuuaugaugugccggauuaugccucccuuaggucacuaguugccucauccggcacacuggaguuuaacaaugaaagcuucgauuggacuggagucacucagaauggaacaagcucugcuugcaaaaggagaucuaauaaaaguuucuuuaguagauugaauugguugacccacuuaaaauacaaauacccagcauugaacgugacuaugccaaacaaugaaaaauuugacaaauuguacauuugggggguucaccacccggguacggacagugaccaaaucagccuauaugcucaagcaucaggaagaaucacagucucuaccaaaagaagccaacaaacuguaaucccgaauaucggaucuagacccaggguaagggaugucuccagccgaauaagcaucuauuggacaauaguaaaaccgggagacauacuuuugauuaacagcacagggaaucuaauugcuccucgggguuacuucaaaauacgaagugggaaaagcucaauaaugagaucagaugcacccauuggcaaaugcaauuccgaaugcaucacuccaaauggaagcauucccaaugacaaaccauuucaaaauguaaacaggaucacauauggggccugucccagauauguuaagcaaaacacucugaaauuggcaacagggaugcgaaacguaccagagaaacaaacuagaggcauauuuggcgcaaucgcggguuucauagaaaaugguugggagggaaugguggacgguugguaugguuucaggcaucaaaauucugagggcacaggacaagcagcagaucucaaaagcacucaagcagcaaucaaccaaaucaaugggaaacugaauagguuaaucgggaaaacaaacgagaaauuccaucagauugaaaaagaauucucagaaguagaagggagaauucaggaccucgagaaauauguugaggacacuaaaauagaucucuggucauacaacgcggagcuucuuguugcccuggagaaccaacauacaauugaucuaacugacucggaaaugaacaaacuguuugaaagaacaaagaagcaacugagggaaaaugcugaggauaugggcaaugguuguuucaaaauauaccacaaaugugacaaugccugcauagggucaaucagaaauggaacuuaugaccaugauguguacagagaugaagcauuaaacaaccgguuccagaucaaagguguugagcugaagucaggauacaaagauuggauccuauggauuuccuuugccauaucauguuuuuugcuuuguguugcuuuguugggguucaucaugugggccugccaaaaaggcaacauuaggugcaacauuugcauuuga

SEQ ID NO: 32170 - RNA, 1701 nt, Artificial Sequence
  derived and/or modified CDS sequence (wt) from hemagglutinin__InfluenzaA__AAY44620
augaagacuaucauugcuuugagcuacauuuuaugucugguuuucgcucaaaaacuucccggaaaugacaacagcacggcaacgcugugccuggggcaccaugcagugccaaacggaacgcuagugaaaacaaucacgaaugaccaaauugaagugacuaaugcuacugagcugguucagaguuccucaacagguagaauaugcgacaguccucaccaaauccuugauggagaaaacugcacacuaauagaugcucuauugggagacccucauugugauggcuuccaaaauaaggaaugggaccuuuuuguugaacgcagcaaagccuacagcaacuguuacccuuaugaugugccggauuaugucucccuuaggucacuaguugccucaucaggcacgcuggaguuuaacaaugaaagcuucaauuggacuggagucgcucagaauggaacaagcucugcuugcaaaaggagaucugauaaaaguuucuuuaguagauugaauugguugcaccaauuaaaauacaaauauccagcacugaacgugacuaugccaaacaaugaaaaauuugacaaauuguacauuugggggguucaccacccggguacagacagugaccaaaucagccuauaugcucaagcaucagggagagucacagucucuaccaaaagaagccaacaaacuguaaucccgaauaucggaucuagacccuggguaaggggugucuccagcagaauaagcaucuauuggacaauaguaaaaccgggagacauacuuuugauuaacagcacagggaaucuaauugcuccucgggguuacuucaaaauacgaagugggaaaagcucaauaaugaggucagaugcacccauuggcaaaugcaauucugaaugcaucacuccaaauggaagcauucccaaugacaaaccauuucaaaauguaaacaggaucacauaugggcccugucccagauauguuaagcaaaacacucugaaauuggcaacagggaugcggaaugugccagagaaacaaacuagaggcauauucggugcaaucgcgggcuucauagaaaaugguugggagggaaugauggacgguugguacgguuucaggcaucaaaauucugagggcacagggcaagcagcagaucuuaaaagcacucaagcagcgaucaaccaaaucaacgagaaacugaauagguuaaucgagaaaacgaacgagaaauuccaucaaauugaaaaggaauucucagaaguagaagggagaauucaggaccucgagaaauauguugaggacacuaaaauagaucucuggucguacaaugcggagcuucuuguugcccuggagaaccaacauacaauugaucuaacugacucagaaaugaacaaacuguuugaaagaacaaagaagcaacugagggaaaaugcugaggauaugggcaaugguuguuucaaaauauaccacaaaugugacaaugccugcauagggucaaucagaaauggaacuuaugaccaugauguauacagagacgaagcauugaacaaccgguuccagaucaaagguguugagcugaagucaggauacaaagauuggauccuauggauuuccuuugccauaucauguuuuuugcuuuguauuguuuugcugggguucaucaugugggccugccaaaaaggcaacauuaggugcaacauuugcauuuga

SEQ ID NO: 32171 - RNA, 1701 nt, Artificial Sequence
  derived and/or modified CDS sequence (wt) from hemagglutinin__InfluenzaA__AAY44621
augaagacuaucauugcuuugagcuacauuuuaugccugguuuucgcucaaaaacuucccggaaaugacaacagcacggcaacgcugugccuggggcaccaugcagugccaaacggaacgcuagugaaaacaaucacgaaugaccaaauugaaguaacuaaugcuacugagcugguucagaguuccucaacaaguagaauaugcgacaguccucaccaaauccuugauggagaaaacugcacacuaauagaugcucuauugggagacccucauugugauggcuuccaaaauaaggaaugggaccuuuuuguugaacgcagcaaagccuacagcaacuguuacccuuaugaugugccggauuaugucucccuuaggucacuaguugccucaucaggcacgcuggaguuuaacaaugaaagcuucaauuggacuggagucgcucagaauggaacaagcucugcuugcaaaaggagaucugauaaaaguuucuuuaguagauugaauugguugcaccaauuaaaauacaaauauccagcacugaacgugacuaugccaaacaaugaaaaauuugacaaauuguacauuugggggguucaccacccggguacagacagugaccaaaucagccuauaugcucaagcaucagggagagucacagucucuaccaaaagaagccaacaaacuguaaucccgaauaucggaucuggacccuggguaaggggugucuccagcagaauaagcaucuauuggacaauaguaaaaccgggagacauacuuuugauuaacagcacagggaaucuaauugcuccucgggguuacuucaaaauacgaagugggaaaagcucaauaaugaggucagaugcacccauuggcaaaugcaauucugaaugcaucacuccaaauggaagcauucccaaugacaaaccauuucaaaauguaaacaggaucacauauggggccugucccagauauguuaagcaaaacacucugaaauuggcaacagggaugcggaauguaccagagaaacaaacuagaggcauauucggugcaaucgcgggcuucauagaaaaugguugggagggaaugauggacgguugguacgguuucaggcaucaaaauucugagggcacagggcaagcagcagaucuuaaaagcacucaagcagcaaucaaccaaaucaacgggaaacugaauagguuaaucgagaaaacgaacgagaaauuccaucaaauugaaaaagaauucucagaaguagaagggagaauucaggaccucgagaaauauguugaggacacuaaaauagaucucuggucguacaaugcggagcuucuuguugcccuggagaaccaacauacaauugaucuaacugacucagaaaugaacaaacuguuugaaagaacaaagaagcaacugagggaaaaugcugaggauaugggcaaugguuguuucaaaauauaccacaaaugugacaaugccugcauagggucaaucagaaauggaacuuaugaccaugauguauacagagacgaagcauugaacaaccgguuccagaucaaggguguugagcugaagucaggauacaaagauuggauccuauggauuuccuuugccauaucauguuuuuugcuuuguauuguuuugcugggguucaucaugugggccugccaaaaaggcaacauuaggugcaacauuugcauuuga

SEQ ID NO: 32172 - RNA, 1701 nt, Artificial Sequence
  derived and/or modified CDS sequence (wt) from hemagglutinin__InfluenzaA__AAY44631
augaagacuaucauugcuuugagcuacauuuuaugccugguuuucgcucaaaaacuucccggaaaugacaacagcacggcaacgcugugccuggggcaccaugcagugccaaacggaacgcuagugaaaacaaucacgaaugaccaaauugaaguaacuaaugcuacugagcugguucagaguuccucaacaaguagaauaugcgacaguccucaccaaauccuugauggagaaaacugcacacuaauagaugcucuauugggagacccucauugugauggcuuccaaaauaaggaaugggaccuuuuuguugaacgcagcaaagccuacagcaacuguuacccuuaugaugugccggauuaugucucccuuaggucacuaguugccucaucaggcacgcuggaguuuaacaaugaaagcuucaauuggacuggagucgcucagaauggaacaagcucugcuugcaaaaggagaucugauaaaaguuucuuuaguagauugaauugguugcaccaauuaaaauacaaauauccagcacugaacgugacuaugccaaacaaugaaaaauuugacaaauuguacauuugggggguucaccacccggguacagacagugaccaaaucagccuauaugcucaagcaucagggagagucacagucucuaccaaaagaagccaacaaacuguaaucccgaauaucggaucuagacccuggguaaggggugucuccagcagaauaagcaucuauuggacaauaguaaaaccgggagacauacuuuugauuaacagcacagggaaucuaauugcuccucgggguuacuucaaaauacgaagugggaaaagcucaauaaugaggucagaugcacccauuggcaaaugcaauucagaaugcaucacuccaaauggaagcauucccaaugacaaaccauuucaaaauguaaacaggaucacauauggggccugucccagauauguuaagcaaaacacucugaaauuggcaacagggaugcggaauguaccagagaaacaaacuagaggcauauucggugcaaucgcgggcuucauagaaaaugguugggagggaaugauggacgguugguacgguuucaggcaucaaaauucugagggcacagggcaagcagcagaucuuaaaagcacucaagcagcaaucaaccaaaucaacgggaaacugaauagguuaaucgagaaaacgaacgagaaauuccaucaaauugaaaaagaauucucagaaguagaagggagaauucaggaccucgagaaauauguugaggacacuaaaauagaucucuggucguacaaugcggagcuucuuguugcccuggagaaccaacauacaauugaucuaacugacucagaaaugaacaaacuguuugaaagaacaaagaagcaacugagggaaaaugcugaggauaugggcaaugguuguuucaaaauauaccacaaaugugacaaugccugcauagggucaaucagaaauggaacuuaugaccaugauguauacagagacgaagcauugaacaaccgguuccagaucaaagguguugagcugaagucaggauacaaagauuggauccuauggauuuccuuugccauaucauguuuuuugcuuuguauuguuuugcugggguucaucaugugggccugccaaaaaggcaacauuaggugcaacauuugcauuuga

SEQ ID NO: 32173 - RNA, 1701 nt, Artificial Sequence
  derived and/or modified CDS sequence (wt) from hemagglutinin__InfluenzaA__AAY44641
augaagacuaucauugcuuugagcuacauuuuaugucugguuuucgcucaaaaacuucccggaaaugacaacagcacggcaacgcugugccuggggcaccaugcagugccaaacggaacgcuagugaaaacaaucacgaaugaccaaauugaagugacuaaugcuacugagcugguucagaguuccucaacagguagaauaugcgacaguccucaccaaauccuugauggagaaaacugcacacuaauagaugcucuauugggagacccucauugugauggcuuccaaaauaaggaaugggaccuuuuuguugaacgcagcaaagccuacagcaacuguuacccuuaugaugugccggauuaugucucccuuaggucacuaguugccucaucaggcacgcuggaguuuaacaaugaaagcuucaauuggacuggagucgcucagaauggaacaagcucugcuugcaaaaggagaucugauaaaaguuucuuuaguagauugaauugguugcaccaauuaaaauacaaauauccagcacugaacgugacuaugccaaacaaugaaaaauuugacaaauuguacauuugggggguucaccacccggguacagacagugaccaaaucagccuauaugcucaagcaucagggagagucacagucucuaccaaaagaagccaacaaacuguaaucccgaauaucggaucuagacccuggguaaggggugucuccagcagaauaagcaucuauuggacaauaguaaaaccgggagacauacuuuugauuaacagcacagggaaucuaauugcuccucgggguuacuucaaaauacgaagugggaaaagcucaauaaugaggucagaugcacccauuggcaaaugcaauucugaaugcaucacuccaaauggaagcauucccaaugacaaaccauuucaaaauguaaacaggaucacauaugggcccugucccagauauguuaagcaaaacacucugaaauuggcaacagggaugcggaaugugccagagaaacaaacuagaggcauauucggugcaaucgcgggcuucauagaaaaugguugggagggaaugauggacgguugguacgguuucaggcaucaaaauucugagggcacagggcaagcagcagaucuuaaaagcacucaagcagcaaucaaccaaaucaacgggaaacugaauagguuaaucgagaaaacgaacgagaaauuccaucaaauugaaaaggaauucucagaaguagaagggagaauucaggaccucgagaaauauguugaggacacuaaaauagaucucuggucguacaaugcggagcuucuuguugcccuggagaaccaacauacaauugaucuaacugacucagaaaugaacaaacuguuugaaagaacaaagaagcaacugagggaaaaugcugaggauaugggcaaugguuguuucaaaauauaccacaaaugugacaaugccugcauagggucaaucagaaauggaacuuaugaccaugauguauacagagacgaagcauugaacaaccgguuccagaucaaagguguugagcugaagucaggauacaaagauuggauccuauggauuuccuuugccauaucauguuuuuugcuuuguauugguuugcugggguucaucaugugggccugccaaaaaggcaacauuaggugcaacauuugcauuuga

SEQ ID NO: 32174 - RNA, 1701 nt, Artificial Sequence
  derived and/or modified CDS sequence (wt) from hemagglutinin__InfluenzaA__AAY44651
augaagacuaucauugcuuugagcuacauuuuaugucugguuuucgcucaaaaacuucccguaaaugacaacagcacggcaacgcugugccugggacaccaugcagugccaaacggaacgcuagugaaaacaaucacgaaugaccacauugaagugacuaaugcuacugagcugguucagaguuccucaacagguagaauaugcgacaguccucaccaaauccuugauggagaaaacugcacacuaauagaugcucuauugggagacccucauugugauggcuuccaaaauaaggaaugggaccuuuuuguugaacgcagcacagccuacagcaacuguuacccuuaugaugugccggauuaugccucccuuaggucacuaguugccucauccggcacacuggaguuuaacaaugaaagcuucaauuggacuggagucgcucagaauggaacaagcucugcuugcaaaaggagaucuauuaaaaguuucuuuaguagauugaauugguugcaccaauuaaaauacaaauauccagcacugaacgugaccaugccaaacaaugaaaaauuugacaaauuguacauuugggggguucaccacccgaguacggacagugaccaaaucagccuauaugcucaagcaucagggagagucacagucucuaccaaaagaagccaacaaacuguaaucccgaauaucggaucuagacccugggaaaggggugucuccagcagaauaagcaucuauuggacaauaguaaaaccgggagacauacuuuugauuaacagcacagggaaucuaauugcuccucgggguuacuucaaaauacgaagugggaaaagcucaauaaugaggucaaaugcacccauuggcaaaugcaauucugaaugcaucacuccaaauggaagcauucccaaugacaaaccauuucaaaauguaaacaggaucacauauggggccugucccagauauguuaagcaaaacacucugaaauuggcaacagggaugcggaauguaccagagaaacaaacuagaggcauauucggcgcaaucgcggguuucauagaaaaugguugggaaggaaugguggacgguugguacgguuucaggcaucaaaauucugagggcacaggacaagcagcagaucuuaaaagcacucaagcagcaaucaaccaaaucaacgggaaacugaauagguuaaucgagaaaacaaacgagaaauuccaucaaauugaaaaagaauucucagaaguagaagggagaauucaggaccucgagaaauauguugaggacacuaaaauagaucucuggucguacaacgcggagcuucuuguugcccuggagaaccaacauacaauugaucuaacugacucagaaaugaacaaacuguuugaaagaacaaggaagcaacugaaggaaaaugcugaggauaugggcaaugguuguuucaaaauauaccacaaaugugacaaugccugcauagggucaaucagaaauggaacuuaugaccaugauguauacagagacgaagcauuaaacaaccgguuucagaucaaagguguugagcugaagucaggauacaaagauuggauccuauggauuuccuuugccauaucauguuuuuugcuuuguguuguuuugcugggguucaucaugugggccugccaaaaaggcaacauuaggugcaacauuugcauuuga

SEQ ID NO: 32175 - RNA, 1701 nt, Artificial Sequence
  derived and/or modified CDS sequence (wt) from hemagglutinin__InfluenzaA__AAY44755
augaagacuaucauugcuuugagcuacauuuuaugucugguuuucgcucaaaaacuucccggaaaugacaacagcacggcaacgcugugccuggggcaccaugcagugccaaacggaacgcuagugaaaacaaucacgaaugaccaaauugaagugacuaaugcuacugagcugguucagaguuccucaacagguagaauaugcgacaguccucaccaaauccuugauggagaaaacugcacacuaauagaugcucuauugggagacccucauugugauggcuuccaaaauaaggaaugggaccuuuucguugaacgcagcaaagccuacagcaacuguuacccuuaugaugugccggauuaugccucccuuaggucacuaguugccucauccggcacacuggaguuuaacaaugaaagcuucaauuggacuggagucgcucagaauggaacaagcucugcuugcaaaaggaggucuaauaaaaguuucuuuaguagauugaauugguugcaccaauugaaauacaaauacccagcacugaacgugacuaugccaaacaaugaaaaauuugacaaauuguacauuugggggguucaccacccgaguacggacagugaccaaaucagccuauaugcucaagcaucagggagagucacagucucuaccaaaagaggccaacagacuguaaucccgaauaucggaucuagacccuggguaaggggugucuccagcauaauaagcaucuauuggacaauaguaaaaccgggagacauacuuuugauuaacagcacagggaaucuaauugcuccucgggguuacuucaaaauacgaagugggaaaagcucaguaaugaggucagaugcauccauugguaaaugcaauucugaaugcaucacuccaaauggaagcauucccaaugacaaaccauuucaaaauguaaacaggaucacauauggggccugucccagauauguuaagcaaaacacucugaaauuggcaacagggaugcggaauguaccagagaaacaaacuagaggcauauucggugcaaucgcggguuucauagaaaaugguugggagggaaugguggacgguugguacgguuucaggcaucaaaauucugagggcacaggacaagcagcagaucuuaaaagcacucaagcagcaaucaaccaaaucaacgggaaacugaauagguuaaucgagaaaacgaacgagaaauuccaucaaauugaaaaagaauucucagaaguagaagggagaauucaggaccucgagaaauauguugaggacacuaaaauagaucucuggucguacaacgcggagcuucuuguugcccuggagaaccaacauacaauugaucuaacugacucagaaaugaacaaacuguuugaaagaacaaagaagcaacugagggaaaaugcugaggauaugggcaauggcuguuucaaaauauaccacaaaugugacaaugccugcauagggucaaucagaaauggaacuuaugaccaugauguauacagagacgaagcauuaaacaaccgguuccagaucaaagguguugagcugaagucaggauacaaagauuggauccuauggauuuccuuugccauaucauguuuuuugcuuuguguuguuuugcugggguucaucaugugggccugccaaaaaggcaacauuaggugcaacauuugcauuuga

SEQ ID NO: 32176 - RNA, 1701 nt, Artificial Sequence
  derived and/or modified CDS sequence (wt) from hemagglutinin__InfluenzaA__AAY44775
augaagacuaucauugcuuugagcuacauuuuaugucugguuuucgcucaaaaacuucccguaaaugacaacagcacggcaacgcugugccugggacaccaugcagugccaaacggaacgcuagugaaaacaaucacgaaugaccacauugaagugacuaaugccacugagcugguucagaguuccucaacagguagaauaugcgacaguccucaccaaauccuugauggagaaaacugcacacuaauagaugcucuauugggagacccucauugugauggcuuccaagauaaggaaugggaccuuuuuguugaacgcagcacagccuacagcaacuguuacccuuaugaugugccggauuaugccucccuuaggucacuaguugccucauccggcacacuggaguuuaacaaugaaagcuucaauuggacuggagucgcucagaauggaacaagcucugcuugcaaaaggagaucuauuaaaaguuucuuuaguagauugaauugguugcaccaauuaaaauacaaauauccagcacugaacgugacuaugccaaacaaugaaaaauuugacaaauuguacauuugggggguucaccacccgaguacggacagugaccaaaucagccuauaugcucaagcaucagggagagucacagucucuaccaaaagaagccaacaaacuguaaucccgaauaucggaucuagacccuggguaaggggugucuccagcagaauaagcaucuauuggacaauaguaaaaccgggagacauacuuuugauuaacagcacagggaaucuaauugcuccucgggguuacuuuaaaauacgaagugggaaaagcucaauaaugaggucaaaugcacccauuggcaaaugcaauucugaaugcaucacuccaaauggaagcauucccaaugacaaaccauuucaaaauguaaacaggaucacauauggggccugucccagauauguuaagcaaaccacucugaaauuggcaacagggaugcggaauguaccagagaaacaaacuagaggcauauucggcgcaaucgcggguuucauagaaaaugguugggagggaaugguggaugguugguacgguuucaggcaucaaaauucugagggcacaggacaagcagcagaucuuaaaagcacucaagcagcaaucaaccaaaucaacgggaaacugaauagguuaaucgagaaaacaaacgagaaauuccaucaaauugaaaaagaauucucagaaguagaagggagaauucaggaccucgagaaauauguugaggacacuaaaauagaucucuggucguacaacgcggagcuucuuguugcccuggagaaccaacauacaauugaucuaacugacucagaaaugaacaaacuguuugaaagaacaaggaagcaacugagggaaaaugcugaggauaugggcaaugguuguuucaaaauauaccacaaaugugacaaugccugcauagggucaaucagaaauggaacuuaugaccaugauguauacagagacgaagcauuaaacaaccgguuccagaucaaagguguugagcugaagucaggauacaaagauuggauccuauggauuuccuuugccauaucauguuuuuugcuuuguguuguuuugcugggguucaucaugugggccugccaaaaaggcaacauuaggugcaacauuugcauuuga

SEQ ID NO: 32177 - RNA, 1701 nt, Artificial Sequence; identical to SEQ ID NO: 32084
  derived and/or modified CDS sequence (wt) from hemagglutinin__InfluenzaA__AAY44785

SEQ ID NO: 32178 - RNA, 1701 nt, Artificial Sequence
  derived and/or modified CDS sequence (wt) from hemagglutinin__InfluenzaA__AAY44795
augaagacuaucauugcuuugagcuacauuuuaugucugguuuucgcucaaaaacuucccguaaaugacaacagcacggcaacgcugugccugggacaccaugcagugccaaacggaacgcuagugaaaacaaucacgaaugaccacauugaagugacuaaugcuacugagcugguucagaguuccucaacagguagaauaugcgacaguacucaccaaauccuugauggagaaaacugcacacuaauagaugcucuauugggagacccucauugugauggcuuccaaaauaaggaaugggaccuuuuuguugaacgcagcacagccuacagcaacuguuacccuuaugaugugccggauuaugccucccuuaggucacuaguugccucauccggcacacuggaguuuaacaaugaaagcuucaauuggacuggagucgcucagaauggaacaagcucugcuugcaaaaggagaucuauuaaaaguuucuuuaguagauugaauugguugcaccaauuaaaauacaaauauccagcacugaacgugacuaugccaaacaaugaaaaauuugacaaauuguacauuugggggguucaccacccgaguacggacagugaccaaaucagccuauaugcucaagcaucagggagagucacagucucuaccaaaagaagccaacaaacuguaaucccgaauaucggaucuagacccuggguaaggggugucuccagcagaauaagcaucuauuggacaauaguaaaaccgggagacauacuuuugauuaacagcacagggaaucuaauugcuccucgggguuacuuuaaaauacgaagugggaaaagcucaauaaugaggucaaaugcacccauuggcaaaugcaauucugaaugcaucacuccaaauggaagcauucccaaugacaaaccauuucaaaauguaaacaggaucacauauggggccugucccagauauguuaagcaaaacacucugaaauuggcaacagggaugcggaauguaccagagaaacaaacuagaggcauauucggcgcaaucgcggguuucauagaaaaugguugggagggaaugguggacgguugguacgguuucaggcaucaaaauucugagggcacaggacaagcagcagaucuuaaaagcacucaagcagcaaucaaccaaaucaacgggaaacugaauagguuaaucgagaaaacaaacgagaaauuccaucaaauugaaaaagaauucucagaaguagaagggagaauucaggaccucgagaaauauguugaggacacuaaaauagaucucuggucguacaacgcggagcuucuuguugcccuggagaaccaacauacaauugaucuaacugacucagaaaugaacaaacuguuugaaagaacaaggaagcaacugagggaaaaugcugaggauaugggcaaugguuguuucaaaauauaccacaaaugugacaaugccugcauagggucaaucagaaauggaacuuaugaccaugauguauacagagacgaagcauuaaacaaccgguuccagaucaaagguguugagcugaagucaggauacaaagauuggauccuauggauuuccuuugccauaucauguuuuuugcuuuguguuguuuugcugggguucaucaugugggccugccaaaaaggcaacauuaggugcaacauuugcauuuga

SEQ ID NO: 32179 - RNA, 1701 nt, Artificial Sequence
  derived and/or modified CDS sequence (wt) from hemagglutinin__InfluenzaA__AAY44796
augaagacuaucauugcuuugagcuacacucuaugucugguuuucgcucaaaaacuucccggaaaugacaacagcacggcaacguugugccuugggcaccaugcaguaccaaacggaacgauagugaaaacaaucacgaaugaccaaauugaaguuacuaaugcuacugagcugguacagaguuccucaacagguggaauaugcgacaguccucaucagauccuugauggagaaaacugcacacuaauagaugcucuauugggagacccucagugugauggcuuccaaaauaagaaaugggaccuuuuuguugaacgcagcaaagccuacagcaacuguuacccuuaugaugugccggauuaugccucccuuaggucacuaguugccucauccggcacacuagaguuuaacaaugaaagcuucgauuggacuggagucacucagaauggaacaagcucugcuugcaaaaggagaucuaauaaaaguuucuuuaguagauugaauugguugacccacuuaaaauacaaauacccagcauugaacgugacuaugccaaacaaugaaaaauuugacaaauuguacauuugggggguucaccacccggguacggacagugaccaaaucagccuauaugcucaagcaucaggaagaaucacagucucuaccaaaagaagccaacaaacuguaaucccgaauaucggaucuagacccaggguaagggaugucuccagccgaauaagcaucuauuggacaauaguaaaaccgggagacauacuuuugauuaacagcacagggaaucuaauugcuccucgggguuacuucaaaauacgaagugggaaaagcucaauaaugagaucagaugcacccauuggcaaaugcaauucugaaugcaucacuccaaauggaagcauucccaaugacaaaccauuucaaaauguaaacaggaucacauauggggccugucccagauauaucaagcaaaacacucugaaauuggcaacagggaugcgaaauguaccagagaaacaaacuagaggcauauuuggcgcaaucgcggguuucauagaaaaugguugggagggaaugguggacgguugguacgguuucaggcaucaaaauucugagggcacaggacaagcagcagaucucaaaagcacucaagcagcaaucaaccaaaucaaugggaaacugaauagguuaaucgggaaaacaaacgagaaauuccaucagauugaaaaagaauucucagaaguagaagggagaauucaggaccucgagaaauauguugaggacacuaaaauagaucucuggucauacaacgcggagcuucuuguugcccuggagaaccaacauacaauugaucuaacugacucagaaaugaacaaacuguuugaaagaacaaagaagcaacugagggaaaaugcugaggauaugggcaaugguuguuucaaaauauaccacaaaugugacaaugccugcauagggucaaucagaaauggaacuuaugaccaugauguguacagagaugaagcauuaaacaaccgguuccagaucaaagguguugagcugaagucaggauacaaagauuggauccuauggauuuccuuugccauaucauguuuuuugcuuuguguugcuuuguugggguucaucaugugggccugccaaaaaggcaacauuaggugcaacauuugcauuuga

SEQ ID NO: 32180 - RNA, 1701 nt, Artificial Sequence; identical to SEQ ID NO: 32059
  derived and/or modified CDS sequence (wt) from hemagglutinin__InfluenzaA__AAY44896

SEQ ID NO: 32181 - RNA, 1701 nt, Artificial Sequence
  derived and/or modified CDS sequence (wt) from hemagglutinin__InfluenzaA__AAY44906
augaagacuaucauugcuuugagcuacauucuaugucugguuuucgcucaaaaacuucccggaaaugacaacagcacggcaacgcugugccuugggcaccaugcaguaccaaacggaacgauagugaaaacaaucacgaaugaccaaauugaaguuacuaaugcuacugagcugguacagaguuccucaacagguggaauaugcgacaguccucaucagauccuugauggagaaaacugcacacuaauagaugcucuauugggagacccucagugugauggcuuccaaaauaagaaaugggaccuuuuuguugaacgcagcaaagccuacagcaacuguuacccuuaugaugugccggauuaugccucccuuaggucacuaguugccucauccggcacacuggaguuuaacaaugaaagcuucgauuggacuggagucacucagaauggaacaagcucugcuugcaaaaggagaucuaauaaaaguuucuuuaguagauugaauugguugacccacuuaaaauacaaauacccagcauugaacgugacuaugccaaacaaugaaaaauuugacaaauuguacauuugggggguucaccacccggguacggacagugaccaaaucagccuauaugcucaagcaucaggaagaaucacagucucuaccaaaagaagccaacaaacuguaaucccgaauaucggaucuagacccaggguaagggaugucucuagccgaauaagcaucuauuggacaauaguaaaaccgggagacauacuuuugauuaacagcacagggaaucuaauugcuccucgggguuacuucaaaauacgaagugggaaaagcucaauaaugagaucagaugcacccauuggcaaaugcaauuccgaaugcaucacuccaaauggaagcauucccaaugacaaaccauuucaaaauguaaacaggaucacauauggggccugucccagauauguuaagcaaaacacuuugaaauuggcaacagggaugcgaaauguaccagagagacaaacuagaggaauauuuggcgcaaucgcgggcuucauagaaaaugguugggagggaaugguggacgguugguacgguuucaggcaucaaaauucugagggcacaggacaagcagcagaucucaaaagcacucaagcagcaaucaaccaaaucaaugggaaacugaauagguuaaucgggaaaacaaacgagaaauuccaucagauugaaaaagaauucucagaaguagaagggagaauucaggaccucgagaaauauguugaggacacuaaaauagaucucuggucauacaacgcggagcuucuuguugcccuagagaaccaacauacaauugaucuaacugacucagaaaugaacaaacuguuugaaagaacaaagaagcaacugagggaaaaugcugaggauaugggcaaugguuguuucaaaauauaccacaaaugugacaaugccugcauagggucaaucagaaauggaacuuaugaccaugauguguacagagaugaagcauuaaacaaccgguuccagaucaaagguguugagcugaagucaggauacaaagauuggauccuauggauuuccuuugccauaucauguuuuuugcuuuguguugcuuuguugggguucaucaugugggccugccaaaaaggcaacauuaggugcaacauuugcauuuga

SEQ ID NO: 32182 - RNA, 1701 nt, Artificial Sequence
  derived and/or modified CDS sequence (wt) from hemagglutinin__InfluenzaA__AAY46371
augaagacuaucauugcuuugagcuacauuuuaugucugguuuuugcucaaaaacuucccggaaaugacaacagcacggcaacgcugugccugggacaccaugcagugccaaacggaacgcuagugaaaacaaucacgagugaccaaauugaagugacuaaugcuacugagcugguucagaguuccucaacagguagaauaugcgacaguccucaccgaauccuugauggagaaaacugcacacugauagaugcucuauugggagacccucauugugauggcuuccaaaauaaggaaugggaccuuuuuguugaacgcagcaaagccuacagcaacuguuacccuuaugaugugccggauuaugccucccuuaggucacuaguugccucauccggcacccuggaguuuaacaaugaaagcuucaauuggacuggagucgcucagaauggaacaagcuuugcuugcaaaaggagaucuauuaaaaguuucuuuaguagauugaauugguugcaccaauuaaaauacaaauauccagcacugaacgugacuaugccaaacaaugacaaauuugacaaauuguacauuugggggguucaccacccggguacggacagugaccaaaccagccuauaugcucaagcaucagggagagucacagucucuaccaaaagaagccaacaaacuguaaucccgaauaucggaucuagacccuggguaagggguguuuccagcagaauaagcaucuauuggacaauagugaaaccgggagacauacuucugauuaacagcacagggaaucuaauugcuccucgggguuacuucaaaauacgaagugggaaaagcucaauaaugaggucagaugcacccauuggcaaaugcaauucugaaugcaucacuccaaauggaagcauucccaauggcaaaccauuucaaaauguaaacaggaucacauauggggccugucccagauauguuaagcaaaacacucugaaauuggcaacagggaugcggaauguaccagagaaacaaacuagaggcauauucggcgcaaucgcagguuucauagaaaaugguugggagggaaugguagacgguugguacgguuucaggcaucaaaauucugagggcacaggacaagcagcagaucuuaaaagcacucaagcagcaaucaaccaaaucaacgggaaacugaauagguuaaucgagaaaacgaacgagaaauuccaucaaauugaaaaagaauucacagaaguagaagggagaauucaggaccucgagaaauauguugaggacacuaaaauagaucucuggucguacaacgcggagcuucuuguugcccuggagaaccaacauacaauugaucuaacugacucagaaaugaacaaacuguuugaaagaacaaggaagcaacugagggaaaaugcugaggauaugggcaaugguuguuucaaaauauaccacaaaugugacaaugccugcauagggucaaucagaaauggaacuuaugaccaugauguauacagagacgaagcauuaaacaaccgguuccagaucaaagguguugagcugaagucaggauacaaagauuggauccuauggauuuccuuugccacaucauguuuuuugcuuuguguuguuuugcugggguucaucaugugggccugccaaaaaggcaacauuaggugcaacauuugcauuuga

SEQ ID NO: 32183 - RNA, 1701 nt, Artificial Sequence; identical to SEQ ID NO: 32048
  derived and/or modified CDS sequence (wt) from hemagglutinin__InfluenzaA__AAY46381

SEQ ID NO: 32184 - RNA, 1701 nt, Artificial Sequence
  derived and/or modified CDS sequence (wt) from hemagglutinin__InfluenzaA__AAY46391
augaagacuaucauugcuuugagcuacauuuuaugucugguuuucgcucaaaaacuucccguaaaugacaacagcacggcaacgcugugccugggacaccaugcagugccaaacggaacgcuagugaaaacaaucacgaaugaccacauugaagugacuaaugcuacugagcugguucagaguuccucaacagguagaauaugcgacaguccucaccaaauccuugauggagaaaacugcacacuaauagaugcucuauugggagacccucauugugauggcuuccaaaauaaggaaugggaccuuuuuguugaacgcagcacagccuacagcaacuguuacccuuaugaugugccggauuaugccucccuuaggucacuaguugccucauccggcacacuggaguuuaacaaugaaagcuucaauuggacuggagucgcucagaauggaacaagcucugcuugcaaaaggagaucuauuaaaaguuucuuuaguagauugaauugguuacaccaauuaaaauacaaauauccagcacugaacgugacuaugccaaacaaugaaaaauuugacaaauuguacauuugggggguucaccacccgaguacggacagugaccaaaucagccuauaugcucaagcaucagggagagucacagucucuaccaaaagaagccaacaaacuguaaucccgaauaucggaucuagacccuggguaaggggugucuccagcauaauaagcaucuauuggacaauaguaaaaccgggagacauacuuuugauuaacagcacagggaaucuaauugcuccucgggguuacuucaaaauacgaagugggaaaagcucaauaaugaggucaaaugcacccauuggcaaaugcaauucugaaugcaucacuccaaauggaagcauucccaaugacaaaccauuucaaaauguaaacaggaucacauauggggccugucccagauauguuaagcaaaacacucugaaauuggcaacagggaugcggaauguaccagagaaacaaacuagaggcauauucggcgcaaucgcggguuucauagaaaaugguugggaaggaaugguggacgguugguacgguuucaggcaucaaaauucugagggcacaggacaagcagcagaucuuaaaagcacucaagcagcaaucaaccaaaucaacgggaaacugaauagguuaaucgagaaaacaaacgagaaauuccaucaaauugaaaaagaauucucagaaguagaagggagaauucaggaccucgagaaauauguugaggacacuaaaauagaucucuggucguacaacgcggagcuucuuguugcccuggagaaccaacauacaauugaucuaacugacucagaaaugaacaaacuguuugaaagaacaaggaagcaacugagggaaaaugcugaggauaugggcaaugguuguuucaaaauauaccacaaaugugacaaugccugcauagggucaaucagaaauggaacuuaugaccaugauguauacagagacgaagcauuaaacaaccgguuccagaucaaagguguugagcugaagucaggauacaaagauuggauccuauggauuuccuuugccauaucauguuuuuugcuuuguguuguuuugcugggguucaucaugugggccugccaaaaaggcaacauuaggugcaacauuugcauuuga

SEQ ID NO: 32185 - RNA, 1701 nt, Artificial Sequence
  derived and/or modified CDS sequence (wt) from hemagglutinin__InfluenzaA__AAY46426
augaagacuaucauugcuuugagcuacauuuuaugucugguuuucgcucaaaaacuucccggaaaugacaacagcacggcaacgcugugccuggggcaccaugcagugccaaacggaacgcuagugaaaacaaucacgaaugaccaaauugaagugacuaaugcuacugagcugguucagaguuccucaacagguagaauaugcgacaguccucaccaaauccuugauggagaaaacugcacacuaauagaugcucuauugggagacccucauugugauggcuuccaaaauaaggaaugggaccuuuuuguugaacgcagcaaagccuacagcaacuguuacccuuaugaugugccggauuaugccucccuuaggucacuaguugccucauccggcacacuggaguuuaacaaugaaagcuucaauuggacuggagucgcucagaauggaacaagcucugcuugcaaaaggagaucuaauaaaaguuucuuuaguagauugaauugguugcaccaauuaaaauacaaauauccagcacugaacgugacuaugccaaacaauaaaaaauuugacaaauuguacauuugggggguucaccacccgaguacggacagugaccaaaucagccuauaugcucaagcaucagggagagucacagucucuaccaaaagaagccaacaaacuguaaucccgaauaucggaucuagacccuggguaaggggugucuccagcagaauaagcaucuauuggacaauaguaaaaccgggagacauacuuuugauuaacagcacagggaaucuaauugcuccucgggguuacuucaaaauacgaagugggaaaagcucaauaaugaggucagaugcacccauuggcaaaugcaauucugaaugcaucacuccaaauggaagcauucccaaugacaaaccauuucaaaauguaaacaggaucacauauggggccugucccagauauguuaagcaaaacacucugaaauuggcaacagggaugcggaauauaccagagaaacaaacuagaggcauauucggcgcaaucgcggguuucauagaaaaugguugggagggaaugguggacgguugguacgguuucaggcaucaaaauucugagggcacaggacaagcagcagaucuuaaaagcacucaagcagcaaucaaccaaaucaacgggaaacugaauagguuaaucgagaaaacgaacgagaaauuccaucaaauugaaaaagaauucucagaaguagaagggagaauucaggaccucgagaaauauguugaggacacuaaaauagaucucuggucguacaacgcggagcuucuuguugcccuggagaaccaacauacaauugaucuaacugacucagaaaugaacaaacuguuugaaagaacaaagaagcaacugagggaaaaugcugaggauaugggcaaugguuguuucaaaauauaccacaaaugugacaaugccugcauagggucaaucagaaauggaacuuaugaccaugauguauacagagacgaagcauuaaacaaccgguuccagaucaaagguguugagcugaagucaggauacaaagauuggauccuauggauuuccuuugccauaucauguuuuuugcuuuguguuguuuugcugggguucaucaugugggccugccaaaaaggcaacauuaggugcaacauuugcauuuga

SEQ ID NO: 32186 - RNA, 1701 nt, Artificial Sequence
  derived and/or modified CDS sequence (wt) from hemagglutinin__InfluenzaA__AAY47013
augaagacuaucauugcuuugagcuacauuuuauguuugguuuucgcucaaaaacuucccggaaaugacaacagcacggcaacgcugugccuggggcaucaugcagugccaaacggaacgcuagugaaaacaaucacgaaugaccaaauugaagugacuaaugcuacugagcugguucagaguuccucaacagguagaauaugcgacaguccucaccaaauccuugauggagaaaacugcacacuaauagaugcucuauugggagacccucauugugauggcuuccaaaauaaggaaugggaccuuuuuguugaacgcagcaaagccuacagcaacuguuacccuuaugaugugccggauuaugucucccuuaggucacuaguugccucaucaggcacgcuggaguuuaacaaugaaagcuucaauuggacuggagucgcucagaauggaacaagcucugcuugcaaaaggagaucugauaaaaguuucuuuaguagauugaauugguugcaccaauuaaaauacaaauauccagcacugaacgugacuaugccaaacaaugaaaaauuugacaaauuguacauuugggggguucaccacccggguacagacagugaccaaaucagccuauaugcucaagcaucagggagagucacagucucuaccaaaagaagccaacaaacuguaaucccgaauaucgggucuggacccuggguaaggggugucuccagcagaauaagcaucuauuggacaauaguaaaaccgggagacauacuuuugauuaacagcacagggaaucuaauugcuccucgggguuacuucaaaauacgaagugggaaaagcucaauaaugaggucagaugcacccauuggcaaaugcaauucugaaugcaucacuccaaauggaagcauucccaaugacaaaccauuucaaaauguaaacaggaucacauaugggcccugucccagauauguuaagcaaaacacucugaaauuggcaacagggaugcggaaugugccagagaaacaaacuagaggcauauucggugcaaucgcgggcuucauagaaaaugguugggagggaaugauggacgguugguacgguuucaggcaucaaaauucugagggcacagggcaagcagcagaucuuaaaagcacucaagcagcaaucaaccaaaucaacgggaaacugaauagguuaaucaagaaaacgaacgagaaauuccaucaaauugaaaaagaauucucagaaguagaagggagaauucaggaccucgagaaauauguugaggacacuaaaauagaucucuggucguacaaugcggagcuucuuguugcccuggagaaccaacauacaauugaucuaacugacucagaaaugaacaaacuguuugaaagaacaaagaagcaacugagggaaaaugcugaggauaugggcaaugguuguuucaaaauauaccacaaaugugacaaugccugcauagggucaaucagaaauggaacuuaugaccaugauguauacagagacgaagcauugaacaaccgguuccagaucaaagguguugagcugaagucaggauacaaagauuggauccuauggauuuccuuugccauaucauguuuuuugcuuuguauuguuuugcugggguucaucaugugggccugccaaaaaggcaacauuaggugcaacauuugcauuuga

SEQ ID NO: 32187 - RNA, 1701 nt, Artificial Sequence
  derived and/or modified CDS sequence (wt) from hemagglutinin__InfluenzaA__AAY47023
augaagacuaucauugcuuugagcuacauuuuaugccugguuuucgcucaaaaacuucccggaaaugacaacagcacggcaacgcugugccuggggcaccaugcagugccaaacggaacgcuagugaaaacaaucacgaaugaccaaauugaaguaacuaaugcuacugagcugguucagaguuccucaacaaguagaauaugcgacaguccucaccaaauccuugauggagaaaacugcacacuaauagaugcucuauugggagacccucauugugauggcuuccaaaauaaggaauggggccuuuuuguugaacgcagcaaagccuacagcaacuguuacccuuaugaugugccggauuaugucucccuuaggucacuaguugccucaucaggcacgcuggaguuuaacaaugaaagcuucaauuggacuggagucgcucagaauggaacaagcucugcuugcaaaaggagaucugauaaaaguuucuuuaguagauugaauugguugcaccaauuaaaauacaaauauccagcacugaacgugacuaugccaaacaaugaaaaauuugacaaauuguacauuugggggguucaccacccggguacagacagugaccaaaucagccuauaugcucaagcaucagggagagucacagucucuaccaaaagaagccaacaaacuguaaucccgaauaucggaucuagacccuggguaaggggugucuccagcagaauaagcaucuauuggacaauaguaaaaccgggagacauacuuuugauuaacagcacagggaaucuaauugcuccucgggguuacuucaaaauacgaagugggaaaagcucaauaaugaggucagaugcacccauuggcaaaugcaauucugaaugcaucacuccaaauggaagcauucccaaugacaaaccauuucaaaauguaaacaggaucacauauggggccugucccagauauguuaagcaaaacacucugaaauuggcaacagggaugcggaauguaccagagaaacaagcuagaggcauauucggugcaaucgcgggcuucauagaaaaugguugggagggaaugauggacgguugguacgguuucaggcaucaaaauucugagggcacagggcaagcagcagaucuuaaaagcacucaagcagcaaucaaccaaaucaacgggaaacugaauagguuaaucgagaaaacgaacgagaaauuccaucaaauugaaaaagaauucucagaaguagaagggagaauucaggaccucgagaaauauguugaggacacuaaaauagaucucuggucguacaaugcggagcuucuuguugcccuggagaaccaacauacaauugaucuaacugacucagaaaugaacaaacuguuugaaagaacaaagaagcaacugagggaaaaugcugaggauaugggcaaugguuguuucaaaauauaccacaaaugugacaaugccugcauagggucaaucagaaauggaacuuaugaccaugauguauacagagacgaagcauugaacaaccgguuccagaucaaagguguugagcugaagucaggauacaaagauuggauccuauggauuuccuuugccauaucauguuuuuugcuuuguauuguuuugcugggguucaucaugugggccugccaaaaaggcaacauuaggugcaacauuugcauuuga

SEQ ID NO: 32188 - RNA, 1701 nt, Artificial Sequence
  derived and/or modified CDS sequence (wt) from hemagglutinin__InfluenzaA__AAY47052
augaagacuaucauugcuuugagcuacauuuuaugucugguuuucgcucaaaaacuucccguaaaugacaacagcacggcaacgcugugccugggacaccaugcagugccaaacggaacgcuagugaaaacaaucacgaaugaccacauugaagugacuaaugcuacugagcugguucagaguuccucaacagguagaauaugcgacaguccucaccaaauccuugauggagaaaacugcacacuaauagaugcucuauugggagacccucauugugauggcuuccaaaauaaggaaugggaccuuuuuguugaacgcagcacagccuacagcaacuguuacccuuaugaugugccggauuaugccucccuuaggucacuaguugccucauccggcacacuggaguuuaacaaugaaagcuucaauuggacuggagucgcucagaauggaacaagcucugcuugcaaaaggagaucuauuaaaaguuucuuuaguagauugaauugguuacaccaauuaaaauacaaauauccagcacugaacgugacuaugccaaacaaugaaaaauuugacaaauuguacauuugggggguucaccacccgaguacggacagugaccaaaucagccuauaugcucaagcaucagggagagucacagucucuaccaaaagaagccaacaaacuguaaucccgaauaucggaucuagacccuggguaaggggugucuccagcauaauaagcaucuauuggacaauaguaaaaccgggagacauacuuuugauuaacagcacagggaaucuaauugcuccucgggguuacuuuaaaauacgaagugggaaaagcucaauaaugaggucaaaugcacccauuggcaaaugcaauucugaaugcaucacuccaaauggaagcauucccaaugacaaaccauuucaaaauguaaacaggaucacauauggggccugucccagauauguuaagcaaaacacucugaaauuggcaacagggaugcggaauguaccagagaaacaaacuagaggcauauucggcgcaaucgcggguuucauagaaaaugguugggagggaaugguggacgguugguacgguuucaggcaucaaaauucugagggcacaggacaagcagcagaucuuaaaagcacucaagcagcaaucaaccaaaucaacgggaaacugaauagguuaaucgagaaaacaaacgagaaauuccaucaaauugaaaaagaauucucagaaguagaagggagaauucaggaccucgagaaauauguugaggacacuaaaauagaucucuggucguacaacgcggagcuucuuguugcccuggagaaccaacauacaauugaucuaacugacucagaaaugaacaaacuguuugaaagaacaaggaagcaacugagggaaaaugcugaggauaugggcaaugguuguuucaaaauauaccacaaaugugacaaugccugcauagggucaaucagaaauggaacuuaugaccaugauguauacagagacgaagcauuaaacaaccgguuccagaucaaagguguugagcugaagucaggauacaaagauuggauccuauggauuuccuuugccauaucauguuuuuugcuuuguguuguuuugcugggguucaucaugugggccugccaaaaaggcaacauuaggugcaacauuugcauuuga

SEQ ID NO: 32189 - RNA, 1701 nt, Artificial Sequence
  derived and/or modified CDS sequence (wt) from hemagglutinin__InfluenzaA__AAY47075
augaagacuaucauagcuuugagcuacauuuuaugucugguuuucgcucaaaaacuucccggaaaugacaacagcauggcaacgcugugccugggacaccaugcagugccaaacggaacgcuagugaaaacaaucacgaaugaccaaauugaagugacuaaugcuacugagcugguucagaguuccucaacagguagaauaugcgacaguccucaccaaauccuugauggagaaaacugcacacuaauagaugcucuauugggagacccucauugugauggcuuccaaaauaaggaaugggaccuuuuuguugaacgcagcaaagccuacagcaacuguuacccuuaugaugugccggauuaugucucccuuaggucacuaguugccucaucaggcacgcuggaguuuaacaaugaaagcuucaauuggacuggagucgcucagaauggaacaagcucugcuugcaaaaggagaucuaauaaaaguuucuuuaguagauugaauugguugcaccaauuaaaaaacaaauauccagcgcugaacgugacuaugccaaacaaugaaaaauuugacaaauuguacauuugggggguucaccacccgggcacagacagugaccaaaucagccuauaugcucaagcaucagggagagucacagucucuaccaaaagaagccaacaaacuguaaucccgaauaucggaucuagacccaggguaagggauaucuccagcagaauaagcaucuauuggacaauaguaaaaccgggagacauacuuuugauuaacagcacagggaaucuaauugcuccucgggguuacuucaaaauacgaagugggaaaagcucaauaaugaggucagaugcacccauuggcaaaugcaauucugaaugcaucacuccaaauggaagcauuccuaaugacaaaccauuucaaaauguaaacaggaucacauauggggccugucccagauauguuaagcaaaacacucugaaauuggcaacagggaugcgaaaugugccagagaaacaaacuagaggcauauucggugcaaucgcgggcuucauagaaaaugguugggagggaaugauggacgguugguacgguuucaggcaucaaaauucugagggcacaggacaagcagcagaucuuaaaagcacucaagcagcaaucaaccaaaucaacgggaaacugaauagguuaaucgagaaaacgaacgagaaauuccaccaaauugaaaaagaauucucagaaguagaagggagaauucaggaccucgagaaauauguugaggacacuaaaauagaucucuggucguacaaugcggagcuucuuguugcccuggagaaccaacauacaauugaucuaacugacucagaaaugaacaaacuguuugaaagaacaaagaagcaacugagggaaaaugcugaggauaugggcaaugguuguuucaaaauauaccacaaaugugacaaugccugcauagggucaaucagaaauggaacuuaugaccaugauguauacagagacgaagcauuaaacaaccgguuccagaucaaagguguugagcugaagucaggauacaaagauuggauccuauggauuuccuuugccauaucauguuuuuugcuuuguauuguuuugcugggguucaucaugugggccugccaaaaaggcaacaucaggugcaacauuugcauuuga

SEQ ID NO: 32190 - RNA, 1701 nt, Artificial Sequence
  derived and/or modified CDS sequence (wt) from hemagglutinin__InfluenzaA__AAY47085
augaagacuaucauugcuuugagcuacauucuaugucugguuuucgcucaaaagcuucccggaaaugacaacagcacggcaacgcugugccuugggcaccaugcaguaccaaacggaacgauagugaaaacaaucacgaaugaccaaauugaaguuacuaaugcuacugagcugguucagaguuccucaacagguggaauaugcgacaguccucaucagauccuugauggagaaaacugcacacuaauagaugcucuauugggagacccucagugugauggcuuccaaaauaagaaaugggaccuuuuuguugaacgcagcaaagccuacagcaacuguuacccuuaugaugugccggauuaugccucccuuagaucacuaguugccucauccggcacacuggaguuuaacaaugaaagcuucaauuggacuggagucacucagaauggaacaagcucugcuugcaaaaggagaucuaauaaaaguuucuuuaguagauugaauugguugacccacuuaaaauacaaauacccagcauugaacgugacuaugccaaacaaugaaaaauuugacaaauuguacauuugggggguucaccacccggguacggacagugaccaaaucagccuauaugcucaagcaucaggaagaaucacagucucuaccaaaagaagccaacaaacuguaaucccgaaugucggaucuagacccaggguaagggaugucuccagcagaauaagcaucuauuggacaauaguaaaaccgggagacauacuuuugauuaacagcacagggaaucuaauugcuccucgggguuacuucaaaauacgaagugggaaaagcucaauaaugagaucagaugcacccauuggcaaaugcaauucugaaugcaucacuccaaauggaagcauucccaaugacaaaccauuucaaaauguaaacaggaucacauauggggccugucccagauauguuaagcaaaacacucugaaauuggcaacagggaugcgaaauguaccagagaaacaaacuagaggcauauuuggcgcaaucgcggguuucauagaaaaugguugggagggaaugguggacgguugguaugguuucaggcaucaaaauucugagggcacaggacaagcagcagaucucaaaagcacucaagcagcaaucaaccaaaucaaugggaaacugaauagguuaaucgggaaaacaaacgagaaauuccaucagauugaaaaagaauucucagaaguagaagggagaauucaggaccucgagaaauauguugaggacacuaaaauagaucucuggucauacaacgcggagcuucuuguugcccuggagaaccaacauacaauugaucuaacugacucagaaaugaacaaacuguuugaaagaacaaagaagcaacugagggaaaaugcugaggauaugggcaaugguuguuucaaaauauaccacaaaugugacaaugccugcauagagucaaucagaaauggaacuuaugaccaugauguauacagagaugaagcauuaaacaaccgguuccagaucaaagguguugagcugaagucaggauacaaagauuggauccuauggauuuccuuugccauaucauguuuuuugcuuuguguugcuuuguugggguucaucaugugggccugccaaaaaggcaacauuaggugcaacauuugcauuuga

SEQ ID NO: 32191 - RNA, 1701 nt, Artificial Sequence
  derived and/or modified CDS sequence (wt) from hemagglutinin__InfluenzaA__AAY58320
augaagacuaucauugcuuugagcuacauucuaugucugguuuucgcucaaaaacuucccggaaaugacaacagcacggcaacgcugugccuugggcaccaugcaguaccaaacggaacgauagugaaaacaaucacgaaugaccaaauugaaguuacuaaugcuacugagcugguacagaguuccucaacagguggaauaugcgacaguccucaucagauccuugauggagaaaacugcacacuaauagaugcucuauugggagacccucagugugauggcuuccaaaauaagaaaugggaccuuuuuguugaacgcagcaaagccuacagcaacuguuacccuuaugaugugccggauuaugccucccuuaggucacuaguugccucauccggcacacuggaguuuaacaaugaaagcuucgauuggacuggagucacucagaauggaacaagcucugcuugcaaaaggagaucuaauaaaaguuucuuuaguagauugaauugguugacccacuuaaaauacaaauacccagcauugaacgugacuaugccaaacaaugaaaaauuugacaaauuguacauuugggggguucaccacccggguacggacagugaccaaaucagccuauaugcucaagcaucaggaagaaucacagucucuaccaaaagaagccaacaaacuguaaucccgaauaucggaucuagacccaggguaagggauaucucuagccgaauaagcaucuauuggacaauaguaaaaccgggagacauacuuuugauuaacagcacagggaaucuaauugcuccucgggguuacuucaaaauacgaagugggaaaagcucaauaaugagaucagaugcacccauuggcaaaugcaauuccgaaugcaucacuccaaauggaagcauucccaaugacaaaccauuucaaaauguaaacaggaucacauauggggccugucccagauauguuaagcaaaacacuuugaaauuggcaacagggaugcgaaauguaccagagaaacaaacuagaggcauauuuggcgcaaucgcgggcuucauagaaaaugguugggagggaaugguggacgguugguacgguuucaggcaucaaaauucugagggcacaggacaagcagcagaucucaaaagcacucaagcagcaaucaaccaaaucaaugggaaacugaauagguuaaucgggaaaacaaacgagaaauuccaucagauugaaaaagaauucucagaaguagaagggagaauucaggaccucgagaaauauguugaggacacuaaaauagaucucuggucauacaacgcggagcuucuuguugcccuggagaaccaacauacaauugaucuaacugacucagaaaugaacaaacuguuugaaagaacaaagaagcaacugagggaaaaugcugaggauaugggcaaugguuguuucaaaauauaccacaaaugugacaaugccugcauagggucaaucagaaauggaacuuaugaccaugauguguacagagaugaagcauuaaacaaccgguuccagaucaaagguguugagcugaagucaggauacaaagauuggauccuauggauuuccuuugccauaucauguuuuuugcuuuguguugcuuuguugggguucaucaugugggccugccaaaaaggcaacauuaggugcaacauuugcauuuga

SEQ ID NO: 32192 - RNA, 1701 nt, Artificial Sequence
  derived and/or modified CDS sequence (wt) from hemagglutinin__InfluenzaA__AAY59035
augaagacuaucauugcuuugagcuacauuuuaugucugguuuucgcucaaaaacuuaccguaaaugacaacagcacggcaacgcugugccugggacaccaugcagugccaaacggaacgcuagugaaaacaaucacgaaugaccacauugaagugacuaaugcuacugagcugguucagaguuccucaacagguagaauaugcgacaguccucaccaaauccuugauggagaaaacugcacacuaauagaugcucuauugggagacccucauugugauggcuuccaaaauaaggaaugggaccuuuuuguugaacgcagcacagccuacagcaacuguuacccuuaugaugugccggauuaugccucccuuaggucacuaguugccucauccggcacacuggaguuuaacaaugaaagcuucaauuggacuggagucgcucagaauggaacaagcucugcuugcaaaaggagaucuauuaaaaguuucuuuaguagauugaauugguugcaccaauuaaaauacaaauauccagcacugaacgugacuaugccaaacaaugaaaaauuugacaaauuguacauuugggggguucaccacccgaguacggacagugaccaaaucagccuauaugcucaagcaucagggagagucacagucucuaccaaaagaagccaacaaacuguaaucccgaauaucggaucuagacccuggguaaggggugucuccagcagaauaagcaucuauuggacaauaguaaaaccgggagacauacuuuugauuaacagcacagggaaucuaauugcuccucgggguuacuucaaaauacgaagugggaaaagcucaauaaugaggucaaaugcacccauuggcaaaugcaauucugaauguaucacuccaaauggaagcauucccaaugacaaaccauuucaaaauguaaacaggaucacauauggggccugucccagauauguuaagcaaaacacucugaaauuggcaacagggaugcggaauguaccagagaaacaaacuagaggcauauucggcgcaaucgcggguuucauagaaaaugguugggagggaaugguggacgguugguacgguuucaggcaucaaaauucugagggcacaggacaagcagcagaucuuaaaagcacucaagcagcaaucaaucaaaucaacgggaaacugaauagguuaaucgagaaaacaaacgagaaauuccaucaaauugaaaaagaauucucagaaguagaagggagaauucaggaccucgagaaauauguugaggacacuaaaauagaucucuggucguacaacgcggagcuucuuguugcccuggagaaccaacauacaauugaucuaacugacucagaaaugaacaaacuguuugaaagaacaaggaagcaacugagggaaaaugcugaggauaugggcaaugguuguuucaaaauauaucacaaaugugacaaugccugcauagggucaaucagaaauggaacuuaugaccaugauguauacagagacgaagcauuaaacaaccgguuccagaucaaagguguugagcugaagucaggauacaaagauuggauccuauggauuuccuuugccauaucauguuuuuugcuuuguguuguuuugcugggguucaucaugugggccugccaaaaaggcaacauuaggugcaacauuugcauuuga

SEQ ID NO: 32193 - RNA, 1701 nt, Artificial Sequence
  derived and/or modified CDS sequence (wt) from hemagglutinin__InfluenzaA__AAY64202
augaagacuaucauugcuuugagcuacauucuaugucugguuuucgcucaaaaacuucccggaaaugacaacagcacggcaacgcugugccuugggcaccaugcaguaccaaacggaacgauagugaaaacaaucacgaaugaccaaauugaaguuacuaaugcuacugagcugguucagaguuccucaacagguggaauaugcgacaguccucaucagauccuugauggagaaaacugcacacuaauagaugcucuauugggagacccucagugugauggcuuccaaaauaagaaaugggaccuuuuuguugaacgcagcaaagccuacagcaacuguuacccuuaugaugugccggauuaugccucccuuaggucacuaguugccucauccggcacacuggaguuuaacaaugaaagcuucaauuggacuggagucacucagaauggaacaagcucugcuugcgaaaggagaucuaauaaaaguuucuuuaguagauugaauugguugacccacuuaaaauacaaauacccagcauugaacgugacuaugccaaacaaugaaaaauuugacaaauuguacauuugggggguucaccacccggguacggacagugaccaaaucagccuauaugcucaagcaucaggaagaaucacagucucuaccaaaagaagccaacaaacuguaaucccgaauaucggaucuagacccaggguaagggaugucuccagccgaauaagcaucuauuggacaauaguaaaaccgggagacauacuuuugauuaacagcacagggaaucuaauugcuccucgggguuacuucaaaauacgaagugggaaaagcucaauaaugagaucagaugcacccauuggcaaaugcaauucugaaugcaucacuccaaauggaagcauucccaaugacaaaccauuucaaaauguaaacaggaucacauauggggccugucccagauauguuaagcaaaacacucugaaauuggcaacagggaugcgaaauguaccagagaaacaaaauagaggcauauuuggcgcaaucgcggguuucauagaaaauggcugggagggaaugguggacgguugguacgguuucaggcaucaaaauucugagggcacaggacaagcagcagaucucaaaagcacucaagcagcaauuaaccaaaucaaugggaaacugaauagguuaaucgggaaaacaaacgagaaauuccaucagauugaaaaagaauucucagaaguagaagggagaauucaggaccucgagaaauauguugaggacacuaaaauagaucucuggucauacaacgcggagcuucuuguugcccuggagaaccaacauacaauugaucuaacugacucagaaaugaacaaacuguuugaaagaacaaagaagcaacugagggaaaaugcugaggauaugggcaaugguuguuucaaaauauaccacaaaugugacaaugccugcauagggucaaucagaaauggaacuuaugaccaugauguguacagagaugaagcauuaaacaaccgguuccagaucaaagguguugagcugaagucaggauacaaagauuggauccuauggauuuccuuugccauaucauguuuuuugcuuuguguugcuuuguugggguucaucaugugggccugccaaaaaggcaacauuaggugcgacauuugcauuuga

SEQ ID NO: 32194 - RNA, 1701 nt, Artificial Sequence
  derived and/or modified CDS sequence (wt) from hemagglutinin__InfluenzaA__AAY64212
augaagacuaucauugcuuugagcuacauuuuaugucugguuuucgcucaaaaaauucccguaaaugacaacagcacggcaacgcugugccugggacaccaugcagugccaaacggaacgcuagugaaaacaaucacgaaugaacacauugaagugacuaaugcuacugagcugguucagaguuccucaacagguagaauaugcgacaguccucaccaaauccuugauggagaaaacugcacacuaauagaugcucuauugggagacccucauugugauggcuuccaaaauaaggaaugggaccuuuuuguugaacgcagcacagccuacagcaacuguuacccuuaugaugugccggauuaugccucccuuaggucacuaguugccucauccggcacacuggaguuuaacaaugaaagcuucaauuggacuggagucgcucagaauggaacaagcucugcuugcaaaaggagaucuauuaaaaguuucuuuaguagauugaauugguugcaccaauuaaaauacaaauauccagcacugaacgugacuaugccaaacaaugaaaaauuugacaaauuguacauuugggggguucaccacccgaguacggacagugaccaaaucagccuauaugcucaagcaucagggagagucacagucucuaccaaaagaagccaacaaacuguaaucccgaauaucggaucuagacccuggguaaggggugucuccagcagaauaagcaucuauuggacaauaguaaaaccgggagacauacuuuugauuaacagcacagggaaucuaauugcuccucgggguuacuuuaaaauacgaagugggaaaagcucaauaaugaggucaaaugcacucauuggcaaaugcaauucugaaugcaucacuccaaauggaagcauucccaaugacaaaccauuucaaaauguaaacaggaucacauauggggccugucccagauauguuaagcaaaacacucugaaauuggcaacagggaugcggaauguaccagagaaacaaacuagaggcauauucggcgcaaucgcggguuucauagaaaaugguugggagggaaugguggacgguugguacgguuucaggcaucaaaauucugagggcacaggacaagcagcagaucuuaaaagcacucaagcagcaaucaaccaaaucaacgggaaacugaauagguuaaucgagaaaacaaacgagaaauuccaucaaauugaaaaagaauucucagaaguagaagggagaauucaggaccucgagaaauauguugaggacacuaaaauagaucucuggucguacaacgcggagcuucuuguugcccuggagaaccaacauacaauugaucuaacugacucagaaaugaacaaacuguuugaaagaacaaggaagcaacugagggaaaaugcugaggauaugggcaaugguuguuucaaaauauaccacaaaugugacaaugccugcauagggucaaucagaaauggaacuuaugaccaugauguauacagagacgaagcauuaaacaaccgguuccagaucaaagguguugagcugaagucaggauacaaagauuggauccuauggauuuccuuugccauaucauguuuuuugcuuuguguuguuuugcugggguucaucaugugggccugccaaaaaggcaacauuaggugcaacauuugcauuuga

SEQ ID NO: 32195 - RNA, 1701 nt, Artificial Sequence
  derived and/or modified CDS sequence (wt) from hemagglutinin__InfluenzaA__AAY64222
augaagacuaucauugcuuugagcuacauuuuaugucugguuuucgcucaaaaacuucccggaaaugacaacagcacggcaacgcugugccuggggcaccaugcagugccaaacggaacgcuagugaaaacaaucacgaaugaccaaauugaagugacuaaugcuacugagcugguucagaguuccucaauagguagaauaugcgacaguccucaccaaauccuugauggagaaaacugcacacuaauagaugcucuauugggagacccucauugugauggcuuccaaaauaaggaaugggaccuuuuuguugaacgcagcaaagccuacagcaacuguuacccuuaugaugugccggauuaugucucccuuaggucacuaguugccucaucaggcacgcuggaguuuaacaaugaaagcuucaauuggacuggagucgcucagaauggaacaagcucuucuugcaaaaggagaucugauaaaaguuucuuuaguagauugaauugguugcaccaauuaaaauacaaauauccagcacugaacgugacuaugccaaacaaugaaaaauuugacaaauuguacauuugggggguucaccacccggguacagacagugaccaaaucagccuauaugcucaagcaucagggagagucacagucucuaccaaaagaagccaacaaacuguaaucccgaacaucggaucuagacccuggguaaggggugucuccagcagaauaagcaucuauuggacaauaguaaaaccgggagacauacuuuugauuaacagcacagggaaucuaauugcuccucgggguuacuucaaaauacgaagugggaaaagcucaauaaugaggucagaugcacccauuggcaaaugcaauucugaaugcaucacuccaaauggaagcauucccaaugacaaaccauuucaaaauguaaacaggaucacauaugggcccugucccagauauguuaagcaaaacacucugaaauuggcaacagggaugcggaaugugccagagaaacaaacuagaggcauauucggugcaaucgcgggcuucauagaaaaugguugggagggaaugauggacgguugguacgguuucaggcaucaaaauucugagggcacagggcaagcagcagaucuuaaaagcacucaagcagcaaucaaccagaucaacgggaaacugaauagguuaaucgagaaaacgaacgagaaauuccaucaaauugaaaaagaauucucagaaguagaagggagaauccaggaccucgagaaauauguugaggacacuaaaauagaucucuggucguacaaugcggagcuucuuguugcccuggagaaccaacauacaauugaucuaacugacucagaaaugaacaaacuguuugaaaaaacaaagaagcaacugagggaaaaugcugaggauaugggcaaugguuguuucaaaauauaccacaaaugugacaaugccugcauagggucaaucagaaauggaacuuaugaccaugauguauacagagacgaagcauugaacaaccgguuccagaucaaagguguugagcugaagucaggauacaaagauuggauccuauggauuuccuuugccauaucauguuuuuugcuuuguauuguuuugcugggguucaucaugugggccugccaaaaaggcaacauuagaugcaacauuugcauuuga

SEQ ID NO: 32196 - RNA, 1701 nt, Artificial Sequence
  derived and/or modified CDS sequence (wt) from hemagglutinin__InfluenzaA__AAY64262
augaagacuaucauugcuuugagcuacauuuuaugucugguuuucgcucaaaaacuucccggaaaugacaacagcacggcaacgcugugccuggggcaccaugcagugccaaacggaacgcuagugaaaacaaucacgaaugaccaaauugaagugacuaaugcuacugagcugguucagaguuccucaacagguagaauaugcgacaguccucaccaaauccuugauggagaaaacugcacacuaauagaugcucuauugggagacccucauugugauggcuuccaaaauaaggaaugggaccuuuuuguugaacgcagcaaagccuacagcaacuguuacccuuaugaugugccggauuaugccucccuuaggucacuaguugccucauccggcacacuggaguuuaacaaugaaagcuucaauuggacuggagucgcucagaauggaacaagcucugcuugcaaaaggagaucuaauaaaaguuucuuuaguagauugaauugguugcaccaauuaaaauacaaauauccagcacugaacgugacuaugccaaacaaugaaaaauuugacaaauuguacauuugggggguucaccacccgaguacggacagugaccaaaucagccuauaugcucaagcaucagggagagucacagucucuaccaaaagaagccaacaaacuguaaucccgaauaucggaucuagacccuggguaaggggugucuccagcagaauaagcaucuauuggacaauaguaaaaccgggagacauacuuuugauuaacagcacagggaaucuaauugcuccucgggguuacuucaaaauacgaagugggaaaagcucaauaaugaggucagaugcacccauuggcaaaugcaauucugaaugcaucacuccaaauggaagcauucccaaugacaaaccauuucaaaauguaaacaggaucacauauggggccugucccagauauguuaagcaaaacacucugaaauuggcaacagggaugcggaauguaccagagaaacaaacuagaggcauauucggcgcaaucgcggguuucauagaaaaugguugggagggaaugguggacgguugguacgguuucaggcaucaaaauucugagggcacaggacaagcagcagaucuuaaaagcacucaagcagcaaucaaccaaaucaacgggaaacugaauagguuaaucgagaaaacgaacgagaaauuccaucaaauugaaaaagaauucucagaaguagaagggagaauucaggaccucgagaaauauguugaggacacuaaaauagaucucuggucguacaacgcggagcuucuuguugcccuggagaaccaacauacaauugaucuaacugacucagaaaugaacaaacuguuugaaagaacaaagaagcaacugagggaaaaugcugaggauaugggcaaugguuguuucaaaauauaccacaaaugugacaaugccugcauggggucaaucagaaauggaacuuaugaccaugauguauacagagacgaagcauuaaacaaccgguuccagaucaaagguguugagcugaagucaggauacaaagauuggauccuauggauuuccuuugccauaucauguuuuuugcuuuguguuguuuugcugggguucaucaugugggccugccaaaaaggcaacauuaggugcaacauuugcauuuga

SEQ ID NO: 32197 - RNA, 1701 nt, Artificial Sequence
  derived and/or modified CDS sequence (wt) from hemagglutinin__InfluenzaA__AAY64272
augaagacuaucauugcuuugagcuacauucuaugucugguuuucgcucaaaagcuucccggaaaugacaacagcacggcaacgcugugccuugggcaccaugcaguaccaaacggaacgauagugaaaacaaucacgaaugaccaaauugaaguuacuaaugcuacugagcugguucagaguuccucaacagguggaauaugcgacaguccucaucagauccuugauggagaaaacugcacacuaauagaugcucuauugggagacccucagugugauggcuuccaaaauaagaaaugggaccuuuuuguugaacgcagcaaagccuacagcaacuguuacccuuaugaugugccggauuaugccucccuuaggucacuaguugccucauccggcacacuggaguuuaacaaugaaagcuucaauuggacuggagucacucagaauggaacaagcucugcuugcaaaaggagaucuaauaaaaguuucuuuaguagauugaauugguugacccacuuaaaauacaaauacccagcauugaacgugacuaugccaaacaaugaaaaauuugacaaauuguacauuugggggguucaccacccggguacggacagugaccaaaucagccuauaugcucaagcaucaggaagaaucacagucucuaccaaaagaagccaacaaacuguaaucccgaauaucggaucuagacccaggguaagggaugucuccagcagaauaagcaucuauuggacaauaguaaaaccgggagacauacuuuugauuaacagcacagggaaucuaauugcuccucgggguuacuucaaaauacgaagugggaaaagcucaauaaugagaucagaugcacccauuggcaaaugcaauucugaaugcaucacuccaaauggaagcauucccaaugacaaaccauuucaaaauguaaacaggaucacauauggggccugucccagauauguuaagcaaaacacucugaaauuggcaacagggaugcgaaauguaccagagaaacaaacuagaggcauauuuggcgcaaucgcggguuucauagaaaaugguugggagggaaugguggacgguugguacgguuucaggcaucaaaauucugagggcacaggacaagcagcagaucucaaaagcacucaagcagcaaucaaccaaaucaaugggaaacugaauagguuaaucgggaaaacaaacgagaaauuccaucagauugaaaaagaauucucagaaguagaagggagaauucaggaccucgagaaauauguugaggacacuaaaauagaucucuggucauacaacgcggagcuucuuguugcccuggagaaccaacauacaauugaucuaacugacucagaaaugaacaaacuguuugaaagaacaaagaagcaacugagggaaaaugcugaggauaugggcaaugguuguuucaaaauauaccacaaaugugacaaugccugcauagagucaaucagaaauggaacuuaugaccaugauguauacagagaugaagcauuaaacaaccgguuccagaucaaagguguugagcugaagucaggauacaaagauuggauccuauggauuuccuuugccauaucauguuuuuugcuuuguguugcuuuguugggguucaucaugugggccugccaaaaaggcaacauuaggugcaacauuugcauuuga

SEQ ID NO: 32198 - RNA, 1701 nt, Artificial Sequence
  derived and/or modified CDS sequence (wt) from hemagglutinin__InfluenzaA__AAY64282
augaagacuaucauugcuuugagcuacauuuuaugucugguuuucgcucaaaaacuucccggaaaugacaacagcacggcaacgcugugccuggggcaccaugcagugccaaacggaacgcuagugaaaacaaucacgaaugaccaaauugaagugacuaaugcuacugagcugguucagaguuccucaacagguagaauaugcgacaguccucaccaaauccuugauggagaaaacugcacacugauagaugcucuauugggagacccucauugugauggcuuccaaaauaaggaaugggaccuuuuuguugaacgcagcaaagccuacagcaacuguuacccuuaugaugugccggauuaugccucccuuaggucacuaguugccucauccggcacacuggaguuuaacaaugaaagcuucaauuggacuggagucgcucagaauggaacaagcucugcuugcaaaaggagaucuaauaaaaguuucuuuaguagauugaauugguugcaccaauuaaaauacaaauauccagcacugaacgugacuaugccaaacaaugaaaaauuugacaaauuguacauuugggggguucaccacccgaguacggacagugaccaaaucagccuauaugcucaagcaucagggagagucacagucucuaccaaaagaagccaacaaacuguaaucccgaauaucggaucuagacccuggguaaggggugucuccagcagaauaagcaucuauuggacaauaguaaaaccgggagacauacuuuugauuaacagcacagggaaucuaauugcuccucgggguuacuucaaaauacgaagugggaaaagcucaauaaugaggucagaugcacccauuggcaaaugcaauucugaaugcaucacuccaaauggaagcauucccaaugacaaaccauuucaaaauguaaacaggaucacauauggggccugucccagauauguuaagcaaaacacucugaaauuggcaacagggaugcggaauguaccagagaaacaaacuagaggcauauucggcgcaaucgcggguuucauagaaaaugguugggagggaaugguggacgguugguacgguuucaggcaucaaaauucugagggcacaggacaagcagcagaucuuaaaagcacucaagcagcaaucaaccaaaucaacgggaaacugaauagguuaaucgagaaaacgaacgagaaauuccaucaaauugaaaaagaauucucagaaguagaagggagaauucaggaccucgagaaauauguugaggacacuaaaauagaucucuggucguacaacgcggagcuucuuguugcccuggagaaccaacauacaauugaucuaacugacucagaaaugaacaaacuguuugaaagaacaaagaagcaacugagggaaaaugcugaggauaugggcaaugguuguuucaaaauauaccacaaaugugacaaugccugcauagggucaaucagaaauggaacuuaugaccaugauguauacagagacgaagcauuaaacaaccgguuccagaucaaagguguugagcugaagucaggauacaaagauuggauccuauggauuuccuuugccauaucauguuuuuugcuuuguguuguuuugcugggguucaucaugugggccugccaaaaaggcaacauuaggugcaacauuugcauuuga

SEQ ID NO: 32199 - RNA, 1701 nt, Artificial Sequence
  derived and/or modified CDS sequence (wt) from hemagglutinin__InfluenzaA__AAY64292
augaagacuaucauagcuuugagcuacauuuuaugucugguuuucgcucaaaaacuucccggaaaugacaacagcacggcaacgcugugccuggggcaccaugcagugccaaacggaacgcuagugaaaacaaucacgaaugaccaaauugaagugacuaaugcuacugagcugguucagaguuccucaacagauaaaauaugcgacaguccucaccaaauccuugauggaggaaacugcacacuaauagaugcucuauugggagacccucauugugauggcuuccaaaauaaggaaugggaccuuuuuguugaacgcagcaaagccuacagcaacuguuacccuuaugaugugccggauuaugucucccuuaggucacuaguugccucaucaggcacgcuggaguuuaacaaugaaagcuucaauuggacuggagucgcucagaauggaacaagcucugcuugcaaaaggagaucugauaaaaguuucuuuaguagauugaauugguugcaccaauuaaaaaauaaauauccagcacugaacgugacuaugccaaacaaugaaaaauuugacaaauuguacauuugggggguucaccacccggguacagacagugaccaaaucagccuauaugcucaagcaucagggagagucacagucucuaccaaaagaagccaacaaacuguaaucccgaauaucggaucuagacccaggguaagggauauauccagcagaauaagcaucuauuggacaauaguaaaaccgggagacauacuuuugauuaacagcacagggaaucuaauugcuccucgagguuacuucaaaauacgaagugggaaaagcucaauaaugaggucagaugcacccauuggcaaaugcaauucugaaugcaucacuccaaauggaagcauuccuaaugacaaaccauuucaaaauguaaacaggaucacauauggggccugucccagauauguuaagcaaaacacucugaaauuggcaacagggaugcggaaugugccggagaaacaaacuagaggcauauucggugcaaucgcgggcuucauagaaaaugguugggagggaaugguggacgguugguacgguuucaggcaucaaaauucugagggcacaggacaagcagcagaucuuaaaagcacucaagcagcaaucaaccaaaucaacgggaaacugaauagguuaaucgagaaaacgaacgagaaauuccaccaaauugaaaaagaauucucagaaguagaagggagaauucaggaccucgagaaauauguugaggacacuaaaauagaucucuggucguacaaugcggagcuucuuguugcccuggagaaccaacauacaauugaucuaacugacucagaaaugaacaaacuguuugaaagaacaaagaagcaacugagggaaaaugcugaggauaugggcaaugguuguuucaaaauauaccacaaaugugacaaugccugcauagggucaaucagaaauggaacuuaugaccaugauguauacagagacgaagcauuaaacaaccgguuccagaucaaagguguugagcugaaaucaggauacaaagauuggauccuauggauuuccuuugccauaucauguuuuuugcuuuguauuguuuugcugggguucaucaugugggccugccaaaaaggcaacauuaggugcaacauuugcauuuga

SEQ ID NO: 32200 - RNA, 1701 nt, Artificial Sequence
  derived and/or modified CDS sequence (wt) from hemagglutinin__InfluenzaA__AAY64302
augaagacuaucauugcuuugagcuacauuuuaugucugguuuucgcucaaaaacuucccggaaaugacaacagcacggcaacgcugugccugggacaccaugcagugccaaacggaacgcuagugaaaacaaucacgagugaccaaauugaagugacuaaugcuacugagcugguucagaguuccucaacagguagaauaugcgacaguccucaccgaauccuugauggagaaaacugcacacugauagaugcucuauugggagacccucauugugauggcuuccaaaauaaggaaugggaccuuuuuguugaacgcagcaaagccuacagcaacuguuacccuuaugaugugccggauuaugccucccuuaggucacuaguugccucauccggcacccuggaguuuaacaaugaaagcuucaauuggacuggagucgcucagaauggaacaagcuuugcuugcaaaaggagaucuauuaaaaguuucuuuaguagauugaauugguugcaccaauuaaaauacaaauauccagcacugaacgugacuaugccaaacaaugacaaauuugacaaauuguacauuugggggguucaccacccgaguacggacagugaccaaaccagccuauaugcucaagcaucagggagagucacagucucuaccaaaagaagccaacaaacuguaaucccgaauaucggaucuagacccuggguaagggguguuuccagcagaauaagcaucuauuggacaauagugaaaccgggagacauacuucugauuaacagcacagggaaucuaauugcuccucgggguuacuucaaaauacgaagugggaaaagcucaauaaugaagucagaugcacccauuggcaaaugcaauucugaaugcaucacuccaaauggaagcauucccaaugacaaaccauuucaaaauguaaacaggaucacauauggggccugucccagauauguuaagcaaaacacucugaaauuggcaacagggaugcggaauguaccagagaaacaaacuagaggcauauucggcgcaaucgcagguuucauagaaaaugguugggagggaaugguagacgguugguacgguuucaggcaucaaaauucugagggcacaggacaagcagcagaucuuaaaagcacucaagcagcaaucaaccaaaucaacgggaaacugaauagguuaaucgagaaaacgaacgagaaauuccaucaaauugaaaaagaauucacagaaguagaagggagaauucaggaccucgagaaauauguugaggacacuaaaauagaucucuggucguacaacgcggagcuucuuguugcccuggagaaccaacauacaauugaucuaacugacucagaaaugaacaaacuguuugaaagaacaaggaagcaacugagggaaaaugcugaggauaugggcaaugguuguuucaaaauauaccacaaaugugacaaugucugcauagggucaaucagaaauggaacuuaugaccaugauguauacagagacgaagcauuaaacaaccgguuccagaucaaagguguugagcugaagucaggauacaaagauuggauccuauggauuuccuuugccacaucauguuuuuugcuuuguguuguuuugcugggguucaucaugugggccugccaaaaaggcaacauuaggugcaacauuugcauuuga

SEQ ID NO: 32201 - RNA, 1701 nt, Artificial Sequence; identical to SEQ ID NO: 32195
  derived and/or modified CDS sequence (wt) from hemagglutinin__InfluenzaA__AAY64312

SEQ ID NO: 32202 - RNA, 1701 nt, Artificial Sequence
  derived and/or modified CDS sequence (wt) from hemagglutinin__InfluenzaA__AAY64322
augaagacuaucauugcuuugagcuacauuuuaugucugguuuucgcucaaaaacuucccggaaaugacaacagcacggcaacgcugugccuggggcaccaugcagugccaaacggaacgcuagugaaaacaaucacgaaugaccaaauugaagugacuaaugcuacugagcugguucagaguuccucaacagguagaauaugcgacaguccucaccaaauccuugauggagaaaacugcacacuaauagaugcucuauugggagacccucauugugauggcuuccaaaauaaggaaugggaccuuuuuguugaacgcagcaaagccuacagcaacuguuacccuuaugaugugccggauuaugccucccuuaggucacuaguugccucauccggcacacuggaguuuaacaaugaaagcuucaauuggacuggagucgcucagaauggaacaagcucugcuugcaaaaggagaucuaauaaaaguuucuuuaguagauugaauugguugcaccaauuaaaauacaaauauccagcacugaacgugacuaugccaaacaaugaaaaauuugacaaauuguacauuugggggguucaccacccgaguacggacagugaccaaaucagccuauaugcucaagcaucagggagagucacagucucuaccaaaagaagccaacaaacuguaaucccgaauaucggaucuagacccuggguaaggggugucuccagcagaauaagcaucuauuggacaauaguaaaaccgggagacauacuuuugauuaacagcacagggaaucuaauugcuccucgggguuacuucaaaauacgaagugggaaaagcucaauaaugaggucagaugcacccauuggcaaaugcaauucugaaugcaucacuccaaauggaagcauucccaaugacaaaccauuucaaaauguaaacaggaucacauauggggccugucccagauauguuaagcaaaacacucugaaauuggcaacagggaugcggaauguaccagagaaacaaacuagaggcauauucggcgcaaucgcggguuucauagaaaaugguugggagggaaugguggacgguugguacgguuucaggcaucaaaauucugagggcacaggacaagcagcagaucuuaaaagcacucaagcagcaaucaaccaaaucaacgggaaacugaauagguuaaucgagaaaacgaacgagaaauuccaucaaauugaaaaagaauucucagaaguagaagggagaauucaggaccucgagaaauauguugaggacacuaaaauagaucucuggucguacaacgcggagcuucuuguugcccuggagaaccaacauacaauugaucuaacugacucagaaaugaacaaacuguuugaaagaacaaagaagcaacugagggaaaaugcugaggauaugggcaaugguuguuucaaaauauaccacaaaugugacaaugccugcauagggucaaucagaaauggaacuuaugaccaugauguauacagagacgaagcauuaaacaaccgguuccagaucaaagguguugagcugaagucaggauacaaagauuggauccuauggauuuccuuugccauaucauguuuuuugcuuuguguuguuuugcugggguucaucaugugggccugccaaaaaggcaacauuaggugcaacauuugcauuuga

SEQ ID NO: 32203 - RNA, 1701 nt, Artificial Sequence
  derived and/or modified CDS sequence (wt) from hemagglutinin__InfluenzaA__AAY64332
augaagacuaucauugcuuugagcuacauucuaugucugguuuucacucaaaaacuucccggaaaugacaacagcacggcaacgcugugccuugggcaccaugcaguaccaaacggaacgauagugaaaacaaucacgaaugaccaaauugaaguuacuaaugcuacugagcugguucagaguuccucaacagguggaauaugcgacaguccucaucagauccuugauggagaaaacugcacacuaauagaugcucuauugggagacccucagugugauggcuuccaaaauaagaaaugggaccuuuuuguugaacgcagcaaagccuacagcaacuguuacccuuaugaugugccggauuaugccucccuuaggucacuaguugccucauccggcacacuggaguuuaacaaugaaagcuucgauuggacuggagucacucagaauggaacaagcucugcuugcaaaaggagaucuaauaaaaguuucuuuaguagauugaauugguugacccacuuaaaauucaaauacccagcauugaacgugacuaugccaaacaaugaaaaauuugacaaauuguacauuugggggguucaccacccggguacggacagugaccaaaucagccuauaugcucaagcaucaggaagaaucacagucucuaccaaaagaagccaacaaacuguaaucccgaauaucggaucuagacccaggguaagggaugucuccagccgaauaagcaucuauuggacaauaguaaaaccgggagacauacuuuugauuaacagcacagggaaucuaauugcuccucgggguuacuucaaaauacgaagugggaaaagcucaauaaugagaucagaugcacccauuggcaaaugcaauucugaaugcaucacuccaaauggaagcauucccaaugacaaaccauuucaaaauguaaacaggaucacauauggggccugucccagauauguuaagcaaaacacucugaaauuggcaacagggaugcgaaauguaccagagaaacaaacuagaggcauauuuggcgcaaucgcggguuucauagaaaaugguugggagggaaugguggacgguugguacgguuucaggcaucaaaauucugagggcacaggacaagcagcagaucucaaaagcacucaagcagcaaucaaccaaaucaaugggaaacugaauagguuaaucgggaaaacaaacgagaaauuccaucagauugaaaaagaauucucagaaguagaagggagaauucaggaccucgagaaauauguugaggacacuaaaauagaucucuggucauacaacgcggagcuucuuguugcccuggagaaccaacauacaauugaucuaacugacucagaaaugaacaaacuguuugaaagaacaaagaagcaacugagggaaaaugcugaggauaugggcaaugguuguuucaaaauauaccacaaaugugacaaugccugcauagggucaaucagaaauggaacuuaugaccaugauguguacagagaugaagcauuaaacaaccgguuccagaucaaagguguugagcugaagucaggauacaaagauuggauccuauggauuuccuuugccauaucauguuuuuugcuuuguguugcuuuguugggguucaucaugugggccugccaaaaaggcaacauuaggugcgacauuugcauuuga

SEQ ID NO: 32204 - RNA, 1701 nt, Artificial Sequence
  derived and/or modified CDS sequence (wt) from hemagglutinin__InfluenzaA__AAY64342
augaagacuaucauugcuuugagcuacauuuuaugucugguuuucgcucaaaaacuucccggaaaugacaacagcacggcaacgcugugccuggggcaccaugcagugccaaacggaacgcuagugaaaacaaucacgaaugaccaaauugaagugacuaaugcuacugagcugguucagaguuccucaacagguagaauaugcgacaguccucaccaaauccuugauggagaaaacugcacacuaauagaugcucuauugggagacccucauugugauggcuuccaaaauaaggaaugggaccuuuuuguugaacgcagcaaagccuacagcaacuguuacccuuaugaugugccggauuaugccucccuuaggucacuaguugccucauccggcacacuggaguuuaacaaugaaagcuucaauuggacuggagucgcucagaauggaacaagcucugcuugcaaaaggagaucuaauaaaaguuucuuuaguagauugaauugguugcaccaauuaaaauacaaauauccagcacugaacgugacuaugccaaacaaugaaaaauuugacaaauuguacauuugggggguucaccacccgaguacggacagugaccaaaucagccuauaugcucaagcaucagggagagucacagucucuaccaaaagaagccaacaaacuguaaucccgaauaucggaucuagacccuggguaaggggugucuccagcagaauaagcaucuauuggacaauaguaaaaccgggagacauacuuuugauuaacagcacagggaaucuaauugcuccucgggguuacuucaaaauacgaagugggaaaagcucaauaaugaggucagaugcacccauuggcaaaugcaauucugaaugcaucacuccaaauggaagcauucccaaugacaaaccauuucaaaauguaaacaggaucacauauggggccugucccagauauguuaagcaaaacacucugaaauuggcaacagggaugcggaauguaccagagaaacaaacuagaggcauauucggcgcaaucgcggguuucauagaaaaugguugggagggaaugguggacgguugguacgguuucaggcaucaaaauucugaaggcacaggacaagcagcagaucuuaaaagcacucaagcagcaaucaaccaaaucaacgggaaacugaauagguuaaucgagaaaacgaacgagaaauuccaucaaauugaaaaagaauucucagaaguagaagggagaauucaggaccucgagaaauauguugaggacacuaaaauagaucucuggucguacaacgcggagcuucuuguugcccuggagaaccaacauacaauugaucuaacugacucagaaaugaacaaacuguuugaaagaacaaagaagcaacugagggaaaaugcugaggauaugggcaaugguuguuucaaaauauaccacaaaugugacaaugccugcauagggucaaucagaaauggaacuuaugaccaugauguauacagagacgaagcauuaaacaaccgguuccagaucaaagguguugagcugaagucaggauacaaagauuggauccuauggauuuccuuugccacaucauguuuuuugcuuuguguuguuuugcugggguucaucaugugggccugccaaaaaggcaacauuaggugcaacauuugcauuuga

SEQ ID NO: 32205 - RNA, 1701 nt, Artificial Sequence
  derived and/or modified CDS sequence (wt) from hemagglutinin__InfluenzaA__AAY64352
augaagacuaucauugcuuugagcuacauucuaugucugguuuucgcucaaaaacuucccggaaaugacaacagcacggcaacgcugugccuugggcaccaugcaguaccaaacggaacgauagugaaaacaaucacgaaugaccaaauugaaguuacuaaugcuacugagcugguacagaguuccucaacagguggaauaugcgacaguccucaucagauccuugauggagaaaacugcacacuaauagaugcucuauugggagacccucagugugauggcuuccaaaauaagaaaugggaccuuuuuguugaacgcagcaaagccuacagcaacuguuacccuuaugaugugccggauuaugccucccuuaggucacuaguugccucauccggcacacuggaguuuaacaaugaaagcuucgauuggacuggagucacucagaauggaacaagcucugcuugcaaaaggagaucuaauaaaaguuucuuuaguagauugaauugguugacccacuuaaaauacaaauacccagcauugaacgugacuaugccaaacaaugaaaaauuugacaaauuguacauuugggggguucaccacccggguacggacagugaccaaaucagccuauaugcucaagcaucaggaagaaucacagucucuaccaaaagaagccaacaaacuguaaucccgaauaucggaucuagacccaggguaagggaugucuccagccgaauaagcaucuauuggacaauaguaaaaccgggagacauacuuuugauuaacagcacagggaaucuaauugcuccucgggguuacuucaaaauacgaagugggaaaagcucaauaaugagaucagaugcacccauuggcaaaugcaauuccgaaugcaucacuccaaauggaagcauucccaaugacaaaccauuucaaaauguaaacaggaucacauauggggccugucccagauauguuaagcaaaacacucugaaauuggcaacagggaugcgaaauguaccagagaaacaaacuagaggcauauuuggcgcaaucgcggguuucauagaaaaugguugggagggaaugguggacgguugguacgguuucaggcaucaaaauucugagggcacaggacaagcagcagaucucaaaagcacucaagcagcaaucaaccaaaucaaugggaaacugaauagguuaaucgggaaaacaaacgagaaauuccaucagauugaaaaagaauucucagaaguagaagggagaauucaggaccucgagaaauauguugaggacacuaaaauagaucucuggucauacaacgcggagcuucuuguugcccuggagaaccaacauacaauugaucuaacugacucagaaaugaacaaacuguuugaaagaacaaagaagcaacugagggaaaaugcugaggauaugggcaaugguuguuucaaaauauaccacaaaugugacaaugccugcauagggucaaucagaaauggaacuuaugaccaugauguguacagagaugaagcauuaaacaaccgguuccagaucaaagguguugagcugaagucaggauacaaagauuggauccuauggauuuccuuugccauaucauguuuuuugcuuuguguugcuuuguugggguucaucaugugggccugccaaaaaggcaacauuaggugcaacauuugcauuuga

SEQ ID NO: 32206 - RNA, 1701 nt, Artificial Sequence
  derived and/or modified CDS sequence (wt) from hemagglutinin__InfluenzaA__AAY64362
augaagacuaucauugcuuugagcuacauucuaugucugguuuucgcucaaaaacuucccggaaaugacaacagcacggcaacgcugugccuugggcaccaugcaguaccaaacggaacgauagugaaaacaaucacgaaugaccaaauugaaguuacuaaugcuacugagcugguacagaguuccucaacaggugaaauaugcgacaguccucaucagauccuugauggagaaaacugcacacuaauagaugcucuauugggagacccucagugugauggcuuccaaaauaagaaaugggaccuuuuuguugaacgcagcaaagccuacagcaacuguuacccuuaugaugugccggauuaugccucccuuaggucacuaguugccucauccggcacacuagaguuuaacaaugaaagcuucgauuggacuggagucacucagaauggaacaagcucugcuugcaaaaggagaucuaauaaaaguuucuuuaguagauugaauugguugacccacuuaaaauacaaauacccagcauugaacgugacuaugccaaacaaugaaaaauuugacaaauuguacauuugggggguucaccacccggguacggacagugaccaaaucagccuauaugcucaagcaucaggaagaaucacagucucuaccaaaagaagccaacaaacuguaaucccgaauaucggaucuagacccaggguaagggauaucuccagccgaauaagcaucuauuggacaauaguaaaaccgggagacauacuuuugauuaauagcacagggaaucuaauugcuccucgggguuacuucaaaauacgaagugggaaaagcucaauaaugagaucagaugcacccauuggcaaaugcaauucugaaugcaucacuccaaauggaagcauucccaaugacaaaccauuucaaaauguaaacaggaucacauauggggccugucccagauauauuaagcaaaacacucugaaauuggcaacagggaugcgaaauguaccagagaaacaaacuagaggcauauuuggcgcaaucgcggguuucauagaaaaugguugggagggaaugguggacgguugguacgguuucaggcaucaaaauucugagggcacaggacaagcagcagaucucaaaagcacucaagcagcaaucaaccaaaucaaugggaaacugaauagguuaaucgggaaaacaaacgagaaauuccaucagauugaaaaagaauucucagaaguagaagggagaauucaggaccucgagaaauauguugaggacacuaaaauagaucucuggucauacaacgcggagcuucuuguugcccuggagaaccaacauacaauugaucuaacugacucagaaaugaacaaacuguuugaaagaacaaagaagcaacugagggaaaaugcugaggauaugggcaaugguuguuucaaaauauaccacaaaugugacaaugccugcauagggucaaucagaaauggaacuuaugaccaugauguguacagagaugaagcauuaaacaaccgguuccagaucaaagguguugagcugaagucaggauacaaagauuggauccuauggauuuccuuugccauaucauguuuuuugcuuuguguugcuuuguugggguucaucaugugggccugccaaaaaggcaacauuaggugcaacauuugcauuuga

SEQ ID NO: 32207 - RNA, 1701 nt, Artificial Sequence
  derived and/or modified CDS sequence (wt) from hemagglutinin__InfluenzaA__AAY64382
augaagacuaucauugcuuugagcuacauuuuaugucugguuuucgcucaaaaacuucccggaaaugacaacagcacggcaacgcugugccuggggcaccaugcagugccaaacggaacgcuagugaaaacaaucacgaaugaccaaauugaagugacuaaugcuacugagcugguucagaguuccucaacagguagaauaugcgacaguccucaccaaauccuugauggagaaaacugcacacuaauagaugcucuauugggagacccucauugugauggcuuccaaaauaaggaaugggaccuuuuuguugaacgcagcaaagccuacagcaacuguuacccuuaugaugugccggauuaugccucccuuaggucacuaguugccucauccggcacacuggaguuuaacaaugaaagcuucaauuggacuggagucgcucagaauggaacaagcucugcuugcaaaaggagaucuaauaaaaguuucuuuaguagauugaauugguugcaccaauuaaaauacaaauauccagcacugaacgugacuaugccaaacaaugaaaaauuugacaaauuguacauuugggggguucaccacccgaguacggacagugaccaaaucagccuauaugcucaagcaucagggagagucacagucucuaccaaaagaagccaacaaacuguaaucccgaauaucggaucuagacccuggguaaggggugucuccagcagaauaagcaucuauuggacaauagugaaaccgggagacauacuuuugauuaacagcacagggaaucuaauugcuccucgggguuacuucaaaauacgaagugggaaaagcucaauaaugaggucagaugcacccauuggcaaaugcaauucugaaugcaucacuccaaauggaagcauucccaaugacaaaccauuucaaaauguaaacaggaucacauauggggccugucccagauauguuaagcaaaacacucugaaauuggcaacaggaaugcggaauguaccagagaaacaaacuagaggcauauucggcgcaaucgcggguuucauagaaaaugguugggagggaaugguggacgguugguacgguuucaggcaucaaaauucugagggcacaggacaagcagcagaucuuaaaagcacucaagcagcaaucaaccaaaucaacgggaaacugaauagguuaaucgagaaaacgaacgagaaauuccaucaaauugaaaaagaauucucagaaguagaagggagaauucaggaccucgagaaauauguugaggacacuaaaauagaucucuggucguacaacgcggagcuucuuguugcccuggagaaccaacauacaauugaucuaacugacucagaaaugaacaaacuguuugaaagaacaaagaagcaacugagggaaaaugcugaggauaugggcaaugguuguuucaaaauauaccacaaaugugacaaugccugcauagggucaaucagaaauggaacuuaugaccaugauguauacagagacgaagcauuaaacaaccgguuccagaucaaagguguugagcugaagucaggauacaaagauuggauccuauggauuuccuuugccauaucauguuuuuugcuuuguguuguuuugcugggguucaucaugugggccugccaaaaaggcaacauuaggugcaacauuugcauuuga

SEQ ID NO: 32208 - RNA, 1701 nt, Artificial Sequence
  derived and/or modified CDS sequence (wt) from hemagglutinin__InfluenzaA__AAY64392
augaagacuaucauugcuuugagcuacauucuaugucugguuuucgcucaaaaacuucccggaaaugacaacagcacggcaacgcugugccuugggcaccaugcaguaccaaacggaacgauagugaaaacaaucacgaaugaccaaauugaaguuacuaaugcuacugagcugguucagaguuccucaacagguggaauaugcgacaguccucaucagauccuugauggagaaaacugcacacuaauagaugcucuauugggagacccucagugugauggcuuccaaaauaagaaaugggaccuuuuuguugaacgcagcaaagccuacagcaacuguuacccuuaugaugugccggauuaugccucccuuaggucacuaguugccucauccggcacacuggaguuuaacaaugaaagcuucaauuggacuggagucacucagaauggaacaagcucugcuugcaaaaggagaucuaauaaaaguuucuuuagcagauugaauugguugacccacuuaaaauacaaauacccagcauugaacgugacuaugccaaacaaugaaaaauuugacaaauuguacauuugggggguucaccacccggguacggacaaugaccaaaucagccuauaugcucaagcaucaggaagaaucacagucucuaccaaaagaagccaacaaacuguaaucccgaauaucggaucuagacccaggguaagggaugucuccagcagaauaagcaucuauuggacaauaguaaaaccgggagacauacuuuugauuaacagcacagggaaucuaauugcuccucgggguuacuucaaaauacgaagugggaaaagcucaauaaugagaucagaugcacccauuggcaaaugcaauucugaaugcaucacuccaaauggaagcauucccaaugacaaaccauuucaaaauguaaacaggaucacauauggggccugucccagauauguuaagcaaaacacucugaaauuggcaacagggaugcgaaauguaccagagaaacaaacuagaggcauauuuggcgcuaucgcggguuucauagaaaaugguugggagggaaugguggacgguugguacgguuucaggcaucaaaauucugagggcacaggacaagcagcagaucucaaaagcacucaagcagcaaucaaccaaaucaaugggaaacugaauagguugaucgggaaaacaaacgagaaauuccaucagauugaaaaagaauucucagaaguagaagggagaauucaggaccucgagaaauauguugaggacacuaaaauagaucucuggucauacaacgcggagcuucuuguugcccuggagaaccaacauacaauugaucuaacugacucagaaaugaacaaacuguuugaaagaacaaagaagcaacugagggaaaaugcugaggauaugggcaaugguuguuucaaaauauaccacaaaugugacaaugccugcauagggucaaucagaaauggaacuuaugaccaugauguauacagagaugaagcauuaaacaaccgguuccagaucaaagguguugagcugaagucaggauacaaagauuggauccuauggauuuccuuugccauaucauguuuuuugcuuuguguugcuuuguugggguucaucaugugggccugccaaaaaggcaacauuaggugcaacaucugcauuuga

SEQ ID NO: 32209 - RNA, 1701 nt, Artificial Sequence; identical to SEQ ID NO: 32200
  derived and/or modified CDS sequence (wt) from hemagglutinin__InfluenzaA__AAY64402

SEQ ID NO: 32210 - RNA, 1701 nt, Artificial Sequence
  derived and/or modified CDS sequence (wt) from hemagglutinin__InfluenzaA__AAY98037
augaagacuaucauugcuuugagcuacauuuuaugucugguuuucgcucaaaaacuucccggaaaugacaacagcacggcaacgcugugccuggggcaccaugcagugccaaacggaacgcuagugaaaacaaucacgaaugaccaaauugaagugacuaaugcuacugagcugguucagaguuccucaacagguagaauaugcgacaguccucaccaaauccuugauggagaaaacugcacacuaauagaugcucuauugggagacccucauugugauggcuuccaaaauaaggaaugggaccuuuuuguugaacgcagcaaagccuacagcaacuguuacccuuaugaugugccggauuaugccucccuuaggucacuaguugccucauccggcacacuggaguuuaacaaugaaagcuucaauuggacuggagucgcucagaauggaacaagcucugcuugcaaaaggagaucuaauaaaaguuucuuuaguagauugaauugguugcaccaauuaaaauacaaauauccagcacugaacgugacuaugccaaacaaugaaaaauuugacaaauuguacauuugggggguucaccacccgaguacggacagugaccaaaucagccuauaugcucaagcaucagggagagucacagucucuaccaaaagaagccaacaaacuguaaucccgaauaucggaucuagacccuggguaaggggugucuccagcagaauaagcaucuauuggacaauaguaaaaccgggagacauacuuuugauuaacagcacagggaaucuaauugcuccucgggguuacuucaaaauacgaagugggaaaagcucaauaaugaggucagaugcacccauuggcaaaugcaauucugaaugcaucacuccaaauggaagcauucccaaugacaaaccauuucaaaauguaaacaggaucacauauggggccugucccagauauguuaagcaaaacacucugaaauuggcaacagggaugcggaauguaccagagaaacaaacuagaggcauauucggcgcaaucgcggguuucauagaaaaugguugggagggaaugguggacgguugguacgguuucaggcaucaaaauucugagggcacaggacaagcagcagaucuuaaaagcacucaagcagcaauuaaccaaaucaacgggaaacugaauagguuaaucgagaaaacgaacgagaaauuccaucaaauugaaaaagaauucucagaaguagaagggagaauucaggaccucgagaaauauguugaggacacuaaaauagaucucuggucguacaacgcggagcuucuuguugcccuggagaaccaacauacaauugaucuaacugacucagaaaugaacaaacuguuugaaagaacaaagaagcaacugagggaaaaugcugaggauaugggcaaugguuguuucaaaauauaccacaaaugugacaaugccugcauagggucaaucagaaauggaacuuaugaccaugauguauacagagacgaagcauuaaacaaccgguuccagaucaaagguguugagcugaagucaggauacaaagauuggauccuauggauuuccuuugccauaucauguuuuuugcuuuguguuguuuugcugggguucaucaugugggccugccaaaaaggcaacauuaggugcaacauuugcauuuga

SEQ ID NO: 32211 - RNA, 1701 nt, Artificial Sequence; identical to SEQ ID NO: 32202
  derived and/or modified CDS sequence (wt) from hemagglutinin__InfluenzaA__AAY98047

SEQ ID NO: 32212 - RNA, 1701 nt, Artificial Sequence; identical to SEQ ID NO: 32059
  derived and/or modified CDS sequence (wt) from hemagglutinin__InfluenzaA__AAY98057

SEQ ID NO: 32213 - RNA, 1701 nt, Artificial Sequence
  derived and/or modified CDS sequence (wt) from hemagglutinin__InfluenzaA__AAY98067
augaagacuaucauugcuuugagcuacauuuuaugucugguuuucgcucaagaacuucccggaaaugacaacagcacggcaacgcugugccuggggcaccaugcagugccaaacggaacgcuagugaaaacaaucacgaaugaccaaauugaagugacuaaugcuacugagcugguucagaguuccucaacagguagaauaugcgacaguccucaccaaauccuugauggagaaaacugcacacuaauagaugcucuauugggagacccucauugugauggcuuccaaaauaaggaaugggaccuuuuuguugaacgcagcaaagccuacagcaacuguuacccuuaugaugugccggauuaugucucccuuaggucacuaguugccucaucaggcacgcuggaguuuaacaaugaaagcuucaauuggacuggagucgcucagaauggaacaagcucugcuugcaaaaggagaucugauaaaaguuucuuuaguagauugaauugguugcaccaauuaaaauacaaauauccagcacugaacgugacuaugccaaacaaugaaaaauuugacaaauuguacauuugggggguucaccacccggguacagacagugaccaaaucagccuauaugcucaagcaucagggagagucacagucucuaccaaaagaagccaacaaacuguaaucccgaauaucggaucuggacccuggguaaggggugucuccagcagaauaagcaucuauuggacaauaguaaaaccgggagacauacuuuugauuaacagcacagggaaucuaauugcuccucgggguuacuucaaaauacgaagugggaaaagcucaauaaugaggucagaugcacccauuggcaaaugcaauucugaaugcaucacuccaaauggaagcauucccaaugacaaaccauuucaaaauguaaacaggaucacauaugggcccugucccagauauguuaagcaaaacacucugaaauuggcaacagggaugcggaaugugccagagaaacaaacuagaggcauauucggugcaaucgcgggcuucauagaaaaugguugggagggaaugauggacgguugguacgguuucaggcaucaaaauucugagggcacagggcaagcagcagaucuuaaaagcacucaagcagcaaucaaccaaaucaacgggaaacugaauagguuaaucgaaaaaacgaacgagaaauuccaucaaauugaaaaagaauucucagaaguagaagggagaauucaggaccucgagaaauauguugaggacacuaaaauagaucucuggucguacaaugcggagcuucuuguugcccuggagaaccaacauacaauugaucuaacugacucagaaaugaacaaacuguuugaaagaacaaagaagcaacugagggaaaaugcugaggauaugggcaaugguuguuucaaaauauaccacaaaugugacaaugccugcauagggucaaucagaaauggaacuuaugaccaugauguauacagagacgaagcauugaacaaccgguuccagaucaaagguguugagcugaagucaggauacaaagauuggauccuauggauuuccuuugccauaucauguuuuuugcuuuguauuguuuugcugggguucaucaugugggccugccaaaaaggcaacauuaggugcaacauuugcauuuga

SEQ ID NO: 32214 - RNA, 1701 nt, Artificial Sequence
  derived and/or modified CDS sequence (wt) from hemagglutinin__InfluenzaA__AAY98077
augaagacuaucauugcucugagcuacauuuuaugccugguuuucgcucaaaaacuucccggaaaugacaacagcacggcaacgcugugccuggggcaccaugcagugccaaacggaacgcuagugaaaacaaucacgaaugaccaaauugaaguaacuaaugcuacugagcugguucagaguuccucagcaaguagaauaugcgacaguccucaccaaauccuugauggagaaaacugcacacuaauagaugcucuauugggagacccucauugugauggcuuccaaaauaaggaaugggaccuuuuuguugaacgcagcaaagccuacagcaacuguuacccuuaugaugugccggauuaugucucccuuaggucacuaguugccucaucaggcacgcuggaguuuaacaaugaaagcuucaauuggacuggagucgcucagaauggaacaagcucugcuugcaaaaggagaucugauaaaaguuucuuuaguagauugaauugguugcaccaauuaaaauacaaauauccagcacugaacgugacuaugccaaacaaugaaaaauuugacaaauuguacauuugggggguucaccacccggguacagacagugaccaaaucagccuauaugcucaagcaucagggagagucacagucucuaccaaaagaagccaacaaacuguaaucccgaauaucggaucuagacccuggguaaggggugucuccagcagaauaagcaucuauuggacaauaguaaaaccgggagacauacuuuugauuaacagcacagggaaucuaauugcuccucgggguuacuucaaaauacgaagugggaaaagcucaauaaugaggucagaugcacccauuggcaaaugcaauucugaaugcaucacuccaaauggaagcauucccaaugacaaaccauuucaaaauguaaacaggaucacauauggggccugucccagauauguuaagcaaaacacucugaaauuggcaacagggaugcggaauguaccagagaaacaaacuagaggcauauucggugcaaucgcgggcuucauagaaaaugguugggagggaaugauggacgguugguacgguuucaggcaucaaaauucugagggcacagggcaagcagcagaucuuaaaagcacucaagcagcaaucaaccaaaucaacgggaaacugaauagguuaauugagaaaacgaacgagaaauuccaucaaauugaaaaagaauucucagaaguagaagggagaauucaggaccucgagaaauauguugaggacacuaaaauagaucucuggucguacaaugcggagcuucuuguugcccuggagaaucaacauacaauugaucuaacugacucagaaaugaacaaacuguuugaaagaacaaagaagcaacugagggaaaaugcugaggauaugggcaacgguuguuucaaaauauaccacaaaugugacaaugccugcauagggucaaucagaaauggaacuuaugaccaugauguauacagagacgaagcauugaacaaccgguuccagaucaaagguguugagcugaagucaggauacaaagauuggauccuauggauuuccuuugccauaucauguuuuuugcuuuguauuguuuugcugggguucaucaugugggccugccaaaaaggcaacauuaggugcaacauuugcauuuga

SEQ ID NO: 32215 - RNA, 1701 nt, Artificial Sequence
  derived and/or modified CDS sequence (wt) from hemagglutinin__InfluenzaA__AAY98087
augaagacuaucauugcuuugagcuacauuuuaugucugguuuucgcucaaaaacuucccggaaaugacaacagcacggcaacgcugugccugggacaccaugcagugccaaacggaacgcuagugaaaacaaucacgaaugaccaaauugaagugacuaaugcuacugagcugguucagaguuccucaacagguagaauaugcgacaguccucaccgaauccuugauggagaaaacugcacacugauagaugcucuauugggagacccucauugugauggcuuccaaaauaaggaaugggaccuuuuuguugaacgcagcaaagccuacagcaacuguuacccuuaugaugugccggauuaugccucccuuaggucacuaguugccucauccggcacccuggaguuuaacaaugaaagcuucaauuggacuggagucgcucagaauggaacaagcucugcuugcaaaaggagaucuauuaaaaguuucuuuaguagauugaauugguugcaccaauuaaaauacaaauauccagcacugaacgugacuaugccaaacaaugacaaauuugacaaauuguacauuugggggguucaccacccgaguacggacagugaccaaaccagccuauaugcucaagcaucagggagagucacagucucuaccaaaagaagccaacaaacuguaaucccgaauaucggaucuagacccuggguaaggggugucuccagcagaauaagcaucuauuggacaauaguaaaaccgggagacauacuuuugauuaacagcacagggaaucuaauugcuccucgggguuacuucaaaauacgaagugggaaaagcucaauaaugaggucagaugcacccauuggcaaaugcaauucugaaugcaucacuccaaauggaagcauucccaaugacaaaccauuucaaaauguaaacaggaucacauauggggccugucccagauauguuaagcaaaacacucugaaacuggcaacagggaugcggaauguaccagagaaacaaacuagaggcauauucggcgcaaucgcggguuucauagaaaaugguugggagggaaugguggacgguugguacgguuucaggcaucaaaauucugagggcacaggacaagcagcagaucuuaaaagcacucaagcagcaaucaaccaaaucaacgggaaacugaauagguuaaucgagaaaacgaacgagaaauuccaucaaauugaaaaagaauucucagaaguagaagggagaauucaggaccucgagaaauauguugaggacacuaaaauagaucucuggucguacaacgcggagcuucuuguugcccuggagaaccaacauacaauugaucuaacugacucagaaaugaacaaacuguuugaaagaacaaggaagcaacugagggaaaaugcugaggauaugggcaaugguuguuucaaaauauaccacaaaugugacaaugccugcauagggucaaucagaaauggaacuuaugaccaugauguauacagagacgaagcauuaaacaaccgguuccagaucaaagguguugagcugaagucaggauacaaagauuggauccuauggauuuccuuugccauaucauguuuuuugcuuuguguuguuuugcugggguucaucaugugggccugccaaaaaggcaacauuaggugcaacauuugcauuuga

SEQ ID NO: 32216 - RNA, 1701 nt, Artificial Sequence; identical to SEQ ID NO: 32210
  derived and/or modified CDS sequence (wt) from hemagglutinin__InfluenzaA__AAY98097

SEQ ID NO: 32217 - RNA, 1701 nt, Artificial Sequence
  derived and/or modified CDS sequence (wt) from hemagglutinin__InfluenzaA__AAY98107
augaagacuaucauugcuuugagcuacauuuuaugucugguuuucgcucaaaaacuucccggaaaugacaacagcacggcaacgcugugccuggggcaccaugcagugccaaacggaacgcuagugaaaacaaucacgaaugaccaaauugaagugacuaaugcuacugagcugguucagaguuccucaacagguagaauaugcgacaguccucaccaaauccuugauggagaaaacugcacacuaauagaugcucuauugggagacccucauugugauggcuuccaaaauaaggaaugggaccuuuuuguugaacgcagcaaagccuacagcaacuguuacccuuaugaugugccggauuaugccucccuuaggucacuaguugccucauccggcacacuggaguuuaacaaugaaagcuucaauuggacuggagucgcucagaauggaacaagcucugcuugcaaaaggagaucuaauaaaaguuucuuuaguagauugaauugguugcaccaauuaaaauacaaauauccagcacugaacgugacuaugccaaacaaugaaaaauuugacaaauuguacauuugggggguucaccacccgaguacggacagugaccaaaucagccuauaugcucaagcaucagggagagucacagucucuaccaaaagaagccaacaaacuguaaucccgaauaucggaucuagacccuggguaaggggugucuccagcagaauaagcaucuauuggacaauaguaaaaccgggagacauacuuuugauuaacagcacagggaaucuaauugcuccucgggguuacuucaaaauacgaagugggaaaagcucaauaaugaggucagaugcacccauuggcaaaugcaauucugaaugcaucacuccaaauggaagcauucccaaugacaaaccauuucaaaauguaaacaggaucacauauggggccugucccagauauguuaagcaaaacacucugaaauuggcaacagggaugcggaauguaccagagaaacaaacuagaggcauauucggcgcaaucgcggguuucauagaaaaugguugggagggaaugguggacgguugguacgguuucaggcaucaaaacucugagggcacaggacaagcagcagaucuuaaaagcacucaagcagcaaucaaccaaaucaacgggaaacugaauagguuaaucgagaaaacgaacgagaaauuccaucaaauugaaaaagaauucucagaaguagaagggagaauucaggaccucgagaaauauguugaggacacuaaaauagaucucuggucguacaacgcggagcuucuuguugcccuggagaaccaacauacaauugaucuaacugacucagaaaugaacaaacuguuugaaagaacaaagaagcaacugagggaaaaugcugaggauaugggcaaugguuguuucaaaauauaccacaaaugugacaaugccugcauagggucaaucagaaauggaacuuaugaccaugauguauacagagacgaagcauuaaacaaccgguuccagaucaaagguguugagcugaagucaggauacaaagauuggauccuauggauuuccuuugccauaucauguuuuuugcuuuguguuguuuugcugggguucaucaugugggccugccaaaaaggcaacauuaggugcaacauuugcauuuga

SEQ ID NO: 32218 - RNA, 1701 nt, Artificial Sequence
  derived and/or modified CDS sequence (wt) from hemagglutinin__InfluenzaA__AAY98117
augaagacuaucauugcuuugagcuacauuuuaugucugguuuucgcucaaaaacuucccggaaaugacaacagcacggcaacgcugugccuggggcaccaugcagugccaaacggaacgcuagugaaaacaaucacgaaugaccaaauugaagugacuaaugcuacugagcugguucagaguuccucaacagguagaauaugcgacaguccucaccaaauccuugauggagaaaacugcacacuaauagaugcucuauugggagacccucauugugauggcuuccaaaauaaggaaugggaccuuuuuguugaacgcagcaaagccuacagcaacuguuacccuuaugaugugccggauuaugccucccuuaggucacuaguugccucauccggcacacuggaguuuaacaaugaaagcuucaauuggacuggagucgcucagaauggaacaagcucugcuugcaaaaggggaucuaauaaaaguuucuuuaguagauugaauugguugcaccaauuaaaauacaaauauccagcacugaacgugacuaugccaaacaaugaaaaauuugaaaaauuguacauuugggggguucaccacccgaguacggacagugaccaaaucagccuauaugcucaagcaucagggagagucacagucucuaccaaaagaagccaacaaacuguaaucccgaauaucggaucuagacccuggguaaggggugucuccagcagaauaagcaucuauuggacaauaguaaaaccgggagacauacuuuugauuaacagcacagggaaucuaauugcuccucgggguuacuucaaaauacgaagugggaaaagcucaauaaugaggucagaugcacccauuggcaaaugcaauucugaaugcaucacuccaaauggaagcauucccaaugacaaaccauuucaaaauguaaacaggaucacauauggggccugucccagauauguuaagcaaaacacucugaaauuggcaacagggaugcggaauguaccagagaaacaaacuagaggcauauucggcgcaaucgcggguuucauagaaaaugguugggagggaaugguggacgguugguacgguuucaggcaucaaaauucugagggcacaggacaagcagcagaucuuaaaagcacucaagcagcaaucaaccaaaucaacgggaaacugaauagguuaaucgagaaaacgaacgagaaauuccaucaaauugaaaaagaauucucagaaguagaagggagaauucaggaccucgagaaauauguugaggacacuaaaauagaucucuggucguacaacgcggagcuucuuguugcccuggagaaccaacauacaauugaucuaacugacucagaaaugaacaaacuguuugaaagaacaaagaagcaacugagggaaaaugcugaggauaugggcaaugguuguuucaaaauauaccacaaaugugacaaugccugcauagggucaaucagaaauggaacuuaugaccaugauguauacagagacgaagcauuaaacaaccgguuccagaucaaagguguugagcugaagucaggauacaaagauuggauccuauggauuuccuuugccauaucauguuuuuugcuuuguguuguuuugcugggguucaucaugugggccugccaaaaaggcaacauuaggugcaacauuugcauuuga

SEQ ID NO: 32219 - RNA, 1701 nt, Artificial Sequence
  derived and/or modified CDS sequence (wt) from hemagglutinin__InfluenzaA__AAY98147
augaagacuaucauugcuuugagcuacauuuuaugucugguuuucgcucaaaaacuucccggaaaugacaacagcacggcaacgcugugccuggggcaccaugcagugccaaacggaacgcuagugaaaacaaucacgaaugaccaaauugaagugacuaaugcuacugagcugguucagaguuccucaacagguagaauaugcgacaguccucaccaaauccuugauggagaaaacugcacacuaauagaugcucuauugggagacccucauugugauggcuuccaaaauaaggaaugggaccuuuuuguugaacgcagcaaagccuacagcaacuguuacccuuaugaugugccggauuaugccucccuuaggucacuaguugccucauccggcacacuggaguuuaacaaugaaagcuucaauuggacuggagucgcucagaauggaacaagcucugcuugcaaaaggagaucuaauaaaaguuucuuuaguagauugaauugguugcaccaauuaaaauacaaauauccagcacugaacgugacuaugccaaacaaugaaaaauuugacaaauuguacauuugggggguucaccacccgaguacggacagugaccaaaucagccuauaugcucaagcaucagggagagucacagucucuaccaaaagaagccaacaaacuguaaucccgaauaucggaucuagacccuggguaaggggugucuccagcagaauaagcaucuauuggacaauaguaaaaccgggagacauacuuuugauuaacagcacagggaaucuaauugcuccucgggguuacuucaaaauacgaagugggaaaagcucaauaaugaggucagaugcacccauuggcaaaugcaauucugaaugcaucacuccaaauggaagcauucccaaugacaaaccauuucaaaauguaaacaggaucacauauggggccugucccagauauguuaagcaaaacacucugaaauuggcaacagggaugcggaauguaccagagaaacaaacuagaggcauauucggcgcaaucgcggguuucauagaaaaugguugggagggaaugguggacgguugguacgguuucaggcaucaaaauucugagggcacaggacaagcagcagaucuuaaaagcacucaagcagcaaucaaccaaaucaacgggaaacugaauagguuaaucgagaaaacaaacgagaaauuccaucaaauugaaaaagaauucucagaaguagaagggagaauucaggaccucgagaaauauguugaggacacuaaaauagaucucuggucguacaacgcggagcuucuuguugcccuggagaaccaacauacaauugaucuaacugacucagaaaugaacaaacuguuugaaagaacaaagaagcaacugagggaaaaugcugaggauaugggcaaugguuguuucaaaauauaccacaaaugugacaaugccugcauagggucaaucagaaauggaacuuaugaccaugauguauacagagacgaagcauuaaacaaccgguuccagaucaaagguguugagcugaagucaggauacaaagauuggauccuauggauuuccuuugccauaucauguuuuuugcuuuguguuguuuugcugggguucaucaugugggccugccaaaaaggcaacauuaggugcaacauuugcauuuga

SEQ ID NO: 32220 - RNA, 1701 nt, Artificial Sequence; identical to SEQ ID NO: 32202
  derived and/or modified CDS sequence (wt) from hemagglutinin__InfluenzaA__AAY98157

SEQ ID NO: 32221 - RNA, 1701 nt, Artificial Sequence
  derived and/or modified CDS sequence (wt) from hemagglutinin__InfluenzaA__AAY98167
augaagacuaucauugcuuugagcuacauuuuaugucugguuuucgcucaaaaacuucccggaaaugacaacagcacggcaacgcugugccuggggcaccaugcagugccaaacggaacgcuagugaaaacaaucacgaaugaccaaauugaagugacuaaugcuacugagcugguucagaguuccucaacagguagaauaugcgacaguccucaccaaauccuugauggagaaaacugcacacuaauagaugcucuauugggagacccucauugugauggcuuccaaaauaaggaaugggaccuuuuuguugaacgcagcaaagccuacagcaacuguuacccuuaugaugugccggauuaugccucccuuaggucacuaguugccucauccggcacacuggaguucaacaaugaaagcuucaauuggacuggagucgcucagaauggaacaagcucugcuugcaaaaggagaucuaauaaaaguuucuuuaguagauugaauugguugcaccaauuaaaauacaaauauccagcacugaacgugacuaugccaaacaaugaaaaauuugacaaauuguacauuugggggguucaccacccgaguacggacagugaccaaaucagccuauaugcucaagcaucagggagagucacagucucuacccaaagaagccaacaaacuguaaucccgaauaucggaucuagacccuggguaaggggugucuccagcagaauaagcaucuauuggacaauaguaaaaccgggagacauacuuuugauuaacagcacagggaaucuaauugcuccucgggguuacuucaaaauacgaagugggaaaagcucaauaaugaggucagaugcacccauuggcaaaugcaauucugaaugcaucacuccaaauggaagcauucccaaugacaaaccauuucaaaauguaaacaggaucacauauggggccugucccagauauguuaagcaaaacacucugaaauuggcaacagggaugcggaauguaccagagaaacaaacuagaggcauauucggcgcaaucgcggguuucauagaaaaugguugggagggaaugguggacgguugguacgguuucaggcaucaaaauucugagggcacaggacaagcagcagaucuuaaaagcacucaagcagcaaucaaccaaaucaacgggaaacugaauagguuaaucgagaaaacgaacgagaaauuccaucaaauugaaaaagaauucucagaaguagaagggagaauucaggaccucgagaaauauguugaggacacuaaaauagaucucuggucguacaacgcggagcuucuuguugcccuggagaaccaacauacaauugaucuaacugacucagaaaugaacaaacuguuugaaagaacaaagaagcaacugagggaaaaugcugaggauaugggcaaugguuguuucaaaauauaccacaaaugugacaaugccugcauagggucaaucagaaauggaacuuaugaccaugauguauacagagacgaagcauuaaacaaccgguuccagaucaaagguguugagcugaagucaggauacaaagauuggauccuauggauuuccuuugccauaucauguuuuuugcuuuguguuguuuugcugggguucaucaugugggccugccaaaaaggcaacauuaggugcaacauuugcauuuga

SEQ ID NO: 32222 - RNA, 1701 nt, Artificial Sequence
  derived and/or modified CDS sequence (wt) from hemagglutinin__InfluenzaA__AAY98177
augaagacuaucauugcuuugagcuacauucuaugucugguuuucgcucaaaaacuucccggaaaugacaacagcacggcaacgcugugccuggggcaccaugcagugccaaacggaacgcuagugaaaacaaucacgaaugaccaaauugaagugacuaaugcuacugagcugguucagaguuccucaacagguagaauaugcgacaguccucaccaaauccuugauggagaaaacugcacacuaauagaugcucuauugggagacccucauugugauggcuuccaaaauaaggaaugggaccuuuuuguugaacgcagcaaagccuacagcaacuguuacccuuaugaugugccggauuaugccucccuuaggucacuaguugccucauccggcacacuggaguuuaacaaugaaagcuucaauuggacuggagucgcucagaauggaacaagcucugcuugcaaaaggagaucuaauaaaaguuucuuuaguagauugaauugguugcaccaauuaaaauacaaauauccagcacugaacgugacuaugccaaacaaugaaaaauuugacaaauuguacauuugggggguucaccacccgaguacggacagugaccaaaucagccuauaugcucaagcaucagggagagucacagucucuaccaaaagaagccaacaaacuguaaucccgaauaucggaucuagacccuggguaaggggugucuccagcagaauaagcaucuauuggacaauaguaaaaccgggagacauacuuuugauuaacagcacagggaaucuaauugcuccucgggguuacuucaaaauacgaagugggaaaagcucaauaaugaggucagaugcacccauuggcaaaugcaauucugaaugcaucacuccaaauggaagcauucccaaugacaaaccauuucaaaauguaaacaggaucacauauggggccugucccagauauguuaagcaaaacacucugaaauuggcaacagggaugcggaauguaccagagaaacaaacuagaggcauauucggcgcaaucgcggguuucauagaaaaugguugggagggaaugguggacgguugguacgguuucaggcaucaaaauucugagggcacaggacaagcagcagaucuuaaaagcacucaagcagcaaucaaccaaaucaacgggaaacugaauagguuaaucgagaaaacgaacgagaaauuccaucaaauugaaaaagaauucucagaaguagaagggagaauucaggaccucgagaaauauguugaggacacuaaaauagaucucuggucguacaacgcggggcuucuuguugcccuggagaaccaacauacaauugaucuaacugacucagaaaugaacaaacuguuugaaagaacaaagaagcaacugagggaaaaugcugaggauaugggcaaugguuguuucaaaauauaccacaaaugugacaaugccugcauagggucaaucagaaauggaacuuaugaccaugauguauacagagacgaagcauuaaacaaccgguuccagaucaaagguguugagcugaagucaggauacaaagauuggauccuauggauuuccuuugccauaucauguuuuuugcuuuguguuguuuugcugggguucaucaugugggccugccaaaaaggcaacauuaggugcaacauuugcauuuga

SEQ ID NO: 32223 - RNA, 1701 nt, Artificial Sequence
  derived and/or modified CDS sequence (wt) from hemagglutinin__InfluenzaA__AAY98195
augaagacuaucauugcuuugagcuacauuuuaugucugguuuucgcucaaaaacuucccggaaaugacaacagcacggcaacgcugugccuggggcaccaugcagugccaaacggaacgcuagugaaaacaaucacgaaugaccaaauugaagugacuaaugcuacugagcugguucagaguuccucaacagguagaauaugcgacaguccucaccaaauccuugauggagaaaacugcacacuaauagaugcucuauugggagacccucauugugauggcuuccaaaauaaggaaugggaccuuuuuguugaacgcagcaaagccuacagcaacuguuacccuuaugaugugccggauuaugccucccuuaggucacuaguugccucauccggcacacuggaguuuaacaaugaaagcuucaauuggacuggagucgcucagaauggaacaagcucugcuugcaaaaggagaucuaauaaaaguuucuuuaguagauugaauugguugcaccaauuaaaauacaaauauccagcacugaacgugacuaugccaaacaaugaaaaauuugacaaauuguacauuugggggguucaccacccgaguacggacagugaccaaaucagccuauaugcucaagcaucagggagagucacagucucuaccaaaagaagccaacaaacuguaaucccgaauaucggaucuagacccuggguaaggggugucuccagcagaauaagcaucuauuggacaauaguaaaaccgggagacauacuuuugauuaacagcacagggaaucuaauugcuccucgggguuacuucaaaauacgaagugggaaaagcucaauaaugaggucagaugcacccauuggcaaaugcaauucugaaugcaucacuccaaauggaagcauucccaaugacaaaccauuucaaaauguaaacaggaucacauauggggccugucccagauauguuaagcaaaacacucugaaauuggcaacagggaugcggaauguaccagagaaacaaacuagaggcauauucggcgcaaucgcggguuucauagaaaaugguugggagggaaugguggacgguugguacgguuucaggcaucaaaauucugagggcacaggacaagcagcagaucuuaaaagcacucaagcagcaaucaaccaaaucaacgggaaacugaauagguuaaucgagaaaacgaacgagaaauuccaucaaauugaaaaagaauucucagaaguagaagggagaauucaggaccucgagaaauauguugaggacacuaaaauagaucucuggucguacaacgcggagcuucuuguugcccuggagaaccaacauacaauugaucuaacugacucagaaaugaacaaacuguuugaaagaacaaggaagcaacugagggaaaaugcugaggauaugggcaaugguuguuucaaaauauaccacaaaugugacaaugccugcauagggucaaucagaaauggaacuuaugaccaugauguauacagagacgaagcauuaaacaaccgguuccagaucaaagguguugagcugaagucaggauacaaagauuggauccuauggauuuccuuugccauaucauguuuuuugcuuuguguuguuuugcugggguucaucaugugggccugccaaaaaggcaacauuaggugcaacauuugcauuuga

SEQ ID NO: 32224 - RNA, 1701 nt, Artificial Sequence
  derived and/or modified CDS sequence (wt) from hemagglutinin__InfluenzaA__AAY98207
augaagacuaucauugcuuugagcuacauuuuaugucugguuuucgcucaaaaacuucccggaaaugacaacagcacggcaacgcugugccuggggcaccaugcagugccaaacggaacgcuagugaaaacaaucacgaaugaccaaauugaagugacuaaugcuacugagcugguucagaguuccucaacagguagaauaugcgacaguccucaccaaauccuugauggagaaaacugcacacuaauagaugcucuauugggagacccucauugugauggcuuccaaaauaaggaaugggaccuuuuuguugaacgcagcaaagccuacagcaacuguuacccuuaugaugugccggauuaugccucccuuaggucacuaguugccucauccggcacacuggaguucaacaaugaaagcuucaauuggacuggagucgcucagaauggaacaagcucugcuugcaaaaggagaucuaauaaaaguuucuuuaguagauugaauugguugcaccaauuaaaauacaaauauccagcacugaacgugacuaugccaaacaaugaaaaauuugacaaauuguacauuugggggguucaccacccgaguacggacagugaccaaaucagccuauaugcucaagcaucagggagagucacagucucuaccaaaagaagccaacaaacuguaaucccgaauaucggaucuagacccuggguaaggggugucuccagcagaauaagcaucuauuggacaauaguaaaaccgggagacauacuuuugauuaacagcacagggaaucuaauugcuccucgggguuacuucaaaauacgaagugggaaaagcucaauaaugaggucagaugcacccauuggcaaaugcaauucugaaugcaucacuccaaauggaagcauucccaaugacaaaccauuucaaaauguaaacaggaucacauauggggccugucccagauauguuaagcaaaacacucugaaauuggcaacagggaugcggaauguaccagagaaacaaacuagaggcauauucggcgcaaucgcggguuucauagaaaaugguugggagggaaugguggacgguugguacgguuucaggcaucaaaauucugagggcacaggacaagcagcagaucuuaaaagcacucaagcagcaaucaaccaaaucaacgggaaacugaauagguuaaucgagaaaacgaacgagaaauuccaucaaauugaaaaagaauucucagaaguagaagggagaauucaggaccucgagaaauauguugaggacacuaaaauagaucucuggucguacaacgcggagcuucuuguugcccuggagaaccaacauacaauugaucuaacugacucagaaaugaacaaacuguuugaaagaacaaagaagcaacugagggaaaaugcugaggauaugggcaaugguuguuucaaaauauaccacaaaugugacaaugccugcauagggucaaucagaaauggaacuuaugaccaugauguauacagagacgaagcauuaaacaaccgguuccagaucaaagguguugagcugaagucaggauacaaagauuggauccuauggauuuccuuugccauaucauguuuuuugcuuuguguuguuuugcugggguucaucaugugggccugccaaaaaggcaacauuaggugcaacauuugcauuuga

SEQ ID NO: 32225 - RNA, 1701 nt, Artificial Sequence; identical to SEQ ID NO: 32200
  derived and/or modified CDS sequence (wt) from hemagglutinin__InfluenzaA__AAY98217

SEQ ID NO: 32226 - RNA, 1701 nt, Artificial Sequence; identical to SEQ ID NO: 32217
  derived and/or modified CDS sequence (wt) from hemagglutinin__InfluenzaA__AAY98227

SEQ ID NO: 32227 - RNA, 1701 nt, Artificial Sequence; identical to SEQ ID NO: 32202
  derived and/or modified CDS sequence (wt) from hemagglutinin__InfluenzaA__AAY98237

SEQ ID NO: 32228 - RNA, 1701 nt, Artificial Sequence
  derived and/or modified CDS sequence (wt) from hemagglutinin__InfluenzaA__AAY98247
augaagacuaucauugcuuugagcuacauuuuaugucugguuuucgcucaaaaacuucccggaaaugacaacagcacggcaacgcugugccuggggcaccaugcagugccaaacggaacgcuagugaaaacaaucacgaaugaccaaauugaagugacuaaugcuacugagcugguucagaguuccucaacagguagaauaugcgacaguccucaccaaauccuugauggagaaaacugcacacuaauagaugcucuauugggagacccucauugugauggcuuccaaaauaaggaaugggaccuuuuuguugaacgcagcaaagccuacagcaacuguuacccuuaugaugugccggauuaugccucccuuaggucacuaguugccucauccggcacacuggaguuuaacaaugaaagcuucaauuggacuggagucgcucagaauggaacaagcucugcuugcaaaaggagaucuaauaaaaguuucuuuaguagauugaauugguugcaccaauuaaaauacaaauauccagcacugaacgugacuaugccaaacaaugaaaaauuugacaaauuguacauuugggggguucaccacccgaguacggacagugaccaaaucagccuauaugcucaagcaucagggagagucacagucucuaccaaaagaagccaacaaacuguaaucccgaauaucggaucuagacccuggguaaggggugucuccagcagaauaagcaucuauuggacaauaguaaaaccgggagacauacuuuugauuaacagcacagggaaucuaauugcuccucgggguuacuucaaaauacgaagugggaaaagcucaauaaugaggucagaugcacccauuggcaaaugcaauucugaaugcaucacuccaaauggaagcauucccaaugacaaaccauuucaaaauguaaacaggaucacauauggggccugucccagauauauuaagcaaaacacucugaaauuggcaacagggaugcggaauguaccagagaaacaaacuagaggcauauucggcgcaaucgcggguuucauagaaaaugguugggagggaaugguggacgguugguacgguuucaggcaucaaaauucugagggcacaggacaagcagcagaucuuaaaagcacucaagcagcaaucaaccaaaucaacgggaaacugaauagguuaaucgagaaaacgaacgagaaauuccaucaaauugaaaaagaauucucagaaguagaagggagaauucaggaccucgagaaauauguugaggacacuaaaauagaucucuggucguacaacgcggagcuucuuguugcccuggagaaccaacauacaauugaucuaacugacucagaaaugaacaaacuguuugaaagaacaaagaagcaacugagggaaaaugcugaggauaugggcaaugguuguuucaaaauauaccacaaaugugacaaugccugcauagggucaaucagaaauggaacuuaugaccaugauguauacagagacgaagcauuaaacaaccgguuccagaucaaagguguugagcugaagucaggauacaaagauuggauccuauggauuuccuuugccauaucauguuuuuugcuuuguguuguuuugcugggguucaucaugugggccugccaaaaaggcaacauuaggugcaacauuugcauuuga

SEQ ID NO: 32229 - RNA, 1701 nt, Artificial Sequence
  derived and/or modified CDS sequence (wt) from hemagglutinin__InfluenzaA__AAY98319
augaagacuaucauugcuuugagcuacauucuaugucugguuuucgcucaaaaacuucccggaaaugacaacagcacggcaacgcugugccuggggcaccaugcagugccaaacggaacgcuagugaaaacaaucacgaaugaccaaauugaagugacuaaugcuacugagcugguucagaguuccucaacagguagaauaugcgacaguccucaccaaauccuugauggagaaaacugcacacuaauagaugcucuauugggagacccucauugugauggcuuccaaaauaaggaaugggaccuuuuuguugaacgcagcaaagccuacagcaacuguuacccuuaugaugugccggauuaugccucccuuaggucacuaguugccucauccggcacacuggaguuuaacaaugaaagcuucaauuggacuggagucgcucagaauggaacaagcucugcuugcaaaaggagaucuaauaaaaguuucuuuaguagauugaauugguugcaccaauuaaaauacaaauauccagcacugaacgugacuaugccaaacaaugaaaaauuugacaaauuguacauuugggggguucaccacccgaguacggacagugaccaaaucagccuauaugcucaagcaucagggagagucacagucucuaccaaaagaagccaacaaacuguaaucccgaauaucggaucuagacccuggguaaggggugucuccagcagaauaagcaucuauuggacaauaguaaaaccgggagacauacuuuugauuaacagcacagggaaucuaauugcuccucgggguuacuucaaaauacgaagugggaaaagcucaauaaugaggucagaugcacccauuggcaaaugcaauucugaaugcaucacuccaaauggaagcauucccaaugacaaaccauuucaaaauguaaacaggaucacauauggggccugucccagauauguuaagcaaaacacucugaaauuggcaacagggaugcggaauguaccagagaaacaaacuagaggcauauucggcgcaaucgcggguuucauagaaaaugguugggagggaaugguggacgguugguacgguuucaggcaucaaaauucugagggcacaggacaagcagcagaucuuaaaagcacucaagcagcaaucaaccaaaucaacgggaaacugaauagguuaaucgagaaaacgaacgagaaauuccaucaaauugaaaaagaauucucagaaguagaagggagaauucaggaccucgagaaauauguugaggacacuaaaauagaucucuggucguacaacgcggagcuucuuguugcccuggagaaccaacauacaauugaucuaacugacucagaaaugaacaaacuguuugaaagaacaaagaagcaacugagggaaaaugcugaggauaugggcaaugguuguuucaaaauauaccacaaaugugacaaugccugcauagggucaaucagaaauggaacuuaugaccaugauguauacagagacgaagcauuaaacaaccgguuccagaucaaagguguugagcugaagucaggauacaaagauuggauccuauggauuuccuuugccauaucauguuuuuugcuuuguguuguuuugcugggguucaucaugugggccugccaaaaaggcaacauuaggugcaacauuugcauuuga

SEQ ID NO: 32230 - RNA, 1701 nt, Artificial Sequence
  derived and/or modified CDS sequence (wt) from hemagglutinin__InfluenzaA__AAY98329
augaagacuaucauugcuuugagcuacauuuuaugucugguuuucgcucaaaaacuucccggaaaugacaacagcacggcaacgcugugccuggggcaccaugcagugccaaacggaacgcuagugaaaacaaucacgaaugaccaaauugaagugacuaaugcuacugagcugguucagaguuccucaacagguagaauaugcgacaguccucaccaaauccuugauggagaaaacugcacacuaauagaugcucuauugggagacccucauugugauggcuuccaaaauaaggaaugggaccuuuuuguugaacgcagcaaagccuacagcaacuguuacccuuaugaugugccggauuaugccucccuuaggucacuaguugccucauccggcacacuggaguuuaacaaugaaagcuucaauuggacuggagucgcucagaauggaacaagcucugcuugcaaaaggagaucuaauaaaaguuucuuuaguagauugaauugguugcaccaauuaaaauacaaauauccagcacugaacgugacuaugccaaacaaugaaaaauuugacaaauuguacauuugggggguucaccacccgaguacggacagugaccaaaucagccuauaugcucaagcauuagggagagucacagucucuaccaaaagaagccaacaaacuguaaucccgaauaucggaucuagacccuggguaaggggugucuccagcagaauaagcaucuauuggacaauaguaaaaccgggagacauacuuuugauuaacagcacagggaaucuaauugcuccucgggguuacuucaaaauacgaagugggaaaagcucaauaaugaggucagaugcacccauuggcaaaugcaauucugaaugcaucacuccaaauggaagcauucccaaugacaaaccauuucaaaauguaaacaggaucacauauggggccugucccagauauguuaagcaaaacacucugaaauuggcaacagggaugcggaauguaccagagaaacaaacuagaggcauauucggugcaaucgcggguuucauagaaaaugguugggagggaaugguggacgguugguacgguuucaggcaucuaaauucugagggcacaggacaagcagcagaucuuaaaagcacucaagcagcaaucaaccaaaucaacgggaaacugaauagguuaaucgagaaaacgaacgagaaauuccaucaaauugaaaaagaauucucagaaguagaagggagaauucaggaccucgagaaauauguugaggacacuaaaauagaucucuggucguacaacgcggagcuucuuguugcccuggagaaccaacauacaauugaucuaacugacucagaaaugaacaaacuguuugaaagaacaaagaagcaacugagggaaaaugcugaggauaugggcaaugguuguuucaaaauauaccacaaaugugacaaugccugcauagggucaaucagaaauggaacuuaugaccaugauguauacagagacgaagcauuaaacaaccgguuccagaucaaagguguugagcugaagucaggauacaaagauuggauccuauggauuuccuuugccauaucauguuuuuugcuuuguguuguuuugcugggguucaucaugugggccugccaaaaaggcaacauuaggugcaacauuugcauuuga

SEQ ID NO: 32231 - RNA, 1701 nt, Artificial Sequence; identical to SEQ ID NO: 32202
  derived and/or modified CDS sequence (wt) from hemagglutinin__InfluenzaA__AAY98339

SEQ ID NO: 32232 - RNA, 1701 nt, Artificial Sequence; identical to SEQ ID NO: 32202
  derived and/or modified CDS sequence (wt) from hemagglutinin__InfluenzaA__AAY98353

SEQ ID NO: 32233 - RNA, 1701 nt, Artificial Sequence
  derived and/or modified CDS sequence (wt) from hemagglutinin__InfluenzaA__AAY98366
augaagacuaucauugcuuugagcuacauuuuaugccugguuuucgcucaaaaacuucccggaaaugacaacagcacggcaacgcugugccugggacaccaugcagugccaaacggaacgcuagugaaaacaaucacgagugaccaaauugaagugacuaaugcuacugagcugguucagaguuccucaacagguagaauaugcgacaguccucaccgaauccuugauggagaaaacugcacacugauagaugcucuauugggagacccucauugugauggcuuccaaaauaaggaaugggaccuuuuuguugaacgcagcaaagccuacagcaacuguuacccuuaugaugugccggauuaugccucccuuaggucacuaguugccucauccggcacccuggaguuuaacaaugaaagcuucaauuggacuggagucgcucagaauggaacaagcuuugcuugcaaaaggagaucuauuaaaaguuucuuuaguagauugaauugguugcaccaauuaaaauacaaauauccagcacugaacgugacuaugccaaacaaugacaaauuugacaaauuguacauuugggggguucaccacccggguacggacagugaccaaaccagccuauaugcucaagcaucagggagagucacagucucuaccaaaagaagccaacaaacuguaaucccgaauaucggaucuagacccuggguaagggguguuuccagcagaauaagcaucuauuggacaauagugaaaccgggagacauacuucugaucaacagcacagggaaucuaauugcuccucgggguuacuucaaaauacgaagugggaaaagcucaauaaugaggucagaugcacccauuggcaaaugcaauucugaaugcaucacuccaaauggaagcauucccaaugacaaaccauuucaaaauguaaacaggaucacauauggggccugucccagauauguuaagcaaaacacucugaaauuggcaacagggaugcggaauguaccagagaaacaaacuagaggcauauucggcgcaaucgcagguuucauagaaaaugguugggagggaaugguagacgguugguacgguuucaggcaucaaaauucugagggcacaggacaagcagcagaucuuaaaagcacucaagcagcaaucaaccaaaucaacgggaaacugaauagguuaaucgagaaaacgaacgagaaauuccaucaaauugaaaaagaauucacagaaguagaagggagaauucaggaccucgagaaauauguugaggacacuaaaauagaucucuggucguacaacgcggagcuucuuguugcccuggagaaccaacauacaauugaucuaacugacucagaaaugaacaaacuguuugaaagaacaaggaagcaacugagggaaaaugcugaggauaugggcaaugguuguuucaaaauauaccacaaaugugacaaugccugcauagggucaaucagaaauggaacuuaugaccaugauguauacagagacgaagcauuaaacaaccgguuccagaucaaagguguugagcugaagucaggauacaaagauuggauccuauggauuuccuuugccacaucauguuuuuugcuuuguguuguuuugcugggguucaucaugugggccugccaaaaaggcaacauuaggugcaacauuugcauuuga

SEQ ID NO: 32234 - RNA, 1701 nt, Artificial Sequence
  derived and/or modified CDS sequence (wt) from hemagglutinin__InfluenzaA__AAY98376
augaagacuaucauugcuuugagcuacauuuuaugucugguuuucgcucaaaaacuucccggaaaugacaacagcacggcaacgcugugccugggacaccaugcagugccaaacggaacgcuagugaaaacaaucacgaaugaccaaauugaagugacuaaugcuacugagcugguucagaguuccucaacagguagaauaugugacaguccucaccaaauccuugauggagaaaacugcacacuaauagaugcucuauugggagauccucauugugauggcuuccaaaauaaggaaugggaccuuuuuguugaacgcagcaaagccuacagcaacuguuacccuuaugaugugccggauuaugccucccuuaggucacuaguugccucauccggcacacuggaguuuaacaaugaaagcuucaauuggacuggagucgcucagaauggaacaagcucugcuugcaaaaggagaucuauuaaaaguuucuuuaguagauugaauugguugcaccaauuaaaauacaaauauccagcacugaacgugacuaugccaaacaaugacaaauuugacaaauuguacauuugggggguucaccacccgaguacggacagugaccaaaccagccuauaugcucaagcaucagggagagucacagucucuaccaaaagaagccaacaaacaguaaucccgaauaucggaucuagacccuggguaaggggugucuccagcagaauaagcaucuauuggacaauaguaaaaccgggagacauacuuuugauuaacagcacagggaaucuaauugcuccucgggguuacuucaaaauacgaagugggaaaagcucaauaaugaggucagaugcacccauuggcaaaugcaauucugaaugcaucacuccaaauggaagcauucccaaugacaaaccauuucaaaauguaaacaggaucacauauggggccugucccagauauguuaagcaaaacacucugaaauuggcaacagggaugcggaauguaccagagaaacaaacuagaggcauauucggcgcaaucgcggguuucauagaaaaugguugggagggaaugguggacgguugguacgguuucaggcaucaaaauucugagggcacaggacaagcagcagaucuuaaaagcacucaagcagcaaucaaccaaaucaacgggaaacugaauagguuaaucgagaaaacgaaugagaaauuccaucaaauugaaaaagaauucucagaaguagaagggagaauucaggaccucgagaaauauguugaggacacuaaaauagaucucuggucguacaacgcggagcuucuuguugcccuggagaaccaacauacaauugaucuaacugacucagaaaugaacaaacuguuugaaagaacaaggaagcaacugagggaaaaugcugaggauaugggcaaugguuguuucaaaauauaccacaaaugugacaaugccugcauagggucaaucagaaauggaacuuaugaccaugauguauacagagacgaagcauuaaacaaccgguuccagaucaaagguguugagcugaagucaggauacaaagauuggauccuauggauuuccuuugccauaucauguuuuuugcuuuguguuguuuugcugggguucaucaugugggccugccaaaaaggcaacauuaggugcaacauuugcauuuga

SEQ ID NO: 32235 - RNA, 1701 nt, Artificial Sequence
  derived and/or modified CDS sequence (wt) from hemagglutinin__InfluenzaA__AAY98386
augaagacuaucauugcuuugagcuacauuuuaugucugguuuucgcucaaaaacuucccggaaaugacaacagcacggcaacgcugugccuggggcaccaugcagugccaaacggaacgcuagugaaaacaaucacgaaugaccaaauugaagugacuaaugcuaccgagcugguucagaguuccucaacagguagaauaugcgacaguccucaccaaauccuugauggaggaaacugcacacuaauagaugcucuauugggagacccucauugugauggcuuccaaaauaaggaaugggaccuuuuuguugaacgcagcaaagucuacagcaacuguuacccuuaugaugugccggauuaugccucccuuaggucacuaguugccucauccggcacacuggaguuuaacaaugaaagcuucaauuggacuggagucgcucagaauggaacaagcucugcuugcaaaaggagaucuauuaaaaguuucuuuaguagauugaauugguugcaccaauuaaaauacaaauauccagcacugaacgugacuaugccaaacaaugaaaaauuugacaaauuguacauuugggggguucaccacccgaguacggacagugaccaaaucagccuauaugcucaagcaucagggagagucacagucucuaccaaaagaagccaacaaacuguaaucccgaauaucggaucuagacccuggguaaggggugucuccagcagaauaagcaucuauuggacaauaguaaaaccgggagacauacuuuugauuaacagcacagggaaucuaauugcuccucgggguuacuucaaaauacgaagugggaaaagcucaauaaugaggucagaugcacccauuggcaaaugcaauucugaaugcaucacuccaaauggaagcauucccaaugacaaaccauuucaaaauguaaacaggaucacauauggggccugucccagauauguuaagcaaaacacucugaaauuggcaacagggaugcggaauguaccagagaaacaaacuagaggcauauucggcgcaaucgcggguuucauagaaaaugguugggagggaaugguggacgguugguacgguuucaggcaucaaaauucugagggcacaggacaagcagcagaucuuaaaagcacucaagcagcaaucaaccaaaucaacgggaaacugaauagguuaaucgagaaaacgaacgagaaauuccaucaaauugaaaaagaauucucagaaguagaagggagaauucaggaucucgagaaauauguugaggacacuaaaauagaucucuggucguacaacgcggagcuucuuguugcccuggagaaccaacauacaauugaucuaacugacucagaaaugaacaaacuguuugaaagaacaaagaagcaacugagggaaaaugcugaggauaugggcaaugguuguuuuaaaauauaccacaaaugugacaaugccugcauagggucaaucagaaauggaacuuaugaccaugauguauacagagacgaagcauuaaacaaccgguuccagaucaaagguguugagcugaagucaggauacaaagauuggauccuauggauuuccuuugccauaucauguuuuuugcuuuguguuguuuugcugggguucaucaugugggccugccaaaaaggcaacauuaggugcaacauuugcauuuga

SEQ ID NO: 32236 - RNA, 1701 nt, Artificial Sequence; identical to SEQ ID NO: 32202
  derived and/or modified CDS sequence (wt) from hemagglutinin__InfluenzaA__AAY98396

SEQ ID NO: 32237 - RNA, 1701 nt, Artificial Sequence
  derived and/or modified CDS sequence (wt) from hemagglutinin__InfluenzaA__AAY98406
augaagacuaucauugcuuugagcuacauuuuaugucugguuuucgcucaaaaacuucccggaaaugacaacagcacggcaacgcugugccuggggcaccaugcagugccaaacggaacgcuagugaaaacaaucacgaaugaccaaauugaagugacuaaugcuacugagcugguucagaguuccucaacagguagaauaugcgacaguccccaccaaauccuugauggagaaaacugcacacuaauagaugcucuauugggagacccucauugugauggcuuccaaaauaaggaaugggaccuuuuuguugaacgcagcaaagccuacagcaacuguuacccuuaugaugugccggauuaugccucccuuaggucacuaguugccucauccggcacacuggaguuuaacaaugaaagcuucaauuggacuggagucgcucagaauggaacaagcucugcuugcaaaaggagaucuaauaaaaguuucuuuaguagauugaauugguugcaccaauuaaaauacaaauauccagcacugaacgugacuaugccaaacaaugaaaaauuugacaaauuguacauuugggggguucaccacccgaguacggacagugaccaaaucagccuauaugcucaagcaucagggagagucacagucucuaccaaaagaagccaacaaacuguaaucccgaauaucggaucuagacccuggguaaggggugucuccagcagaauaagcaucuauuggacaauaguaaaaccgggagacauacuuuugauuaacagcacagggaaucuaauugcuccucgggguuacuucaaaauacgaagugggaaaagcucaauaaugaggucagaugcacccauuggcaaaugcaauucugaaugcaucacuccaaauggaagcauucccaaugacaaaccauuucaaaauguaaacaggaucacauauggggccugucccagauauguuaagcaaaacacucugaaauuggcaacagggaugcggaauguaccagagaaacaaacuagaggcauauucggcgcaaucgcggguuucauagaaaaugguugggagggaaugguggacgguugguacgguuucaggcaucaaaauucugagggcacaggacaagcagcagaucuuaaaagcacucaagcagcaaucaaccaaaucaacgggaaacugaauagguuaaucgagaaaacgaacgagaaauuccaucaaauugaaaaagaauucucagaaguagaagggagaauucaggaccucgagaaauauguugaggacacuaaaauagaucucuggucguacaacgcggagcuucuuguugcccuggagaaccaacauacaauugaucuaacugacucagaaaugaacaaacuguuugaaagaacaaagaagcaacugagggaaaaugcugaggauaugggcaaugguuguuucaaaauauaccacaaaugugacaaugccugcauagggucaaucagaaauggaacuuaugaccaugauguauacagagacgaagcauuaaacaaccgguuccagaucaaagguguugagcugaagucaggauacaaagauuggauucuauggauuuccuuugccauaucauguuuuuugcuuuguguuguuuugcugggguucaucaugugggccugccaaaaaggcaacauuaggugcaacauuugcauuuga

SEQ ID NO: 32238 - RNA, 1701 nt, Artificial Sequence
  derived and/or modified CDS sequence (wt) from hemagglutinin__InfluenzaA__AAZ32946
augaagacuaucauugcuuugagcuacauucuaugucugguuuucgcucaaaaacuucccggaaaugacaacagcacggcaacgcugugccuugggcaccaugcaguaccaaacggaacgauagugaaaacaaucacgaaugaccaaauugaaguuacuaaugcuacugagcugguucagaguuccucaacagguggaauaugcgacaguccucaucagauccuugauggagaaaacugcacacuaauagaugcucuauugggagacccucagugugauggcuuccaaaauaagaaaugggaccuuuuuguugaacgcagcgaagccuacagcaacuguuacccuuaugaugugccggauuaugccucccuuaggucacuaauugccucauccggcacacuggaguuuaccaaugaaagcuucaauuggacuggagucacucagaauggaacaagcucugcuugcaaaaggagaucuaauaaaaguuucuuuaguagauugaauugguugacccauuuaaaauacaaauacccagcauugaacgugacuaugccaaacaaugaaaaauuugacaaauuguacauuugggggguucaccacccggguacggacagugaccaaaucagccuauaugcucaagcaucaggaagaaucacagucucuaccaaaagaagccaacaaacuguaaucccgaauaucggaucuagaccaaggguaagggaugucuccagcagaauaagcaucuauuggacaauaguaaaaccgggagacauacuuuugauuaacagcacagggaaucuaauugcuccucgggguuacuucaaaauacgaagugggaaaagcucaauaaugagaucagaugcacccauuggcaaaugcaauucugaaugcaucacuccaaauggaagcauucccaaugacaaaccauuucaaaauauaaacaggaucacauaugggaccugucccagauauguuaagcaaaacacucugaaauuggcaacagggaugcgaaauguaccagagaaacaaacuagaggcauauuuggcgcaaucgcggguuucauagaaaaugguugggagggaaugguggacgguugguacgguuucaggcaucaaaauucugagggcacaggacaagcagcagaucucaaaagcacucaagcagcaaucaaccaaaucaaugggaaacugaauagguuaaucgggaaaacaaacgagaaauuccaucagauugaaaaagaauucucagaaguagaagggagaauucaggaccucgagaaauauguugaggacacuaaaauagaucucuggucauacaacgcggagcuucuuguugcccuggagaaccaacauacaauugaucuaacugacucagaaaugaacaaacuguuugaaagaacaaagaagcaauugagggaaaaugcugaggauaugggcaaugguuguuucaaaauauaccacaaaugugacaaugccugcauagggucaaucagaaauggaacuuaugaccaugauguauacagagaugaagcauuaaacaaccgguuccagaucaaagguguugagcugaagucaggauacaaagauuggauccuauggauuuccuuugccauaucauguuuuuugcuuuguguuguuuuguugggguucaucaugugggccugccaaaaaggcaacauuaggugcaacauuugcauuuga

SEQ ID NO: 32239 - RNA, 1701 nt, Artificial Sequence
  derived and/or modified CDS sequence (wt) from hemagglutinin__InfluenzaA__AAZ32949
augaagacuaucauugcuuugagcuacauucuaugucugguuuucgcucaaaaacuucccggaaaugacaacagcacggcaacgcugugccuugggcaccaugcaguaccaaacggaacgauagugaaaacaaucacgaaugaccaaauugaaguuacuaaugcuacugagcugguucagaguuccucaacagguggaauaugcgacaguccucaucagauccuugauggagaaaacugcacacuaauagaugcucuauugggagacccucagugugauggcuuccaaaauaagaaaugggaccuuuuuguugaacgcagcgaagccuacagcaacuguuacccuuaugaugugccggauuaugccucccuuaggucacuaauugccucauccggcacacuggaguuuaccaaugaaagcuucaauuggacuggagucacucagaauggaacaagcucugcuugcaaaaggagaucuaauaaaaguuucuuuaguagauugaauugguugacccauuuaaaauacaaauacccagcauugaacgugacuaugccaaacaaugaaaaauuugacaaauuguacauuugggggguucaccacccggguacggacagugaccaaaucagccuauaugcucaagcaucaggaagaaucacagucucuaccaaaagaagccaacaaacuguaaucccgaauaucggaucuagaccaaggguaagggauaucuccagcagaauaagcaucuauuggacaauaguaaaaccgggagacauacuuuugauuaacagcacagggaaucuaauugcuccucgggguuacuucaaaauacgaagugggaaaagcucaauaaugagaucagaugcacccauuggcaaaugcaauucugaaugcaucacuccaaauggaagcauucccaaugacaaaccauuucaaaauauaaacaggaucacauauggggccugucccagauauguuaagcaaaacacucugaaauuggcaacagggaugcgaaauguaccagagaaacaaacuagaggcauauuuggcgcaaucgcggguuucauagaaaaugguugggagggaaugguggacgguugguacgguuucaggcaucaaaauucugagggcacaggacaagcagcagaucucaaaagcacucaagcagcaaucaaccaaaucaaugggaaacugaauagguuaaucgggaaaacaaacgagaaauuccaucagauugaaaaagaauucucagaaguagaagggagaauucaggaccucgagaaauauguugaggacacuaaaauagaucucuggucauacaacgcggagcuucuuguugcccuggagaaccaacauacaauugaucuaacugacucagaaaugaacaaacuguuugaaagaacaaagaagcaauugagggaaaaugcugaggauaugggcaaugguuguuucaaaauauaccacaaaugugacaaugccugcauagggucaaucagaaauggaacuuaugaccaugauguauacagagaugaagcauuaaacaaccgguuccagaucaaagguguugagcugaagucaggauacaaagauuggauccuauggauuuccuuugccauaucauguuuuuugcuuuguguuguuuuguugggguucaucaugugggccugccaaaaaggcaacauuaggugcaacauuugcauuuga

SEQ ID NO: 32240 - RNA, 1701 nt, Artificial Sequence
  derived and/or modified CDS sequence (wt) from hemagglutinin__InfluenzaA__AAZ32950
augaagacuaucauugcuuugagcuacauucuaugucugguuuucgcucaaaaacuucccggaaaugacaacagcacggcaacgcugugccuugggcaccaugcaguaccaaacggaacgauagugaaaacaaucacgaaugaccaaauugaaguuacuaaugcuacugagcugguucagaguuccucaacagguggaauaugcgacaguccucaucagauccuugauggagaaaacugcacacuaauagaugcucuauugggagacccucagugugauggcuuccaaaauaagaaaugggaccuuuuuguugaacgcagcgaagccuacagcaacuguuacccuuaugaugugccggauuaugccucccuuaggucacuaauugccucauccggcacacuggaguuuaccaaugaaagcuucaauuggacuggagucacucagaauggaacaagcucugcuugcaaaaggagaucuaauaaaaguuucuuuaguagauugaauugguugacccauuuaaaauacaaauacccagcauugaacgugacuaugccaaacaaugaaaaauuugacaaauuguacauuugggggguucaccacccggguacggacagugaccaaaucagccuauaugcucaagcaucaggaagaaucacagucucuaccaaaagaagccaacaaacuguaaucccgaauaucggaucuagaccaaggguaagggaugucuccagcagaauaagcaucuauuggacaauaguaaaaccgggagacauacuuuugauuaacagcacagggaaucuaauugcuccucgggguuacuucaaaauacgaagugggaaaagcucaauaaugagaucagaugcacccauuggcaaaugcaauucugaaugcaucacuccaaauggaagcauucccaaugacaaaccauuucaaaauauaaacaggaucacauauggggccugucccagauauguuaagcaaaacacucugaaauuggcaacagggaugcgaaauguaccagagaaacaaacuagaggcauauuuggcgcaaucgcggguuucauagaaaaugguugggagggaaugguggacgguugguacgguuucaggcaucaaaauucugagggcacaggacaagcagcagaucucaaaagcacucaagcagcaaucaaccaaaucaaugggaaacugaauagguuaaucgggaaaacaaacgagaaauuccaucagauugaaaaagaauucucagaaguagaagggagaauucaggaccucgagaaauauguugaggacacuaaaauagaucucuggucauacaacgcggagcuucuuguugcccuggagaaccaacauacaauugaucuaacugacucagaaaugaacaaacuguuugaaagaacaaaggagcaauugagggaaaaugcugaggauaugggcaaugguuguuucaaaauauaccacaaaugugacaaugccugcauagggucaaucagaaauggaacuuaugaccaugauguauacagagaugaagcauuaaacaaccgguuccagaucaaagguguugagcugaagucaggauacaaagauuggauccuauggauuuccuuugccauaucauguuuuuugcuuuguguuguuuuguugggguucaucaugugggccugccaaaaaggcaacauuaggugcaacauuugcauuuga

SEQ ID NO: 32241 - RNA, 1701 nt, Artificial Sequence
  derived and/or modified CDS sequence (wt) from hemagglutinin__InfluenzaA__AAZ32951
augaagacuaucauugcuuugagcuacauuuuaugucugguuuucgcucaaaaaauucccggaaaugacaacagcacggcaacgcugugccuugggcaccaugcaguaccaaauggaacgcuagugaaaacaaucacgaaugaccaaauugaagugacuaaugcuacugagcugguucagaguuccucaacagguggaauaugcgacaguccucaucagauccuugauggagaaaacugcacacuaauagaugcucuauugggagacccucauugugauggcuuccaaaauaagaaaugggaccuuuuuguugaacgcagcaaagccuacagcaacuguuacccuuaugaugugccggauuaugccucccuuaggucacuaguugccucauccggcacacuggaguuuaacaaugaaagcuucaauuggacuggagucacucagaauggaacaagcucugcuugcaaaaggagaucuaauaaaaguuucuuuaguagauugaauugguugcaccaauuaaaauacaaauacccagcauugaacguggcuaugccaaacaaugaaaaauuugacaaauuguacauuugggggguucaccacccggguacggacagugaccaaaucagccuauaugcucaagcaucagggagaaucacagucucuaccaaaagaagccaacaaacuguaaucccgaauaucggaucuagacccaggguaagggauaucuccagcagaauaagcaucuauuggacaauaguaaaaccgggagacauacuuuugauuaacagcacagggaaucuaauugcuccucgggguuacuucaaaauacgaagugggaaaagcucaauaaugagaucagaugcacccauuggcaaaugcaauucugaaugcaucacuccaaauggaagcauucccaaugacaaaccauuucaaaauguaaacaggaucacauauggggccugucccagauauguuaagcaaaacacucugaaauuggcaacagggaugcggaauguaccagagaaacaaacuagaggcauauucggcgcaaucgcggguuucauagaaaaugguugggagggaaugguggacgguugguacgguuucaggcaucaaaauucugagggcacaggacaagcagcagaucuuaaaagcacucaagcagcaaucaaccaaaucaaugggaaacugaauagguuaaucgggaaaacaaacgagaaauuccaucagauugaaaaagaauucucagaaguagaagggagaauucaggaccucgagaaauauguugaggacacuaaaauagaucucuggucauacaacgcggagcuucuuguugcccuggagaaccaacauacaauugaucuaacugacucagaaaugaacaaacuguuugaaagaacaaagaagcaacugagggaaaaugcugaggauaugggcaaugguuguuucaaaauauaccacaaaugugacaaugccugcauagggucaaucagaaauggaacuuaugaccaugauguauacagagaugaagcauuaaacaaccgguuccagaucaaagguguugagcugaagucaggauacaaagauuggauccuauggauuuccuuugccauaucauguuuuuugcuuuguguugcuuugcugggguucaucaugugggccugccaaaaaggcaacauuaggugcaacauuugcauuuga

SEQ ID NO: 32242 - RNA, 1701 nt, Artificial Sequence
  derived and/or modified CDS sequence (wt) from hemagglutinin__InfluenzaA__AAZ32952
augaagacuaucauugcuuugagcuacauuuuaugucugguuuucgcucaaaaaauucccggaaaugacaacagcacggcaacgcugugccuugggcaccaugcaguaccaaauggaacgcuagugaaaacaaucacgaaugaccaaauugaagugacuaaugcuacugagcugguucagaguuccucaacagguggaauaugcgacaguccucaucagauccuugauggagaaaacugcacacuaauagaugcucuauugggagacccucauugugauggcuuccaaaauaagaaaugggaccuuuuuguugaacgcagcaaagccuacagcaacuguuacccuuaugaugugccggauuaugccucccuuaggucacuaguugccucauccggcacacuggaguuuaacaaugaaagcuucaauuggacuggagucacucagaauggaacaagcucugcuugcaaaaggagaucuaauaaaaguuucuuuaguagauugaauugguugcaccaauuaaaauacaaauacccagcauugaacguggcuaugccaaacaaugaaaaauuugacaaauuguacauuugggggguucaccacccggguacggacagugaccaaaucagccuauaugcucaagcaucagggagaaucacagucucuaccaaaagaagccaacaaacuguaaucccgaauaucggaucuagacccaggguaagggaugucuccagcagaauaagcaucuauuggacaauaguaaaaccgggagacauacuuuugauuaacagcacagggaaucuaauugcuccucgggguuacuucaaaauacgaagugggaaaagcucaauaaugagaucagaugcacccauuggcaaaugcaauucugaaugcaucacuccaaauggaagcauucccaaugacaaaccauuucaaaauguaaacaagaucacauauggggccugucccagauauguuaagcaaaacacucugaaauuggcaacagggaugcggaauguaccagagaaacaaacuagaggcauauucggcgcaaucgcggguuucauagaaaaugguugggagggaaugguggacgguugguacgguuucaggcaucaaaauucugagggcacaggacaagcagcagaucuuaaaagcacucaagcagcaaucaaccaaaucaaugggaaacugaauagguuaaucgggaaaacaaacgagaaauuccaucagauugaaaaagaauucucagaaguagaagggagaauucaggaccucgagaaauauguugaggacacuaaaauagaucucuggucauacaacgcggagcuucuuguugcccuggagaaccaacauacaauugaucuaacugacucagaaaugaacaaacuguuugaaagaacaaagaagcaacugagggaaaaugcugaggauaugggcaaugguuguuucaaaauauaccacaaaugugacaaugccugcauagggucaaucagaaauggaacuuaugaccaugauguauacagagaugaagcauuaaacaaccgguuccagaucaaagguguugagcugaagucaggauacaaagauuggauccuauggauuuccuuugccauaucauguuuuuugcuuuguguugcuuugcugggguucaucaugugggccugccaaaaaggcaacauuaggugcaacauuugcauuuga

SEQ ID NO: 32243 - RNA, 1701 nt, Artificial Sequence
  derived and/or modified CDS sequence (wt) from hemagglutinin__InfluenzaA__AAZ32953
augaagacuaucauugcuuugagcuacauuuuaugucugguuuucgcucaaaaaauucccggaaaugacaacagcacggcaacgcugugccuugggcaccaugcaguaccaaauggaacgcuagugaaaacaaucacgaaugaccaaauugaagugacuaaugcuacugagcugguucagaguuccucaacagguggaauaugcgacaguccucaucagauccuugauggagaaaacugcacacuaauagaugcucuauugggagacccucauugugauggcuuccaaaauaagaaaugggaccuuuuuguugaacgcagcaaagccuacagcaacuguuacccuuaugaugugccggauuaugccucccuuaggucacuaguugccucauccggcacacuggaguuuaacaaugaaagcuucaauuggacuggagucacucagaauggaacaagcucugcuugcaaaaggagaucuaauaaaaguuucuuuaguagauugaauugguugcaccaauuaaaauacaaauacccagcauugaacguggcuaugccaaacaaugaaaaauuugacaaauuguacauuugggggguucaccacccggguacggacagugaccaaaucagccuauaugcucaagcaucagggagaaucacagucucuaccaaaagaagccaacaaacuguaaucccgaauaucggaucuagacccaggguaagggaugucuccagcagaauaagcaucuauuggacaauaguaaaaccgggagacauacuuuugauuaacagcacagggaaucuaauugcuccucgggguuacuucaaaauacgaagugggaaaagcucaauaaugagaucagaugcacccauuggcaaaugcaauucugaaugcaucacuccaaauggaagcauucccaaugacaaaccauuucaaaauguaaacaggaucacauauggggccugucccagauauguuaagcaaaacacucugaaauuggcaacagggaugcggaauguaccagagaaacaaacuagaggcauauucggcgcaaucgcggguuucauagaaaaugguugggagggaaugguggacgguugguacgguuucaggcaucaaaauucugagggcacaggacaagcagcagaucuuaaaagcacucaagcagcaaucaaccaaaucaaugggaaacugaauagguuaaucgggaaaacaaacgagaaauuccaucagauugaaaaagaauucucagaaguagaagggagaauucaggaccucgagaaauauguugaggacacuaaaauagaucucuggucauacaacgcggagcuucuuguugcccuggagaaccaacauacaauugaucuaacugacucagaaaugaacaaacuguuugaaagaacaaagaagcaacugagggaaaaugcugaggauaugggcaaugguuguuucaaaauauaccacaaaugugacaaugccugcauagggucaaucagaaauggaacuuaugaccaugauguauacagagaugaagcauuaaacaaccgguuccagaucaaagguguugagcugaagucaggauacaaagauuggauccuauggauuuccuuugccauaucauguuuuuugcuuuguguugcuuugcugggguucaucaugugggccugccaaaaaggcaacauuaggugcaacauuugcauuuga

SEQ ID NO: 32244 - RNA, 1701 nt, Artificial Sequence
  derived and/or modified CDS sequence (wt) from hemagglutinin__InfluenzaA__AAZ38462
augaagacuaucauugcuuugagcuacauuuuaugucugguuuucgcucaaaaacuucccggaaaugacaacagcacggcaacgcugugccugggacaccaugcagugccaaacggaacgcuagugaaaacaaucacgagugaccaaauugaagugacuaaugcuacugagcugguucagaguuccucaacagguagaauaugcgacaguccucaccgaauccuugauggagaaaacugcacacugauagaugcucuauugggagacccucauugugauggcuuccaaaauaaggaaugggaccuuuuuguugaacgcagcaaagccuacagcaacuguuacccuuaugaugugccggauuaugccucccuuaggucacuaguugccucauccggcacccuggaguuuaacaaugaaagcuucaauuggacuggagucgcucagaauggaacaagcuuugcuugcaaaaggagaucuauuaaaaguuucuuuaguagauugaauugguugcaccaauuaaaauacaaauauccagcacugaacgugacuaugccaaacaaugacaaauuugacaaauuguacauuugggggguucacuacccggguacggacagugaccaaaccagccuauaugcucaagcaucagggagagucacagucucuaccaaaagaagccaacaaacuguaaucccgaauaucggaucuagacccuggguaagggguguuuccagcagaauaagcaucuauuggacaauagugaaaccgggagacauacuucugauuaacagcacagggaaucuaauugccccucgggguuacuucaaaauacgaagugggaaaagcucaauaaugaggucagaugcacccauuggcaaaugcaauucugaaugcaucacuccaaauggaagcauucccaauggcaaaccauuucaaaauguaaacaggaucacauauggggccugucccagauauguuaagcaaaacacucugaaauuggcaacagggaugcggaauguaccagagaaacaaacuagaggcauauucggcgcaaucgcagguuucauagaaaaugguugggagggaaugguagacgguugguacgguuucaggcaucaaaauucugagggcacaggacaagcagcagaucuuaaaagcacucaagcagcaaucaaccaaaucaacgggaaacugaauagguuaaucgagaaaacgaacgagaaauuccaucaaauugaaaaagaauucacagaaguagaagggagaauucaggaccucgagaaauauguugaggacacuaaaauagaucucuggucguacaacgcggagcuucuuguugcccuggagaaccaacauacaauugaucuaacugacucagaaaugaacaaacuguuugaaagaacaaggaggcaacugagggaaaaugcugaggauaugggcaaugguuguuucaaaauauaccacaaaugugacaaugccugcauagggucaaucagaaauggaacuuaugaccaugauguauacagagacgaagcauuaaacaaccgguuccagaucaaagguguugagcugaagucaggauacaaagauuggauccuauggauuuccuuugccacaucauguuuuuugcuuuguguuguuuugcugggguucaucaugugggccugccaaaaaggcaacauuaggugcaacauuugcauuuga

SEQ ID NO: 32245 - RNA, 1701 nt, Artificial Sequence
  derived and/or modified CDS sequence (wt) from hemagglutinin__InfluenzaA__AAZ38473
augaagacuaucauugcuuugagcuacauuuuaugucugguuuucgcucaaaaacuucccggaaaugacaacagcacggcaacgcugugccugggacaccaugcagugccaaacggaacgcuagugaaaacaaucacgagugaccaaauugaagugacuaaugcuacugagcugguucagaguuccucaacagguagaauaugcgacaguccucaccgaauccuugauggagaaaacugcacacugauagaugcucuauugggagacccucauugugauggcuuccaaaauaaggaaugggaccuuuuuguugaacgcagcaaagccuacagcaacuguuacccuuaugaugugccggauuaugccucccuuaggucacuaguugccucauccggcacccuggaguuuaacaaugaaagcuucaauuggacuggagucgcucagaauggaacaagcuuuacuugcaaaaggagaucuauuaaaaguuucuuuaguagauugaauugguugcaccaauuaaaauacaaauauccagcacugaacgugacuaugccaaacaaugacaaauuugacaaauuguacauuugggggguucaccacccaaguacggacagugaccaaaccagccuauaugcucaagcaucagggagagucacagucucuaccaaaagaagccaacaaacuguaaucccgaauaucggaucuagacccuggguaagggguguuuccagcagaauaagcaucuauuggacaauagugaaaccgggagacauacuucugauuaacagcacagggaaucuaauugcuccucgggguuacuucaaaauacgaagugggaaaagcucaauaaugaagucagaugcacccauuggcaaaugcaauucugaaugcaucacuccaaauggaagcauucccaaugacaaaccauuucaaaauguaaacaggaucacauauggggccugucccagauauguuaagcaaaacacucugaaauuggcaacagggaugcggaauguaccagagaaacaaacuagaggcauauucggcgcaaucgcagguuucauagaaaaugguugggagggaaugguagacgguugguacgguuucaggcaucaaaauucugagggcacaggacaagcagcagaucuuaaaagcacucaagcagcaaucaaccaaaucaacgggaaacugaauagguuaaucgagaaaacgaacgagaaauuccaucaaauugaaaaagaauucacagaaguagaagggagaauucaggaccucgagaaauauguugaggacacuaaaauagaucucuggucguacaacgcggagcuucuuguugcccuggagaaccaacauacaauugaucuaacugacucagaaaugaacaaacuguuugaaagaacaaggaagcaacugagggaaaaugcugaggauaugggcaaugguuguuucaaaauauaccacaaaugugacaaugucugcauagggucaaucagaaauggaacuuaugaccaugauguauacagagacgaagcauuaaacaaccgguuccagaucaaagguguugagcugaagucaggauacaaagauuggauccuauggauuuccuuugccacaucauguuuuuugcuuuguguuguuuugcugggguucaucaugugggccugccaaaaaggcaacauuaggugcaacauuugcauuuga

SEQ ID NO: 32246 - RNA, 1701 nt, Artificial Sequence; identical to SEQ ID NO: 32202
  derived and/or modified CDS sequence (wt) from hemagglutinin__InfluenzaA__AAZ38484

SEQ ID NO: 32247 - RNA, 1701 nt, Artificial Sequence
  derived and/or modified CDS sequence (wt) from hemagglutinin__InfluenzaA__AAZ38495
augaagacuaucauugcuuugagcuacauuuuaugucugguuuucgcucaaaaacuucccggaaaugacaacagcacggcaacgcugugccuggggcaccaugcagugccaaacggaacgcuagugaaaacaaucacgaaugaccaaauugaagugacuaaugcuacugagcugguucagaguuccucaacagguagaauaugcgacaguccucaccaaauccuugauggagaaaacugcacacuaauagaugcucuauugggagacccucauugugauggcuuccaaaauaaagaaugggaccuuuuuguugaacgcagcaaagccuacagcaacuguuacccuuaugaugugccggauuaugccucccuuaggucacuaguugccucauccggcacacuggaguuuaacaaugaaagcuucaauuggacuggagucgcucagaauggaacaagcucugcuugcaaaaggagaucuaauaaaaguuucuuuaguagauugaauugguugcaccaauuaaaauacaaauauccagcacugaacgugacuaugccaaacaaugaaaaauuugacaaauuguacauuugggggguucaccacccgaguacggacagugaccaaaucagccuauaugcucaagcaucagggagagucacagucucuaccaaaagaagccaacaaacuguaaucccgaauaucggaucuagacccuggguaaggggugucuccagcaaaauaagcaucuauuggacaauaguaaaaccgggagacauacuuuugauuaacagcacagggaaucuaauugcuccucgggguuacuucaaaauacgaagugggaaaagcucaauaaugaggucagaugcacccauuggcaaaugcaauucugaaugcaucacuccaaauggaagcauucccaaugacaaaccauuucaaaauguaaacaggaucacauauggggccugucccagauauguuaagcaaaacacucugaaauuggcaacagggaugcggaauguaccagagaaacaaacuagaggcauauucggcgcaaucgcggguuucauagaaaaugguugggagggaaugguggacgguugguacgguuucaggcaucaaaauucugagggcacaggacaagcagcagaucuuaaaagcacucaagcagcaaucaaccaaaucaacgggaaacugaauagguuaaucgagaaaacgaacgagaaauuccaucaaauugaaaaagaauucucagaaguagaagggagaauucaggaccucgagaaauauguugaggacacuaaaauagaucucuggucguacaacgcggagcuucuuguugcccuggagaaccaacauacaauugaucuaacugacucagaaaugaacaaacuguuugaaagaacaaagaagcaacugagggaaaaugcugaggauaugggcaaugguuguuucaaaauauaccacaaaugugacaaugccugcauagggucaaucagaaauggaacuuaugaccaugauguauacagagacgaagcauuaaacaaccgguuccagaucaaagguguugagcugaagucaggauacaaagauuggauccuauggauuuccuuugccauaucauguuuuuugcuuuguguuguuuugcugggguucaucaugugggccugccaaaaaggcaacauuaggugcaacauuugcauuuga

SEQ ID NO: 32248 - RNA, 1701 nt, Artificial Sequence
  derived and/or modified CDS sequence (wt) from hemagglutinin__InfluenzaA__AAZ38517
augaagacuaucauugcuuugagcuacauucuaugucugguuuucgcucaaaaacuucccggaaaugacaacagcacggcaacgcugugccuugggcaccaugcaguaccaaacggaacgauagugaaaacaaucacgaaugaccaaauugaaguuacuaaugcuacugagcugguucagaguuccucaacagguggaauaugcgacaguccucaucagauccuugauggagaaaacugcacacuaauagaugcucuauugggagacccucagugugauggcuuccaaaauaagaaaugggaccuuuuuguugaacgcagcaaagccuacagcaacuguuacccuuaugaugugccggauuaugccucccuuaggucacuaguugccucauccggcacacuggaguuuaacaaugaaagcuucaauuggacuggagucacucaaaauggaacaagcucugcuugcaaaaggagaucuaauaacaguuucuuuaguagauugaauugguugacccacuuaaaauucaaauacccagcauugaacgugacuaugccaaacaaugaaaaauuugacaaauuguacauuugggggguucaccacccggguacggacaaugaccaaauuagccuauaugcucaagcuucaggaagaaucacagucucuaccaaaagaagccaacaaacuguaaucccgaauaucggaucuagacccaggguaagggauauccccagcagaauaagcauauauuggacaauaguaaaaccgggagacauacuuuugauuaacagcacagggaaucuaauugcuccucgggguuacuucaaaauacgaagugggaaaagcucaauaaugagaucagaugcacccauuggcaaaugcaauucugaaugcaucacuccaaauggaagcauucccaaugacaaaccauuucaaaauguaaacaggaucacauauggggccugucccagauauguuaagcaaaacacucugaaauuggcaacagggaugcgaaauguaccagagaaacaaacuagaggcauauuuggcgcaaucgcggguuucauagaaaaugguugggagggaaugguggaugguugguacgguuucaggcaucaaaauucugagggaauaggacaagcagcagaucucaaaagcacucaagcagcaaucaaccaaaucaaugggaagcugaauagguugaucgggaaaaccaacgagaaauuccaucagauugaaaaagaauucucagaaguagaagggagaauucaggaccucgagaaauauguugaggacacuaaaauagaucucuggucauacaacgcggagcuucuuguugcccuggagaaccaacauacaauugaucuaacugacucagaaaugaacaaacuguuugaaagaacaaagaagcaacugagggaaaaugcugaggauaugggcaaugguuguuucaaaauauaccacaaauguaacaaugccugcauagggucaaucagaaauggaacuuaugaccaugauguauacagagaugaagcauuaaacaaccgguuccagaucaaagguguugagcugaagucaggauacaaagauuggauccuauggauuuccuuugccauaucauguuuuuugcuuuguguuguuuuguugggguucaucaugugggccugccaaaaaggcaacauuaggugcaacauuugcauuuga

SEQ ID NO: 32249 - RNA, 1701 nt, Artificial Sequence
  derived and/or modified CDS sequence (wt) from hemagglutinin__InfluenzaA__AAZ38539
augaagacuaucauugcuuugagcuacauuuuaugucugguuuucgcucaaaaacuucccggaaaugacaacagcacggcaacgcugugccuggggcaccaugcagugccaaacggaacgcuagugaaaacaaucacgaaugaccaaauugaagugacuaaugcuacugagcugguucagaguuccucaacagguagaauaugcgacaguccucaccaaauccuugauggagaaaacugcacacuaauagaugcucuauugggagacccucauugugauggcuuccaaaauaaggaaugggaccuuuuuguugaacgcagcaaagccuacagcaacuguuacccuuaugaugugccggauuaugucucccuuaggucacuaguugccucaucaggcacgcuggaguuuaacaaugaaagcuucaauuggacuggagucgcucagaauggaacaagcucugcuugcaaaaggagaucugauaaaaguuucuuuaguagauugaauugguugcaccaauuaaaauacaaauauccagcacugaacgugacuaugccaaacaaugaaaaauuugacaaauuguacauuugggggguucaccacccggguacagacagugaccaaaucagccuauaugcucaagcaucagggagagucacagucucuaccaaaagaagccaacaaacuguaaucccgaauaucggaucuagacccuggguaaggggugucuccagcaaaauaagcaucuauuggacaauaguaaaaccgggagacauauuuuugauuaacagcacagggaaucuaauugcuccucgggguuauuucaaaauacgaagugggaaaagcucaauaaugaggucagaugcacccauuggcaaaugcaauucugaaugcaucacuccaaauggaagcauucccaaugacaaaccauuucaaaauguaaacaggaucacauaugggcccugucccagauauguuaagcaaaacacucugaaauuggcaacagggaugcggaaugugccagagaaacaaacuagaggcauauucggugcaaucgcgggcuucauagaaaaugguugggagggaaugauggacgguugguacgguuucaggcaucaaaauucugagggcacagggcaagcagcagaucuuaaaagcacucaagcagcaaucaaccaaaucaacgggaaacugaauagguuaaucgagaaaacgaacgagaaauuccaucaaauugaaaaggaauucucagaaguagaagggagaauucaggaccucgagaaauauguugaggacacuaaaauagaucucuggucguacaaugcggagcuucuuguugcccuggagaaccaacauacaauugaucuaacugacucagaaaugaacaaacuguuugaaagaacaaagaagcaacugagggaaaaugcugaggauaugggcaaugguuguuucaaaauauaccacaaaugugacaaugccugcauagggucaaucagaaauggaacuuaugaccaugauguauacagagacgaagcauugaacaaccgguuccagaucaaagguguugagcugaagucaggauacaaagauuggauccuauggauuuccuuugccauaucauguuuuuugcuuuguauuguuuugcugggguucaucaugugggccugccaaaaaggcaacauuaggugcaacauuugcauuuga

SEQ ID NO: 32250 - RNA, 1701 nt, Artificial Sequence; identical to SEQ ID NO: 32237
  derived and/or modified CDS sequence (wt) from hemagglutinin__InfluenzaA__AAZ38561

SEQ ID NO: 32251 - RNA, 1701 nt, Artificial Sequence
  derived and/or modified CDS sequence (wt) from hemagglutinin__InfluenzaA__AAZ38583
augaagacuaucauugcuuugagcuacauccuaugucugguuuucgcucaaaaaauucccggaaaugacaacagcacggcaacgcugugccuugggcaccaugcaguaccaaacggaacgauagugaaaacaaucacgaaugaccaaauugaaguuacuaaugcuacugagcugguucagaguuccucaacagguggaauaugcgacaguccucaucagauccuugauggagaaaacugcacacuaauagaugcucuauugggagacccucagugugauggcuuccaaaauaagaaaugggaccuuuuuguugaacgcagcaaagccuacagcaacuguuacccuuaugaugugccggauuaugccucccuuaggucacuaguugccucauccggcacacuggaguuuaacaaugaaagcuucaauuggacuggagucacucaaaauggaacaagcucugcuugcaaaaggagaucuaauaacaguuucuuuaguagauugaauugguugacccauuuaaaauucaaauacccagcauugaacgugacuaugccaaacaaugaaaaauuugacaaauuguacauuugggggguucaccacccggguacgaacaaugaccaaaucagccuauaugcucaagcaucaggaagaaucacagucucuaccaaaagaagccaacaaacuguaaucccgaauaucggaucuagacccaggguaagggauauccccagcagaauaagcaucuauuggacaauaguaaaaccgggagacauacuuuugauuaacagcacagggaaucuaauugcuccucgggguuacuucaaaauacgaagugggaaaagcucaauaaugagaucagaugcacccauuggcaaaugcaauucugaaugcaucacuccaaauggaagcauucccaaugacaaaccauuucaaaauguaaacaggaucacauauggggccugucccagauauguuaagcaaaacacucugaaauuggcaacagggaugcgaaauguaccagagaaacaaacuagaggcauauuuggcgcaaucgcggguuucauagaaaaugguugggagggaaugguggaugguugguacgguuucaggcaucaaaauucugagggaauaggacaagcagcagaucucaaaagcacucaagcagcaaucaaccaaaucaaugggaagcugaauagguugaucgggaaaaccaacgagaaauuccaucagauugaaaaagaauucucagaaguagaagggagaauucaggaccucgagaaauauguugaggacacuaaaauagaucucuggucauacaacgcggagcuucuuguugcccuggagaaccaacauacaauugaucuaacugacucagaaaugaacaaacuguuugaaagaacaaagaagcaacugagggaaaaugcugaggauaugggcaaugguuguuucaaaauauaccacaaaugugacaaugccugcauagggucaaucagaaauggaacuuaugaccaugauguauacagagaugaagcauuaaacaaccgguuccagaucaaagguguugagcugaagucaggauacaaagauuggaucauauggauuuccuuugccauaucauguuuuuugcuuuguguugcuuuguugggguucaucaugugggccugccaaaaaggcaacauuaggugcaacauuugcauuuga

SEQ ID NO: 32252 - RNA, 1701 nt, Artificial Sequence
  derived and/or modified CDS sequence (wt) from hemagglutinin__InfluenzaA__AAZ38594
augaagacuaucauugcuuugagcuacauucuaugucugguuuucgcucaaaaacuucccggaaaugacaacagcacggcaacgcugugccuugggcaccaugcaguaccaaacggaacgauagugaaaacaaucacgaaugaccaaauugaaguuacuaaugcuacugagcugguucagaguuccucaacagguggaauaugcgacaguccucaucagauccuugauggagaaaacugcacacuaauagaugcucuauugggagacccucagugugauggcuuccaaaauaagaaaugggaccuuuuuguugaacgcagcaaagccuacagcaacuguuacccuuaugaugugccggauuaugccucccuuaggucacuaguugccucauccggcacacuggaguuuaacaaugaaagcuucaauuggacuggagucacucaaaauggaacaagcucugcuugcaaaaggagaucuaauagcaguuucuuuaguagauugaauugguugacccacuuaaaauucaaauacccagcauugaacgugacuaugccaaacaaugaaaaauuugacaaauuguacauuugggggguucaccacccggguacggacaaugaccaaaucagccuauaugcucaagcaucaggaagaaucacagucucuaccaaaagaagccaacaaacuguaaucccgaauaucggaucuagacccaggguaagggauauccccagcagaauaagcaucuauuggacaauaguaaaaccgggagacauacuuuugauuaacagcacagggaaucuaauugcuccucgggguuacuucaaaauacgaagugggaaaagcucaauaaugagaucagaugcacccauuggcaaaugcaauucugaaugcaucacuccaaauggaagcauucccaaugacaaaccauuucaaaauguaaacaggaucacauauggggccugucccagauauguuaagcaaaacacucugaaauuggcaacagggaugcgaaauguaccagagaaacaaacuagaggcauauuuggcgcaaucgcggguuucauagaaaaugguugggagggaaugguggaugguugguacgguuucaggcaucaaaauucugagggaauaggacaagcagcagaucucaaaagcacucaagcagcaaucaaccaaaucaaugggaagcugaauagguugaucgggaaaaccaacgagaaauuccaucagauugaaaaagaauucucagaaguagaagggagaauucaggaccucgagaaauauguugaggacacuaaaauagaucucuggucauacaacgcggagcuucuuguugcccuggagaaccaacauacaauugaucuaacugacucagaaaugaacaaacuguuugaaagaacaaagaagcaacugagggaaaaugcugaggauaugggcaaugguuguuucaaaauauaccacaaaugugacaaugccugcauagggucaaucagaaauggaacuuaugaccaugauguauacagagaugaagcauuaaacaaccgguuccagaucaaagguguugagcugaagucaggauacaaagauuggauccuauggauuuccuuugccauaucauguuuuuugcuuuguguugcuuuguugggguucaucaugugggccugccaaaaaggcaacauuaggugcaacauuugcauuuga

SEQ ID NO: 32253 - RNA, 1701 nt, Artificial Sequence
  derived and/or modified CDS sequence (wt) from hemagglutinin__InfluenzaA__AAZ38605
augaagacuaucauugcuuugagcuacauucuaugucugguuuuuacucaaaaacuucccggaaaugacaacagcacggcaacgcugugccuugggcaccaugcaguaccaaacggaacgauagugaaaacaaucacgaaugaccaaauugaagucacuaaugcuacugagcugguucagaguuccucaacagguggaauaugcgacaguccucaucagauccuugauggagaaaacugcacacuaauagaugcucuauugggagacccucagugugauggcuuccaaaauaagaaaugggaccuuuuuguugaacgcagcaaagccuacagcaacuguuacccuuaugaugugccggauuaugcaucccuuagaucacuaguugccucauccggcacacuggaguuuaacaaugaaagcuucaauuggacuggagucacucaaaauggaacaagcucugcuugcaaaaggagaucuaauaacaguuucuuuaguagauugaauugguugacccacuuaaaauucaaauacccagcauugaacgugacuaugccaaacaaugaaaaauuugacaaacuguacauuugggggguucaccacccggguacggacaaugaccaaaucagccuauaugcucaagcaucaggaagaaucacagucuccaccaaaagaagccaacaaacuguaaucccgaguaucgggucuagacccaggauaagggauguccccagcagaauaagcaucuauuggacaauaguaaaaccgggagacauacuuuugauuaacagcacagggaaucuaauugcuccucgggguuacuucaaaauacgaagugggaaaagcucaauaaugagaucagaugcacccauuggcaaaugcaauucugaaugcaucacuccaaauggaagcauucccaaugacaaaccauuucaaaauguaaacaggaucacauauggggccugucccagauauguuaagcaaaacacucugaaauuggcaacagggaugcgaaauguaccagagaaacaaacuagaggcauauuuggcgcaaucgcggguuucauagaaaaugguugggagggaaugguggacgguugguacgguuucaggcaucaaaauucugagggaacaggacaagcagcagaucucaaaagcacucaagcagcaaucaaccaaaucaaugggaagcugaauagguugaucgggaaaacaaacgagaaauuccaucagauugaaaaagaauucucagaaguagaagggagaauucaggaccucgagaaauauguugaggacacuaaaauagaucucuggucauacaacgcggagcuucuuguggcccuggagaaccaacauacaauugaucuaacugacucagaaaugaacaaacuguuugaaagaacaaagaagcaacugagggaaaaugcugaggauaugggcaaugguuguuucaaaauauaccacaaaugugacaaugccugcauagggucaaucagaaauggaacuuaugaccaugauguauacagagaugaagcauuaaacaaccgguuccagaucaaagguguugaguugaagucaggauacaaagauuggauccuauggauuucuuuugccauaucauguuuuuugcuuuguguugcuuuguugggguucaucaugugggccugccaaaaaggcaacauuaggugcaacauuugcauuuga

SEQ ID NO: 32254 - RNA, 1698 nt, Artificial Sequence
  derived and/or modified CDS sequence (wt) from hemagglutinin__InfluenzaA__AAZ38627
augaaagcaaaacuacugguccuguuauguacauuuacagcuacauacgcagacacaauauguauaggcuaccaugccaacaacucaaccgacacuguugacacaguacuugagaagaaugugacagugacacacucugucaaccuacuugaggacagucacaauggaaaacuaugucuacuaaaaggaauagccccacuacaauuggguaauugcagcguugccggauggaucuuaggaaacccagaaugcgaauuacugauuuccaaggaaucaugguccuacauuguagaaacaccaaauccugagaauggaacauguuacccaggguauuucgccgacuaugaggaacugagggagcaauugaguucaguaucuucauuugagagauucgaaauauuccccaaaggaagcucauggcccaaccacaccguaaccggaguaucagcaucaugcucccauaaugggaaaagcaguuuuuacagaaauuugcuauggcugacgggaaagaaugguuuguacccaaaccugagcauguccuauguaaacaacaaagagaaagaaguccuugugcuaugggguguucaucacccaccuaacauaggggaccaaagggcccucuaucauacagaaaaugcuuaugucucuguagugucuucacauuauagcagaagauucaccccagaaauagccaaaagacccaaaguaagagaucaggaaggaagaaucaacuacuacuggacucugcuggaacccggggacacaauaauauuugaggcaaauggaaaucuaauagcgccaugguaugcuuucgcacugaguagaggcuuuggaucaggaaucaucaccucaaaugcaccaauggaugaaugugaugcgaagugucaaacaccucagggagcuauaaacaguagucuuccuuuccagaauguacacccaguuacaauaggagaguguccaaaguaugucaggagugcaaaauuaaggauggcuacaggacuaaggaacaucccuuccauucaauccagagguuuguuuggagccauugccgguuucauugaagggggguggacuggaaugguagaugggugguaugguuaucaucaucagaaugagcaaggaucuggcuaugcugcagaucaaaaaagcacacaaaaugccauuaacgggauuacaaacaaggugaauucuguaauugagaaaaugaacacucaauucacagcugugggcaaagaauucaauaaauuagaaagaaggauggaaaacuuaaauaaaaaaguugaugauggguuucuagacauuuggacauauaaugcagaauuguugguucuacuggaaaaugaaaggacuuuggauuuccaugacuccaaugugaagaaucuguaugagaaaguaaaaagccaauuaaagaauaaugccaaagaaauaggaaacggguguuuugaauucuaucacaaguguaacaaugaaugcauggaaagugugaaaaacggaacuuaugacuauccaaaauauuccgaagaaucaaaguuaaacagggagaaaauugauggaguaaaauuggaaucaaugggagucuaucagauucuggcaaucuacucaacugucgccaguucccugguucuuuuggucucccugggggcaaucagcuucuggauguguuccaaugggucuuugcaguguagaauaugcaucuga

SEQ ID NO: 32255 - RNA, 1701 nt, Artificial Sequence
  derived and/or modified CDS sequence (wt) from hemagglutinin__InfluenzaA__AAZ38638
augaagacuaucauugcuuugagcuacauucuaugucugguuuucgcucaaaaacuucccggaaaugacaacagcacggcaacgcugugccuugggcaccaugcaguaccaaacggaacgauagugaaaacaaucacgaaugaccaaauugaaguuacuaaugcuacugagcugguucagaguuccucaacagguggaauaugcgacaguccucaucagauccuugauggagaaaacugcacacuaauagaugcucuauugggagacccucagugugauggcuuccaaaauaagaaaugggaccuuuuuguugaacgcagcaaagccuacagcaacuguuacccuuaugaugugccggauuaugccucccuuaggucacuaguugccucauccggcacacuggaguuuaacaaugaaagcuucaauuggacuggagucacucaaaauggaacaagcucugcuugcaaaaggagaucuaauaacaguuucuuuaguagauugaauugguugacccacuuaaaauucaaauacccagcauugaacgugacuaugccaaacaaugaaaaauuugacaaauuguacauuugggggguucaccacccggguacggacaaugaccaaaucagccuauaugcucaagcuucaggaagaaucacagucucuaccaaaagaagccaacaaacuguaaucccgaauaucggaucuagacccaggguaagggauauccccagcagaauaagcaucuauuggacaauaguaaaaccgggagacauacuuuugauuaacagcacagggaaucuaauugcuccucgggguuacuucaaaauacgaagugggaaaagcucaauaaugagaucagaugcacccauuggcaaaugcaauucugaaugcaucacuccaaauggaagcauucccaaugacaaaccauuucaaaauguaaacaggaucacauauggggccugucccagauauguuaagcaaaacacucugaaauuggcaacagggaugcgaaauguaccagagaaacaaacuagaggcauauuuggcgcaaucgcggguuucauagaaaaugguugggagggaaugguggaugguugguacgguuucaggcaucaaaauucugagggaauaggacaagcagcagaucucaaaagcacucaagcagcaaucaaccaaaucaaugggaagcugaauagguugaucgggaaaaccaacgagaaauuccaucagauugaaaaagaauucucagaaguagaagggagaauucaggaccucgagaaauauguugaggauacuaaaauagaucucuggucauacaacgcggagcuucuuguugcccuggagaaccaacauacaauugaucuaacugacucagaaaugaacaaacuguuugaaagaacaaagaagcaacugagggaaaaugcugaggauaugggcaaugguuguuucaaaauauaccacaaaugugacaaugccugcauagggucaaucagaaauggaacuuaugaccaugauguauacagagaugaagcauuaaacaaccgguuccagaucaaagguguugagcugaagucaggauacaaagauuggauccuauggauuuccuuugccauaucauguuuuuugcuuuguguugcuuuguugggguucaucaugugggccugccaaaaaggcaacauuaggugcaacauuugcauuuga

SEQ ID NO: 32256 - RNA, 1701 nt, Artificial Sequence
  derived and/or modified CDS sequence (wt) from hemagglutinin__InfluenzaA__AAZ38650
augaagacuaucauugcuuugagcuacauucuaugucugguuuucgcucaaaaacuucccggaaaugacaacagcacggcaacgcugugccuugggcaccaugcaguaccaaacggaacgauagugaaaacaaucacgaaugaccaaauugaaguuacuaaugcuacugagcugguucagaguuccucaacagguggaauaugcgacaguccucaucagauccuugauggagaaaacugcacacuaauagaugcucuauugggagacccucagugugauggcuuccaaaauaagaaaugggaccuuuuuguugaacgcagcaaagccuacagcaacuguuacccuuaugaugugccggauuaugccucccuuaggucacuaguugccucauccggcacacuggaguuuaacaaugaaagcuucaauuggacuggagucacucaaaauggaacaagcucugcuugcaaaaggagaucuaauaacaguuucuuuaguagauugaauugguugacccacuuaaaauucaaauacccagcauugaacgugacuaugccaaacaaugaaaaauuugacaaauuguacauuugggggguucaccacccggguacggacaaugaccaaaucagccuauaugcucaagcaucaggaagaaucacagucucuaccaaaagaagccaacaaacuguaaucccgaauaucggaucuagacccaggguaagggauauccccagcagaauaagcaucuauuggacaauaguaaaaccgggagacauacuuuugauuaacagcacagggaaucuaauugcuccucgggguuacuucaaaauacgaagugggaaaagcucaauaaugagaucagaugcacccauuggcaaaugcaauucugaaugcaucacuccaaauggaagcauucccaaugacaaaccauuucaaaauguaaacaggaucacauauggggccugucccagauauguuaagcaaaacacccugaaauuggcaacagggaugcgaaauguaccagagaaacaaacuagaggcauauuuggcgcaaucgcggguuucauagaaaaugguugggagggaaugguggaugguugguacgguuucaggcaucaaaauucugagggaauaggacaagcagcagaucucaaaagcacucaagcagcaaucaaccaaaucaaugggaagcugaauagguugaucgggaaaaccaacgagaaauuccaucagauugaaaaagaauucucagaaguagaagggagaauucaggaccucgagaaauauguugaggacacuaaaauagaucucuggucauacaacgcggagcuucuuguugcccuggagaaccaacauacaauugaucuaacugacucagaaaugaacaaacuguuugaaagaacaaagaagcaacugagggaaaaugcugaggauaugggcaaugguuguuucaaaauauaccacaaaugugacaaugccugcauagggucaaucagaaauggaacuuaugaccaugauguauacagagaugaagcauuaaacaaccgguuccagaucaaagguguugagcugaagucaggauacaaagauuggauccuauggauuuccuuugccauaucauguuuuuugcuuuguguugcuuuguugggguucaucaugugggccugccaaaaaggcaacauuaggugcaacauuugcauuuga

SEQ ID NO: 32257 - RNA, 1701 nt, Artificial Sequence
  derived and/or modified CDS sequence (wt) from hemagglutinin__InfluenzaA__AAZ43370
augaagacuaucauugcuuugagcuacauuuucugucugguuuucgcccaaaaacuucccggaaaugacaacagcacagcaacgcugugccugggacaucaugcagugccaaacggaacgcuagugaaaacaaucacgaaugaucagauugaagugacuaaugcuacugagcugguucagaguuccucaacagguagaauaugcgacaguccucaccgaauccuugauggaaaaaacugcacacugauagaugcucuauugggagacccucauugugauggcuuccaaaaugagaaaugggaccuuuuuauugaacgcagcaaagcuuucagcaacuguuacccuuaugaugugccggauuaugccucccuuaggucacuaguugccucaucaggcacccuggaguuuaucaaugaaggcuucaauuggacuggagucacucagagugggggaagcuaugcuugcaaaaggggaucuguuaaaaguuucuucaguagauugaauugguuguacgaaucagaauacaaauauccagcgcugaacgugacuaugccaaacaauggcaaauuugacaaacuguacauuugggggguucaccacccgagcacggaaaaagaacaaaccaaccuauauguucgagcaucagggagagucacagucucuaccaagagaagccagcaaacuguaaucccgaauaucgggucuagacccuggguaaggggucuguccaguagaauaagcaucuauuggacaauaguaaaaccgggagacauacuguugauuaauagcacugggaaccuaauugcuccucgggguuacuucaaaauacgcacugggaaaagcucaauaaugaggucagaugcaccuauuggcaccugcaguucugaaugcaucacuccaaauggaagcauucccaaugacaaacccuuucaaaauguaaacaagaucacauauggggcaugucccagguauguuaagcaaaacacucugaaauuggcaacagggaugcggaauguaccagagaaacaaacuagaggcauauucggcgcaauagcagguuucauagaaaaugguugggagggaaugguagacgguugguacgguuucaggcaucaaaauucugagggcacaggacaagcagcagaucuuaaaagcacucaagcagcaaucgaccaaaucaacggaaaacugaauagguuaaucgagaaaacgaacgagaaauuccaucaaaucgaaaaggaauucucagaaguagaagggagaauucaggaccucgagaaauauguugaagacacuaaaauagaucucuggucuuacaacgcggagcuucuugucgcccuggagaaccaacauacaauugaucugacugacucagaaaugaacaaacuguuugaaaaaacaaggaagcaacugagggaaaaugcugaggacaugggcaaugguugcuucaaaauauaccacaaaugugacaaugcuugcauagggucaaucagaaauggaacuuaugaccaugauguauacagagacgaagcauuaaacaaccgguuucagaucaaagguguugagcugaagucaggauacaaagacuggauccuauggauuuccuuugccauaucaugcuuuuugcuuuguguuguuuugcugggguucaucaugugggccugccaaaaaggcaacauuaggugcaacauuugcauuuga

SEQ ID NO: 32258 - RNA, 1701 nt, Artificial Sequence
  derived and/or modified CDS sequence (wt) from hemagglutinin__InfluenzaA__AAZ43394
augaagacuaucauugcuuugagcuacauucuaugucugguuuucgcucaaaaacuucccggaaaugacaacagcacggcaacgcugugccuugggcaccaugcaguaccaaacggaacgauagugaaaacaaucacgaaugaccaaauugaaguuacuaaugcuacugagcugguacagaguuccucaacagguggaauaugcgacaguccucaucagauccuugauggagaaaacugcacacuaauagaugcucuauugggagacccucagugugauggcuuccaaaauaagaaaugggaccuuuuuguugaacgcagcaaagccuacagcaacuguuacccuuaugaugugccggauuaugccucccuuaggucacuaguugccucauccggcacacuagaguuuaacaaugaaagcuucgauuggacuggagucacucagaauggaacaagcucugcuugcaaaaggagaucuaauaaaaguuucuuuaguagauugaauugguugacccacuuaaaauacaaauacccagcauugaacgugacuaugccaaacaaugaaaaauuugacaaauuguacauuugggggguucaccacccggguacggacagugaccaaaucagccuauaugcucaagcaucaggaagaaucacagucucuaccaaaagaagccaacaaacuguaaucccgaauaucggaucuagacccaggguaagggaugucuccagccgaauaagcaucuauuggacaauaguaaaaccgggagacauacuuuugauuaacagcacagggaaucuaauugcuccucgggguuacuucaaaauacgaagugggaaaagcucaauaaugagaucagaugcacccauuggcaaaugcaauucugaaugcaucacuccaaauggaagcauucccaaugacaaaccauuucaaaauguaaacaggaucacauauggggccugucccagauauauuaagcaaaacacucugaaauuggcaacagggaugcgaaauguaccagagaaacaaacuagaggcauauuuggcgcaaucgcggguuucauagaaaaugguugggagggaaugguggacgguugguacgguuucaggcaucaaaauucugagggcacaggacaagcagcagaucucaaaagcacucaagcagcaaucaaccaaaucaaugggaaacugaauagguuaaucgggaaaacaaacgagaaauuccaucagauugaaaaagaauucucagaaguagaagggagaauucaggaccucgagaaauauguugaggacacuaaaauagaucucuggucauacaacgcggagcuucuuguugcccuggagaaccaacauacaauugaucuaacugacucagaaaugaacaaacuguuugaaagaacaaagaagcaacugagggaaaaugcugaggacaugggcaaugguuguuucaaaauauaccacaaaugugacaaugccugcauagggucaaucagaaauggaacuuaugaccaugauguguacagagaugaagcauuaaacaaccgguuccagaucaaagguguugagcugaagucaggauacaaagauuggauccuauggauuuccuuugccauaucauguuuuuugcuuuguguugcuuuguugggguucaucaugugggccugccaaaaaggcaacauuaggugcaacauuugcauuuga

SEQ ID NO: 32259 - RNA, 1701 nt, Artificial Sequence
  derived and/or modified CDS sequence (wt) from hemagglutinin__InfluenzaA__AAZ43405
augaagacuaucauugcuuugagcuacauuuuaugucugguuuucgcucaaaaacuucccggaaaugacaacagcacggcaacgcugugccuggggcaccaugcagugccaaacggaacgcuagugaaaacaaucacgaaugaccaaauugaagugacuaaugcuacugagcugguucagaguuccucaacagguagaauaugcgacaguccucaccaaauccuugauggagaaaacugcacacuaauagaugcucuauugggagacccucauugugauggcuuccaaaauaaggaaugggaccuuuuuguugaacgcagcaaagccuacagcaacuguuacccuuaugaugugccggauuaugccucccuuaggucacuaguugccucauccggcacacuggaguuuaacaaugaaagcuucaauuggacuggagucgcucagaauggaacaagcucugcuugcaaaaggagaucuaauaaaaguuucuuuaguagauugaauugguugcaccaauuaaaauacaaauacccagcacugaacgugacuaugccaaacaaugaaaaauuugacaaauuguacauuugggggguucaccacccgaguacggacagugaccaaaucagccuauaugcucaagcaucagggagagucacagucucuaccaaaagaagccaacaaacuguaaucccgaauaucggaucuagacccuggguaaggggugucuccagcagaauaagcaucuauuggacaauaguaaaaccgggagacauacuuuugauuaacugcacagggaaucuaauugcuccucgggguuacuucaaaauacgaagugggaaaagcucaauaaugaggucagaugcauccauuggcaaaugcaauucugaaugcaucacuccaaauggaagcauucccaaugacaaaccauuucaaaauguaaacaggaucacauauggggccugucccagauauguuaagcaaaacacucugaaauuggcaacagggaugcggaauguaccagagaaacaaacuagaggcauauucggcgcaaucgcggguuucauagaaaaugguugggagggaaugguggacgguugguacgguuucaggcaucaaaauucugagggcacaggacaagcagcagaucuuaaaagcacucaagcagcaaucaaccaaaucaacgggaaacugaauagguuaaucgagaaaacgaacgagaaauuccaucaaauugaaaaagaauucucagaaguagaagggagaauucaggaccucgagaaauauguugaggacacuaaaauagaucucuggucguacaacgcggagcuucuuguugcccuggagaaccaacauacaauugaucuaacugacucagaaaugaacaaacuguuugaaagaacaaagaagcaacugagggaaaaugcugaggauaugggcaaugguuguuucaaaauauaccacaaaugugacaaugccugcauagggucaaucagaaauggaacuuaugaccaugauguauacagagacgaagcauuaaacaaccgguuccagaucaaagguguugagcugaagucaggauacaaagauuggauccuauggauuuccuuugccauaucauguuuuuugcuuuguguugucuugcugggguucaucaugugggccugccaaaaaggcaacauuaggugcaacauuugcauuuga

SEQ ID NO: 32260 - RNA, 1701 nt, Artificial Sequence; identical to SEQ ID NO: 32059
  derived and/or modified CDS sequence (wt) from hemagglutinin__InfluenzaA__AAZ74352

SEQ ID NO: 32261 - RNA, 1701 nt, Artificial Sequence
  derived and/or modified CDS sequence (wt) from hemagglutinin__InfluenzaA__AAZ74363
augaagacuaucauugcuuugagcuacauuuuaugucugguuuucgcucaaaaacuucccggaaaugacaacagcacggcaacgcugugccugggacaccaugcagugccaaacggaacgcuagugaaaacaaucacgaaugaccaaauugaagugacuaaugcuacugagcugguucagaguuccucaacagguagaauaugcgacaguccucaccgaauccuugauggagaaaacugcacacugauagaugcucuauugggagacccucauugugauggcuuccaaaauaaggaaugggaccuuuuuguugaacgcaguaaagccuacagcaacuguuacccuuaugaugugccggauuaugccucccuuaggucacuaguugccucauccggcacccuggaguuuaacaaugaaagcuucaauuggacuggagucgcucagaauggaacaagcucugcuugcaaaaggagaucuauuaaaaguuucuuuaguagauugaauugguugcaccaauuaaaauacaaauauccagcacugaacgugacuaugccaaacaaugacaaauuugacaaauuguacauuugggggguucaccacccgaguacggacagugaccaaaccagccuauaugcucaagcaucagggagagucacagucucuaccaaaagaagccaacaaacuguaaucccgaauaucggaucuagacccuggguaaggggugucuccagcagaauaagcaucuauuggacaauaguaaaaccgggagacauacuuuugauuaacagcacagggaaucuaauugcuccucgggguuacuucaaaauacgaagugggaaaagcucaauaaugaggucagaugcacccauuggcaaaugcaauucugaaugcaucacuccaaauggaagcauucccaaugacaaaccauuucaaaauguaaacaggaucacauauggggccugucccagauauguuaagcaaaacacucugaaacuggcaacagggaugcggaauguaccagagaaacaaacuagaggcauauucggcgcaaucgcggguuucauagaaaaugguugggagggaaugguggacgguugguacgguuucaggcaucaaaauucugagggcacaggacaagcagcagaucuuaaaagcacccaagcagcaaucaaccaaaucaacgggaaacugaauagguuaaucgagaaaacgaacgagaaauuccaucaaauugaaaaagaauucucagaaguagaagggagaauucaggaccucgagaaauauguugaggacacuaaaauagaucucuggucguacaacgcggagcuucuuguugcccuggagaaccaacauacaauugaucuaacugacucagaaaugaacaaacuguuugaaagaacaaggaagcaacugagggaaaaugcugaggauaugggcaaugguuguuucaaaauauaccacaaaugugacaaugccugcauagggucaaucagaaauggaacuuaugaccaugauguauacagagacgaagcauuaaacaaccgguuccagaucaaagguguugagcugaagucaggauacaaagauuggauccuauggauuuccuuugccauaucauguuuuuugcuuuguguuguuuugcugggguucaucaugugggccugccaaaaaggcaacauuaggugcaacauuugcauuuga

SEQ ID NO: 32262 - RNA, 1698 nt, Artificial Sequence
  derived and/or modified CDS sequence (wt) from hemagglutinin__InfluenzaA__AAZ74374
augaaaguaaaacuacugauccuguuauguacauuuacagcuacauaugcagacacaauauguauaggcuaccaugccaacaacucaaccgacacuguugacacaguacuugagaaaaaugugacagugacacacucugucaaccuacuugaggacagucacaauggaaaacugugccuacuaaaaggaauagccccccuacaauuggguaauugcagcguugccggauggaucuuaggaaacccagaaugcgaauuacugauuuccaaggaaucaugguccuacauuguagaaacaccaaauccugagaauggagcauguuacccaggguauuucgccgacuaugaggagcuaagggagcaauugaguucaguaucuucauuugagagauucgaaauauuccccaaagaaagcucauggcccaaccacaccguaaccggaguaucagcaucaugcucccauaaugggaaaagcaguuuuuacagaaauuugcuguggcugacggggaagaaugguuuguacccaaaccugagcaaguccuaugcaaacaacaaagagaaagaaguccuuauacuaugggguguucaucacccgccuaacauaggggaccaaaggacccucuaucacacagaaaaugcuuaugucucuguagugucuucacauuauggcagaagauucaccccagaaauaaccaaaaggcccaaaguaagagaucaggaaggaagaaucaacuacuacuggacucugcuggaacccggggauacaauaauauuugaggcaaauggaaaucuaauagcgccaugguaugcuuucgcacugaguagaggcuuuggaucaggaaucaucaccucaaaugcaccaauggaugaaugugaugcgaagugucaaacaccucagggagcuauaaacagcagucuuccuuuccagaauguacauccagucacaauaggagaguguccaaaguaugucaggagugcaaaauuaaggaugguuacaggacuaaggaacaucccauccauucaauccagagguuuguuuggagccauugccgguuucauugaagggggguggacuggaaugguagaugggugguaugguuaucaucaucagaaugagcaaggaucuggcuaugcugcagaucaaaaaagcacacaaaaugccauuaacgggauuacaaacaaggugaauucuguaauugagaaaaugaacacucaauucacagcugugggcaaagaauucaacaaauuggaaagaaggauggaaaacuuaaauaaaaagguugaugauggguuucuagacguuuggacauauaaugcagaauuguugguucuacuggaaaaugaaaggacuuuggauuuccacgacuccaaugugaagaaucuguacgagaaaguaaaaagccaauuaaagaauaaugccaaagaaauaggaaauggguguuuugaauucuaucacaaguguaacaaugaaugcauggagagugugaaaaauggaacuuaugacuauccaaaauauuccgaagaaucaaaguuaaacagggaaaaaauugauggagugaaauuggacucaaugggggucuaucagauucuggcgaucuacucaacugucgccaguucccugguucuuuuggucucccugggggcaaucagcuucuggauguguuccaaugggucuuugcaguguagaauaugcaucuga

SEQ ID NO: 32263 - RNA, 1701 nt, Artificial Sequence
  derived and/or modified CDS sequence (wt) from hemagglutinin__InfluenzaA__AAZ74397
augaauacuaucauugcuuugagcuacauuuuaugucugguuuuugcucaaaaacuucccggaaaugacaacagcacggcaacgcugugccugggacaccaugcagugccaaacggaacgcuagugaaaacaaucacgagugaccaaauugaagugacuaaugcuacugagcugguucagaguuccucaacagguagaauaugcgacaguccucaccgaauccuugauggagaaaacugcacacugauagaugcucuauugggagacccucuuugugauggcuuccaaaauaaggaaugggaccuuuuuguugaacgcagcaaagccuacagcaacuguuacccuuaugaugugccggauuaugccucccuuaggucacuaguugccucauccggcacccuggaguuuaacaaugaaagcuucaauuggacuggagucgcucagaauggaacaagcuuugcuugcaaaaggagaucuauuaaaaguuucuuuaguagauugaauugguugcaccaauuaaaauacaaauauccagcacugaacgugacuaugccaaacaaugacaaauuugacaaauuguacauuugggggguucaccacccggguacggacagugaccaaaccagccuauaugcucaagcaucagggagagucacagucucuaccaaaagaagccaacaaacuguaaucccgaauaucggaucuagacccuggguaagggguguuuccagcagaauaagcaucuauuggacaauagugaaaccgggagacauacuucugauuaacagcacagggaaucuaauugcuccucgggguuacuucaaaauacgaagugggaaaagcucaauaaugaggucagaugcacccauuggcaaaugcaauucugaaugcaucacuccaaauggaagcauucccaauggcaaaccauuucaaaauguaaacaggaucacauauggggccugucccagauauguuaagcaaaacacucugaaauuggcaacagggaugcggaauguaccagagaaacaaacuagaggcauauucggugcaaucgcagguuucauagaaaaugguugggagggaaugguagacgguugguacgguuucaggcaucaaaauucugagggcacaggacaagcagcagaucuuaaaagcacucaagcagcaaucaaccaaaucaacgggaaacugaauagguuaaucgagaaaacgaacgagaaauuccaucaaauugaaaaagaauucacagaaguagaagggagaauucaggaccucgagaaauauguugaggacacuaaaauagaucucuggucguacaacgcggagcuucuuguugcccuggagaaccaacauacaauugaucuaacugacucagaaaugaacaaacuguuugaaagaacaaggaagcaacugagggaaaaugcugaggauaugggcaaugguuguuucaaaauauaccacaaaugugacaaugccugcauagggucaaucagaaauggaacuuaugaccaugauguauacagagacgaagcauuaaacaaccgguuccagaucaaagguguugagcugaagucaggauacaaagauuggauccuauggauuuccuuugccacaucauguuuuuugcuuuguguuguuuugcugggguucaucaugugggccugccaaaaaggcaacauuaggugcaacauuugcauuuga

SEQ ID NO: 32264 - RNA, 1701 nt, Artificial Sequence
  derived and/or modified CDS sequence (wt) from hemagglutinin__InfluenzaA__AAZ74408
augaagacuaucauugcuuugagcuacauuuuaugucugguuuucgcucaaaaacuucccggaaaugacaacagcacggcaacgcugugccuggggcaccaugcagugccaaacggaacgcuagugaaaacaaucacgaaugaccaaauugaagugacuaaugcuacugagcugguucagaguuccucaacagguagaauaugcgacaguccucaccaaauccuugauggagaaaacugcacacuaauagaugcucuauugggagacccucauugugauggcuuccaaaauaaggaaugggaccuuuuuguugaacgcagcaaagccuacagcaacuguuacccuuaugaugugccggauuaugccucccuuaggucacuaguugccucauccggcacacuggaguuuaacaaugaaagcuucaauuggacuggagucgcucagaauggaacaagcucugcuugcaaaaggagaucuaauaaaaguuucuuuaguagauugaauugguugcaccaauuaaaauacaaauauccagcacugaacgugacuaugccaaacaaugaaaaauuugacaaauuguacauuugggggguucaccacccgaguacggacagugaccaaaucagccuauaugcucaagcaucagggagagucacagucucuaccaaaagaagccaacaaacuguaaucccgaauaucggaucuagacccuggguaaggggugucuccagcagaauaagcaucuauuggacaauaguaaaaccgggagacauacuuuugauuaacagcacagggaaucuaauugcuccucgggguuacuucaaaauacgaagugggaaaagcucaauaaugaggucagaugcacccauuggcaaaugcaauucugaaugcaucacuccaaauggaagcauucccaaugacaaaccauuucaaaauguaaacaggaucacauauggggccugucccagauauguuaagcaaaacacucugaaauuggcaacagggaugcggaauguaccagagaaacaaacuagaggcauauucggcgcaaucgcggguuucauagaaaaugguugggagggaaugguggacgguugguacgguuucaggcaucaaaauucugagggcacaggacaagcagcagaucuuaaaagcacucaagcagcaaucaaccaaaucaacgggaaacugaauagguuaaucgagaaaacgaacgagaaauuccaucaaauugaaaaagaauucucagaaguagaagggagaauucaggaccucgagaaauauguugaggacacuaaaauagaucucuggucguacaacgcggagcuucuuguugcccuggagaaccaacauacaauugaucuaacugacucagaaaugaacaaacuguuugaaagaacaaagaagcaacugagggaaaaugcugaggauaugggcaaugguuguuucaaaauauaccacaaaugugacaaugccugcauagggucaaucagaaauggaacuuauaaccaugauguauacagagacgaagcauuaaacaaccgguuccagaucaaagguguugagcugaagucaggauacaaagauuggauccuauggauuuccuuugccauaucauguuuuuugcuuuguguuguuuugcugggguucaucaugugggccugccaaaaaggcaacauuaggugcaacauuugcauuuga

SEQ ID NO: 32265 - RNA, 1701 nt, Artificial Sequence; identical to SEQ ID NO: 32202
  derived and/or modified CDS sequence (wt) from hemagglutinin__InfluenzaA__AAZ74430

SEQ ID NO: 32266 - RNA, 1701 nt, Artificial Sequence
  derived and/or modified CDS sequence (wt) from hemagglutinin__InfluenzaA__AAZ74441
augaagacuaucauugcuuugagcuacauucuaugucugguuuucgcucaaaaacuucccggaaaugacaacagcacggcaacgcugugccuugggcaccaugcaguaccaaacggaacgauagugaaaacaaucacgaaugaccaaauugaaguuacuaaugcuacugagcugguucagaguuccucaacagguggaauaugcgacaguccucaucagauccuugauggagaaaacugcacacuaauagaugcucuauugggagacccucagugugauggcuuccaaaauaagaaaugggaccuuuuuguugaacgcagcaaagccuacagcaacugcuacccuuaugaugugccggauuaugccucccuuaggucacuaguugccucauccggcacacuggaguuuaacaaugaaagcuucaauuggacuggagucacucaaaauggaacaagcucugcuugcaaaaggagaucuaauaacaguuucuuuaguagauugaauugguugacccacuuaaaauucaaauacccagcauugaacgugacuaugccaaacaaugaaaaauuugacaaauuguacauuugggggguucaccacccggguacggacaaugaccaaaucagccuauaugcucaagcuucaggaagaaucacagucucuaccaaaagaagccaacaaacuguaaucccgaauaucggaucuagacccaggguaagggauauccccagcagaauaagcaucuauuggacaauaguaaaaccgggagacauacuuuugauuaacagcacagggaaucuaauugcuccucgggguuacuucaaaauacgaagugggaaaagcucaauaaugagaucagaugcacccauuggcaaaugcaauucugaaugcaucacuccaaauggaagcauucccaaugacaaaccauuucaaaauguaaacaggaucacauauggggccugucccagauauguuaagcaaaacacucugaaauuggcaacagggaugcgaaauguaccagagaaacaaacuagaggcauauuuggcgcaaucgcggguuucauagaaaaugguugggagggaaugguggaugguugguaugguuucaggcaucaaaauucugagggaauaggacaagcagcagaucucaaaagcacucaagcagcaaucaaccaaaucaaugggaagcugaauagguugaucgggaaaaccaacgagaaauuccaucagauugaaaaagaauucucagaaguagaagggagaauucaggaccucgagaaauauguugaggacacuaaaauagaucucuggucauacaacgcggagcuucuuguugcccuggagaaccaacauacaauugaucuaacugacucagaaaugaacaaacuguuugaaagaacaaagaagcaacugagggaaaaugcugaggauaugggcaaugguuguuucaaaauauaccacaaaugugacaaugccugcauagggucaaucagaaauggaacuuaugaccaugauguauacagagaugaagcauuaaacaaccgguuccagaucaaagguguugagcugaagucaggauacaaagauuggauccuauggauuuccuuugccauaucauguuuuuugcuuuguguugcuuuguugggguucaucaugugggccugccaaaaaggcaacauuaggugcaacauuugcauuuga

SEQ ID NO: 32267 - RNA, 1701 nt, Artificial Sequence
  derived and/or modified CDS sequence (wt) from hemagglutinin__InfluenzaA__AAZ74452
augaagacuaucauugcuuugagcuacauucuaugucugguuuucgcucaaaaacuucccggaaacgacaacagcacggcaacgcugugccuugggcaccaugcaguaccaaacggaacgauagugaaaacaaucacgaaugaccaaauugaaguuacuaaugcuacugagcugguucagaguuccucaacagguggaauaugcgacaguccucaucagauccuugauggagaaaacugcacacuaauagaugcucuauugggagacccucagugugauggcuuccaaaauaagaaaugggaccuuuuuauugaacgcagcaaagccuacagcaacuguuacccuuaugaugugccggauuaugccucccuuaggucacuaguugccucauccggcacacuggaauuuaacaaugaaagcuucaauuggacuggagucacucaaaauggaacaagcucugcuugcaaaaggagaucuaauaacaguuucuuuaguagauugaauugguugacccacuuaaaauucaaauacccagcauugaacgugacuaugccaaacaaugaaaaauuugacaaauuguacauuugggggguucaccacccggguacggacaaugaccaaaucagccuauaugcucaagcuucaggaagaaucacagucucuaccaaaagaagccaacaaacuguaaucccgaauaucggaucuagacccaggguaagggauauccccagcagaauaagcaucuauuggacaauaguaaaaccgggagacauacuuuugauuaacagcacagggaaucuaauugcuccucgggguuacuucaaaauacgaagugggaaaagcucaauaaugagaucagaugcacccauuggcaaaugcaauucugaaugcaucacaccaaauggaagcauucccaaugacaaaccauuucaaaauguaaacaggaucacauauggggccugucccagauauguuaagcaaaacacucugaaauuggcaacagggaugcgaaauguaccagagaaacaaacuagaggcauauuuggcgcaaucgcggguuucauagaaaaugguugggagggaaugguggaugguugguacgguuucaggcaucaaaauucugagggaauaggacaagcagcagaucucaaaagcacucaagcagcaaucaaccaaaucaaugggaagcugaauagguugaucgggaaaaccaacgagaaauuccaucagauugaaaaagaauucucagaaguagaagggagaauucaggaccucgagaaauauguugaggacacuaaaauagaucucuggucauacaacgcggagcuucuuguugcccuggagaaccaacauacaauugaucuaacugacucagaaaugaacaaacuguuugaaagaacaaagaaacaacugagggaaaaugcugaggauaugggcaaugguuguuucaaaauauaccacaaaugugacaaugccugcauagggucaaucagaaauggaacuuaugaccaugauguauacagagaugaagcauugaacaaccgguuccagaucaaagguguugagcugaagucaggguacaaagauuggauccuauggauuuccuuugccauaucauguuuuuugcuuuguguugcuuuguugggguucaucaugugggccugccaaaaaggcaacauuaggugcaacauuugcauuuga

SEQ ID NO: 32268 - RNA, 1701 nt, Artificial Sequence
  derived and/or modified CDS sequence (wt) from hemagglutinin__InfluenzaA__AAZ74463
augaagacuaucauugcuuugagcuacauucuaugucugguuuucgcucaaaaacuucccggaaaugacaacagcacggcaacgcugugccuugggcaccaugcaguaccaaacggaacgauagugaaaacaaucacgaaugaccaaauugaaguuacuaaugcuacugagcugguucagaguuccucaacagguggaauaugcgacaguccucaucagauccuugauggagaaaacugcacacuaauagaugcucuauugggagacccucagugugauggcuuccaaaauaagaaaugggaccuuuuuguugaacgcagcaaagccuacagcaacuguuacccuuaugaugugccggauuaugccucccuuaggucacuaguugccucauccggcacacuggaguuuaacaaugaaagcuucaauuggacuggagucacucaaaauggaacaagcucugcuuguaaaaggagaucuaauaacaguuucuuuaguagauugaauugguugacccacuuaaaauucaaauacccagcauugaacgugacuaugccaaacaaugaaaaauuugacaaauuguacauuugggggguucaccacccggguacggacaaugaccaaauuagccuauaugcucaagcuucaggaagaaucacagucucuaccaaaagaagccaacaaacuguaaucccgaauaucggaucuagacccaggguaagggauauccccagcagaauaagcaucuauuggacaauaguaaaaccgggagacauacuuuugauuaacagcacagggaaucuaauugcuccucgggguuacuucaaaauacgaagugggaaaagcucaauaaugagaucagaugcacccauuggcaaaugcaauucugaaugcaucacuccaaauggaagcauucccaaugacaaaccauuucaaaauguaaacaggaucacauauggggccugucccagauauguuaagcaaaacacucugaaauuggcaacagggaugcgaaauguaccagagaaacaaacuagaggcauauuuggcgcaaucgcggguuucauagaaaaugguugggagggaaugguggaugguugguacgguuucaggcaucaaaauucugagggaauaggacaagcagcagaucucaaaagcacucaagcagcaaucaaccaaaucaaugggaagcugaauagguugaucgggaaaaccaacgagaaauuccaucagauugaaaaagaauucucagaaguagaagggagaauucaggaccucgagaaauauguugaggacacuaaaauagaucucuggucauacaacgcggagcuucuuguugcccuggagaaccaacauacaauugaucuaacugacucagaaaugaacaaacuguuugaaagaacaaagaagcaacugagggaaaaugcugaggauaugggcaaugguuguuucaaaauauaccacaaaugugacaaugccugcauagggucaaucagaaauggaacuuaugaccaugauguauacagagaugaagcauuaaacaaccgguuccagaucaaagguguugagcugaagucaggauacaaagauuggauccuauggauuuccuuugccauaucauguuuuuugcuuuguguuguuuuguugggguucaucaugugggccugccaaaaaggcaacauuaggugcaacauuugcauuuga

SEQ ID NO: 32269 - RNA, 1701 nt, Artificial Sequence
  derived and/or modified CDS sequence (wt) from hemagglutinin__InfluenzaA__AAZ74474
augaagacuaucauugcuuugagcuacauucuaugucugguuuucgcucaaaaacuucccggaaaugacaacagcacggcaacgcugugccuugggcaccaugcaguaccaaacggaacgauagugaaaacaaucacgaaugaccaaauugaaguuacuaaugcuacugagcugguucagaguuccucaacugguggaauaugcgacaguccucaucagauccuugauggagaaaacugcacacuaauagaugcucuauugggagacccucagugugauggcuuccaaaauaagaaaugggaccuuuuuguugaacgcagcaaagccuacagcaacuguuacccuuaugaugugccggauuaugccucccuuaggucacuaguugccucauccggcacacuggaguuuaacaaugaaagcuucaauuggacuggagucacucaaaauggaacaagcucugcuugcaaaaagagaucuaauaacaguuucuuuaguagauugaauugguugacccacuuaaaauucaaauacccagcacugaacgugacuaugccaaacaaugaaaaauuugacaaauuguacauuugggggguucaccacccggguacggacaaugaccaaaucagccuauaugcucaagcaucaggaagaaucacagucucuaccaaaagaagccaacaaacuguaaucccgaauaucggaucuagacccaggguaagggauauccccagcagaauaagcaucuauuggacaauaguaaaaccgggagacauacuuuugauuaacagcacagggaaucuaauugcuccucgggguuacuucaaaauacgaagugggaaaagcucaauaaugagaucagaugcacccauuggcaaaugcaauucugaaugcaucacuccaaauggaagcauucccaaugacaaaccauuucaaaauguaaacaggaucacauauggggccugucccagauauguuaagcaaaacacucugaaauuggcaacagggaugcgaaauguaccagagaaacaaacuagaggcauauuuggcgcaaucgcggguuucauagaaaaugguugggagggaaugguggaugguugguacgguuucaggcaucaaaauucugagggaauaggacaagcagcagaucucaaaagcacucaagcagcaaucaaccaaaucaaugggaagcugaauagguugaucggaaaaaccaacgagaaauuccaucagauugaaaaagaauucucagaaguagaagggagaauucaggaccucgagaaauauguugaggacacuaaaauagaucucuggucauacaacgcggagcuucuuguugcccuggagaaccaacauacaauugaucuaacugacucagaaaugaacaaacuguuugaaagaacaaagaagcaacugagggaaaaugcugaggauaugggcaaugguuguuucaaaauauaccacaaaugugacaaugccugcauagggucaaucagaaauggaacuuaugaccaugauguauacagagaugaagcauuaaacaaccgguuccagaucaaagguguugagcugaagucaggauacaaagauuggauccuauggauuuccuuugccauaucauguuuuuugcuuuguguugcuuuguugggguucaucaugugggccugccaaaaaggcaacauuaggugcaacauuugcauuuga

SEQ ID NO: 32270 - RNA, 1701 nt, Artificial Sequence
  derived and/or modified CDS sequence (wt) from hemagglutinin__InfluenzaA__AAZ74485
augaagacuaucauugcuuugagcuacauucuaugucugguuuucgcucaaaaacuucccggaaaugacaacagcacggcaacgcugugccuugggcaccaugcaguaccaaacggaacgauagugaaaacaaucacgaaugaccaaauugaaguuacuaaugcuacugagcugguucagaguuccucaacagguggaauaugcgacaguccucaucagauccuugauggagaaaacugcacacuaauagaugcucuauugggagacccucagugugauggcuuccaaaauaagaaaugggaccuuuuuauugaacgcagcaaagccuacagcaacuguuacccuuaugaugugccggauuaugccucccuuaggucacuaguugccucauccggcacacuggaauuuaacaaugaaagcuucaauuggacuggagucacucaaaauggaacaagcucugcuugcaaaaggagaucuaauaacaguuucuuuaguagauugaauugguugacccacuuaaaauucaaauacccagcauugaacgugacuaugccaaacaaugaaaaauuugacaaauuguacauuugggggguucaccacccggguacggacaaugaccaaaucagccuauaugcucaagcuucaggaagaaucacagucucuaccaaaagaagccaacaaacuguaaucccgaauaucggaucuagacccaggguaagggauauccccagcagaauaagcaucuauuggacaauaguaaaaccgggagacauacuuuugauuaacagcacagggaaucuaauugcuccucgggguuacuucaaaauacgaagugggaaaagcucaauaaugagaucagaugcacccauuggcaaaugcaauucugaaugcaucacuccaaauggaagcauucccaaugacaaaccauuucaaaauguaaacaggaucacauauggggccugucccagauauguuaagcaaaacacucugaaauuggcaacagggaugcgaaauguaccagagaaacaaacuagaggcauauuuggcgcaaucgcggguuucauagaaaaugguugggagggaaugguggaugguugguacgguuucaggcaucaaaauucugagggaauaggacaagcagcagaucucaaaagcacucaagcagcaaucaaccaaaucaaugggaagcugaauagguugaucgggaaaaccaacgagaaauuccaucagauugaaaaagaauucucagaaguagaagggagaauucaggaccucgagaaauacguugaggacacuaaaauagaucucuggucauacaacgcagagcuucuuguugcccuggagaaccaacauacaauugaucuaacugacucagaaaugaacaaacuguuugaaagaacaaagaagcaacugagggaaaaugcugaggauaugggcaaugguuguuucaaaauauaccacaaaugugacaaugccugcauagggucaaucagaaauggaacuuaugaccaugauguauacagagaugaggcauugaacaaccgguuccagaucaaagguguugagcugaagucaggauacaaagauuggauccuauggauuuccuuugccauaucauguuuuuugcuuuguguugcuuuguugggguucaucaugugggccugccaaaaaggcaacauuaggugcaacauuugcauuuga

SEQ ID NO: 32271 - RNA, 1701 nt, Artificial Sequence
  derived and/or modified CDS sequence (wt) from hemagglutinin__InfluenzaA__AAZ74496
augaagacuaucauugcuuugagcuacauucuaugucugguuuucgcucaaaaacuucccggaaaugacaacagcacggcaacgcugugccuugggcaccaugcaguaccaaacggaacgauagugaaaacaaucacgaaugaccaaauugaaguuacuaaugcuacugagcugguucagaguuccucaacagguggaauaugcgacaguccucaucagauccuugauggagaaaacugcacacuaauagaugcucuauugggagacccucagugugauggcuuccaaaauaagaaaugggaccuuuuuguugaacgcagcaaagccuacagcaacuguuacccuuaugaugugccggauuaugccucccuuaggucacuaguugccucauccggcacacuggaguuuaacaaugaaagcuucaauuggacuggagucacucaaaauggaacaagcucugcaugcaaaaggagaucuaauaacaguuucuuuaguagauugaauugguugacccacuuaaaauucaaauacccagcauugaacgugacuaugccaaacaaugaaaaauuugacaaauuguacauuugggggguucaccacccggguacggacaaugaccaaauuagccuauaugcucaagcuucaggaagaaucacagucucuaccaaaagaagccaacaaacuguaaucccgaauaucggaucuagacccaggguaagggauauccccagcagaauaagcaucuauuggacaauaguaaaaccgggagacauacuuuugauuaacagcacagggaaucuaauugcuccucgggguuacuucaaaauacgaagugggaaaagcucaauaaugagaucagaugcacccauuggcaaaugcaauucugaaugcaucacuccaaauggaagcauucccaaugacaaaccauuucaaaauguaaacaggaucacauauggggccugucccagauauguuaagcaaaacacucugaaauuggcaacagggaugcgaaauguaccagagaaacaaacuagaggcauauuuggcgcaaucgcggguuucauagaaaaugguugggagggaaugguggaugguugguacgguuucaggcaucaaaauucugagggaauaggacaagcagcagaucucaaaagcacucaagcagcaaucaaccaaaucaaugggaagcugaauagguugaucgggaaaaccaacgagaaauuccaucagauugaaaaagaauucucagaaguagaagggagaauucaggaccucgagaaauauguugaggacacuaaaauagaucucuggucauacaacgcggagcuucuuguugcccuggagaaccaacauacaauugaucuaacugacucagaaaugaacaaacuguuugaaagaacaaagaagcaacugagggaaaaugcugaggauaugggcaaugguuguuucaaaauauaccacaaaugugacaaugccugcauagggucaaucagaaauggaacuuaugaccaugauguauacagagaugaagcauuaaacaaccgguuccagaucaaagguguugagcugaagucaggauacaaagauuggauccuauggauuuccuuugccauaucauguuuuuugcuuuguguuguuuuguugggguucaucaugugggccugccaaaaaggcaacauuaggugcaacauuugcauuuga

SEQ ID NO: 32272 - RNA, 1701 nt, Artificial Sequence
  derived and/or modified CDS sequence (wt) from hemagglutinin__InfluenzaA__AAZ74507
augaagacuaucauugcuuugagcuacauucuaugucugguuuucgcucaaaaacuucccggaaaugacaacagcacggcaacgcugugccuugggcaccaugcaguaccaaacggaacgauagugaaaacaaucacgaaugaccaaauugaaguuacuaaugcuacugagcugguucagaguuccucaacagguggaauaugcgacaguccucaucagauccuugauggagaaaacugcacacuaauagaugcucuauugggagacccucagugugauggcuuccaaaauaagaaaugggaccuuuuuauugaacgcagcaaagccuacagcaacuguuacccuuaugaugugccggauuaugccucccuuaggucacuaguugccucauccggcacacuggaauuuaacaaugaaagcuucaauuggacuggagucacucaaaauggaacaagcucugcuugcaaaaggagaucuaauaacaguuucuuuaguagauugaauugguugacccacuuaaaauucaaauacccagcauugaacgugacuaugccaaacaaugaaaaauuugacaaauuguacauuugggggguucaccacccggguacggacaaugaccaaaucagccuauaugcucaagcuucaggaagaaucacagucucuaccaaaagaagccaacaaacuguaaucccgaauaucggaucuagacccaggguaagggauauccccagcagaauaagcaucuauuggacaauaguaaaaccgggagacauacuuuugauuaacagcacagggaaucuaauugcuccucgggguuacuucaaaauacgaagugggaaaagcucaauaaugagaucagaugcacccauuggcaaaugcaauucugaaugcaucacuccaaauggaagcauucccaaugacaaaccauuucaaaauguaaacaggaucacauauggggccugucccagauauguuaagcaaaacacucugaaauuggcaacagggaugcgaaauguaccagagaaacaaacuagaggcauauuuggcgcaaucgcggguuucauagaaaaugguugggagggaaugguggaugguugguacgguuucaggcaucaaaauucugagggaauaggacaagcagcagaucucaaaagcacucaagcagcaaucaaccaaaucaaugggaagcugaauagguugaucgggaaaaccaacgagaaauuccaucagauugaaaaagaauucucagaaguagaagggagaauucaggaccucgagaaauauguugaggacacuaaaauagaucucuggucauacaacgcggagcuucuuguugcccuggagaaccaacauacaauugaucuaacugacucagaaaugaacaaacuguuugaaagaacaaagaagcaacugagggaaaaugcugaggauaugggcaaugguuguuucaaaauauaccacaaaugugacaaugccugcauagggucaaucagaaauggaacuuaugaccaugauguauacagagaugaggcauugaacaaccgguuccagaucaaagguguugagcugaagucaggauacaaagauuggauccuauggauuuccuuugccauaucauguuuuuugcuuuguguugcuuuguugggguucaucaugugggccugccaaaaaggcaacauuaggugcaacauuugcauuuga

SEQ ID NO: 32273 - RNA, 1701 nt, Artificial Sequence; identical to SEQ ID NO: 32271
  derived and/or modified CDS sequence (wt) from hemagglutinin__InfluenzaA__AAZ74518

SEQ ID NO: 32274 - RNA, 1701 nt, Artificial Sequence
  derived and/or modified CDS sequence (wt) from hemagglutinin__InfluenzaA__AAZ74529
augaagacuaucauugcuuugagcuacauucuaugucugguuuucgcucaaaaacuucccggaaaugacaacagcacggcaacgcugugccuugggcaccaugcaguaccaaacggaacgauagugaaaacaaucacgaaugaccaaauugaaguuacuaaugcuacugagcugguucagaguuccucaacagguggaauaugcgacaguccucaucagauccuugauggagaaaacugcacacuaauagaugcucuauugggagacccucagugugauggcuuccaaaauaagaaaugggaccuuuuuauugaacgcagcaaagccuacagcaacuguuacccuuaugaugugccggauuaugccucccuuaggucacuaguugccucauccggcacacuggaauuuaacaaugaaagcuucaauuggacuggagucacucaaaauggaacaagcucugcuugcaaaaggagaucuaauaacaguuucuuuaguagauugaauugguugacccacuuaaaauucaaauacccagcauugaacgugacuaugccaaacaaugaaaaauuugacaaauuguacauuugggggguucaccacccggguacggacaaugaccaaaucagccuauaugcucaagcuucaggaagaaucacagucucuaccaaaagaagccaacaaacuguaaucccgaauaucggaucuagacccaggguaagggauauccccagcagaauaagcaucuauuggacaauaguaaaaccgggagacauacuuuugauuaacagcacagggaaucuaauugcuccucgggguuacuucaaaauacgaagugggaaaagcucaauaaugagaucagaugcacccauuggcaaaugcaauucugaaugcaucacuccaaauggaagcauucccaaugacaaaccauuucaaaauguaaacaggaucacauauggggccugucccagauauguuaagcaaaacacucugaaauuggcaacagggaugcgaaauguaccagagaagcaaacuagaggcauauuuggcgcaaucgcggguuucauagaaaaugguugggagggaaugguggaugguugguacggcuucaggcaucaaaauucugagggaauaggacaagcagcagaucucaaaagcacucaagcagcaaucaaccaaaucaaugggaagcugaauagguugaucgggaaaaccaacgagaaauuccaucagauugaaaaagaauucucagaaguagaagggagaauucaggaccucgagaaauauguugaggacacuaaaauagaucucuggucauacaacgcggagcuucuuguugcccuggagaaccaacauacaauugaucuaacugacucagaaaugaacaaacuguuugaaagaacaaagaagcaacugagggaaaaugcugaggauaugggcaaugguuguuucaaaauauaccacaaaugugacaaugccugcauagggucaaucagaaauggaacuuaugaccaugauguauacagagaugaggcauugaacaaccgguuccagaucaaagguguugagcugaagucaggauacaaagauuggauccuauggauuuccuuugccauaucauguuuuuugcuuuguguugcuuuguugggguucaucaugugggccugccaaaaaggcaacauuaggugcaacauuugcauuuga

SEQ ID NO: 32275 - RNA, 1701 nt, Artificial Sequence
  derived and/or modified CDS sequence (wt) from hemagglutinin__InfluenzaA__AAZ74551
augaagacuaucauugcuuugagcuacauucuaugucugguuuucgcucaaaaacuucccggaaaugacaacagcacggcaacgcugugccuugggcaccaugcaguaccaaacggaacgauagugaaaacaaucacgaaugaccaaauugaaguuacuaaugcuacugagcugguucagaguuccucaacagguggaauaugcgacaguccucaucagauccuugauggagaaaacugcacacuaauagaugcucuauugggagacccucagugugauggcuuccaaaauaagaaaugggaccuuuuuguugaacgcagcaaagccuacagcaacuguuacccuuaugaugugccggauuaugccucccuuaggucacuaguugccucauccggcacacuggaguuuaacaaugaaagcuucaauuggacuggagucacucaaaauggaacaagcucugcuugcaaaaggagaucuaauaacaguuucuuuaguagauugaauugguugacccacuuaaaauucaaauacccagcauugaacgugacuaugccaaacaaugaaaaauuugacaaauuguacauuugggggguucaccacccggguacggacaaugaccaaaucagccuauaugcucaagcuucaggaagaaucacagucucuaccaaaagaagccaacaaacuguaaucccgaauaucggaucuagacccaggguaagggauauccccagcagaauaagcaucuauuggacaauaguaaaaccgggagacauacuuuugauuaacagcacagggaaucuaauugcuccucgggguuacuucaaaauacgaagugggaaaagcucaauaaugagaucagaugcacccauuggcaaaugcaauucugaaugcaucacuccaaauggaagcauucccaaugacaaaccauuucaaaauguaaacaggaucacauauggggccugucccagauauguuaagcaaaacacucugaaauuggcaacagggaugcgaaauguaccagagaaacaaacuagaggcauauuuggcgcaauugcggguuucauagaaaaugguugggagggaaugguggaugguugguacgguuucaggcaucaaaauucugagggaauaggacaagcagcagaucucaaaagcacucaagcagcaaucaaccaaaucaaugggaagcugaauagguugaucgggaaaaccaacgagaaauuccaucagauugaaaaagaauucucagaaguagaagggagaauucaggaccucgagaaauauguugaggacacuaaaauagaucucuggucauacaacgcggagcuucuuguugcccuggagaaccaacauacacuugaucuaacugacucagaaaugaacaaacuguuugaaagaacaaagaagcaacugagggaaaaugcugaggauaugggcaaugguuguuucaaaauauaccacaaaugugacaaugccugcauagggucaaucagaaauggaacuuaugaccaugauguauacagagaugaagcauuaaacaaccgauuccagaucaaagguguugagcugaagucaggauacaaagauuggauccuauggauuuccuuugccauaucauguuuuuugcuuuguguugcuuuguugggguucaucaugugggccugccaaaaaggcaacauuaggugcaacauuugcauuuga

SEQ ID NO: 32276 - RNA, 1701 nt, Artificial Sequence
  derived and/or modified CDS sequence (wt) from hemagglutinin__InfluenzaA__AAZ74562
augaagacuaucauugcuuugagcuacauuuuaugucugguuuucgcucaaaaacuucccggaaaugacaacagcacggcaacgcugugccuggggcaccaugcagugccaaacggaacgcuagugaaaacaaucacgaaugaccaaauugaggugacuaaugcuacugagcugguucagaguuccucaacagguagaauaugcgacaguccucaccaaauccuugauggagaaaacugcacacuaauagaugcucuauugggagacccucauugugauggcuuccaaaauaaggaaugggaccuuuuuguugaacgcagcaaagccuacagcaacuguuacccuuaugaugugccggauuaugccucccuuaggucacuaguugccucauccggcacacuggaguuuaacaaugaaagcuucaauuggacuggagucgcucagaauggaacaagcucugcuugcaaaaggagaucuaauaaaaguuucuuuaguagauugaauugguuacaccaauuaaaauacaaauauccagcacugaacgugacuaugccaaacaaugaaaaauuugacaaauuguacauuugggggguucaccacccgaguacggacagugaccaaaucagccuauaugcucaagcaucagggagagucacagucucuaccaaaagaagccaacaaacuguaaucccgaauaucggaucuagacccuggguaaggggugucuccagcagaauaagcaucuauuggacaauaguaaaaccgggagacauacuuuugauuaacagcacagggaaucuaauugcuccucgggguuacuucaaaauacgaagugggaaaagcucaauaaugaggucagaugcacccauuggcaaaugcaauucugaaugcaucacuccaaauggaagcauucccaaugacaaaccauuucaaaauguaaacaggaucacauauggggccugucccagauauguuaagcaaaacacucugaaauuggcaacagggaugcggaauguaccagagaaacaaacuagaggcauauucggcgcaaucgcggguuucauagaaaaugguugggagggaaugguggacgguugguacgguuucaggcaucaaaauucugagggcacaggacaagcagcagaucuuaaaagcacucaagcagcaaucaaccaaaucaacgggaaacugaauagguuaaucgagaaaacgaacgagaaauuccaucaaauugaaaaagaauucucagaaguagaagggagaauucaggaccucgagaaauauguugaggacacuaaaauagaucucuggucguacaacgcggagcuucuuguugcccuggagaaccaacauacaauugaucuaacugacucagaaaugaacaaacuguuugaaagaacaaagaagcaacugagggaaaaugcugaggauaugggcaaugguuguuucaaaauauaccacaaaugugacaaugccugcauagggucaaucagaaauggaacuuaugaccaugauguauacagagacgaagcauuaaacaaccgguuccagaucaaagguguugagcugaagucaggauacaaagauuggauccuauggauuuccuuugccauaucauguuuuuugcuuuguguuguuuugcugggguucaucaugugggccugccaaaaaggcaacauuaggugcaacauuugcauuuga

SEQ ID NO: 32277 - RNA, 1701 nt, Artificial Sequence
  derived and/or modified CDS sequence (wt) from hemagglutinin__InfluenzaA__AAZ74573
augaagacuaucauugcuuugagcuacauucuaugucugguuuucgcucaaaaacuucccggaaaugacaacagcacggcaacgcugugccuugggcaccaugcaguaccaaacggaacgauagugaaaacaaucacgaaugaccaaauugaaguuacuaaugcuacugagcugguucagaguuccucaacagguggaauaugcgacaguccucaucagauccuugauggagaaaacugcacacuaauagaugcucuauugggagacccucagugugauggcuuccaaaauaagaaaugggaccuuuuuauugaacgcagcaaagccuacagcaacuguuacccuuaugaugugccggauuaugccucccuuaggucacuaguugccucauccggcacacuggaauuuaacaaugaaagcuucaauuggacuggagucacucaaaauggaacaagcucugcuugcaaaaggagaucuaauaacaguuucuuuaguagauugaauugguugacccacuuaaaauucaaauacccagcauugaacgugacuaugccaaacaaugaaaaauuugacaaauuguacauuugggggguucaccacccggguacgggcaaugaccaaaucagccuauaugcucaagcuucaggaagaaucacagucucuaccaaaagaagccaacaaacuguaaucccgaauaucggaucuagacccaggguaagggauauccccagcagaauaagcaucuauuggacaauaguaaaaccgggagacauacuuuugauuaacagcacagggaaucuaauugcuccucgggguuacuucaaaauacgaagugggaaaagcucaauaaugagaucagaugcacccauuggcaaaugcaauucugaaugcaucacuccaaauggaagcauucccaaugacaaaccauuucaaaauguaaacaggaucacauauggggccugucccagauauguuaagcaaaacacucugaaauuggcaacagggaugcgaaauguaccagagaaacaaacuagaggcauauuuggcgcaaucgcggguuucauagaaaaugguugggagggaaugguggaugguugguacgguuucaggcaucaaaauucugagggaauaggacaagcagcagaucucaaaagcacucaagcagcaaucaaccaaaucaaugggaagcugaauagguugaucgggaaaaccaacgagaaauuccaucagauugaaaaagaauucucagaaguagaagggagaauucaggaccucgagaaauauguugaggacacuaaaauagaucucuggucauacaacgcggagcuucuuguugcccuggagaaccaacauacaauugaucuaacugacucagaaaugaacaaacuguuugaaagaacaaagaagcaacugagggaaaaugcugaggauaugggcaaugguuguuucaaaauauaccacaaaugugacaaugccugcauagggucaaucagaaauggaacuuaugaccaugauguauacagagaugaggcauugaacaaccgguuccagaucaaagguguugagcugaagucaggauacaaagauuggauccuauggauuuccuuugccauaucauguuuuuugcuuuguguugcuuuguugggguucaucaugugggccugccaaaaaggcaacauuaggugcaacauuugcauuuga

SEQ ID NO: 32278 - RNA, 1701 nt, Artificial Sequence
  derived and/or modified CDS sequence (wt) from hemagglutinin__InfluenzaA__AAZ74584
augaagacuaucauugcuuugagcuacauuuuaugucuaguuuucgcucaaaaacuucccggaaaugacaacagcacggcaacgcugugccuggggcaccaugcagugccaaacggaacgcuagugaaaacaaucgcgaaugaccaaauugaagugacuaaugcuacugagcugguucagaguuccucaacagguagaauaugcgacaguccucaccaaauccuugauggagaaaacugcacacuaauagaugcucuauugggagacccucauugugauggcuuccaaaauaaggaaugggaccuuuuuguugaacgcagcaaagccuacagcaacuguuacccuuaugaugugccggauuaugcuucccuuaggucacuaguugccucauccggcacacuggaguuuaacaaugaaagcuucaauuggacuggagucgcucagaauggaacaagcucugcuugcaaaaggagaucuaauaaaaguuucuuuaguagauugaauugguugcaccaauuaaaauacaaauauccagcacagaacgugacuaugccaaacaaugaaaaauuugacaaauuguacauuugggggguucaccacccgaguacggacagugaccaaaucagccuauaugcucaagcaucagggagagucacagucucuaccaaaagaagccaacaaacuguaaucccgaauaucggaucuagacccuggguaaggggugucuccagcagaauaagcaucuauuggacaauaguaaaaccgggagacauacuuuugauuaacagcacagggaaucuaauugcuccucgggguuacuucaaaauacgaagugggaaaagcucaauaaugaggucagaugcacccauuggcaaaugcaauucugaaugcaucacuccaaauggaagcauucccaaugacaaaccauuucaaaauguaaacaggaucacauauggggccugucccagauauguuaagcaaaacacucugaaauuggcaacagggaugcggaauguaccagagaaacaaacuagaggcauauucggcgcaaucgcggguuucauagaaaaugguugggagggaaugguggacgguugguacgguuucaggcaucaaaauucugagggcacaggacaagcagcagaucuuaaaagcacucaagcagcaaucaaccaaaucaacgggaaacugaauagguuaaucgagaaaacgaacgagaaauuccaucaaauugaaaaagaauucucagaaguagaagggagaauucaggaccucgagaaauauguugaggacacuaaaauagaucucuggucguacaacgcggagcuucuuguugcccuggagaaccaacauacaauugaucuaacugacucagaaaugaacaaacuguuugaaagaacaaagaagcaacugagggaaaaugcugaggauaugggcaaugguuguuucaaaauauaccacaaaugugacaaugccugcauagggucaaucagaaauggaacuuaugaccaugauguauacagagacgaagcauuaaacaaccgguuccagaucaaagguguugagcugaagucaggauacaaagauuggauccuauggauuuccuuugccauaucauguuuuuugcuuuguguugcuuugcugggguucaucaugugggccugccaaaaaggcaacauuaggugcaacauuugcauuuga

SEQ ID NO: 32279 - RNA, 1701 nt, Artificial Sequence
  derived and/or modified CDS sequence (wt) from hemagglutinin__InfluenzaA__AAZ74595
augaagacuaucauugcuuugagcuacauucuaugucugguuuucgcucaaaaacuucccggaaaugacaacagcacggcaacgcugugccuugggcaccaugcaguaccaaacggaacgauagugaaaacaaucacgaaugaccaaauugaaguuacuaaugcuacugagcugguucagaguuccucaacagguggaauaugcgacaguccucaucagauccuugauggagaaaacugcacacuaauagaugcucuauugggagacccucagugugauggcuuccaaaauaagaaaugggaccuuuuuguugaacgcagcaaagccuacagcaacuguuacccuuaugaugugccggauuaugccucccuuaggucacuaguugccucauccggcacacuggaguuuaacaaugaaagcuucaauuggacuggagucacucaaaauggaacaagcucugcuugcaaaaggagaucuaauaacaguuucuuuaguagauugaauugguugacccacuuaaaauucaaauacccagcauugaacgugacuaugccaaacaaugaaaaauuugacaaauuguacauuugggggguucaccacccggguacggacaaugaccaaaucagccuauaugcucaagcaucaggaagaaucacagucucuaccaaaagaagccaacaaacuguaaucccgaauaucggaucuagacccaggguaagggauauccccagcagaauaagcaucuauuggacaauaguaaaaccgggagacauacuuuugauuaacagcacagggaaucuaauugcuccucgggguuacuucaaaauacgaagugggaaaagcucaauaaugagaucagaugcacccauuggcaaaugcaauucugaaugcaucacuccaaauggaagcauucccaaugacaaaccauuucaaaauguaaacaggaucacauauggggccugucccagauauguuaagcaaaacacucugaaauuggcaacagggaugcgaaauguaccagagaaacaaacuagaggcauauuuggcgcaaucgcggguuucauagaaaaugguugggagggaaugguggaugguugguacgguuucaggcaucaaaauucugagggaauaggacaagcagcagaucucaaaagcacucaagcagcaaucaaccaaaucaaugggaagcugaauagguugaucgggaaaaccaacgagaaauuccaucagauugaaaaagaauucucagaaguagaagggagaauucaggaccucgagaaauauguugaggacacuaaaauagaucucuggucauacaacgcggagcuucuuguugcccuggagaaccaacauacaauugaucuaacugacucagaaaugaacaaacuguuugaaagaacaaagaagcaacugagggaaaaugcugaggauaugggcaaugguuguuucaaaauauaccacaaaugugacaaugccugcauagggucaaucagaaauggaacuuaugaccaugauguauacagagaugaagcauuaaacaaccgguuccagaucaaagguguugagcugaagucaggauacaaagauuggauccuauggauuuccuuugccauaucauguuuuuugcuuuguguugcuuuguugggguucaucaugugggccugccaaaaaggcaacauuaggugcaacauuugcauuuga

SEQ ID NO: 32280 - RNA, 1701 nt, Artificial Sequence
  derived and/or modified CDS sequence (wt) from hemagglutinin__InfluenzaA__AAZ74617
augaagacuaucauugcuuugagcuacauuuuaugucugguuuucgcucaaaaacuucccguaaaugacaacagcacggcaacgcugugccugggacaccaugcagugccaaacggaacgcuagugaaaacaaucacgaaugaccacauugaagugacuaaugcuacugagcugguucagaguuccucaacagguagaauaugcgacaguccucaccaaauccuugauggagaaaacugcacacuaauagaugcucuauugggagacccucauugugauggcuuccagaauaaggaaugggaccuuuuuguugaacgcagcacagccuacagcaacuguuacccuuaugaugugccggauuaugccucccuuaggucacuaguugccucauccggcacacuggaguuuaacaaugaaagcuucaauuggacuggagucgcucagaauggaacaagcucugcuugcaaaaggagaucuauuaaaaguuucuuuaguagauugaauugguugcaccaauuaaaauacaaauauccagcacugaacgugacuaugccaaacaaugaaaaauuugacaaauuguacauuugggggguucaccacccgaguacggacagugaccaaaucagccuauaugcucaagcaucagggagagucacagucucuaccaaaagaagccaacaaacuguaaucccgaauaucggaucuagacccuggguaaggggugucuccagcaaaauaagcaucuauuggacaauaguaaaaccgggagacauacuuuugauuaacagcacagggaaucuaauugcuccucgggguuacuuuaaaauacgaagugggaaaagcucaauaaugaggucaaaugcacccauuggcaaaugcaauucugaaugcaucacuccaaauggaagcauucccaaugacaaaccauuucaaaauguaaacaggaucacauauggggccugucccagauauguuaagcaaaacacucugaaauuggcaacagggaugcggaauguaccagagaaacaaacuagaggcauauucggcgcaaucgcggguuucauagaaaaugguugggagggaaugguggacgguugguacgguuucaggcaucaaaauucugagggcacaggacaagcagcagaucuuaaaagcacucaagcagcaaucaaccaaaucaacgggaaacugaauagguuaaucgagaaaacaaacgagaaauuccaucaaauugaaaaagaauucucagaaguagaagggagaauucaggaccucgagaaauauguugaggacacuaaaauagaucucuggucguacaacgcggagcuucuuguugcccuggagaaccaacauacaauugaucuaacugacucagaaaugaacaaacuguuugaaagaacaaggaagcaacugagggaaaaugcugaggauaugggcaaugguuguuucaaaauauaccacaaaugugacaaugccugcauagggucaaucagaaauggaacuuaugaccaugauguauacagagacgaagcauuaaacaaccgguuccagaucaaagguguugagcugaagucaggauacaaagauuggauccuauggauuuccuuugccauaucauguuuuuugcuuuguguuguuuugcugggguucaucaugugggccugccaaaaaggcaacauuaggugcaacauuugcauuuga

SEQ ID NO: 32281 - RNA, 1701 nt, Artificial Sequence; identical to SEQ ID NO: 32082
  derived and/or modified CDS sequence (wt) from hemagglutinin__InfluenzaA__AAZ79505

SEQ ID NO: 32282 - RNA, 1701 nt, Artificial Sequence
  derived and/or modified CDS sequence (wt) from hemagglutinin__InfluenzaA__AAZ79516
augaagacuaucauugcuuugagcuacauuuuaugucugguuuucgcucaaaaacuucccggaaaugacaacagcacggcaacgcugugccuggggcaccaugcagugccaaacggaacgcuagugaaaacaaucacgaaugaccaaauugaagugacuaaugcuacugagcugguucagaguuccucaacagguagaauaugcgacaguccucaccaaauccuugauggagaaaacugcacacuaauagaugcucuauugggagacccucauugugauggcuuccaaaauaaggaaugggaccuuuuuguugaacgcagcaaagccuacagcaacuguuacccuuaugaugugccggauuaugccucccuuaggucacuaguugccucauccggcacacuggaguuuaacaaugaaagcuucaauuggacuggagucgcucagaauggaacaagcucugcuugcaaaaggagaucuaauaaaaguuucuuuaguagauugaauugguugcaccaauuaaaauacaaauauccagcacugaacgugacuaugccaaacaaugaaaaauuugacaaauuguacauuugggggguccaccacccgaguacggacagugaccaaaucagccuauaugcucaagcaucagggagagucacagucucuaccaaaagaagccaacaaacuguaaucccgaauaucggaucuagacccuggguaaggggugucuccagcagaauaagcaucuauuggacaauaguaaaaccgggagacauacuuuugauuaacagcacagggaaucuaauugcuccucgggguuacuucaaaauacgaagugggaaaagcucaauaaugaggucagaugcacccauuggcaaaugcaauucugaaugcaucacuccaaauggaagcauucccaaugacaaaccauuucaaaauguaaacaggaucacauauggggccugucccagauauguuaagcaaaacacucugaaauuggcaacagggaugcggaauguaccagagaaacaaacuagaggcauauucggcgcaaucgcggguuucauagaaaaugguugggagggaaugguggacgguugguacgguuucaggcaucaaaauucugagggcacaggacaagcagcagaucuuaaaagcacucaagcagcaaucaaccaaaucaacgggaaacugaauagguuaaucgagaaaacgaacgagaaauuccaucaaauugaaaaagaauucucagaaguagaagggagaauucaggaccucgagaaauauguugaggacacuaaaauagaucucuggucguacaacgcggagcuucuuguugcccuggagaaccaacauacaauugaucuaacugacucagaaaugaacaaacuguuugaaagaacaaagaagcaacugagggaaaaugcugaggauaugggcaaugguugucucaaaauauaccacaaaugugacaaugccugcauagggucaaucagaaauggaacuuaugaccaugauguauacagagacgaagcauuaaacaaccgguuccagaucaaagguguugagcugaagucaggauacaaagauuggauccuauggauuuccuuugccauaucauguuuuuugcuuuguguuguuuugcugggguucaucaugugggccugccaaaaaggcaacauuaggugcaacauuugcauuuga

SEQ ID NO: 32283 - RNA, 1701 nt, Artificial Sequence
  derived and/or modified CDS sequence (wt) from hemagglutinin__InfluenzaA__AAZ79527
augaagacuaucauugcuuugagcuacauucuaugucugguuuucgcucaaaaacuucccggaaaugacaacagcacggcaacgcugugccuugggcaccaugcaguaccaaacggaacgauagugaaaacaaucacgaaugaccaaauugaaguuacuaaugcuacugagcugguacagaguuccucaacagguggaauaugcgacaguccucaucagauccuugauggagaaaacugcacacuaauagaugcucuauugggagacccucagugugauggcuuccaaaauaagaaaugggaccuuuuuguugaacgcagcaaagccuacagcaacuguuacccuuaugaugugccggauuaugccucccuuaggucacuaguugccucauccggcacacuggaguuuaacaaugaaagcuucgauuggacuggagucacucagaauggaacaagcucugcuugcaaaaggagaucuaauaaaaguuucuuuaguagauugaauugguugacccacuuaaaauacaaauacccagcauugaacgugacuaugccaaacaaugaaaaauuugacaaauuguacauuugggggguucaccacccggguacggacagugaccaaaucagccuauaugcucaagcaucaggaagaaucacagucucuaccaaaagaagccaacaaacuguaaucccgaauaucggaucuagacccaggguaagggaugucucuagccgaauaagcaucuauuggacaauaguaaaaccgggagacauacuuuugauuaacagcacagggaaucuaauugcuccucgggguuacuucaaaauacgaagugggaaaagcucaauaaugagaucagaugcacccauuggcaaaugcaauuccgaaugcaucacuccaaauggaagcauucccaaugacaaaccauuucaaaauguaaacaggaucacauauggggccugucccagauauguuaagcaaaacacuuugaaauuggcaacagggaugcgaaauguaccagagagacaaacuagaggaauauuuggcgcaaucgcgggcuucauagaaaaugguugggagggaaugguggacgguugguacgguuucaggcaucaaaauucugagggcacaggacaagcagcagaucucaaaagcacucaagcagcaaucaaccaaaucaaugggaaacugaauagguuaaucgggaaaacaaacgagaaauuccaucagauugaaaaagaauucucagaaguagaagggagaauucaggaccucgagagauauguugaggacacuaaaauagaucucuggucauacaacgcggagcuucuuguugcccuggagaaccaacauacaauugaucuaacugacucagaaaugaacaaacuguuugaaagaacaaagaagcaacugagggaaaaugcugaggauaugggcaaugguuguuucaaaauauaccacaaaugugacaaugccugcauagggucaaucagaaauggaacuuaugaccaugauguguacagagaugaagcauuaaacaaccgguuccagaucaaagguguugagcugaagucaggauacaaagauuggauccuauggauuuccuuugccauaucauguuuuuugcuuuguguugcuuuguugggguucaucaugugggccugccaaaaaggcaacauuaggugcaacauuugcauuuga

SEQ ID NO: 32284 - RNA, 1698 nt, Artificial Sequence
  derived and/or modified CDS sequence (wt) from hemagglutinin__InfluenzaA__AAZ79549
augaaaguaaaacuacugauccuguuauguacauuuacagcuacauaugcagacacaauauguauaggcuaccaugccaacaacucaaccgacacuguugacacaguacuugagaagaaugugacagugacacacucugucaaccuacuugaggacagucacaauggaaaacugugccuacuaaaagggauagccccccuacaauuggguaauugcagcguugccggauggaucuuaggaaacccagaaugcgaauuacugauuuccaaggaaucaugguccuacauuguagaaacaccaaauccugagaauggagcauguuacccaggguauuucgccgacuaugaggagcuaagggagcaauugaguucaguaucuucauuugagagauucgaaauauuccccaaagaaagcucauggcccaaccacaccguaaccggaguaucagcaucaugcucccauaaugggaaaagcaguuuuuacagaaauuugcuauggcugacggggaagaaugguuuguacccaaaccugagcaaauccuaugcaaacaacaaagagaaagaaguccuuauacuaugggguguucaucacccgccuaacauagggaaccaaaggacccucuaucacacagaaaaugcuuaugucucuguagugucuucacauuauagcagaagauucaccccagaaauaaccaaaaggcccaaaguaagagaucaggaaggaagaaucaacuacuacuggacucugcuggaacccggggauacaauaauauuugaggcaaauggaaaucuaauagcgccaugguaugcuuucgcacugaguagaggcuuuggaucaggaaucaucaccucaaaugcaccaauggaugaaugugaugcgaagugucaaacaccucagggagcuauaaacagcagucuuccuuuccagaauguacacccagucacaauaggagaguguccaaaguaugucaggagugcaaaauuaaggaugguuacaggacuaaggaacaucccauccauucaauccagagguuuguuuggagccauugccgguuucauugaagggggguggacuggaaugguagaugggugguaugguuaucaucaucagaaugagcaaggaucuggcuaugcugcagaucaaaaaagcacacaaaaugccauuaacgggauuacaaacaaggugaauucuguaauugagaaaaugaacacucaauucacagcugugggcaaagaauucaacaaauuggaaagaaggauggaaaacuuaaauaaaaagguugaugauggguuucuagacauuuggacauauaaugcagaauuguugguucuacuggaaaaugaaaggacuuuggauuuccacgacuccaaugugaagaaucuguacgagaaaguaaaaagccaauuaaagaauaaugccaaagaaauaggaaauggguguuuugaauucuaucacaaguguaacaaugaaugcauggagagugugaaaaauggaacuuaugacuauccaaaauauuccgaagaaucaaaguuaaacagggaaaaaauugauggagugaaauuggacucaaugggggucuaucagauucuggcgaucuacucaacugucgccaguucccugguucuuuuggucucccugggggcaaucagcuucuggauguguuccaauggguccuugcaguguagaauaugcaucuga

SEQ ID NO: 32285 - RNA, 1701 nt, Artificial Sequence
  derived and/or modified CDS sequence (wt) from hemagglutinin__InfluenzaA__AAZ79560
augaagacuaucauugcuuugagcuacauuuuaugucugguuuucgcucaaaaacuucccggaaaugacaacagcacggcaacgcugugccuggggcaccaugcagugccaaacggaacgcuagugaaaacaaucacgaaugaccaaauugaagugacuaaugcuacugagcugguucagaguuccucaacagguagaauaugcgacaguccucaccaaauccuugauggagaaaacugcacacuaauagaugcucuauugggagacccucauugugauggcuuccaaaauaaggaaugggaccuuuuuguugaacgcagcaaagccuacagcaacuguuacccuuaugaugugccggauuaugccucccuuaagucacuaguugccucauccggcacacuggaguuuaacaaugaaagcuucaauuggacuggagucgcucagaauggaacaagcucugcuugcaaaaggagaucuaauaaaaguuucuuuaguagauugaauugguugcaccaauuaaaauacaaauauccagcacugaacgugacuaugccaaacaaugaaaaauuugacaaauuguacauuugggggguucaccacccgaguacggacagugaccaaaucagccuauaugcucaagcaucagggagagucacagucucuaccaaaagaagccaacaaacuguaaucccgaauaucggaucuagacccuggguaaggggugucuccagcagaauaagcaucuauuggacaauaguaaaaccgggagacauacuuuugauuaacagcacagggaaucuaauugcuccucgggguuacuucaaaauacgaagugggaaaagcucaauaaugaggucaaaugcacccauuggcaaaugcaauucugaaugcaucacuccaaauggaagcauucccaaugacaaaccauuucaaaauguaaacaggaucacauauggggccugucccagauauguuaagcaaaacacucugaaauuggcaacagggaugcggaauguaccagagaaacaaacuagaggcauauucggcgcaaucgcggguuucauagaaaaugguugggagggaaugguggacgguugguacgguuucaggcaucaaaauucugagggcacaggacaagcagcagaucuuaaaagcacucaagcagcaaucaaccaaaucaacgggaaacugaauagguuaaucgagaaaacgaacgagaaauuccaucaaauugaaaaagaauucucagaaguagaagggagaauucaggaccucgagaaauauguugaggacacuaaaauagaucucuggucauacaacgcggagcuucuuguugcccuggagaaccaacauacaauugaucuaacugacucagaaaugaacaaacuguuugaaagaacaaagaagcaacugagggaaaaugcugaggauaugggcaaugguuguuucaaaauauaccacaaaugugacaaugccugcauagggucaaucagaaauggaacuuaugaccaugauguauacagagacgaagcauuaaacaaccgguuccagaucaaagguguugagcugaagucaggauacaaagauuggauccuauggauuuccuuugccauaucauguuuuuugcuuuguguuguuuugcugggguucaucaugugggccugccaaaaaggcaacauuaggugcaacauuugcauuuga

SEQ ID NO: 32286 - RNA, 1701 nt, Artificial Sequence
  derived and/or modified CDS sequence (wt) from hemagglutinin__InfluenzaA__AAZ79571
augaagacuaucauugcuuugagcuacauuuuaugucugguuuucgcucaaaaacuucccggaaaugacaacagcacggcaacgcugugccuggggcaccaugcagugccaaacggaacgcuagugaaaacaaucacgaaugaccaaauugaagugacuaaugcuacugagcugguucagaguuccucaacagguagaauaugcgacaguccucaccaaauccuugauggagaaaacugcacacuaauagaugcucuauugggagacccucguugugauggcuuccaaaauaaggaaugggaccuuuuuguugaacgcagcaaagccuacagcaacuguuacccuuaugaugugccggauuaugccucccuuaggucacuaguugccucauccggcacacuggaguuuaacaaugaaagcuucaauuggacuggagucgcucagaauggaacaagcucugcuugcaaaaggagaucuaauaaaaguuucuuuaguagauugaauugguugcaccaauuaaaauacaaauauccagcacugaacgugacuaugccaaacaaugaaaaauuugacaaauuguacauuugggggguucaccacccgaguacggacagugaccaaaucagccuauaugcucaagcaucagggagagucacagucucuaccaaaagaagccaacaaacuguaaucccgaauaucggaucuagacccuggguaaggggugucuccagcagaauaagcaucuauuggacaauaguaaaaccgggagacauacuuuugauuaacagcacagggaaucuaauugcuccucgggguuacuucaaaauacgaagugggaaaagcucaauaaugaggucagaugcacccauuggcaaaugcaauucugaaugcaucacuccaaauggaagcauucccaaugacaaaccauuucaaaauguaaacaggaucacauauggggccugucccagauauguuaagcaaaacacucugaaauuggcaacagggaugcggaauguaccagagaaacaaacuagaggcauauucggcgcaaucgcggguuucauagaaaaugguugggagggaaugguggacgguugguacgguuucaggcaucaaaauucugagggcacaggacaagcagcagaucuuaaaagcacucaagcagcaaucaaccaaaucaacgggaaacugaauagguuaaucgagaaaacgaacgagaaauuccaucaaauugaaaaagaauucucagaaguagaagggagaauucaggaccucgagaaauauguugaggacacuaaaauagaucucuggucguacaacgcggagcuucuuguugcccuggagaaccaacauacaauugaucuaacugacucagaaaugaacaaacuguuugaaagaacaaagaagcaacugagggaaaaugcugaggauaugggcaaugguuguuucaaaauauaccacaaaugugacaaugccugcauagggucaaucagaaauggaacuuaugaccaugauguauacagagacgaagcauuaaacaaccgguuccagaucaaagguguugagcugaagucaggauacaaagauuggauccuauggauuuccuuugccauaucauguuuuuugcuuuguguuguuuugcugggguucaucaugugggccugccaaaaaggcaacauuaggugcaacauuugcauuuga

SEQ ID NO: 32287 - RNA, 1701 nt, Artificial Sequence
  derived and/or modified CDS sequence (wt) from hemagglutinin__InfluenzaA__AAZ79582
augaagacuaucauugcuuugagcuacauuuuaugucugguuuucgcucaaaaacuucccggaaaugacaacagcacggcaacgcugugccuggggcaccaugcagugccaaacggaacgcuagugaaaacaaucacgaaugaccaaauugaagugacuaaugcuacugagcugguucagaguuccucaacagguagaauaugcgacaguccucaccaaauccuugauggagaaaacugcacacuaauagaugcucuauugggagacccucauugugauggcuuccaaaauaaggaaugggaccuuuuuguugaacgcagcaaagccuacagcaacuguuacccuuaugaugugccggauuaugccucccuuaggucacuaguugccucauccggcacacuggaguuuaacaaugaaagcuucaauuggacuggagucgcucagaauggaacaagcucugcuugcaaaaggagaucuaauaaaaguuucuuuaguagauugaauugguugcaccaauuaaaauacaaauauccagcacugaacgugacuaugccaaacaaugaaaaauuugacaaauuguacauuugggggguucaccacccgaguacggacagugaccaaaucagccuauaugcucaagcaucagggagagucacagucucuaccaaaagaagccaacaaacuguaaucccgaauaucggaucuggacccuggguaaggggugucuccagcagaauaagcaucuauuggacaauaguaaaaccgggagacauacuuuugauuaacagcacagggaaucuaauugcuccucgggguuacuucaaaauacgaagugggaaaagcucaauaaugaggucagaugcacccauuggcaaaugcaauucugaaugcaucacuccaaauggaagcauucccaaugacaaaccauuucaaaauguaaacaggaucacauauggggccugucccagauauguuaagcaaaacacucugaaauuggcaacagggaugcggaauguaccagagaaacaaacuagaggcauauucggcgcaaucgcggguuucauagaaaaugguugggagggaaugguggacgguugguacgguuucaggcaucaaaauucugagggcacaggacaagcagcagaucuuaaaagcacucaagcagcaaucaaccaaaucaacgggaaacugaauagguuaaucgagaaaacgaacgagaaauuccaucaaauugaaaaagaauucucagaaguagaagggagaauucaggaccucgagaaauauguugaggacacuaaaauagaucucuggucguacaacgcggagcuucuuguugcccuggagaaccaacauacaauugaucuaacugacucagaaaugaacaaacuguuugaaagaacaaagaagcaacugagggaaaaugcugaggauaugggcaaugguuguuucaaaauauaccacaaaugugacaaugccugcauagggucaaucagaaauggaacuuaugaccaugauguauacagagacgaagcauuaaacaaccgguuccagaucaaagguguugagcugaagucaggauacaaagauuggauccuauggauuuccuuugccauaucauguuuuuugcuuuguguuguuuugcugggguucaucaugugggccugccaaaaaggcaacauuaggugcaacauuugcauuuga

SEQ ID NO: 32288 - RNA, 1698 nt, Artificial Sequence
  derived and/or modified CDS sequence (wt) from hemagglutinin__InfluenzaA__AAZ79604
augaaagcaaaacuacugguccuguuauguacauuuacagcuacauacgcagacacaauauguauaggcuaccaugccaacaacucaaccgacacuguugacacaguacuugagaagaaugugacagugacacacucugucaaccuacuugaggacagucacaauggaaaacuaugucuacuaaaaggaauagccccacuacaauuggguaauugcagcguugccggauggaucuuaggaaacccagaaugcgaauuacugauuuccaaggaaucaugguccuacauuguagaaacaccaaauccugagaauggaacauguuacccaggguauuucgccgacuaugaggaacugagggagcaauugaguucaguaucuucauuugagagauucgaaauauuccccaaaggaagcucauggcccaaccacaccguaaccggaguaucagcaucaugcucccauaaugggaaaagcaguuuuuacagaaauuugcuauggcugacggggaagaaugguuuguacccaaaucugagcauguccuauguaaacaacaaagagaaagaaguccuugugcuaugggguguucaucacccaccuaacauaggggaccaaagggcccucuaccauacagaaaaugcuuaugucucuguagugucuucacauuauagcagaagauucaccccagaaauagccaaaagacccaaaguaagagaucaggaaggaagaaucaacuacuacuggacucugcuggaacccggggacacaauaauauuugaggcaaauggaaaucuaauagcgccaugguaugcuuucgcacugaguagaggcuuuggaucaggaaucaucaccucaaaugcaccaauggaugaaugugaugcgaagugucaaacaccucagggagcuauaaacaguagucuuccuuuccagaauguacacccaguuacaauaggagaguguccaaaguaugucaggagugcaaaauuaaggaugguuacaggacuaaggaacaucccauccauucaauccagagguuuguuuggagccauugccgguuucauugaagggggguggacuggaaugguagaugggugguaugguuaucaucaucagaaugagcaaggaucuggcuaugcugcagaucaaaaaagcacacaaaaugccauuaacaggauuacaaacaaggugaauucuguaauugagaaaaugaacacucaauucacagcugugggcaaagaauucaacaaauuagaaagaaggauggaaaacuuaaauaaaaagguugaugauggguuucuagacauuuggacauauaaugcagaauuguugguucuacuggaaaaugaaaggacuuuggauuuccaugacuccaaugugaagaaucuguaugagaaaguaaaaagccaauuaaagaauaaugccaaagaaauaggaaacggguguuuugaauucuaucacaaguguaacaaugaaugcauggaaagugugaaaaauggaacuuaugacuauccgaaauauuccgaagaaucaaaguuaaacagggagaaaauugauggaguaaaauuggaaucaaugggagucuaucagauucuggcgaucuacucaacugucgcuaguucccugguucuuuuggucucccugggggcaaucagcuucuggauguguuccaaugggucuuugcaguguagaauaugcaucuga

SEQ ID NO: 32289 - RNA, 1701 nt, Artificial Sequence
  derived and/or modified CDS sequence (wt) from hemagglutinin__InfluenzaA__AAZ79615
augaagacuaucauugcuuugagcuacauucuaugucugguuuucgcucaaaaaauucccggaaaugacaacagcacggcaacgcugugcguugggcaccaugcaguaccaaacggaacgauagugaaaacaaucacgaaugaccaaauugaaguuacuaaugcuacugagcugguucagaguuccucaacagguggaauaugcgacaguccucaucagauccuugauggagaaaacugcacacuaauagaugcucuauugggagacccucagugugauggcuuccaaaauaagaaaugggaccuuuuuguugaacgcagcaaagccuacagcaacuguuacccuuaugaugugccggauuaugccucccuuaggucacuaguugccucauccggcacacuggaguuuaacaaugaaagcuucaauuggacuggagucacucaaaauggaacaagcucugcuugcaaaaggagaucuaauaacaguuucuuuaguagauugaauugguugacccacuuaaaauucaaauacccagcauugaacgugacuaugccaaacaaugaaaaauuugacaaauuguacauuugggggguucaccacccggguacggacaaugaccaaauuagccuauaugcucaagcuucaggaagaaucacagucucuaccaaaagaagccaacaaacuguaaucccgaauaucggaucuagacccaggguaagggauauccccagcagaauaagcaucuauuggacaauaguaaaaccgggagacauacuuuugauuaacagcacagggaaucuaauugcuccucgggguuacuucaaaauacgaagugggaaaagcucaauaaugagaucagaugcacccauuggcaaaugcaauucugaaugcaucacuccaaauggaagcauucccaaugacaaaccauuucaaaauguaaacaggaucacauauggggccugucccagauauguuaagcaaaacacucugaaauuggcaacagggaugcgaaauguaccagagaaacaaacuagaggcauauuuggcgcaaucgcggguuucauagaaaaugguugggagggaaugguggaugguugguacgguuucaggcaucaaaauucugagggaauaggacaagcagcagaucucaaaagcacucaagcagcaaucaaccaaaucaaugggaagcugaauagguugaucgggaaaaccaacgagaaauuccaucagauugaaaaagaauucucagaaguagaagggagaauucaggaccucgagaaauauguugaggacacuaaaauagaucucuggucauacaacgcggagcuucuuguugcccuggagaaccaacauacaauugaucuaacugacucagaaaugaacaaacuguuugaaagaacaaagaagcaacugagggaaaaugcugaggauaugggcaaugguuguuucaaaauauaccacaaaugugacaaugccugcauagggucaaucagaaauggaacuuaugaccaugauguauacagagaugaagcauuaaacaaccgguuccagaucaaagguguugagcugaagucaggauacaaagauuggauccuauggauuuccuuugccauaucauguuuuuugcuuuguguuguuuuguugggguucaucaugugggccugccaaaaaggcaacauuaggugcaacauuugcauuuga

SEQ ID NO: 32290 - RNA, 1701 nt, Artificial Sequence
  derived and/or modified CDS sequence (wt) from hemagglutinin__InfluenzaA__AAZ79627
augaagacuaucauugcuuugagcuacauucuaugucugguuuucgcucaaaaacuucccggaaaugacaacagcacggcaacgcugugccuugggcaccaugcaguaccaaacggaacgauagugaaaacaaucacgaaugaccaaauugaaguuacuaaugcuacugagcugguucagaguuccucaacagguggaauaugcgacaguccucaucagauccuugauggagaaaacugcacacuaauagaugcucuauugggagacccucagugugauggcuuccaaaauaagaaaugggaccuuuuuguugaacgcagcaaagccuacagcaacuguuacccuuaugaugugccggauuaugccucccuuaggucacuaguugccucauccggcacacuggaguuuaacaaugaaagcuucaauuggacuggagucacucaaaauggaacaagcucugcuugcaaaaggagaucuaauagcaguuucuuuaguagauugaauugguugacccacuuaaaauucaaauacccagcauugaaagugacuaugccaaacaaugaaaaauuugacaaauuguacauuugggggguucaccacccggguacggacaaugaccaaaucagccuauaugcucaagcaucaggaagaaucacagucucuaccaaaagaagccaacaaacuguaaucccgaauaucggaucuagacccaggguaagggauauccccagcagaauaagcaucuauuggacaauaguaaaaccgggagacauacuuuugauuaacagcacagggaaucuaauugcuccucgggguuacuucaaaauacgaagugggaaaagcucaauaaugagaucagaugcacccauuggcaaaugcaauucugaaugcaucacuccaaauggaagcauucccaaugacaaaccauuucaaaauguaaacaggaucacauauggggccugucccagauauguuaagcaaaacacucugaaauuggcaacagggaugcgaaauguaccagagaaacaaacuagaggcauauuuggcgcaaucgcggguuucauagaaaaugguugggagggaaugguggaugguugguacgguuucaggcaucaaaauucugagggaauaggacaagcagcagaucucaaaagcacucaagcagcaaucaaccaaaucaaugggaagcugaauagguugaucgggaaaaccaacgagaaauuccaucagauugaaaaagaauucucagaaguagaagggagaauucaggaccucgagaaauauguugaggacacuaaaauagaucucuggucauacaacgcggagcuucuuguugcccuggagaaccaacauacaauugaucuaacugacucagaaaugaacaaacuguuugaaagaacaaagaagcaacugagggaaaaugcugaggauaugggcaaugguuguuucaaaauauaccacaaaugugacaaugccugcauagggucaaucagaaauggaacuuaugaccaugauguauacagagaugaagcauuaaacaaccgguuccagaucaaagguguugagcugaagucaggauacaaagauuggauccuauggauuuccuuugccauaucauguuuuuugcuuuguguugcuuuguugggguucaucaugugggccugccaaaaaggcaacauuaggugcaacauuugcauuuga

SEQ ID NO: 32291 - RNA, 1701 nt, Artificial Sequence
  derived and/or modified CDS sequence (wt) from hemagglutinin__InfluenzaA__AAZ79941
augaagacuaucauugcuuugagcuacauucuaugucugguuuucgcucaaaaacuucccggaaaugacaacagcacggcaacgcugugccuugggcaccaugcaguaccaaacggaacgauagugaaaacaaucacgaaugaccaaauugaaguuacuaaugcuacugagcugguucagaguuccucaacagguggaauaugcgacaguccucaucagauccuugauggagaaaacugcacacuaauagaugcucuauugggagacccucagugugauggcuuccaaaauaagaaaugggaccuuuuuguugaacgcagcaaagccuacagcaacuguuacccuuaugaugugccggauuaugccucccuuaggucacuaguugccucauccggcacacuggaguuuaacaaugaaagcuucaauuggacuggagucacucaaaauggaacaagcucugcuugcaaaaggagaucuaauaacaguuucuuuaguagauugaauugguugacccacuuaaaauucaaauacccagcauugaacgugacuaugccaaacaaugaaaaauuugacaaauuguacauuugggggguucaccacccggguacggacaaugaccaaauuagccuauaugcucaagcuucaggaagaaucacagucucuaccaaaagaagccaacaaacuguaaucccgaauaucggaucuagacccaggguaagggauauccccagcagaauaagcaucuauuggacaauaguaaaaccgggagacauacuuuugauuaacagcacagggaaucuaauugcuccucgggguuacuucaaaauacgaagugggaaaagcucaauaaugagaucagaugcacccauuggcaaaugcaauucugaaugcaucacuccaaauggaagcauucccaaugacaaaccauuucaaaauguaaacaggaucacauauggggccugucccagauauguuaagcaaaacacucugaaauuggcaacagggaugcgaaauguaccagagaaacaaacuagaggcauauuuggcgcaaucgcggguuucauagaaaaugguugggagggaaugguggaugguugguacgguuucaggcaucaaaauucugagggaauaggacaagcagcagaucucaaaagcacucaagcagcaaucaaccaaaucaaugggaagcugaauagguugaucgggaaaaccaacgagaaauuccaucagauugaaaaagaauucucagaaguagaagggagaauucaggaccucgagaaauauguugaggacacuaaaauagaucucuggucauacaacgcggagcuucuuguugcccuggagaaccaacauacaauugaucuaacugacucagaaaugaacaaacuguuugaaagaacaaagaagcaacugagggaaaaugcugaggauaugggcaaugguuguuucaaaauauaccacaaaugugacaaugccugcauagggucaaucagaaauggaacuuaugaccaugauguauacagagaugaagcauuaaacaaccgguuccagaucaaagguguugagcugaagucaggauacaaagauuggauccuauggauuuccuuugccauaucauguuuuuugcuuuguguuguuuuguugggguucaucaugugggccugccaaaaaggcaacauuaggugcaacauuugcauuuga

SEQ ID NO: 32292 - RNA, 1701 nt, Artificial Sequence
  derived and/or modified CDS sequence (wt) from hemagglutinin__InfluenzaA__AAZ79944
augaagacuaucauugcuuugagcuacauucuaugucugguuuucgcucaaaaacuucccggaaaugacaacagcacggcaacgcugugccuugggcaccaugcaguaccaaacggaacgauagugaaaacaaucacgaaugaccaaauugaaguuacuaaugcuacugagcugguucagaguuccucaacagguggaauaugcgacaguccucaucagauccuugauggagaaaacugcacacuaauagaugcucuauugggagacccucagugugauggcuuccaaaauaagaaaugggaccuuuuuauugaacgcagcaaagccuacagcaacuguuacccuuaugaugugccggauuaugccucccuuaggucacuaguugccucauccggcacacuggaauuuaacaaugaaagcuucaauuggacuggagucacucaaaauggaacaagcucugcuugcaaaaggagaucuaauaacaguuucuuuaguagauugaauugguugacccacuuaaaauucaaauacccagcauugaacgugacuaugccaaacaaugaaaaauuugacaaauuguacauuugggggguucaccacccggguacggacaaugaccaaaucagccuauaugcucaagcuucaggaagaaucacagucucuaccaaaagaagccaacaaacuguaaucccgaauaucggaucuagacccaggguaagggauauccccagcagaauaagcaucuauuggacaauaguaaaaccgggagacauacuuuugauuaacagcacagggaaucuaauugcuccucgggguuacuucaaaauacgaagugggaaaagcucaauaaugagaucagaugcacccauuggcaaaugcaauucugaaugcaucacuccaaauggaagcauucccaaugacaaaccauuucaaaauguaaacaggaucacauauggggccugucccagauauguuaagcaaaacacucugaaauuggcaacagggaugcgaaauguaccagagaaacaaacuagaggcauauuuggcgcaaucgcggguuucauagaaaaugguugggagggaaugguggaugguugguacgguuucaggcaucaaaauucugagggaauaggacaagcagcagaucucaaaagcacucaagcagcaaucaaccaaaucaaugggaagcugaauagguugaucgggaaaaccaacgagaaguuccaucagauugaaaaagaauucucagaaguagaagggagaauucaggaccucgagaaauauguugaggacacuaaaauagaucucuggucauacaacgcggagcuucuuguugcccuggagaaccaacauacaauugaucuaacugacucagaaaugaacaaacuguuugaaagaacaaagaagcaacugagggaaaaugcugaggauaugggcaaugguuguuucaaaauauaccacaaaugugacaaugccugcauagggucaaucagaaauggaacuuaugaccaugauguauacagagaugaggcauugaacaaccgguuccagaucaaagguguugagcugaagucaggauacaaagauuggauccuauggauuuccuuugccauaucauguuuuuugcuuuguguugcuuuguugggguucaucaugugggccugccaaaaaggcaacauuaggugcaacauuugcauuuga

SEQ ID NO: 32293 - RNA, 1701 nt, Artificial Sequence
  derived and/or modified CDS sequence (wt) from hemagglutinin__InfluenzaA__AAZ79963
augaagacuaucauugcuuugagcuacauucuaugucugguuuuugcucaaaaacuucccggaaaugacaacagcacggcaacgcugugccuugggcaccaugcaguaccaaacggaacgauagugaaaacaaucacgaaugaccaaauugaagucacuaaugcuacugagcugguucagaguuccucaacagguggaauaugcgacaguccucaucagauccuugauggagaaaacugcacacuaauagaugcucuauugggagacccucagugugauggcuuccaaaauaagaaaugggaccuuuuuguugaacgcagcaaagccuacagcaacuguuacccuuaugaugugccggauuaugccucccuuagaucacuaguugccucauccggcacacuggaguuuaacaaugaaagcuucaauuggacuggagucacucaaaauggaacaagcucagcuugcaaaaggagaucuaauaacaguuucuuuaguagauugaauugguugacccacuuaaaauucaaauacccagcauugaacgugacuaugccaaacaaugaaaaauuugacaaacuguacauuugggggguucaccacccggguacggacaaugaccaaaucagccuauaugcucaagcaucaggaagaaucacagucucuaccaaaagaagccaacaaacuguaaucccgaguaucggaucuagacccaggauaagggauguccccagcagaauaagcaucuauuggacaauaguaaaaccgggagacauacuuuugauuaacagcacagggaaucuaauugcuccucgggguuacuucaaaauacgaagugggaaaagcucaauaaugagaucagaugcacccauuggcaaaugcaauucugaaugcaucacuccaaauggaagcauucccaaugacaaaccauuucaaaauguaaacaggaucacauauggggccugucccagauauguuaagcaaaacacucugaaauuggcaacagggaugcgaaauguaccagagaaacaaacuagaggcauauuuggcgcaaucgcggguuucauagaaaaugguugggagggaaugguggacgguugguacgguuucaggcaucaaaauucugagggaacaggacaagcagcagaucucaaaagcacucaagcagcaaucaaccaaaucaaugggaagcugaauagguugaucgggaaaacaaacgagaaauuccaucagauugaaaaagaauucucagaaguagaagggagaauucaggaccucgagaaauauguugaggacacuaaaauagaucucuggucauacaacgcggagcuucuuguggcccuggagaaccaacauacaauugaucuaacugacucagaaaugaacaaacuguuugaaagaacaaagaagcaacugagggaaaaugcugaggauaugggcaaugguuguuucaaaauauaccacaaaugugacaaugccugcauagggucaaucagaaauggaacuuaugaccaugauguauacagagaugaagcauuaaacaaccgguuccagaucaaagguguugaguugaagucaggauacaaagauuggauccuauggauuuccuuugccauaucauguuuuuugcuuuguguugcuuuguugggguucaucaugugggccugccaaaaaggcaacauuaggugcaacauuugcauuuga

SEQ ID NO: 32294 - RNA, 1701 nt, Artificial Sequence
  derived and/or modified CDS sequence (wt) from hemagglutinin__InfluenzaA__AAZ79974
augaagacuaucauugcuuugagcuacauucuaugucugguuuucgcucaaaaacuucccggaaaugacaacagcacggcaacgcugugccuugggcaccaugcaguaccaaacggaacgauagugaaaacaaucacgaaugaccaaauugaaguuacuaaugcuacugagcugguucagaguucuucaacagguggaauaugcgacaguccucaucagauccuugauggagaaaacugcacacuaauagaugcucuauugggagacccucagugugauggcuuccaaaauaagaaaugggaccuuuuuguugaacgcagcaaagccuacagcaacuguuacccuuaugaugugccggauuaugccucccuuaggucacuaguugccucauccggcacacuggaguuuaacaaugaaagcuucaauuggacuggagucacucaaaauggaacaagcucugcuugcaaaaggagaucuaauaacaguuucuuuaguagauugaauugguugacccauuuaaaauucaaauacccagcauugaacgugacuaugccaaacaaugaaaaauuugacaaauuguacauuugggggguucaccacccggguacgaacaaugaccaaaucagccuauaugcucaagcaucaggaagaaucacagucucuaccaaaagaagccaacaaacuguaaucccgaauaucggaucuagacccaggguaagggauauccccagcagaauaagcaucuauuggacaauaguaaaaccgggagacauacuuuugauuaacagcacagggaaucuaauugcuccucgggguuacuucaaaauacgaagugggaaaagcucaauaaugagaucagaugcacccauuggcaaaugcaauucugaaugcaucacuccaaauggaagcauucccaaugacaaaccauuucaaaauguaaacaggaucacauauggggccugucccagauauguuaagcaaaacacucugaaauuggcaacagggaugcgaaauguaccagagaaacaaacuagaggcauauuuggcgcaaucgcggguuucauagaaaaugguugggagggaaugguggaugguugguacgguuucaggcaucaaaauucugagggaauaggacaagcagcagaucucaaaagcacucaagcagcaaucaaccaaaucaaugggaagcugaauagguugaucgggaaaaccaacgagaaauuccaucagauugaaaaagaauucucagaaguagaagggagaauucaggaccucgagaaauauguugaggacacuaaaauagaucucuggucauacaacgcggagcuucuuguugcccuggagaaccaacauacaauugaucuaacugacucagaaaugaacaaacuguuugaaagaacaaagaagcaacugagggaaaaugcugaggauaugggcaaugguuguuucaaaauauaccacaaaugugacaaugccugcauagggucaaucagaaauggaacuuaugaccaugauguauacagagaugaagcauuaaacaaccgguuccagaucaaagguguugagcugaagucaggauacaaagauuggauccuauggauuuccuuugccauaucauguuuuuugcuuuguguugcuuuguugggguucaucaugugggccugccaaaaaggcaacauuaggugcaacauuugcauuuga

SEQ ID NO: 32295 - RNA, 1701 nt, Artificial Sequence
  derived and/or modified CDS sequence (wt) from hemagglutinin__InfluenzaA__AAZ79996
augaagacuaucauugcuuugagcuacauucuaugucugguuuucgcucaaaaacuucccggaaaugacaacagcacggcaacgcugugccuugggcaccaugcaguaccaaacggaacgauagugaaaacaaucacgaaugaccaaauugaaguuacuaaugcuacugagcugguucagaguuccucaacagguggaauaugcgacaguccucaucagauccuugauggagaaaacugcacacuaauagaugcucuauugggagacccucagugugauggcuuccaaaauaagaaaugggaccuuuuuauugaacgcagcaaagccuacagcaacuguuacccuuaugaugugccggauuaugccucccuuaggucacuaguugccucauccggcacacuggaauuuaacaaugaaagcuucaauuggacuggagucacucaaaauggaacaagcucugcuugcaaaaggagaucuaauaacaguuucuuuaguagauugaauugguugacccacuuaaaauucaaauacccagcauugaacgugacuaugccaaacaaugaaaaauuugacaaauuguacauuugggggguucaccacccggguacggacaaugaccaaaucagccuauaugcucaagcuucaggaagaaucacagucucuaccaaaagaagccaacaaacuguaaucccgaauaucggaucuagacccaggguaagggauauccccagcagaauaagcaucuauuggacaauaguaaaaccgggagacauacuuuugauuaacagcacagggaaucuaauugcuccucgggguuacuucaaaauacgaagugggaaaagcucaauaaugagaucagaugcacccauuggcaaaugcaauucugaaugcaucacuccaaauggaagcauucccaaugacaaaccauuucaaaauguaaacaggaucacauauggggccugucccagauauguuaagcaaaacacucugaaauuggcaacagggaugcgaaauguaccagagaaacaaacuagaggcauauuuggcgcaaucgcggguuucauagaaaaugguugggagggaaugguggaugguugguacgguuucaggcaucaaaauucugagggaauaggacaagcagcagaucucaaaagcacucaagcagcaaucaaccaaaucaaugggaagcugaauagguugaucgggaaaaccaacgagaaauuccaucagauugaaaaagaauucucagaaguagaagggagaauucaggaccucgagaaauauguugaggacacuaaaauagaucucuggucauacaacgcggagcuucuuguugcccuggagaaccaacauacaauugaucuaacugacucagaaaugaacaaacuguuugaaagaacaaagaagcaacugagggaaaaugcugaggauaugggcaaugguuguuucaaaauauaccacaaaugugacaaugccugcauagggucuaucagaaauggaacuuaugaccaugauguauacagagaugaggcauugaacaaccgguuccagaucaaagguguugagcugaagucaggauacaaagauuggauccuauggauuuccuuugccauaucauguuuuuugcuuuguguugcuuuguugggguucaucaugugggccugccaaaaaggcaacauuaggugcaacauuugcauuuga

SEQ ID NO: 32296 - RNA, 1701 nt, Artificial Sequence
  derived and/or modified CDS sequence (wt) from hemagglutinin__InfluenzaA__AAZ80007
augaagaccauuauugcuuugagccacauuuucugucugguucucggccaauaccuuccaggaaaugacaacagcacagcaacgcugugucugggacaucaugcagugccaaacggaacacuagugaaaacaaucacaaaugaucagauugaagugacuaaugcuacugagcuaguucagagcuccucaacggggaaaauaugcaacaauccucaucgaauccuugauggaauagacugcacacugauagaugcucuauugggggacccucauugugaugguuuucaaaaugagacaugggaccuuuucguugaacgcagcaaagcuuucagcaacuguuaccccuaugaugugccagauuaugccucccuuagaucacuaguugccucgucaggcacucuugaguuuaucacugaggguuucacuuggacuggggucacucagaaugggggaagcaaugcuugcaaaaggggaccugguagcgguuuuuucaguagacugaacugguugaccaaaucagaaagcacauauccagugcugaacgugacuaugccaaacaaugacaauuuugacaaacuauacauuuggggaguucaccacccgagcacgaaccaagaacaaaccagccuguauguucaagcaucagggagagucacagucucuaccaggagaagccagcaaacuauaaucccgaauaucgggucuagacccuggguaaggggucugucuaguagaauaagcaucuauuggacaauaguuaagccgggagacguacugguaauuaauaguaaugggaaccuaaucgcuccucgggguuauuucaaaaugcgcacugggaaaagcucaauaaugaggucagaugcaccuauugauaccuguauuucugaaugcaucacuccaaauggaagcauucccaacgacaagcccuuucaaaacguaaacaagaucacauauggagcaugccccaaguauguuaagcaaaacacccugaaguuggcaacagggaugcggaauguaccagagaaacaaacuagaggccuauucggcgcaauagcagguuucauagaaaaugguugggagggaaugauagacgguugguacgguuucaggcaucaaaauucugagggcacaggacaagcagcagaucuuaaaagcacucaagcagccaucgaucaaaucaaugggaaauugaauaggguaauugagaagacaaacgagaaauuccaucaaaucgaaaaggaauucucagaaguagaagggagaauucaggaccucgagaaauacguugaagacacuaaaauagaucucuggucuuacaaugcggagcuucuugucgcucuggagaaucaacauacaauugaucugacugacucggaaaugaacaagcuguuugaaaaaacaaggaggcaacugagggaaaaugcugaagacaugggcaaugguugcuucaaaauauaccacaaaugugacaacgcuugcauagagucaaucagaaaugggacuuaugaccaugauguauacagagacgaagcauuaaacaaccgguuucagaucaaagguguugaacugaagucuggauacaaagacuggauccuguggauuuccuuugccauaucauguuuuuugcuuuguguuguuuugcugggguucaucaugugggccugccagagaggcaacauuaggugcaacauuugcauuuga

SEQ ID NO: 32297 - RNA, 1701 nt, Artificial Sequence
  derived and/or modified CDS sequence (wt) from hemagglutinin__InfluenzaA__AAZ80017
augaagacuaucauugcuuugagcuacauucuaugucugguuuucgcucaaaaacuucccggaaaugacaacagcacggcaacgcugugccuugggcaccaugcaguaccaaacggaacgauagugaaaacaaucacgaaugaccaaauugaaguuacuaaugcuacugagcugguucagaguuccucaacaggugggauaugcgacaguccucaucagauccuugauggagaaaacugcacacuaauagaugcucuauugggagacccucagugugauggcuuccaaaauaagaaaugggaccuuuuuguugaacgcagcaaagccuacagcaacuguuacccuuaugaugugccggauuaugccucccuuaggucacuaguugccucauccggcacacuggaguuuaacaaugaaagcuucaauuggacuggagucacucaaaauggaacaagcucugcuugcaaaaggagaucuaauaacaguuucuuuaguagauugaauugguugacccacuuaaaauucaaauacccagcauugaacgugacuaugccaaacaaugaaaaauuugacaaauuguacauuugggggguucaccacccggguacggacaaugaccaaauuagccuauaugcucaagcuucaggaagaaucacagucucuaccaaaagaagccaacaaacuguaaucccgaauaucggaucuagacccaggguaagggauauccccagcagaauaagcaucuauuggacaauaguaaaaccgggagacauacuuuugauuaacagcacagggaaucuaauugcuccucgggguuacuucaaaauacgaagugggaaaagcucaauaaugagaucagaugcacccauuggcaaaugcaauucugaaugcaucacuccaaauggaagcauucccaaugacaaaccauuucaaaauguaaacaggaucacauauggggccugucccagauauguuaagcaaaacacucugaaauuggcaacagggaugcgaaauguaccagagaaacaaacuagaggcauauuuggcgcaaucgcggguuucauagaaaaugguugggagggaaugguggaugguugguacgguuucaggcaucaaaauucugagggaauaggacaagcagcagaucucaaaagcacucaagcagcaaucaaccaaaucaaugggaagcugaauagguugaucgggaaaaccaacgagaaauuccaucagauugaaaaagaauucucagaaguagaagggagaauucaggaccucgagaaauauguugaggacacuaaaauagaucucuggucauacaacgcggagcuucuuguugcccuggagaaccaacauacaauugaucuaacugacucagaaaugaacaaacuguuugaaagaacaaagaagcaacugagggaaaaugcugaggauaugggcaaugguuguuucaaaauauaccacaaaugugacaaugccugcauagggucaaucagaaauggaacuuaugaccaugauguauacagagaugaagcauuaaacaaccgguuccagaucaaagguguugagcugaagucaggauacaaagauuggauccuauggauuuccuuugccauaucauguuuuuugcuuuguguuguuuuguugggguucaucaugugggccugccaaaaaggcaacauuaggugcaacauuugcauuuga

SEQ ID NO: 32298 - RNA, 1701 nt, Artificial Sequence
  derived and/or modified CDS sequence (wt) from hemagglutinin__InfluenzaA__AAZ80030
augaagacuaucauugcuuugagcuacauucuaugucugguuuucgcucaagaacuucccggaaaugacaacagcacggcaacgcugugccuugggcaccaugcaguaccaaacggaacgauagugaaaacaaucacgaaugaccaaauugaaguuacuaaugcuacugagcugguucagaguuccucaacagguggaauaugcgacaguccucaucagauccuugauggagaaaacugcacacuaauagaugcucuauugggagacccucagugugauggcuuccaaaauaagaaaugggaccuuuuuguugaacgcagcaaagccuacagcaacuguuacccuuaugaugugccggauuaugccucccuuaggucacuaguugccucauccggcacacuggaguuuaacaaugaaagcuucaauuggacuggagucacucaaaauggaacaagcucugcuugcaaaaggagaucuaauaacaguuucuuuaguagauugaauugguugacccacuuaaaauucaaauacccagcauugaacgugacuaugccaaacaaugaaaaauuugacaaauuguacauuugggggguucaccacccggguacggacaaugaccaaaccagccuauaugcucaagcaucaggaagaaucacagucucuaccaaaagaagccaacaaacuguaaucccgaauaucggaucuagacccaggguaagggauauccccagcagaauaagcaucuauuggacaauaguaaaaccgggagacauacuuuugauuaacagcacagggaaucuaauugcuccucgggguuacuucaaaauacgaagugggaaaagcucaauaaugagaucagaugcacccauuggcaaaugcaauucugaaugcaucacuccaaauggaagcauucccaaugacaaaccauuucaaaauguaaacaggaucacauauggggccugucccagauauguuaagcaaaacacucugaaauuggcaacagggaugcgaaauguaccagagaaacaaacuagaggcauauuuggcgcaaucgcggguuucauagaaaaugguugggagggaaugguggaugguugguacgguuuuaggcaucaaaauucugagggaauaggacaagcagcagaucucaaaagcacucaagcagcaaucaaccaaaucaaugggaagcugaauagguugaucggaaaaaccaacgagaaauuccaucagauugaaaaagaauucucagaaguagaagggagaauucaggaccucgagaaauauguugaggacacuaaaauagaucucuggucauacaacgcggagcuucuuguugcccuggagaaccaacauacaauugaucuaacugacucagaaaugaacaaacuguucgaaagaacaaagaagcaacugagggaaaaugcugaggauaugggcaaugguuguuucaaaauauaccacaaaugugacaaugccugcauagggucaaucagaaauggaacuuaugaccaugauguauacagagaugaagcauuaaacaaccgguuccagaucaaagguguugagcugaagucaggauacaaagauuggauccuauggauuuccuuugccauaucauguuuuuugcuuuguguugcuuuguugggguucaucaugugggccugccaaaaaggcaacauuaggugcaacauuugcauuuga

SEQ ID NO: 32299 - RNA, 1701 nt, Artificial Sequence
  derived and/or modified CDS sequence (wt) from hemagglutinin__InfluenzaA__AAZ83242
augaagacuaucauugcuuugagcuacauucuaugucugguuuucgcucaaaaacuucccggaaaugacaacagcacggcaacgcugugccuugggcaccaugcaguaccaaacggaacgauagugaaaacaaucacgaaugaccaaauugaaguuacuaaugcuacugagcugguucagaguuccucaacaggugaaauaugcgacaguccucaucaaauccuugauggagaaaacugcacacuaauagaugcucuauugggagacccucagugugauggcuuccaaaauaagaaaugggaccuuuuuguugaacgcaacaaagccuacagcaacuguuacccuuaugaugugccggauuaugccucccuuaggucacuaguugccucauccggcacacuggaguuuaacaaugaaagcuucaauuggacuggagucacucagaauggaacaagcucugcuugcaaaaggagaucuaauaaaaguuucuuuaguagauugaauugguugacccacuuaaaauacaaauacccagcauugaacgugacuaugccaaacaaugaaaaauuugacaaauuguacauuugggggguucaucacccggguacggacagugaccaaaucaaccuauaugcucaagcaucaggaagaaucacaguuucuaccaaaagaagccaacaaacuguaaucccgaauaucggauauagacccaggguaagggauguccccagcagaauaagcaucuauuggacaauaguaaaaccgggagacauacuuuugauuaacagcacagggaaucuaauugcuccucgggguuacuucaaaauacgaagugggaaaagcucaauaaugagaucagaugcacccauuggcaaaugcaauucugaaugcaucacuccaaauggaagcauucccaaugacaaaccauuucaaaauguaaacaggaucacauauggggccugucccagauauguuaagcaaaacacccugaaauuggcaacagggaugcgaaauguaccagagaaacaaacuagaggcauauuuggcgcaaucgcggguuucauagaaaaugguugggagggaaugguggacgguugguacgguuucaggcaucaaaauucugagggcacaggacaagcagcagaucucaaaagcacucaagcagcaaucaaccaaaucaaugggaaacugaauagguuaaucgggaaaacaaacgaaaaauuccaucagauugaaaaagaauucucagaaguagaagggagaauucaggaccucgagaaauauguugaggacacuaaaauagaucucuggucauacaacgcggagcuucuuguugcccuggagaaccaacauacaauugaucuaacugacucagaaaugaacaaacuguuugaaagaacaaagaagcaacugagggaaaaugcugaggauaugggcaaugguuguuucaaaauauaccacaaaugugacaaugccugcauagggucaaucagaaauggaacuuaugaccaugauguauacagagaugaagcauuaaacaaccgguuccagaucaaagguguugagcugaagucaggauacaaagauuggauccuauggauuuccuuugccauaucauguuuuuugcuuuguguugcuuuguugggguucaucaugugggccugccaaaaaggcaacauuaggugcaacauuugcauuuga

SEQ ID NO: 32300 - RNA, 1701 nt, Artificial Sequence
  derived and/or modified CDS sequence (wt) from hemagglutinin__InfluenzaA__AAZ83266
augaagacuaucauugcuuugagcuacauuuuaugucugguuuucgcucaaaaacuucccggaaaugacaacagcacggcaacgcugugccuggggcaccaugcagugccaaacggaacgcuagugaaaacaaucacgaaugaccaaauugaagugacuaaugcuaaugagcugguucagaguuccucaacagguagaauaugcgacaguccucaccaaauccuugauggagaaaacugcacacuaauagaugcucuauugggagacccucguugugauggcuuccaaaauaaggaaugggaccuuuuuguugaacgcagcaaagccuacagcaacuguuacccuuaugaugugccggauuaugccucccuuaggucacuaguugccucauccggcacacuggaguuuaacaaugaaagcuucaauuggacuggagucgcucagaauggaacaagcucugcuugcaaaaggagaucuaauaaaaguuucuuuaguagauugaauugguugcaccaauuaaaauacaaauauccagcacugaacgugacuaugccaaacaaugaaaaauuugacaaauuguacauuugggggguucaccacccgaguacggacagugaccaaaucagccuauaugcucaagcaucagggagagucacagucucuaccaaaagaagccaacaaacuguaaucccgaauaucggaucuagacccuggguaaggggugucuccagcagaauaagcaucuauuggacaauaguaaaaccgggagacauacuuuugauuaacagcacagggaaucuaauugcuccucgggguuacuucaaaauacgaagugggaaaagcucaauaaugaggucagaugcacccauuggcaaaugcaauucugaaugcaucacuccaaauggaagcauucccaaugacaaaccauuucaaaauguaaacaggaucacauauggggccugucccagauauguuaagcaaaacacucugaaauuggcaacagggaugcggaauguaccagagaaacaaacuagaggcauauucggcgcaaucgcggguuucauagaaaaugguugggagggaaugguggacgguugguacgguuucaggcaucaaaauucugagggcacaggacaagcagcagaucuuaaaagcacucaagcagcaaucaaccaaaucaacgggaaacugaauagguuaaucgagaaaacgaacgagaaauuccaucaaauugaaaaagaauucucagaaguagaagggagaauucaggaccucgagaaauauguugaggacacuaaaauagaucucuggucguacaacgcggagcuucuuguugcccuggagaaccaacauacaauugaucuaacugacucagaaaugaacaaacuguuugaaagaacaaagaagcaacugagggaaaaugcugaggauaugggcaaugguuguuucaaaauauaccacaaaugugacaaugccugcauagggucaaucagaaauggaacuuaugaccaugauguauacagagacgaagcauuaaacaaccgguuccagaucaaagguguugagcugaagucaggauacaaagauuggauccuauggauuuccuuugccauaucauguuuuuugcuuuguguuguuuugcugggguucaucaugugggccugccaaaaaggcaacauuaggugcaacauuugcauuuga

SEQ ID NO: 32301 - RNA, 1701 nt, Artificial Sequence
  derived and/or modified CDS sequence (wt) from hemagglutinin__InfluenzaA__AAZ83277
augaagacuaucauugcuuugagcuacauuuuaugucugguuuucgcucaaaaacuucccggaaaugacaacagcacggcaacgcugugccuggggcaccaugcagugccaaacggaacgcuagugaaaacaaucacgaaugaccaaauugaaguaacuaaugcuacugagcugguucagaguuccucaacagguagaauaugcgacaguccucaccaaauccuugauggagaaaacugcacacuaauagaugcucuauugggagacccucauugugauggcuuccaaaauaaggaaugggaccuuuuuguugaacgcagcaaagccuacagcaacuguuacccuuaugaugugccggauuaugccucccuuaggucacuaguugccucauccggcacacuggaguuuaacaaugaaagcuucaauuggacuggagucgcucagaauggaacaagcucugcuugcaaaaggagaucuaauaaaaguuucuuuaguagauugaauugguugcaccaauuaaaauacaaauauccagcacugaacgugacuaugccaaacaaugaaaaauuugacaaauuguacauuugggggguucaccacccgaguacggacagugaccaaaucagccuauaugcucaagcaucagggagagucacagucucuaccaaaagaagccaacaaacuguaaucccgaauaucggaucuagacccuggguaaggggugucuccagcagaauaagcaucuauuggacaauaguaaaaccgggagacauacuuuugauuaacagcacagggaaucuaauugcuccccgggguuacuucaaaauacgaagugggaaaagcucaauaaugaggucagaugcacccauuggcaaaugcaauucugaaugcaucacuccaaauggaagcauucccaaugacaaaccauuucaaaauguaaacaggaucacauauggggccugucccagauauguuaagcaaaacacucugaaauuggcaacagggaugcggaauguaccagagaaacaaacuagaggcauauucggcgcaaucgcggguuucauagaaaaugguugggagggaaugguggacgguugguacgguuucaggcaucaaaauucugagggcacaggacaagcagcagaucuuaaaagcacucaagcagcaaucaaccaaaucaacgggaaacugaauagguuaaucgagaaaacgaacgagaaauuccaucaaauugaaaaagaauucucagaaguagaagggagaauucaggaccucgagaaauauguugaggacacuaaaauagaucucuggucguacaacgcggagcuucuuguugcccuggagaaccaacauacaauugaucuaacugacucagaaaugaacaaacuguuugaaagaacaaagaagcaacugagggaaaaugcugaggauaugggcaaugguuguuucaaaauauaccacaaaugugacaaugccugcauagggucaaucagaaauggaacuuaugaccaugauguauacagagacgaagcauuaaacaaccgguuccagaucaaagguguugagcugaagucaggauacaaagauuggauccuauggauuuccuuugccauaucauguuuuuugcuuuguguuguuuugcugggguucaucaugugggccugccaaaaaggcaacauuaggugcaacauuugcauuuga

SEQ ID NO: 32302 - RNA, 1701 nt, Artificial Sequence
  derived and/or modified CDS sequence (wt) from hemagglutinin__InfluenzaA__AAZ83288
augaagacuaucauugcuuugagcuacauuuuaugucugguuuucgcucaaaaacuucccguaaaugacaacagcacggcaacgcugugccugggacaccaugcagugccaaacggaacgcuagugaaaacaaucacgaaugaccacauugaagugacuaaugcuacugagcugguucagaguuccucaacagguagaauaugcgacaguccucaccaaauccuugauggagaaaacugcacacuaauagaugcucuauugggagacccucauugugauggcuuccaaaauaaggaaugggaccuuuuuguugaacgcagcacagccuacagcaacuguuacccuuaugaugugccggauuaugccucccuuaggucacuaguugccucauccggcacacuggaguuuaacaaugaaagcuucaauuggacuggagucgcucagaauggaacaagcucugcuugcaaaaggagaucuauuaaaaguuucuuuaguagauugaauugguugcaccaauuaaaauacaaauauccagcacugaacgugacuaugccaaacaaugaaaaauuugacaaauuguacauuugggggguucaccacccgaguacggacagugaccaaaucagccuauaugcucaagcaucagggagagucacagucucuaccaaaagaagccaacaaacuguaaucccgaauaucggaucuagacccuggguaaggggugucuccagcagaauaagcaucuauuggacaauaguaaaaccgggagacauacuuuugauuaacagcacagggaaucuaauugcuccucgggguuacuucaaaauacgaagugggaaaagcucaauaaugaggucaaaugcacccauuggcaaaugcaauucugaaugcaucacuccaaauggaagcauucccaaugacaaaccauuucaaaauguaaacaggaucacauauggggccugucccagauauguuaagcaaaacacucugaaauuggcaacagggaugcggaauguaccagagaaacaaacuagaggcauauucggcgcaaucgcggguuucauagaaaaugguugggaaggaaugguggacgguugguacgguuucaggcaucaaaauucugagggcacaggacaagcagcagaucuuaaaagcacucaagcagcaaucaaccaaaucaacgggaaacugaauagguuaaucgagaaaacaaacgagaaauuccaucaaauugaaaaagaauucucagaaguagaagggagaauucaggaccucgagaaauauguugaggacacuaaaauagaucucuggucguacaacgcggagcuucuuguugcccuggagaaccaacauacaauugaucuaacugacucagaaaugaacaaacuguuugaaagaacaaggaagcaacugagggaaaaugcugaggauaugggcaaugguuguuucaaaauauaccacaaaugugacaaugccugcauagggucaaucagaaauggaacuuaugaccaugauguauacagagacgaagcauuaaacaaccgguuccagaucaaagguguugagcugaagucaggauacaaagauuggauccuauggauuuccuuugccauaucauguuuuuugcuuuguguuguuuugcugggguucaucaugugggccugccaaaaaggcaacauuaggugcaacauuugcauuuga

SEQ ID NO: 32303 - RNA, 1701 nt, Artificial Sequence
  derived and/or modified CDS sequence (wt) from hemagglutinin__InfluenzaA__AAZ83312
augaagacuaucauugcuuugagcuacauuuuaugucugguuuucgcucaaaaacuuccuggaaaugacaacagcacggcaacgcugugccugggacaccaugcagugccaaacggaacgcuagugaaaacaaucacgaaugaccaaauugaagugacuaaugcuacugagcugguucagaguuccucaacagguagaauaugcgacaguccucaccaaauccuugauggagaaaacugcacacugauagaugcucuauugggagacccccauugugauggcuuccaaaauaaggaaugggaccuuuuuguugaacgcagcaaagccuacagcaacuguuacccuuaugaugugccggauuaugccucccuuaggucacuaguugccucauccggcacccuggaguuuaacaaugaaagcuucaauuggacuggaguugcucagaauggaacaagcucugcuugcaaaaggagaucuauuaaaaguuucuuuaguagauugaauugguugcaccaauuaaaauacaaauauccagcacugaacgugacuaugccaaacaaugacaaauuugacaaauuguacauuugggggguucaucacccgaguacggacagugaccaaaccagccuauaugcucaagcaucagggagagucacagucucuaccaaaagaagccaacaaacuguaaucccgaauaucggaucuagacccuggguaaggggugucuccagcagaauaagcaucuauuggacaauaguaaaaccgggagacauacuuuugauuaacagcacagggaaucuaauugcuccucgggguuacuucaaaauacgaagugggaaaagcucaauaauaaggucagaugcacccauuggcaaaugcaauucugaaugcaucacuccaaauggaagcauucccaaugacaaaccauuucaaaauguaaacaggauaacauauggggccugucccagauauguuaagcaaaacacucugaaauuggcaacagggaugcggaauguaccagagaaacaaacuagaggcaucuucggcgcaaucgcggguuucauagaaaaugguugggagggaaugguggacgguugguacgguuucaggcaucaaaauucugagggcacaggacaagcagcagaucuuaaaagcacucaagcagcaaucaaccaaaucaacgggaaacugaauagguuaaucgagaaaacgaacgagaaauuccaucaaauugaaaaagaauucucagaaguagaagggagaauucaggaccucgagaaauauguugaggacacuaaaauagaucucuggucguacaacgcggagcuucuuguugcccuggagaaccaacauacaauugaucuaacugacucagaaaugaacaaacuguuugaaagaacaaggaagcaacugagggaaaaugcugaggauaugggcaaugguuguuucaaaauauaccacaaaugugacaaugccugcauagggucaaucagaaauggaacuuaugaccaugauguauacagagacgaagcauuaaacaaccgguuccagaucaaagguguugagcugaagucaggauacaaagauuggauccuauggauuuccuuugccauaucauguuuuuugcuuuguguuguuuugcugggguucaucaugugggccugccaaaaaggcaacauuaggugcaacauuugcauuuga

SEQ ID NO: 32304 - RNA, 1701 nt, Artificial Sequence
  derived and/or modified CDS sequence (wt) from hemagglutinin__InfluenzaA__AAZ83323
augaagacuaucauugcuuugagcuacauuuuaugucugguuuucgcucaaaaacuucccggaaaugacaacagcacggcaacgcugugccugggacaccaugcagugccaaacggaacgcuagugaaaacaaucacgaaugaccaaauugaagugacuaaugcuacugagcugguucagaguuccucaacagguagaauaugcgacaguccucaccgaauccuugauggagaaaacugcacacugauagaugcucuauugggagacccucauugugauggcuuccaaaauaaggaaugggaccuuuuuguugaacgcagcaaagccuacagcaacuguuacccuuaugaugugcaggauuaugccucccuuaggucacuaguugccucauccggcacccuggaguuuaacaaugaaagcuucaauuggacuggagucgcucagaauggaacaagcuaugcuugcaaaaggagaucuauuaaaaguuucuuuaguagauugaauugguugcaccaauuaaaauacaaauauccagcacugaacgugacuaugccaaacaaugacaaauuugacaaauuguacauuugggggguucaccacccgaguacggacagugaccaaaccagccuauaugcucaagcaucagggagagucacagucucuaccaaaagaagccaacaaacuguaaucucgaauaucggaucuagacccuggguaaggggugucuccagcagaauaagcaucuauuggacaauaguaaaaccgggagacauacuuuugauuaccagcacagggaaucuaauugcuccucgggguuacuucaaaauacgaagugggaaaagcucaauaaugaggucagaugcacccauuggcaaaugcaauucugaaugcaucacuccaaauggaagcauucccaaugacaaaccauuucaaaauguaaacaggaucacauauggggccugucccagauauguuaagcaaaacacucugaaauuggcaacagggaugcggaauguaccagagaaacaaacuagaggcauauucggcgcaaucgcagguuucauagaaaaugguugggagggaaugguggacgguugguacgguuucaggcaucaaaauucugagggcacaggacaagcagcagaucuuaaaagcacucaagcagcaaucaaccaaaucaacgggaaacugaauagguuaaucgagaaaacgaacgagaaauuccaucaaauugaaaaagaauucucagaaguagaagggagaauucaggaccucgagaaauauguugaggacacuaaaauagaucucuggucguacaacgcggagcuucuuguugcccuggagaaccaacauacaauugaucuaacugacucagaaaugaacaaacuguuugaaagaacaaggaagcaacugagggaaaaugcugaggauaugggcaaugguuguuucaaaauauaccacaaaugugacaaugccugcauagggucaaucagaaauggaacuuaugaccaugauguauacagagacgaagcauuaaacaaccgguuccagaucaaagguguugagcugaagucaggauacaaagauuggauccuauggauuuccuuugccauaucauguuuuuugcuuuguguuguuuugcugggguucaucaugugggccugccaaaaaggcaacauuaggugcaacauuugcauuuga

SEQ ID NO: 32305 - RNA, 1701 nt, Artificial Sequence
  derived and/or modified CDS sequence (wt) from hemagglutinin__InfluenzaA__AAZ83371
augaagacuaucauugcuuugagcuacauucuaugucugguuuucgcucaaaaacuucccggaaaugacaacagcacggcaacgcugugccuugggcaccaugcaguaccaaacggaacgauagugaaaacaaucacgaaugaccaaauugaaguuacuaaugcuacugagcugguucagaguuccucaacagguggaauaugcgacaguccucaucagauccuugauggagaaaacugcacacuaauagaugcucuauugggagacccucagugugauggcuuccaaaauaagaaaugggaccuuuuuguugaacgcagcaaagccuacagcaacuguuacccuuaugaugugccggauuaugccucccuuaggucacuaguugccucauccggcacacuggaguuuaacaaugaaagcuucaauuggacuggagucacucaaaauggaacaagcucugcuugcaaaaggagaucuaauaacaguuucuuuaguagauugaauugguugacccauuuaaaauucaaauacccagcauugaacgugacuaugccaaacaaugaaaaauuugacaaauuguacauuugggggguucaccacccggguacgaacaaugaccaaaucagccuauaugcucaagcaucaggaagaaucacagucucuaccaaaagaagccaacaaacuguaaucccgaauaucggaucuagacccaggguaagggauauccccagcagaauaagcaucuauuggacaauaguaaaaccgggagacauacuuuugauuaacagcacagggaaucuaauugcuccucgggguuacuucaaaauacgaagugggaaaagcucaauaaugagaucagaugcacccauuggcaaaugcaauucugaaugcaucacuccaaauggaagcauucccaaugacaaaccauuucaaaauguaaacaggaucacauauggggccugucccagauauguuaagcaaaacacucugaaauuagcaacagggaugcgaaauguaccagagaaacaaacuagaggcauauuuggcgcaaucgcggguuucauagaaaaugguugggagggaaugguggaugguugguacgguuucaggcaucaaaauucugagggaauaggacaagcagcagaucucaaaagcacucaagcagcaaucaaccaaaucaaugggaagcugaauagguugaucgggaaaaccaacgagaaauuccaucagauugaaaaagaauucucagaaguagaagggagaauucaggaccucgagaaauauguugaggacaccaaaauagaucucuggucauacaacgcggagcuucuuguugcccuggagaaccaacauacaauugaucuaacugacucagaaaugaacaaacuguuugaaagaacaaagaagcaacugagggaaaaugcugaggauaugggcaaugguuguuucaaaauauaccacaaaugugacaaugccugcauagggucaaucagaaauggaacuuaugaccaugauguauacagagaugaagcauuaaacaaccgguuccagaucaaagguguugagcugaagucaggauacaaagauuggauccuauggauuuccuuugccauaucauguuuuuugcuuuguguugcuuuguugggguucaucaugugggccugccaaaaaggcaacauuaggugcaacauuugcauuuga

SEQ ID NO: 32306 - RNA, 1701 nt, Artificial Sequence; identical to SEQ ID NO: 32272
  derived and/or modified CDS sequence (wt) from hemagglutinin__InfluenzaA__AAZ83688

SEQ ID NO: 32307 - RNA, 1698 nt, Artificial Sequence
  derived and/or modified CDS sequence (wt) from hemagglutinin__InfluenzaA__ABA06510
augaaaguaaaacuacugauccuguuauguacauuuacagcuacauaugcagacacaauauguauaggcuaccaugccaacaacucaaccgacacuguugacacaguacuugagaagaaugugacagugacacacucugucaaccuacuugaggacagucacaauggaaaacugugccuacuaaaaggaauagccccccuacaauuggguaauugcagcguugccggauggaucuuaggaaacccagaaugcgaauuacugauugccaaggaaucaugguccuacauuguagaaacaccaaauccugagaauggagcauguuacccaggguauuucgccgacuaugaggagcuaagggagcaauugaguucaguaucuucauuugagagauucgaaauauuccccaaagaaagcucauggcccaaccacaccguaaccggaguaucagcaucaugcucccauaaugggaaaagcaguuuuuacagaaauuugcuauggcugacggggaagaaugguuuguacccaaaccugagcaaguccuaugcaaacaacaaagagaaagaaguccuuauacuaugggguguucaucacccgccuaacauaggggaccaaaggacccucuaucacacagaaaaugcuuaugucucuguagugucuucacauuauagcagaagauucaccccagaaauaaccaaaaggcccaaaguaagagaucaggaaggaagaaucaacuacuacuggacucugcuggaacccggggauacaauaauauuugaggcaaauggaaaucuaauagcgccaugguaugcuuucgcacugaguagaggcuuuggaucaggaaucaucaccucaaaugcaccaauggaugaaugugaugcgaagugucaaacaccucagggagcuauaaacagcagucuuccuuuccagaauguacacccagucacaauaggagaguguccaaaguaugucaggagugcaaaauuaaggaugguuacaggacuaaggaacaucccauccauucaauccagagguuuguuuggagccauugccgguuucauugaagggggguggacuggaaugguagaugggugguaugguuaucaucaucagaaugagcaaggaucuggcuaugcugcagaucaaaaaagcacacaaaaugccauuaacgggauuacaaacaaggugaauucuguaauugagaaaaugaacacucaauucacagcugugggcaaagaauucaacaaauuggaaagaaggauggaaaacuuaaauaaaaagguugaugauggguuucuagacauuuggacauauaaugcagaauuguugguucuacuggaaaaugaaaggacuuuggauuuccacgacuccaaugugaagaaucuguacgagaaaguaaaaagccaauuaaagaauaaugccaaagaaauaggaaauggguguuuugaauucuaucacaaguguaacaaugaaugcauggagagugugaaaaauggaacuuaugacuauccaaaauauuccgaagaaucaaaguuaaacagggaaaaaauugauggagugaaauuggacucaaugggggucuaucagauucuggcgaucuacucaacugucgccaguucccugguucuuuuggucucccugggggcaaucagcuucuggauguguuccaaugggucuuugcaguguagaauaugcaucuga

SEQ ID NO: 32308 - RNA, 1698 nt, Artificial Sequence
  derived and/or modified CDS sequence (wt) from hemagglutinin__InfluenzaA__ABA08464
augaaagcaaaacuacugguccuguuauguacauuuacagcuacauacgcagacacaauauguauaggcuaccaugccaacaacucaacagacacuguugacacaguacuugagaagaaugugacagugacacacucugucaaccuacuugaggacagucacaauggaaaacuaugucuacuaaaaggaauagccccacuacaauuggguaauugcagcguugccggauggaucuuaggaaacccagaaugcgaauuacugauuuccaaggaaucaugguccuacauuguagaaacaccaaaucccgagaauggaacauguuacccaggguauuucgccgacuaugaggaacugagggagcaauugaguucaguaucuucauuugagagauucgaaauauuccccaaaggaagcucauggcccaaccacaccguaaccggaguaucagcaucaugcucccauaaugggaaaagcaguuuuuacagaaauuugcuauggcugacggggaagaaugguuuguacccaaaccugagcauguccuauguaaacaacaaagagaaagaaguccuugugcuaugggguguucaucacccaccuaacauaggggaccaaagggcccucuaccauacagaaaaugcuuaugucucuguagugucuucacauuauagcagaagauucaccccagaaauagccaaaagacccaaaguaagagaucaggaaggaagaaucaacuacuacuggacucugcuggaacccggggacacaauaauauuugaggcaaauggaaaucuaauagcgccaugguaugcuuucgcacugaguagaggcuuuggaucaggaaucaucaccucaaaugcaccaauggaugaaugugaugcgaagugucaaacaccucagggagcuauaaacaguagucuuccuuuccagaauguacacccaguuacaauaggagaguguccaaaguaugucaggagugcaaaauuaaggaugguuacaggacuaaggaacaucccauccauucaauccagagguuuguuuggagccauugccgguuucauugaagggggguggacuggaaugguagaugggugguaugguuaucaucaucagaaugagcaaggaucuggcuaugcugcagaucaaaaaagcacacaaaaugccauuaacgggauuacgaacaaggugaauucuguaauugagaaaaugaacacucaauucacagcugugggcaaagaauucaacaaauuagaaagaaggauggaaaacuuaaauaaaaaaguugaugauggguuucuagacauuuggacauauaaugcagaauuguugguucuacuggaaaaugaaaggacuuuggauuuccaugacuccaaugugaagaaucuguaugagaaaguaaaaagccaauuaaagaauaaugccaaagaaauaggaaacggguguuuugaauucuaucacaaguguaacaaugaaugcauggaaagugugaaaaauggaacuuaugacuauccaaaauauuccgaagaaucaaaguuaaacagggagaaaauugauggaguaaaauuggaaucaaugggagucuaucagauucuggcgaucuacucaacugucgccaguucccugguucuuuuggucucccugggggcaaucagcuucuggauguguuccaaugggucuuugcaguguagaauaugcaucuga

SEQ ID NO: 32309 - RNA, 1698 nt, Artificial Sequence
  derived and/or modified CDS sequence (wt) from hemagglutinin__InfluenzaA__ABA08486
augaaagcaaaacuacugguccuguuauguacauuuacagcuacauacgcagacacaauauguauaggcuaccaugccaacaacucaaccgacacuguugacacaguacuugagaagaaugugacagugacacacucugucaaccuacuugaggacagucacaauggaaaacuaugucuacuaaaaggaauagccccacuacaauuggguaauugcagcguugccggauggaucuuaggaaacccagaaugcgaauuacugauuuccaaggaaucaugguccuacauuguagaaacaccaaaucccgagaauggaacauguuacccaggguauuucgccgauuaugaggaacugagggagcaauugaguucaguaucuucauuugagagauucgaaauauuccccaaaggaagcucauggcccaaccacaccguaaccggaguaucagcaucaugcucccauaaugggaaaagcaguuuuuacagaaauuugcuauggcugacggggaagaaugguuuguacccaaaccugagcauguccuauguaaacaacaaagagaaagaaguccuugugcuaugggguguucaccacccaccuaacauaggggaccaaagggcccucuaccauacagaaaaugcuuaugucucuguagugucuucacauuauaguagaagauucaccccagaaauagccaaaagacccaaaguaagagaucaggaaggaagaaucaacuacuacuggacucugcuggaacccggggacacaauaauauuugaggcaaauggaaaucuaauagcgccaugguaugcuuucgcacugaguagaggcuuuggaucaggaaucaucaccucaaaugcaccaauggaugaaugugaugcgaagugucaaacaccucagggagcuauaaacaguagucuuccuuuccagaauguacacccaguuacaauaggagaguguccaaaguaugucaggagugcaaaauuaaggaugguuacaggacuaaggaacaucccauccauucaauccagagguuuguuuggagccauugccgguuucauugaagggggguggacuggaaugguagaugggugguaugguuaucaucaucagaaugagcaaggaucugguuaugcugcagaucaaaaaagcacacaaaaugccauuaacgggauuacaaacaaggugaauucuguaauugagaaaaugaacacucaauucacagcugugggcaaagaauucaacaaauuagaaagaaggauggaaaacuuaaauaaaaaaguugaugauggguuucuagacauuuggacauauaaugcagaauuguugguucuacuggaaaaugaaaggacuuuggauuuccaugacuccaaugugaagaaucuguaugagaaaguaaaaagccaauuaaagaauaaugccaaagaaauaggaaacggguguuuugaauucuaucacaaguguaacaaugaaugcauggaaagugugaaaaauggaacuuaugacuauccaaaauauuccgaagaaucaaaguuaaacagggagaaaauugauggaguaaaauuggaaucaaugggagucuaucagauucuggcgaucuacucaacugucgccaguucccugguucuuuuggucucccugggggcaaucagcuucuggauguguuccaaugggucuuugcaguguagaauaugcaucuga

SEQ ID NO: 32310 - RNA, 1698 nt, Artificial Sequence
  derived and/or modified CDS sequence (wt) from hemagglutinin__InfluenzaA__ABA08508
augaaaguaaaacuacugauccuguuauguacauuuacagcuacauaugcagacacaauauguauaggcuaccaugccaacaacucaaccgacacuguugacacaguacuugagaagaaugugacagugacacacucugucaaccuacuugaggacagucacaauggaaaacugugccuacuaaaaggaauagccccccuacaauuggguaauugcagcguugccggauggaucuuaggaaacccagaaugcgaauuacugauuuccaaggaaucaugguccuacauuguagaaacaccaaauccugagaauggagcauguuacccaggguauuucgccgacuaugaggagcuaagggagcaauugaguucaguaucuucauuugagagauucgaaauauuccccaaagaaagcucauggcccaaccacaccguaaccggaguaucagcaucaugcucccauaaugggaaaagcaguuuuuacagaaauuugcuauggcugacggggaagaaugguuuguacccaaaccugagcaaguccuaugcaaacaacaaaaagaaagaaguccucauacuaugggguguucaucacccgccuaacauagggguccaaaggacccucuauuacacagaaaaugcuuaugucucuguagugucuucacauuauagcagaagauucaccccagaaauaaccaaaaggcccaaaguaagagaucaggaaggaagaaucaacuacuacuggacucugcuggaacccggggauacaauaauauuugaggcaaauggaaaucuaauagcgccaugguaugcuuucgcacugaguagaggcuuuggaucaggaaucaucaccucaaaugcaccaauggaugaaugugaugcgaagugucaaacaccucagggagcuauaaacagcagucuuccuuuccagaauguacacccagucacaauaggagaguguccaaaguaugucaggagugcaaaauuaaggaugguuacaggacuaaggaacaucccauccauucaauccagagguuuguuuggagccauugccgguuucauugaagggggguggacuggaaugguagaugggugguaugguuaucaucaucagaaugagcaaggaucuggcuaugcugcagaucaaaaaagcacacaaaaugccauuaacgggauuacaaacaaggugaauucuguaauugagaaaaugaacacucaauucacagcugugggcaaagaauucaacaaauuggaaagaaggauggaaaacuuaaauaaaaagguugaugauggguuucuagacauuuggacauauaaugcagaauuguugguucuacuggaaaaugaaaggacuuuggauuuccacgacuccaaugugaagaaucuguacgagaaaguaaaaagccaauuaaagaauaaugccaaagaaauaggaaauggguguuuugaauucuaucacaaguguaacaaugaaugcauggagagugugaaaaauggaacuuaugacuauccaaaauauuccgaagaaucaaaguuaaacagggaaaaaauugauggagugaaauuggacucaaugggggucuaucagauucuggcgaucuacucaacugucgccaguucccugguucuuuuggucucccugggggcaaucagcuucuggauguguuccaaugggucuuugcaguguagaauaugcaucuga

SEQ ID NO: 32311 - RNA, 1698 nt, Artificial Sequence
  derived and/or modified CDS sequence (wt) from hemagglutinin__InfluenzaA__ABA12707
augaaaguaaaacuacugguucuguuauguacauuuacagcuacauaugcagacacaauauguauaggcuaccaugccaacaacucaaccgacacuguugacacaguacuugagaagaaugugacagugacacacucugucaaccuacuugaggacagucacaauggaaaacuaugucuacuaaaaggaauagccccacuacaauuggguaauugcagcguugccggauggaucuuaggaaacccagaaugcgaauuacugauuuccaaggaaucaugguccuacauuguagaaacaccaaauccugagaauggaacauguuacccaggguauuucgccgacuaugaggaacugagggagcaauugaguucaguaucuucauuugagagguucgaaauauuccccaaagagagcucauggcccaaucacaccguaaccggaguaucagcaucaugcucccauaacgggaaaagcaguuuuuacagaaauuugcuauggcugacggggaagaaugguuuguacccaaaccugagcaaguccuaugcaaacaacaaagagaaagaaguccuuguacuaugggguguucaucacccgccuaacauaggggaccaaagggcccucuaucauacagaaaaugcuuaugucucuguagugucuucacauuauagcagaagauucaccccagaaauagccaaaagacccaaggugagagaucaggaaggaagaaucaacuacuacuggacucugcuggaacccggggauacaauaauauuugaggcaaauggaaaucuaauagcgccaagguaugcuuucgcacugaguagaggcuuuggaucaggaaucaucaccucaaaugcaccaauggaugaaugugaugcgaagugucaaacaccucagggagcuauaaacagcagucuuccuuuccagaauguacacccagucacaauaggagaguguccaaaguaugucaggagugcaaaauuaaggaugguuacaggacuaaggaacaucccauccauucaauccagagguuuguuuggagccauugccgguuucauugaagggggguggacuggaaugguagaugguugguaugguuaucaucaucagaaugagcaaggaucuggguaugcugcagaucaaaaaagcacacaaaaugccauuaacgggauuacaaacaaggugaauucuguaauugagaaaaugaacacucaauucacagcugugggcaaagaauucaacaaauuggaaagaaggauggaaaacuuaaauaaaaaaguugaugauggguuucuagacauuuggacauauaaugcagaauuguugguucuacuggaaaaugaaaggacuuuggauuuccaugacuccaacgugaagaaucuguaugagaaaguaaaaagccaauuaaagaauaaugccaaagaaauaggaaacggguguuuugaauucuaucacaaguguaacgaugaaugcauggagagugugaaaaauggaacuuaugacuauccaaaauauuccgaagaaucaaaguuaaacagagagaaaauugauggagugaaauuggaaucaaugggagucuaucagauucuggcgaucuacucaacagucgccaguucccugguucuuuuggucucccugggggcaaucagcuucuggauguguuccaaugggucuuugcaguguagaauaugcaucuaa

SEQ ID NO: 32312 - RNA, 1698 nt, Artificial Sequence
  derived and/or modified CDS sequence (wt) from hemagglutinin__InfluenzaA__ABA12715
augaaagcaaaacuacugguccuguuauguacauuuacagcuacauacgcagacacaauauguauaggcuaccaugccaacaacucaaccgacacuguugacacaguacuugagaagaaugugacagugacacacucugucaaccuacuugaggacagucacaauggaaaacuaugucuacuaaaaggaauagccccacuacaauuggguaauugcagcguugccggauggaucuuaggaaacccagaaugcgaauuacugauuuccaaggaaucaugguccuacauuguagaaacaccaaauccugagaauggaacauguuacccaggguauuucgccgacuaugaggaacugagggagcaauugaguucaguaucuucauuugagagauucgaaauauuccccaaaggaagcucauggcccaaccacaccguaaccggaguaucagcaucaugcucccauaaugggaaaagcaguuuuuacagaaauuugcuauggcugacggggaagaaugguuuguacccaaaucugagcauguccuauguaaacaacaaagagaaagaaguccuugugcuaugggguguucaucacccaccuaacauaggggaccaaagggcccucuaccauacagaaaaugcuuaugucucuguagugucuucacauuauagcagaagauucaccccagaaauagccaaaagacccaaaguaagagaucaggaaggaagaaucaacuacuacuggacucugcuggaacccggggacacaauaauauuugaggcaaauggaaaucuaauagcgccaugguaugcuuucgcacugaguagaggcuuuggaucaggaaucaucaccucaaaugcaccaauggaugaaugugaugcgaagugucaaacaccucagggagcuauaaacaguagucuuccuuuccagaauguacacccaguuacaauaggagaguguccaaaguaugucaggaguacaaaauuaaggaugguuacaggacuaaggaacaucccauccauucaauccagagguuuguuuggagccauugccgguuucauugaagggggguggacuggaaugguagaugggugguaugguuaucaucaucagaaugagcaaggaucuggcuaugcugcagaucaaaaaagcacacaaaaugccauuaacgggauuacaaacaaggugaauucuguaauugagaaaaugaacacucaauucacagcugugggcaaagaauucaacaaauuagaaagaaggauggaaaacuuaaauaaaaaaguugaugauggguuucuagacauuuggacauauaaugcagaauuguugguucuacuggaaaaugaaaggacuuuggauuuccaugacuccaaugugaagaaucuguaugagaaaguaaaaagccaauuaaagaauaaugccaaagaaauaggaaacggguguuuugaauucuaucacaagugugacaaugaaugcauggaaagugugaaaaauggaacuuaugacuauccgaaauauuccgaagaaucaaaguuaaacagggagaaaauugauggaguaaaauuggaaucaaugggagucuaucagauucuggcgaucuacucaacugucgcuaguucccugguuuuuuuggucucccugggggcaaucagcuucuggauguguuccaaugggucuuugcaguguagaauaugcaucuga

SEQ ID NO: 32313 - RNA, 1698 nt, Artificial Sequence
  derived and/or modified CDS sequence (wt) from hemagglutinin__InfluenzaA__ABA12729
augaaaguaaaacuacugguucuguuauguacauuuacagcuacauaugcagacacaauauguauaggcuaccaugccaacaacucaaccgacacuguugacacaguacuugagaagaaugugacagugacacacucugucaaccuacuugaggacagucacaauggaaaacuaugucuacuaaaaggaauagccccacuacaauuggguaauugcagcguugccggauggaucuuaggaaacccagaaugcgaauuacugauuuccaaggaaucaugguccuacauuguagaaacaccaaauccugaaaauggaacauguuacccaggguauuucgccgacuaugaggaacugagggagcaauugaguucaguaucuucauuugagagguucgaaauauuccccaaagagagcucauggcccaaccacaccguaaccggaguaucagcaucaugcucccauaacgggaaaagcaguuuuuacagaaauuugcuauggcugacggggaagaaugguuuguacccaaaccugagcaaguccuaugcaaacaacaaagagaaagaaguccuuguacuaugggguguucaucacccgccuaacauaggggaccaaagggcccucuaucauacagaaaaugcuuauaucucuguagugucuucacauuauagcagaagauucaccccagaaauagccaaaagacccaagguaagagaucaggaaggaagaaucaacuacuacuggacucugcuggaacccggggauacaauaauauuugaggcaaauggaaaucuaauagcgccaagguaugcuuucgcacugaguagaggcuuuggaucaggaaucaucaccucaaaugcaccaauggaugaaugugaugcgaagugucaaacaccucagggagcuauaaacagcagucuuccuuuucagaauguacacccagucacaauaggagaguguccaaaguaugucaggagugcaaaauuaaggaugguuacaggacuaaggaacaucccauccauucaauccagagguuuguuuggagccauugccgguuucauugaagggggguggacuggaaugguagaugguugguaugguuaucaucaucagaaugagcaaggaucuggguaugcugcagaucaaaaaagcacacaaaaugccauuaacgggauuacaaacaaggugaauucuguaauugagaaaaugaacacucaauucacagcugugggcaaagaauucaacaaauuggaaagaaggauggaaaacuuaaauaaaaagguugaugauggguuucuagacauuuggacauauaaugcagaauuguugguucuacuggaaaaugaaaggacuuuggauuuccaugacuccaacgugaagaaucuguaugagaaaguaaaaagccaauuaaagaauaaugccaaagaaauaggaaacggguguuuugaauucuaucacaaguguaacgaugaaugcauggagagugugaaaaauggaacuuaugacuauccaagauauuccgaagaaucaaaguuaaacagggagaaaauugauggagugaaauuggaaucaaugggagucuaucagauucuggcgaucuacucaacagucgccaguucccugguucuuuuggucucccugggggcaaucagcuucuggauguguuccaaugggucuuugcaguguagaauaugcaucuaa

SEQ ID NO: 32314 - RNA, 1701 nt, Artificial Sequence; identical to SEQ ID NO: 32298
  derived and/or modified CDS sequence (wt) from hemagglutinin__InfluenzaA__ABA12740

SEQ ID NO: 32315 - RNA, 1701 nt, Artificial Sequence
  derived and/or modified CDS sequence (wt) from hemagglutinin__InfluenzaA__ABA12751
augaagacuaucauugcuuugagcuacauucuaugucugguuuucgcucaaaaacuucccggaaaugacaacagcacggcaacgcugugccuugggcaucaugcaguaccaaacggaacgauagugaaaacaaucacgaaugaccaaauugaaguuacuaaugcuacugagcugguucagaguuccucaacagguggaauaugcgacaguccucaucagauccuugauggagaaaacugcacacuaauagaugcucuauugggagacccucagugugauggcuuccaaaauaagaaaugggaccuuuuuauugaacgcagcaaagccuacagcaacuguuacccuuaugaugugccggauuaugccucccuuaggucacuaguugccucauccggcacacuggaauuuaacaaugaaagcuucaauuggacuggagucacucaaaauggaacaagcucugcuugcaaaaggagaucuaauaacaguuucuuuaguagauugaauugguugacccacuuaaaauucaaauacccagcauugaacgugacuaugccaaacaaugaaaaauuugacaaauuguacauuugggggguucaccacccggguacggacaaugaccaaaucagccuauaugcucaagcuucaggaagaaucacagucucuaccaaaagaagccaacaaacuguaaucccgaauaucggaucuagacccaggguaagagauauccccagcagaauaagcaucuauuggacaauaguaaaaccgggagacauacuuuugauuaacagcacagggaaucuaauugcuccucgggguuacuucaaaauacgaagugggaaaagcucaauaaugagaucagaugcacccauuggcaaaugcaauucugaaugcaucacuccaaauggaagcauucccaaugacaaaccauuucaaaauguaaacaggaucacauauggggccugucccagauauguuaagcaaaacacucugaaauuggcaacagggaugcgaaauguaccagagaaacaaacuagaggcauauuuggcgcaaucgcggguuucauagaaaaugguugggagggaaugguggaugguugguacgguuucaggcaucaaaauucugagggaauaggacaagcagcagaucucaaaagcacucaagcagcaaucaaccaaaucaaugggaagcugaauagguugaucgggaaaaccaacgagaaauuccaucagauugaaaaagaauucucagaaguagaagggagaauucaggaccucgagaaauauguugaggacacuaaaauagaucucuggucauacaacgcggagcuucuuguugcccuggagaaccaacauacaauugaucuaacugacucagaaaugaacaaacuguuugaaagaacaaagaagcaacugagggaaaaugcugaggauaugggcaaugguuguuucaaaauauaccacaaaugugacaaugccugcauagggucaaucagaaauggaacuuaugaccaugauguauacagagaugaagcauugaacaaccgguuccagaucaaagguguugagcugaagucaggauacaaagauuggauccuauggauuuccuuugccauaucauguuuuuugcuuuguguugcuuuguugggguucaucaugugggccugccaaaaaggcaacauuaggugcaacauuugcauuuga

SEQ ID NO: 32316 - RNA, 1701 nt, Artificial Sequence
  derived and/or modified CDS sequence (wt) from hemagglutinin__InfluenzaA__ABA12762
augaagacuaucauugcuuugagcuacauucuaugucugguuuucgcucaaaaauuucccggaaaugacaacagcacggcaacgcugugccuugggcaccaugcaguaccaaacggaacgauagugaaaacaaucacgaaugaccaaauugaaguuacuaaugcuacugagcugguucagaguuccucaacagguggaauaugcgacaguccucaucagauccuugauggagaaaacugcacacuaauagaugcucuauugggagacccucagugugauggcuuccaaaauaagaaaugggaccuuuuuguugaacgcagcaaagccuacagcaacuguuacccuuaugaugugccggauuaugccucccuuaggucacuaguugccucauccggcacacuggaguuuaacaaugaaagcuucaauuggacuggagucacucaaaauggaacaagcucugcuugcaaaaggagaucuaauaacaguuucuuuaguagauugaauugguugacccacuuaaaauucaaauacccagcauugaacgugacuaugccaaacaaugaaaaauuugacaaauuguacauuugggggguucaccacccggguacggacaaugaccaaauuagccuauaugcucaagcuucaggaagaaucacagucucuaccaaaagaagccaacaaacuguaaucccgaauaucggaucuagacccaggguaagggauauccccagcagaauaagcaucuauuggacaauaguaaaaccgggagacauacuuuugauuaacagcacagggaaucuaauugcuccucgggguuacuucaaaauacgaagugggaaaagcucaauaaugagaucagaugcacccauuggcaaaugcaauucugaaugcaucacuccaaauggaagcauucccaaugacaaaccauuucaaaauguaaacaggaucacauauggggccugucccagauauguuaagcaaaacacucugaaauuggcaacagggaugcgaaauguaccagagaaacaaacuagaggcauauuuggcgcaaucgcggguuucauagaaaaugguugggagggaaugguggaugguugguacgguuucaggcaucaaaauucugagggaauaggacaagcagcagaucucaaaagcacucaagcagcaaucaaccaaaucaaugggaagcugaauagguugaucgggaaaaccaacgagaaauuccaucagauugaaaaagaauucucagaaguagaagggagaauucaggaccucgagaaauauguugaggacacuaaaauagaucucuggucauacaacgcggagcuucuuguugcccuggagaaccaacauacaauugaucuaacugacucagaaaugaacaaacuguuugaaagaacaaagaagcaacugagggaaaaugcugaggauaugggcaaugguuguuucaaaauauaccacaaaugugacaaugccugcauagggucaaucagaaauggaacuuaugaccaugauguauacagagaugaagcauuaaacaaccgguuccagaucaaagguguugagcugaagucaggauacaaagauuggauccuauggauuuccuuugccauaucauguuuuuugcuuuguguuguuuuguugggguucaucaugugggccugccaaaaaggcaacauuaggugcaacauuugcauuuga

SEQ ID NO: 32317 - RNA, 1701 nt, Artificial Sequence
  derived and/or modified CDS sequence (wt) from hemagglutinin__InfluenzaA__ABA12773
augaagacuaucauugcuuugagcuacauuuucugucugguucucggccaagauuuuccaggaaaugacaacagcacagcaacgcugugccugggacaucaugcggugccaaacggaacacuagugaaaacaaucacaaaugaucagauugaagugacuaaugcuacugagcugguucagaguuccucaacggggaaaauaugcaacaauccucaucgaauccuugauggaauagacugcacacugauagaugcucuauugggggacccucauugugauggcuuucaaaaugagacaugggaccuuuucguugaacgcagcaaagcuuucagcaacuguuacccuuaugaugugccagauuaugccucccuuaggucacuaguugccucgucaggcacucuggaguuuaucaaugaaggcuucacuuggacuggggucacucagaaugggggaagcaaugcuugcaaaaggggaccugauagcgguuuuuucaguagacugaacugguuguacaaaucaggaagcacauauccagugcugaacgugacuaugccaaauaaugacaauuuugacaaacuauacauuugggggguucaccacccgagcacggaccaagaacaaaccagccuauauguucaagcaucagggagagucacagucucuaccaagagaagccagcaaacuauaaucccgaauaucgggucuagacccuggguaaggggucugucuaguagaauaagcaucuauuggacaauaguuaaaccaggagacauacugguaauuaacaguaaugggaaccuaauugcuccucgggguuauuucaaaaugcgcacugggaaaagcucaauaaugaggucagaugcaccuauuggcaccugcauuucugaaugcaucacuccaaauggaagcauucccaaugacaagcccuuucaaaacguaaacaagaucacauauggggcaugucccaaguauguuaagcaaaacacccugaaguuggcaacagggaugcggaauguaccagagaaacaaacuagaggccuauucggcgcaauagcagguuucauagaaaaugguugggagggaaugauagacgguugguacgguuucaggcaucaaaauucugagggcacaggacaagcagcagaucuuaaaagcacucaagcagccaucgaccaaaucaaugggaaacugaauaggguaaucgagaagacgaacgagaaauuccaucaaaucgaaaaggaauucucagaaguagaagggagaauucaggaccucgagaaauacguugaagacacuaaaauagaucucuggucuuacaaugcggagcuucuugucgcucuggagaaccaacauacaauugaucugacugacucggaaaugaacaaacuguuugaaaaaacaaggaggcaacugagggaaaaugcugaggacaugggcaaugguugcuucaaaauauaccacaaaugugacaaugcuugcauagggucaaucagaaaugggacuuaugaccaugauguauacagagacgaagcauuaaacaaccgguuucagaucaaagguguugaacugaagucaggauacaaagacuggauccuguggauuuccuuugccauaucaugcuuuuugcuuuguguuguuuugcugggguucaucaugugggccugccagaaaggcaacauuaggugcaacauuugcauuuga

SEQ ID NO: 32318 - RNA, 1701 nt, Artificial Sequence
  derived and/or modified CDS sequence (wt) from hemagglutinin__InfluenzaA__ABA12780
augaagacuaucauugcuuugagcuacauucuaugucugguuuucgcucaaaaacuucccggaaaugacaacagcacggcaacgcugugccuugggcaccaugcaguaccaaacggaacgauagugaaaacaaucacgaaugaccaaauugaaguuacuaaugcuacugagcugguucagaguuccucaacagguggaauaugcgacaguccucaucagauccuugauggagaaaacugcacacuaauagaugcucuauugggagacccucagugugauggcuuccaaaauaagaaaugggaccuuuuuguugaacgcagcaaagccuacagcaacuguuacccuuaugaugugccggauuaugccucccuuaggucacuaguugccucauccggcacacuggaguuuaacaaugaaagcuucaauuggacuggagucacucaaaauggaacaagcucugcuugcaaaaggagaucuaauaacaguuucuuuaguagauugaauugguugacccauuuaaaauucaaauacccagcauugaacgugacuaugccaaacaaugaaaaauuugacaaauuguacauuugggggguucaccacccggguacgaacaaugaccaaaucagccuauaugcucaagcaucaggaagaaucacagucucuaccaaaagaagccaacaaacuguaaucccgaauaucgaaucuagacccaggguaagggauauccccagcagaauaagcaucuauuggacaauaguaaaaccgggagacauacuuuugauuaacagcacagggaaucuaauugcuccucgggguuacuucaaaauacgaagugggaaaagcucaauaaugagaucagaugcacccauuggcaaaugcaauucugaaugcaucacuccaaauggaagcauucccaaugacaaaccauuucaaaauguaaacaggaucacauauggggccugucccagauauguuaagcaaaacacucugaaauuggcaacagggaugcgaaauguaccagagaaacaaacuagaggcauauuuggcgcaaucgcggguuucauagaaaaugguugggagggaaugguggaugguugguacgguuucaggcaucaaaauucugagggaauaggacaagcagcagaucucaaaagcacucaagcagcaaucaaccaaaucaaugggaagcugaauagguugaucgggaaaaccaacgagaaauuccaucagauugaaaaagaauucucagaaguagaagggagaauucaggaccucgagaaauauguugaggacacuaaaauagaucucuggucauacaacgcggagcuccuuguugcccuggagaaccaacauacaauugaucuaacugacucagaaaugaacaaacuguuugaaagaacaaagaagcaacugagggaaaaugcugaggauaugggcaaugguuguuucaaaauauaccacaaaugugacaaugccugcauagggucaaucagaaauggaacuuaugaccaugauguauacagagaugaagcauuaaacaaccgguuccagaucaaagguguugagcugaagucaggauacaaagauuggauccuauggauuuccuuugccauaucauguuuuuugcuuuguguugcuuuguugggguucaucaugugggccugccaaaaaggcaacauuaggugcaacauuugcauuuga

SEQ ID NO: 32319 - RNA, 1701 nt, Artificial Sequence
  derived and/or modified CDS sequence (wt) from hemagglutinin__InfluenzaA__ABA16214
augaagacuaucauugcuuugagcuacauuuccugucugguuuucgcccaaaaacuucccggaaaugacaacagcacagcaacgcugugccugggacaucaugcaguaccaaacggaacgcuagugaaaacaaucacgaaugaucagauugaagugacuaaugcuacugagcugguccaaaguuccucaacagguagaauaugcgacaguccucaccgaauccuugauggaaaaaacugcacacugauagaugcucuauugggagacccucauugugauggcuuccaaaaugagaaaugggaucuuuuuguugaacgcagcaaagcuuucagcaacugcuacccuuaugaugugccggauuaugccucccuuaggucacuaguugccucaucaggcacccuggaguuuaucaaugaaggcuucaauuggacuggagucacucagagugggggaagcuaugcuugcaaaaggggaucuguuaaaaguuucuucaguagauugaauugguuguaugagucagaaagcaaauauccagcgcugaacgugacuaugccaaacaauggcaaauuugacaaauuguacauuugggggguucaccacccuagcacggacaaagaacaaaccaaccuauauguucgagcaucagggagagucacagucucuaccaagagaagccagcaaacuguaaucccgaauaucgggccuagacccuggguaaggggucugucuaguagaauaaguaucuauuggacaauaguaaaaccgggagacauacuguuaauuaauagcacugggaaccuaauugcuccccgggguuacuucaaaauacgcacugggaaaagcucaauaaugaggucagaugcaccuauuggcaccugcaguucuggaugcaucacuccaaauggaagcauucccaaugacaaacccuuucaaaaugugaacaagaucacauauggggcaugucccagguauguuaagcagaacacucugaaguuggcaacagggaugcggaauguaccugaaaaacaaacuagaggcauauucggcgcaauagcagguuucauagaaaaugguugggagggaaugguagacgguugguacgguuucaggcaucaaaauucugagggcacaggacaagcagcagaucuuaaaagcacucaagcagcaaucgaccaaaucaacgggaaacugaauagguuaaucgagaaaacgaacgagaaauuccaucaaaucgaaaaggaauucucagaaguagaagggagaauucaggaccucgagaaguauguugaagacacuaaaauagaucucuggucuuacaacgcggagcuucuuguugcccuggagaaccaacauacaauugauaugacugacucagaaaugaacaaacuguuugaaaaaacaaggaagcaacugagggaaaaugcugaggacaugggcaaugguugcuucaaaauauaccacaaaugugacaaugcuugcauagggucaaucagaaauggaacuuaugaccaugauguauacagagacgaagcauuaaacaaccgguuucagaucaaagguguugagcugaagucaggauacaaagacuggauccuauggauuuccuuugccauaucaugcuuuuugcucuguguuguuuugcugggguucauaaugugggccugccaaaaaggcaacauuaggugcaacauuugcauuuga

SEQ ID NO: 32320 - RNA, 1701 nt, Artificial Sequence; identical to SEQ ID NO: 32291
  derived and/or modified CDS sequence (wt) from hemagglutinin__InfluenzaA__ABA18026

SEQ ID NO: 32321 - RNA, 1698 nt, Artificial Sequence
  derived and/or modified CDS sequence (wt) from hemagglutinin__InfluenzaA__ABA18037
augaaagcaaaacuacugguccuguuauguacauuuacagcuacauacgcagacacaauauguauaggcuaccaugccaacaacucaaccgacacuguugacacaguacuugagaagaaugugacagugacacacucugucaaccuacuugaggacagucacaauggaaaacuaugucuacuaaaaggaauagccccacuacaauuggguaauugcagcguugccggauggaucuuaggaaacccagaaugcgaauuacugauuuccaaggaaucaugguccuacauuguagaaacaccaaaucccgagaauggaacauguuacccaggguauuucgccgacuaugaggaacugaaggagcaauugaguucaguaucuucauuugagagauucgaaauauuccccaaagggagcucauggcccaaccacaccguaaccggaguaucagcaucaugcucccauaaugggaaaagcaguuuuuacagaaauuugcuauggcugacggggaagaaugguuuguacccaaaccugagcaugucauauguaaacaacaaagagaaagaaguccuugugcuaugggguguucaucacccaccuaacauaggggaccaaagggcccucuaccauacagaaaaugcuuaugucucuguagugucuucacauuauagcagaagauucaccccagaaauagccaaaagacccaaaguaagagaucaggaaggaagaaucaacuacuacuggacucugcuggaacccggggacacaauaauauuugaggcaaauggaaaucuaauagcgccaugguaugcuuucgcacugaguagaggcuuuggaucaggaaucaucaccucaaaugcaccaauggaugaaugugaugcgaagugucaaacaccucagggagcuauaaacaguagucuuccuuuccagaauguacacccaguuacaauaggagaguguccaaaguaugucaggagugcaaaauuaaggaugguuacaggacuaaggaacaucccauccauucaauccagagguuuguuuggagccauugccgguuucauugaagggggguggacuggaaugguagaugggugguaugguuaucaucaucagaaugagcaaggaucuggcuaugcugcagaucaaaaaagcacacaaaaugccauuaacgggauuacaaacaaggugaauucuguaauugagaaaaugaacacucaauucacagcugugggcaaagaauucaacaaauuagaaagaaggauggaaaacuuaaauaaaaaaguugaugauggguuucuagacauuuggacauauaaugcagaauuguugguucuacuggaaaaugaaaggacuuuggauuuccaugacuccaaugugaagaaucuguaugagaaaguaaaaagccaauuaaagaauaaugccaaagaaauaggaaacggguguuuugaauucuaucacaaguguaacaaugaaugcauggaaagugugaaaaauggaacuuaugacuauccaaaauauuccgaagaaucaaaguuaaacagggagaaaauugauggaguaaaauuggaaucaaugggagucuaucagauucuggcgaucuacucaacugucgccaguucccugguucuuuuggucucccugggggcaaucagcuucuggauguguuccaaugggucuuugcaguguagaauaugcaucuga

SEQ ID NO: 32322 - RNA, 1701 nt, Artificial Sequence; identical to SEQ ID NO: 32272
  derived and/or modified CDS sequence (wt) from hemagglutinin__InfluenzaA__ABA18048

SEQ ID NO: 32323 - RNA, 1701 nt, Artificial Sequence
  derived and/or modified CDS sequence (wt) from hemagglutinin__InfluenzaA__ABA18123
augaagacuaucauugcuuugagcuacauuuuaugucugguuuucgcucaaaaacuucccggaaaugacaacagcacggcaacgcugugccuggggcaccaugcagugccaaacggaacgcuagugaaaacaaucacgaaugaccaaauugaagugacuaaugcuacugagcugguucagaguuccucaacagguagaauaugcgacaguccucaccaaauccuugauggagaaaacugcacacuaauagaugcucuauugggagacccucauugugauggcuuccaaaauaaggaaugggaccuuuuuguugaacgcagcaaagccuacagcaacuguuacccuuaugaugugccggauuaugucucccuuaggucacuaguugccucaucaggcacgcuggaguuuaacaaugaaagcuucaauuggacuggagucgcucagaauggaacaagcucugcuugcaaaaggagaucuaauaaaaguuucuuuaguagauugaauugguugcaccaauuaaaauacaaauauccagcacugaacgugacuaugccaaacaaugaaaaauuugacaaauuguacauuugggggguucaccacccggguacagacagugaccaaaucagccuauaugcucaagcaucagggagagucacagucucuaccaaaagaagccaacaaacuguaaucccgaauaucggaucuggacccuggguaaggggugucuccagcagaauaagcaucuauuggacaauaguaaaaccgggagacauacuuuugauuaacagcacagggaaucuaauugcuccucgggguuacuucaaaauacgaagugggaaaagcucaauaaugaggucagaugcacccauuggcaaaugcaauucugaaugcaucacuccaaauggaagcauucccaaugacaaaccauuucaaaauguaaacaggaucacauauggggccugucccagauauguuaagcaaaacacucugaaauuggcaacagggaugcggaaugugccagagaaacaaacuagaggcauauucggugcaaucgcgggcuucauagaaaaugguugggagggaaugauggacgguugguacgguuucaggcaucaaaauucugagggcacagggcaagcagcagaucuuaaaagcacucaagcagcaaucaaccaaaucaacgggaaacugaauagguuaaucgagaaaacgaacgagaaauuccaucaaauugaaaaagaauucucagaaguagaagggagaauucaggaccucgagaaauauguugaggacacuaaaauagaucucuggucguacaaugcggagcuucuuguugcccuggagaaccaacauacaauugaucuaacugacucagaaaugaacaaacuguuugaaagaacaaagaagcaacugagggaaaaugcugaggauaugggcaaugguuguuucaaaauauaccacaaaugugacaaugccugcauagggucaaucagaaauggaacuuaugaccaugauguauacagagacgaagcauugaacaaccgguuccagaucaaagguguugagcugaagucaggauacaaagauuggauccuauggauuuccuuugccauaucauguuuuuugcuuuguauuguuuugcugggguucaucaugugggccugccaaaaaggcaacauuaggugcaacauuugcauuuga

SEQ ID NO: 32324 - RNA, 1701 nt, Artificial Sequence; identical to SEQ ID NO: 32272
  derived and/or modified CDS sequence (wt) from hemagglutinin__InfluenzaA__ABA18134

SEQ ID NO: 32325 - RNA, 1698 nt, Artificial Sequence
  derived and/or modified CDS sequence (wt) from hemagglutinin__InfluenzaA__ABA18145
augaaaguaaaacuacugguucuguuauguacauuuacagcuacauaugcagacacaauauguauaggcuaccaugccaacaacucaaccgauacuguugacacaguacuugagaagaaugugacagugacacacucugucaaccuacuugaggacagucacaauggaaaacuaugucuacuaaaaggaauagccccacuacaauuggguaauugcagcguugccggauggaucuuaggaaacccagaaugcgaauuacugauuuccaaggaaucaugguccuacauuguagaaacaccaaauccugagaauggaacauguuacccaggguauuucgccgacuaugaggaacugagggagcaauugaguucaguaucuucauuugagagguucgaaauauuccccaaagagagcucauggcccaaccacaccguaaccggaguaucagcaucaugcucccauaacgggaaaagcaguuuuuacagaaauuugcuauggcugacggggaagaaugguuuguacccaaaccugagcaaguccuaugcaaacaacaaagagaaagaaguccuuguacuaugggguguucaucacccgccuaacauaggggaccaaagggcccucuaucauacagaaaaugcuuaugucucuguagugucuucacauuauagcagaagauucaccccagaaauagccaaaagacccaaggugagagaucaggaaggaagaaucaacuacuacuggacucugcuggaacccggggauacaauaauauuugaggcaaauggaaaucuaauagcgccaagguaugcuuucgcacugaguagaggcuuuggaucaggaaucaucaccucaaaugcaccaauggaugaaugugaugcgaagugucaaacaccucagggagcuauaaacagcagucuuccuuuccagaauguacacccagucacaauaggagaguguccaaaguaugucaggagugcaaaauuaaggaugguuacaggacuaaggaacaucccauccauucaauccagagguuuguuuggagcaauugccgguuucauugaagggggguggacuggaaugguagaugguugguaugguuaucaucaucagaaugagcaaggaucuggguaugcugcagaucaaaaaagcacacaaaaugccauuaacgggauuacaaacaaggugaauucuguaauugagaaaaugaacacucaauucacagcugugggcaaagaauucaacaaauuggaaagaaggauggaaaacuuaaauaaaaaaguugaugauggguuucuagacauuuggacauauaaugcagaauuguugguucuacuggaaaaugaaaggacuuuggauuuccaugacuccaacgugaagaaucuguaugagaaaguaaaaagccaauuaaagaauaaugccaaagaaauaggaaacggguguuuugaauucuaucacaaguguaacgaugaaugcauggagagugugaaaaauggaacuuaugacuauccaaaauauuccgaagaaucaaaguuaaacagggagaaaauugauggagugaaauuggaaucaaugggagucuaucagauucuggcgaucuacucaacagucgccaguucccugguucuuuuggucucccugggggcaaucagcuucuggauguguuccaaugggucuuugcaguguagaauaugcaucuaa

SEQ ID NO: 32326 - RNA, 1701 nt, Artificial Sequence; identical to SEQ ID NO: 32268
  derived and/or modified CDS sequence (wt) from hemagglutinin__InfluenzaA__ABA18156

SEQ ID NO: 32327 - RNA, 1701 nt, Artificial Sequence
  derived and/or modified CDS sequence (wt) from hemagglutinin__InfluenzaA__ABA26700
augaagacuaucauugcuuugagcuacauucuaugucugguuuucgcucaaaaacuucccggaaaugacaacagcacggcaacgcugugccuugggcaccaugcaguaccaaacggaacgauagugaaaacaaucacgaaugaccaaauugaaguuacuaaugcuacugagcugguucagaguucaucaacagguggaauaugcaacaguccucaucagauccuugauggagaaaacugcacacuaauagaugcucuauugggagacccucagugugauggcuuccaaaauaagaaaugggaccuuuuuguugaacgcagcaaagccuacagcaacuguuacccuuaugaugugccggauuaugccucccuuaggucacuaguugccucauccggcacacuggaguuuaacaaugaaagcuucaauuggacuggagucacucaaaauggaacaagcucugcuugcaaaaggagaucuaauaacaguuucuuuaguagauugaauugguugacccacuuaaaauucaaauacccagcauugaacgugacuaugccaaacaaugaaaaauuugacaaauuguacauuugggggguucaccacccggguacggacaaugaccaaaucagccuauaugcucaagcaccaggaagaaucacagucuccaccaaaagaagccaacaaacuguaaucccgaauaucggaucuagacccaggguaagggauauccccagcagaauaagcaucuauuggacaauaguaaaaccgggagacauacuuuugauuaacagcacagggaaucuaauugcuccucgggguuacuucaaaauacgaagugggaaaagcucaauaaugagaucagaugcacccauuggcaaaugcaauucugaaugcaucacuccaaauggaagcauucccaaugacaaaccauuucaaaauguaaacaggaucacauauggggccugccccagauauguuaagcaaaacacucugaaauuggcaacagggaugcgaaauguaccagagaaacaaacuagaggcauauuuggcgcaaucgcggguuucauagaaaaugguugggagggaaugguggaugguugguacgguuucaggcaucaaaauucugagggaauaggacaagcagcagaucucaaaagcacucaagcagcaaucaaccaaaucaaugggaagcugaauagguugaucgggaaaaccaacgagaaauuccaucagauugaaaaagaauucucagaaguagaagggagaauucaggaccuugagaaauauguugaggacacuaaaauagaucucuggucauacaacgcggagcuucuuguugcccuggagaaccaacauacaauugaucuaacugacucagaaaugaacaaacuguuugaaagaacaaagaagcaacugagggaaaaugcugaggauaugggcaaugguuguuucaaaauauaccacaaaugugacaaugccugcauagggucaaucagaaauggaacuuaugaccaugauguauacagagaugaagcauuaaacaaccgguuccagaucaaagguguugagcugaagucaggauacaaagauuggauccuauggauuuccuuugccauaucauguuuuuugcuuuguguugcuuuguugggguucaucaugugggccugccaaaaaggcaacauuaggugcaacauuugcauuuga

SEQ ID NO: 32328 - RNA, 1701 nt, Artificial Sequence
  derived and/or modified CDS sequence (wt) from hemagglutinin__InfluenzaA__ABA26711
augaagacuaucauugcuuugagcuacauucuaugucugguuuucgcucaaaaacuucccggaaaugacaacagcacggcaacgcugugccuugggcaccaugcaguaccaaacggaacgauagugaaaacaaucacgaaugaccaaauugaaguuacuaaugcuacugagcugguucagaguuccucaacagguggaauaugcgacaguccucaucagauccuugauggagaaaacugcacacuaauagaugcucuauugggagacccucagugugauggcuuccaaaauaagaaaugggaccuuuuuguugaacgcagcaaagccuacagcaacuguuacccuuaugaugugccggauuaugccucccuuaggucacuaguugccucauccggcacacuggaguuuaacaaugaaagcuucaauuggacuggagucacucaaaauggaacaagcucugcuugcaaaaggagaucuaauaacaguuucuuuaguagauugaauugguugacccacuuaaaauucaaauacccagcauugaacgugacuaugccaaacaaugaaaaauuugacaaauuguacauuugggggguucaccacccggguacggacaaugaccaaaucagccuauaugcucaagcaucaggaagaaucacagucucuaccaaaagaagccaacaaacuguaaucccgaauaucggaucuagacccaggguaagggauauccccagcagaauaagcaucuauuggacaauaguaaaaccgggagacauacuuuugauuaacagcacagggaaucuaauugcuccucgggguuacuucaaaauacgaagugggaaaagcucaauaaugagaucagaugcacccauuggcaaaugcaagucugaaugcaucacuccaaauggaagcauucccaaugacaaaccauuucaaaauguaaacaggaucacauauggggccugucccagauauguuaagcaaaacacucugaaauuggcaacagggaugcgaaauguaccagagaaacaaacuagaggcauauuuggcgcaaucgcggguuucauagaaaaugguugggagggaaugguggaugguugguacgguuucaggcaucaaaauucugagggaauaggacaagcagcagaucucaaaagcacucaagcagcaaucaaccaaaucaaugggaagcugaauagguugaucgggaaaaccaacgagaaauuccaucagauugaaaaagaauucucagaaguagaagggagaauucaggaccucgagaaauaugucgaggacacuaaaauagaucucuggucauacaacgcggagcuucuuguugcccuggagaaccaacauacaauugaucuaacugacucagaaaugaacaaacuguuugaaagaacaaagaagcaauugagggaaaaugcugaggauaugggcaaugguuguuucaaaauauaccacaaaugugacaaugccugcauagggucaaucagaaauggaacuuaugaccaugauguauacagagaugaagcauuaaacaaccgguuccagaucaaagguguugagcugaagucaggauacaaagauuggauccuauggauuuccuuugccauaucauguuuuuugcuuuguguugcuuuguugggguucaucaugugggccugccaaaaaggcaacauuaggugcaacauuugcauuuga

SEQ ID NO: 32329 - RNA, 1701 nt, Artificial Sequence
  derived and/or modified CDS sequence (wt) from hemagglutinin__InfluenzaA__ABA26722
augaagacuaucauugcuuugagcuacauucuaugucugguuuucgcucaaaaacuucccggaaaugacaacagcacggcaacgcugugccuugggcaccaugcaguaccaaacggaacaauagugaaaacaaucacgaaugaccaaauugaaguuacuaaugcuacugagcugguucagaguuccccaacagguggaauaugcgacaguccucaucagauccuugauggagaaaacugcacacuaauagaugcucuauugggagacccucagugugauggcuuccaaaauaagaaaugggaccuuuuugucgaacgcagcaaagcccacagcaacuguuacccuuaugaugugccggauuaugccucccuuaggucacuaguugccucauccggcacacuggaguuuaacaaugaaagcuucaauuggacuggagucacucaaaauggaacaaguucugcuugcaaaaggagaucuaauaaaaguuucuuuaguagauugaauugguugacccacuuaaaauucaaauacccagcauugaacgugacuaugccaaacaaugaaaaauuugacaaauuguacauuugggggguucaccacccggguacggacaaugaccaaaucagccuauaugcucaagcaucaggaagaaucacagucucuaccaaaagaagccaacaaacuguaaucccgaauaucggaucuagacccaggguaagggauguccccagcagaauaagcaucuauuggacaauaguaaaaccgggagacauacuuuugauuaacagcacagggaaucuaauugcuccucgggguuacuucaaaauacgaagugggaaaagcucaauaaugagaucagaugcacccauuggcaaaugcaauucuggaugcaucacuccaaauggaagcauucccaaugacaaaccauuucaaaacguaaacaggaucacauauggggccugucccagauauguuaagcaaaacacucugaaauuggcaacagggaugcgaaacguaccagagaaacaaacuagaggcauauuuggcgcaaucgcggguuucauagaaaaugguugggagggaaugguggacgguugguacgguuucaggcaucaaaauucugagggaacaggacaagcagcagaucucaaaagcacucaagcagcaaucaaccaaaucaaugggaagcugaauagguugaucgggaaaacaaacgagaaauuccaucaaauugaaaaagaauucucagaaguagaagggagaauucaggaccucgagaaauauguugaggacacuaaaauagaucucuggucauacaacgcggagcuucuuguugcccuggagaaccaacauacaauugaucuaacugacucagaaaugaacaaacuguuugaaagaacaaagaagcaacugagggaaaaugcugaggauaugggcaaugguuguuucaaaauauaccacaaaugugacaaugccugcauagggucaaucagaaauggaacuuaugaccaugauguauacagagaugaagcauuaaacaaccgguuccagaucaaagguguugagcugaagucaggauacaaagauuggauccuauggauuuccuuugccauaucauguuuuuugcuuuguguugcuuuguugggguucaucaugugggccugccaaaaaggcaacauuaggugcaacauuugcauuuga

SEQ ID NO: 32330 - RNA, 1701 nt, Artificial Sequence
  derived and/or modified CDS sequence (wt) from hemagglutinin__InfluenzaA__ABA26733
augaagacuaucauugcuuugagcuacauucuaugucugguuuucgcucaaaaacuucccggaaaugacaacagcacggcaacgcugugccuugggcaccaugcaguaccaaacggaacgauagugaaaacaaucacgaaugaccaaauugaaguuacuaaugcuacugagcugguucagaguuccucaacagguggaauaugcgacaguccucaucagauccuugauggagaaaacugcacacuaauagaugcucuauugggagacccucagugugauggcuuccaaaauaagaaaugggaccuuuuuguugaacgcagcaaagccuacagcaacuguuacccuuaugaugugccggauuaugccucccuuaggucacuaguugccucauccggcacacuggaguuuaacaaugaaagcuucaauuggacuggagucacucaaaauggaacaagcucugcuugcaaaaggagaucuaauaacaguuucuuuaguagauugaauugguugacccauuuaaaauucaaauacccagcauugaacgugacuaugccaaacaaugaaaaauuugacaaauuguacauuugggggguucaccacccggguacggacaaugaccaaaucagccuauaugcucaagcaucaggaagaaucacagucucuaccaaaagaagccaacaaacuguaaucccgaauaucggaucuagacccaggguaagggauauccccagcagaauaagcaucuauuggacaauaguaaaaccgggagacauacuuuugauuaacagcacagggaaucuaauugcuccucgggguuacuucaaaauacgaagugggaaaagcucaauaaugagaucagaugcacccauuggcaaaugcaauucugaaugcaucacuccaaauggaagcauucccaaugacaaaccauuucaaaauguaaacaggaucacauauggggccugucccagauauguuaagcaaaacacucugaaauuggcaacagggaugcgaaauguaccagagaaacaaacuagaggcauauuuggcgcaaucgcggguuucauagaaaaugguugggagggaaugguggaugguugguacgguuucaggcaucaaaauucugagggaauaggacaagcagcagaucucaaaagcacucaagcagcaaucaaccaaaucaaugggaagcugaauagguugaucgggaaaaccaacgagaaauuccaucagauugaaaaagaauucucagaaguagaagggagaauucaggaccucgagaaauauguugaggacacuaaaauagaucucuggucauacaacgcggagcuucuuguugcccuggagaaccaacauacaauugaucuaacugacucagaaaugaacaaacuguuugaaagaacaaagaagcaacugagggaaaaugcugaggauaugggcaaugguuguuucaaaauauaccacaaaugugacaaugccugcauagggucaaucagaaauggaacuuaugaccaugauguauacagagaugaagcauuaaacaaccgguuccagaucaaagguguugagcugaagucaggauacaaagauuggauccuauggauuuccuuugccauaucauguuuuuugcuuuguguugcuuuguugggguucaucaugugggccugccaaaaaggcaacauuaggugcaacauuugcauuuga

SEQ ID NO: 32331 - RNA, 1701 nt, Artificial Sequence; identical to SEQ ID NO: 32330
  derived and/or modified CDS sequence (wt) from hemagglutinin__InfluenzaA__ABA26755

SEQ ID NO: 32332 - RNA, 1701 nt, Artificial Sequence
  derived and/or modified CDS sequence (wt) from hemagglutinin__InfluenzaA__ABA26766
augaagacuaucauugcuuugagcuacauucuaugucugguuuucgcucaaaaacuucccggaaaugacaacagcacggcaacacugugccuugggcaccaugcaguaccaaacggaacgauagugaaaacaaucacgaaugaccaaauugaaguuacuaaugcuacugagcugguucagaguuccucaacagguggaauaugcgacaguccucaucagauccuugauggagaaaacugcacacuaauagaugcucuauugggagacccucagugugauggcuuccaaaauaagaaaugggaccuuuuuguugaacgcagcaaagccuacagcaacuguuacccuuaugaugugccggauuaugccucccuuaggucacuaguugccucauccggcacacuggaguuuaacaaugaaagcuucaauuggacuggagucacucaaaauggaacaagcucugcuugcaaaaggagaucuaauaacaguuucuuuaguagauugaauugguugacccauuuaaaauucaaauacccagcauugaacgugacuaugccaaacaaugaaaaauuugacaaauuguacauuugggggguucaccacccggguacgaacaaugaccaaaucagccuauaugcucaagcaucaggaagaaucacagucucuaccaaaagaagccaacaaacuguaaucccgaauaucggaucuagacccaggguaagggauauccccagcagaauaagcaucuauuggacaauaguaaaaccgggagacauacuuuugauuaacagcacagggaaucuaauugcuccucgggguuacuucaaaauacgaagugggaaaagcucaauaaugagaucagaugcacccauuggcaaaugcaauucugaaugcaucacuccaaauggaagcauucccaaugacaaaccauuucaaaauguaaacaggaucacauauggggccugucccagauauguuaagcaaaacacucugaaauuggcaacagggaugcgaaauguaccagagaaacaaacuagaggcauauuuggcgcaaucgcggguuucauagaaaaugguugggagggaaugguggaugguugguacgguuucaggcaucaaaauucugagggaauaggacaagcagcagaucucaaaagcacucaagcagcaaucaaccaaaucaaugggaagcugaauagguugaucgggaaaaccaacgagaaauuccaucagauugaaaaagaauucucagaaguagaagggagaauucaggaccucgagaaauauguugaggacacuaaaauagaucucuggucauacaacgcggagcuucuuguugcccuggagaaccaacauacaauugaucuaacugacucagaaaugaacaaacuguuugaaagaacaaagaagcaacugagggaaaaugcugaggauaugggcaaugguuguuucaaaauauaccacaaaugugacaaugccugcauagggucaaucagaaauggaacuuaugaccaugauguauacagagaugaagcauuaaacaaccgguuccagaucaaagguguugagcugaagucaggauacaaagauuggauccuauggauuuccuuugccauaucauguuuuuugcuuuguguugcuuuguugggguucaucaugugggccugccaaaaaggcaacauuaggugcaacauuugcauuuga

SEQ ID NO: 32333 - RNA, 1701 nt, Artificial Sequence; identical to SEQ ID NO: 32332
  derived and/or modified CDS sequence (wt) from hemagglutinin__InfluenzaA__ABA26788

SEQ ID NO: 32334 - RNA, 1701 nt, Artificial Sequence
  derived and/or modified CDS sequence (wt) from hemagglutinin__InfluenzaA__ABA26799
augaagacuaucauugcuuugagcuacauucuaugucugguuuucgcucaaaaacuucccggaaaugacaacagcacggcaacgcugugccuugggcaccaugcaguaccaaacggaacgauagugaaaacaaucacgaaugaccaaauugaaguuacuaaugcuacugagcugguucagaguuccucaacagguggaauaugcgacaguccucaucagauccuugauggagaaaacugcacacuaauagaugcucuauugggagacccucagugugauggcuuccaaaauaagaaaugggaccuuuuuguugaacgcagcaaagccuacagcaacuguuacccuuaugaugugccggauuaugccucccuuaggucacuaguugccucauccggcacacuggaguuuaacaaugaaagcuucaauuggacuggagucacucaaaauggaacaagcucugcuugcaaaaggagaucuaauaacaguuucuuuaguagauugaauugguugacccauuuaaaauucaaauacccagcauugaacgugacuaugccaaacaaugaaaaauuugacaaauuguacauuugggggguucaccacccggguacgaacaaugaccaaaucagccuauaugcucaagcaucaggaagaaucacagucucuaccaaaagaagccaacaaacuguaaucccgaauaucggaucuagacccaggguaagggauauccccagcagaauaagcaucuauuggacaauaguaaaaccgggagacauacuuuugauuaacagcacagggaaucuaauugcuccucgggguuacuucaaaauacgaagugggaaaagcucaauaaugagaucagaugcacccauuggcaaaugcaauucugaaugcaucacuccaaauggaagcauucccaaugacaaaccauuucaaaauguaaacaggaucacauauggggccugucccagauauguuaagcaaaacacucugaaauuggcaacagggaugcgaaauguaccagagaaacaaacuagaggcauauuuggcgcaaucgcggguuucauagaaaaugguugggagggaaugguggaugguugguacgguuucaggcaucaaaauucugagggaauaggacaagcagcagaucucaaaagcacucaagcagcaaucaaccaaaucaaugggaagcugaauagguugaucgggaaaaccaacgagaaauuccaucagauugaaaaagaauucucagaaguagaagggagaauucaggaccucgagaaauauguugaggacacuaaaauagaucucuggucauacaacgcggagcuucuuguugcccuggagaaccaacauacaauugaucuaacugacucagaaaugaacaaacuguuugaaagaacaaagaagcaacugagggaaaaugcugaggauaugggcaaugguuguuucaaaauauaccacaaaugugacaaugccugcauagggucaaucagaaauggaacuuaugaccaugauguauacagagaugaagcauuaaacaaccgguuccagaucaaagguguugagcugaagucaggauacaaagauuggauccuauggauuuccuuugccauaucauguuuuuugcuuuguguugcuuuguugggguucaucaugugggccugccaaaaaggcaacauuaggugcaacauuugcauuuga

SEQ ID NO: 32335 - RNA, 1698 nt, Artificial Sequence
  derived and/or modified CDS sequence (wt) from hemagglutinin__InfluenzaA__ABA42247
augaaaguaaaacuacugguucuguuauguacauuuacagcuacauaugcagacacaauauguauaggcuaccaugccaacaacucaaccgacacuguugacacaguacuugagaagaaugugacagugacacacucugucaaccuacuugaggacagucacaauggaaaacuaugucuacuaaaaggaauagccccauuacaauuggguaauugcagcguugccggauggaucuuaggaaacccagaaugcgaauuacugauuuccaaggaaucaugguccuacauuguagaaacaccaaauccugagaauggaacauguuacccaggguauuucgccgacuaugaggaacugagggagcaauugaguucaguaucuucauuugagagguucgaaauauuccccaaagagagcucauggcccaaccacaccguaaccggaguaucagcaucaugcucccauaacgggaaaagcaguuuuuacaaaaauuugcuauggcugacggggaagaaugguuuguacccaaaccugagcaaguccuaugcaaacaacaaagagaaagaaguccuuguacuaugggguguucaucacccgccuaacauaggggaccaaagggcccucuaucauacagaaaaugcuuaugucucuguagugucuucacauuauagcagaagauucaccccagaaauagccaaaagacccaaggugagagaucaggaaggaagaaucaacuacuacuggacucugcuggaacccggggauacaauaauauuugaggcaaauggaaaucuaauagcgccaagguaugcuuucgcacugaguagaggcuuuggaucaggaaucaucaccucaaaugcaccaauggaugaaugugaugcgaagugucaaacaccucagggagcuauaaacagcagucuuccuuuccagaauguacacccagucacaauaggagaguguccaaaguaugucaggagugcaaaauuaaggaugguuacaggacuaaggaacaucccauccauucaauccagagguuuguuuggagccauugccgguuucauugaagggggguggacugggaugguagaugguugguaugguuaucaucaucagaaugagcaaggaucuggguaugcugcagaucaaaaaagcacacaaaaugccauuaacgggauuacaaacaaggugaauucuguaauugagaaaaugaacacucaauucacagcugugggcaaagaauucaacaaauuggaaagaaggauggaaaacuuaaauaaaaaaguugaugauggguuucuagacauuuggacauauaaugcagaauuguugguucuacuggaaaaugaaaggacuuuggauuuccaugacuccaacgugaagaaucuguaugagaaaguaaaaagccaauuaaagaauaaugccaaagaaauaggaaacggguguuuugaauucuaucacaaguguaacgaugaaugcauggagagugugaaaaauggaacuuaugacuauccaaaauauuccgaagaaucaaaguuaaacagggagaaaauugauggagugaaauuggaaucaaugggagucuaucagauucuggcgaucuacucaacagucgccaguucccugguucuuuuggucucccugggggcaaucagcuucuggauguguuccaaugggucuuugcaguguagaauaugcaucuaa

SEQ ID NO: 32336 - RNA, 1698 nt, Artificial Sequence
  derived and/or modified CDS sequence (wt) from hemagglutinin__InfluenzaA__ABA42258
augaaagcaaaacuacugguccuguuauguacauuuacagcuacauacgcagacacaauauguauaggcuaccaugccaacaacucaaccgacacuguugacacaguacuugagaagaaugugacagugacacacucugucaaccuacuugaggacagucacaacggaaaacuaugucuacuaaaaggaauagccccacuacaauuggguaauugcagcguugccggauggaucuuaggaaacccagaaugcgaauuacugauuuccaaggaaucaugguccuacauuguagaaacaccaaaucccgagaauggaacauguuacccaggguauuucgccgacuaugaggaacugagggagcaauugaguucaguaucuucauuugagagauucgaaauauuccccaaagggagcucauggcccaaccacaccguaaccggaguaucagcaucaugcucccauaaugggaaaagcaguuuuuacagaaauuugcuauggcugacggggaagaaugguuuguacccaaaccugagcauguccuauguaaacaacaaagagaaagaaguccuugugcuaugggguguucaucacccaccuaacauaggggaccaaagggcccucuaccauacagaaaaugcuuaugucucuguagugucuucacauuauagcagaagauucaccccagaaauagccaaaagacccaaaguaagagaucaggaaggaagaaucaacuacuacuggacucugcuggaacccggggacacaauaauauuugaggcaaauggaaaucuaauagcgccaugguaugcuuucgcacugaguagaggcuuuggaucaggaaucaucaccucaaaugcaccaauggaugaaugugaugcgaagugucaaacaccucagggagcuauaaacaguagucuuccuuuccagaauguacacccaguuacaauaggagaguguccaaaguaugucaggagugcaaaauuaaggaugguuacaggacuaaggaacaucccauccauucaauccagagguuuguuuggagccauugccgguuucauugaagggggguggacuggaaugguagaugggugguaugguuaucaucaucagaaugagcaaggaucuggcuaugcugcagaucaaaaaagcacacaaaaugccauuaacgggauuacaaacaaggugaauucuguaauugagaaaaugaacacucaauucacagcugugggcaaagaauucaacaaauuagaaagaaggauggaaaacuuaaauaaaaaaguugaugauggguuucuagacauuuggacauauaaugcagaauuguugguucuacuggaaaaugaaaggacuuuggauuuccaugacuccaaugugaagaaucuguaugagaaaguaaaaagccaauuaaagaauaaugccaaagaaauaggaaacggguguuuugaauucuaucacaaguguaacaaugaaugcauggaaagugugaaaaauggaacuuaugacuauccaaaauauuccgaagaaucaaaguuaaacagggagaaaauugauggaguaaaauuggaaucaaugggagucuaucagauucuggcgaucuacucaacugucgccaguucccugguucuuuuggucucccugggggcaaucagcuucuggauguguuccaaugggucuuugcaguguagaauaugcaucuga

SEQ ID NO: 32337 - RNA, 1701 nt, Artificial Sequence
  derived and/or modified CDS sequence (wt) from hemagglutinin__InfluenzaA__ABA42269
augaagacuaucauugcuuugagcuacauucuaugucugguuuucgcucaaaaacuucccggaaaugacaacagcacggcaacgcugugccuugggcaccaugcaguaccaaacggaacgauagugaaaacaaucacgaaugaccaaauugaaguuacuaaugcuacugagcugguucagaguuccucaacagguggaauaugcgacaguccucaucagauccuugauggagaaaacugcacacuaauagaugcucuauugggagacccucagugugauggcuuccaaaauaagaaaugggaccuuuuuauugaacgcagcaaagccuacagcaacuguuacccuuaugaugugccggauuaugccucccuuaggucacuaguugccucauccggcacacuggaauuuaacaaugaaagcuucaauuggacuggagucacucaaaauggaacaagcucugcuugcaaaaggagaucuaauaacaguuucuuuaguagauugaauugguugacccacuuaaaauucaaauacccagcauugaacgugacuaugccaaacaaugaaaaauuugacaaauuguacauuugggggguucaccacccggguacggacaaugaccaaaucagccuauaugcucaagcuucaggaagaaucacagucucuaccaaaagaagccaacaaacuguaaucccgaauaucggaucuagacccaggguaagggauauccccagcaggauaagcaucuauuggacaauaguaaaaccgggagacauacuuuugauuaacagcacagggaaucuaauugcuccucgggguuacuucaaaauacgaagugggaaaagcucaauaaugagaucagaugcacccauuggcaaaugcaauucugaaugcaucacuccaaauggaagcauucccaaugacaaaccauuucaaaauguaaacaggaucacauauggggccugucccagauauguuaagcaaaacacucugaaauuggcaacagggaugcgaaauguaccagagaaacaaacuagaggcauauuuggcgcaaucgcggguuucauagaaaaugguugggagggaaugguggaugguugguacgguuucaggcaucaaaauucugagggaauaggacaagcagcagaucucaaaagcacucaagcagcaaucaaccaaaucaaugggaagcugaauagguugaucgggaaaaccaacgagaaauuccaucagauugaaaaagaauucucagaaguagaagggagaauucaggaccucgagaaauauguugaggacacuaaaauagaucucuggucauacaacgcggagcuucuuguugcccuggagaaccaacauacaauugaucuaacugacucagaaaugaacaaacuguuugaaagaacaaagaagcaacugagggaaaaugcugaggauaugggcaaugguuguuucaaaauauaccacaaaugugacaaugccugcauagggucaaucagaaauggaacuuaugaccaugauguauacagagaugaggcauugaacaaccgguuccagaucaaagguguugagcugaagucaggauacaaagauuggauccuauggauuuccuuugccauaucauguuuuuugcuuuguguugcuuuguugggguucaucaugugggccugccaaaaaggcaacauuaggugcaacauuugcauuuga

SEQ ID NO: 32338 - RNA, 1698 nt, Artificial Sequence
  derived and/or modified CDS sequence (wt) from hemagglutinin__InfluenzaA__ABA42280
augaaaguaaaacuacugauccuguuauguacauuuacagcuacauaugcagacacaauauguauaggcuaccaugccaacaacucaaccgacacuguugacacaguacuugagaagaaugugacagugacacacucugucaaccuacuugaggacagucacaauggaaaacugugccuacuaaaaggaauagccccccuacaauuggguaauugcagcguugccggauggaucuuaggaaacccagaaugcgaauuacugauuuccaaggaaucaugguccuacauuguagaaacaccaaauccugagaauggagcauguuacccaggguauuucgccgacuaugaggagcuaagggagcaauugaguucaguaucuucauuugagagauucgaaauauuccccaaagaaagcucauggcccaaccacaccguaaccggaguaucagcaucaugcucccauaaugggaaaagcaguuuuuacagaaauuugcuauggcugacggggaagaaugguuuguacccaaaccugagcaaguccuaugcaaacaacaaagagaaagaaguccuuauacuaugggguguucaucacccgccuaacauaggggaccaaaggacccucuaucacacagaaaaugcuuaugucucuguagugucuucacauuauagcagaagauucaccccagaaauaaccaaaaggcccaaaguaagagaucaggaaggaagaaucaacuacuacuggacucugcuggaacccggggauacaauaauauuugaggcaaauggaaaucuaauagcgccaugguaugcuuucgcacugaguagaggcuuuggaucaggaaucaucaccucaaaugcaccaauggaugaaugugaugcgaagugucaaacaccucagggagcuauaaacagcagucuuccuuuccagaauguacacccagucacaauaggagaguguccaaaguaugucaggagugcaaaauuaaggaugguuacaggacuaaggaacaucccauccauucaauccagagguuuguuuggagccauugccgguuucauugaagggggguggacuggaaugguagaugggugguaugguuaucaucaucagaaugagcaaggaucuggcuaugcugcagaucaaaaaagcacacaaaaugccauuaacgggauuacaaacaaggugaauucuguaauugagaaaaugaacacucaauucacagcugugggcaaagaauucaacaaauuggaaagaaggauggaaaacuuaaauaaaaagguugaugauggguuucuagacauuuggacauauaaugcagaauuguugguucuacuggaaaaugaaaggacuuuggauuuccacgacuccaaugugaagaaucuguacgagaaaguaaaaagccaauuaaagaauaaugccaaagaaauaggaaauggguguuuugaauucuaucacaaguguaacaaugaaugcauggagagugugaaaaauggaacuuaugacuauccaaaauauuccgaagaaucaaaguuaaacagggaaaaaauugauggagugaaauuggacucaaugggggucuaucagauucuggcgaucuacucaacugucgccaguucccugguucuuuuggucucccugggggcaaucagcuucuggauguguuccaaugggucuuugcaguguagaauaugcaucuga

SEQ ID NO: 32339 - RNA, 1701 nt, Artificial Sequence
  derived and/or modified CDS sequence (wt) from hemagglutinin__InfluenzaA__ABA42291
augaagacuaucauugcuuugagcuacauucuaugucugguuuucgcucaaaaacuucccggaaaugacaacagcacggcaacgcugugccuugggcaccaugcaguaccaaacggaacgauagugaaaacaaucacgaaugaccaaauugaaguuacuaaugcuacugagcugguucaaaguuccucaacagguggaauaugcgacaguccucaucagauccuugauggagaaaacugcacacuaauagaugcucuauugggagacccucagugugauggcuuccaaaauaagaaaugggaccuuuuuguugaacgcagcaaagccuacagcaacuguuacccuuaugaugugccggauuaugccucccuuaggucacuaguugccucauccggcacacuggaguuuaacaaugaaagcuucaauuggacuggagucacucaaaauggaacaagcucugcuugcaaaaggagaucuaauaacaguuucuuuaguagauugaauugguugacccacuuaaaauucaaauacccagcauugaacgugacuaugccaaacaaugaaaaauuugacaaauuguacauuugggggguucaccacccggguacggacaaugaccaaaucagccuauaugcucaagcaucaggaagaaucacagucucuaccaaaagaagccaacaaacuguaaucccgaacaucggaucuagacccaggguaagggauauccccagcagaauaagcaucuauuggacaauaguaaaaccgggagacauacuuuugauuaacagcacagggaaccuaauugcuccucgggguuacuucaaaauacgaagugggaaaagcucaauaaugagaucagaugcacccauuggcaaaugcaaaucugaaugcaucacuccaaauggaagcauucccaaugacaaaccauuucaaaauguaaacaggaucacauauggggccugucccagauauguuaagcaaaacacucugaaauuggcaacagggaugcgaaauguaccagagaaacaaacuagaggcauauuuggcgcaaucgcggguuucauagaaaaugguugggagggaaugguggaugguugguacgguuucaggcaucaaaauucugagggaauaggacaagcagcagaucucaaaagcacucaagcagcaaucaaccaaaucaaugggaagcugaauagguugaucgggaaaaccaacgagaaauuccaucagauugaaaaagaauucucagaaguagaagggagaauucaggaccucgagaaauaugucgaggacacuaaaacagaucucuggucauacaacgcggagcuucuuguugcccuggagaaccaacauacaauugaucuaacugacucagaaaugaacaaacuguuugaaagaacaaagaagcaacugagagaaaaugcugaggauaugggcaaugguuguuucaaaauauaccacaaaugugacaaugccugcauagggucaaucagaaauggaacuuaugaccaugauguauacagagaugaagcauuaaacaaccgguuccagaucaaagguguugagcugaagucaggauacaaagauuggauccuauggauuuccuuugccauaucauguuuuuugcuuuguguugcuuuguugggguucaucaugugggccugccaaaaaggcaacauuaggugcaacauuugcauuuga

SEQ ID NO: 32340 - RNA, 1701 nt, Artificial Sequence; identical to SEQ ID NO: 32095
  derived and/or modified CDS sequence (wt) from hemagglutinin__InfluenzaA__ABA42302

SEQ ID NO: 32341 - RNA, 1701 nt, Artificial Sequence
  derived and/or modified CDS sequence (wt) from hemagglutinin__InfluenzaA__ABA42313
augaagacuaucauugcuuugagcuacauuuuaugucugguuuucgcucaaaaacuucccggaaaugacaacagcacggcaacgcugugccuggggcaccaugcagugccaaacggaacgcuagugaaaacaaucacgaaugaccaaauugaagugacuaaugcuacugagcugguucagaguuccucaacagguagaauaugcgacaguccucaccaaauccuugauggagaaaacugcacacuaauagaugcucuauugggagacccucauugugauggcuuccaaaauaaggaaugggaccuuuuuguugaacgcagcaaagccuacagcaacuguuacccuuaugaugugccggauuaugucucccuuaggucacuaguugccucaucaggcacgcuggaguuuaacaaugaaagcuucaauuggacuggagucgcucagaauggaacaagcucugcuugcaaaaggagaucugauaaaaguuucuuuaguagauugaauugguugcaccaauuaaaauacaaauauccagcacugaacgugacuaugccaaacaaugaaaaauuugacaaauuguacauuugggggguucaccacccggguacagacagugaccaaaucagccuauaugcucaagcaucagggagagucacagucucuaccaaaagaagccaacaaacuguaaucccgaauaucggaucuggacccuggguaaggggugucuccagcagaauaagcaucuauuggacaauaguaaaaccgggagacauacuuuugauuaacagcacagggaaucuaauugcuccucgggguuacuucaaaauacgaagugggaaaagcucaauaaugaggucagaugcacccauuggcaaaugcaauucugaaugcaucacuccaaauggaagcauucccaaugacaaaccauuucaaaauguaaacaggaucacauaugggcccugucccagauauguuaagcaaaacacucugaaauuggcaacagggaugcggaaugugccagagaaacaaacuagaggcauauucggugcaaucgcgggcuucauagaaaaugguugggagggaaugauggacgguugguacgguuucaggcaucaaaauucugagggcacagggcaagcagcagaucuuaaaagcacucaagcagcaaucaaccaaaucaacgggaaacugaauagguuaaucgagaaaacgaacgagaaauuccaucaaauugaaaaggaauucucagaaguagaagggagaauucaggaccucgagaaauauguugaggacacuaaaauagaucucuggucguacaaugcggagcuucuuguugcccuggagaaccaacauacaauugaucuaacugacucagaaaugaacaaacuguuugaaagaacaaagaagcaacugagggaaaaugcugaggauaugggcaaugguuguuucaaaauauaccacaaaugugacaaugccugcauagggucaaucagaaauggaacuuaugaccaugauguauacagagacgaagcauugaacaaccgguuccagaucaaagguguugagcugaagucaggauacaaagauuggauccuauggauuuccuuugccauaucauguuuuuugcuuuguauuguuuugcugggguucaucaugugggccugccaaaaaggcaacauuaggugcaacauuugcauuuga

SEQ ID NO: 32342 - RNA, 1701 nt, Artificial Sequence
  derived and/or modified CDS sequence (wt) from hemagglutinin__InfluenzaA__ABA42346
augaagacuaucauugcuuugagcuacauuuuaugucugguuuucgcucaaaaacuucccggaaaugacaacagcacggcaacgcugugccuggggcaccaugcagugccaaacggaacgcuagugaaaacaaucacgaaugaccaaauugaagugacuaaugcuacugagcugguucagaguuccucaacagguagaauaugcgacaguccucaccaaauccuugauggagaaaacugcacacuaauagaugcucuauugggagacccucauugugauggcuuccaaaauaaggaaugggaccuuuuuguugaacgcagcaaagccuauagcaacuguuacccuuaugaugugccggauuaugucucccuuaggucacuaguugccucaucaggcacgcuggaguuuaacaaugaaagcuucaauuggacuggagucgcucagaauggaacaagcucugcuugcaaaaggagaucugauaaaaguuucuuuaguagauugaauugguugcaccaauuaaaauacaaauauccagcacugaacgugacuaugccaaacaaugaaaaauuugacaaauuguacauuugggggguucaccacccggguacagacagugaccaaaucagccuauaugcucaagcaucagggagagucacagucucuaccaaaagaagccaacaaacuguaaucccgaauaucggaucuagacccuggguaaggggugucuccagcagaauaagcaucuauuggacaauaguaaaaccgggagacauacuuuugauuaacagcacagggaaucuaauugcuccucgggguuacuucaaaauacgaagugggaaaagcucaauaaugaggucagaugcacccauuggcaaaugcaauucugaaugcaucacuccaaauggaagcauucccaaugacaaaccauuucaaaauguaaacagaaucacauaugggcccugucccagauauguuaagcaaaacacucugaaauuggcaacagggaugcggaaugugccagagaaacaaacuagaggcauauucggugcaaucgcgggcuucauagaaaaugguugggagggaaugauggacgguugguacgguuucaggcaucaaaauucugagggcacagggcaagcagcagaucuuaaaagcacucaagcagcaaucaaccaaaucaacgggaaacugaauagguuaaucgagaaaacgaacgagaaauuccaucaaauugaaaaggaauucucagaaguagaagggagaauucaggaccucgagaaauauguugaggacacuaaaauagaucucuggucguacaaugcggagcuucuuguugcccuggagaaccaacauacaauugaucuaacugacucagaaaugaacaaacuguuugaaagaacaaagaagcaacugagggaaaaugcugaggauaugggcaaugguuguuucaaaauauaccacaaaugugacaaugccugcauagggucaaucagaaauggaacuuaugaccaugauguauacagagacgaagcauugaacaaccgguuccagaucaaagguguugagcugaagucaggauacaaagauuggauccuauggauuuccuuugccauaucauguuuuuugcuuuguauuguuuugcugggguucaucaugugggccugccaaaaaggcaacauuaggugcaacauuugcauuuga

SEQ ID NO: 32343 - RNA, 1701 nt, Artificial Sequence
  derived and/or modified CDS sequence (wt) from hemagglutinin__InfluenzaA__ABA42357
augaagacuaucauugcuuugagcuacauuuuaugucugguuuucgcucaaaaacuucccggaaaugacaacagcacggcaacgcugugccuggggcaccaugcagugccaaacggaacgcuagugaaaacaaucacgaaugaccaaauugaagugacuaaugcuacugagcugguucagaguuccucaacagguagaauaugcgacaguccucaccaaauccuugauggagaaaacugcacacuaauagaugcucuauugggagacccucauugugauggcuuccaaaauaaggaaugggaccuuuuuguugaacgcagcaaagccuacagcaacuguuacccuuaugaugugccggauuaugucucccuuaggucacuaguugccucaucaggcacgcuggaguuuaacaaugaaagcuucaauuggacuggagucgcucagaauggaacaagcucugcuugcaaaaggagaucugauaaaaguuucuuuaguagauugaauugguugcaccaauuaaaauacaaauauccagcacugaacgugacuaugccaaacaaugaaaaauuugacaaauuguacauuugggggguucaccacccggguacagacagugaccaaaucagccuauaugcucaagcaucagggagagucacagucucuaccaaaagaagccaacaaacuguaaucccgaauaucggaucuggacccuggguaaggggugucuccagcagaauaagcaucuauuggacaauaguaaaaccgggagacauacuuuugauuaacagcacagggaaucuaauugcuccucgggguuacuucaaaauacgaagugggaaaagcucaauaaugaggucagaugcacccauuggcaaaugcaauucugaaugcaucacuccaaauggaagcauucccaaugacaaaccauuucaaaauguaaacaggaucacauaugggcccugucccagauauguuaagcaaaacacucugaaauuggcaacagggaugcggaaugugccagagaaacaaacuagaggcauauucggugcaaucgcgggcuucauagaaaaugguugggagggaaugauggacgguugguacgguuucaggcaucaaaauucugagggcacagggcaagcagcagaucuuaaaagcacucaagcagcaaucaaccaaaucaacgggaaacugaauagguuaaucgagaaaacgaacgagaaauuccaucaaauugaaaaagaauucucagaaguagaagggagaauucaggaccucgagaaauauguugaggacacuaaaauagaucucuggucguacaaugcggagcuucuuguugcccuggagaaccaacauacaauugaucuaacugacucagaaaugaacaaacuguuugaaagaacaaagaagcaacugagggaaaaugcugaggauaugggcaaugguuguuucaaaauauaccacaaaugugacaaugccugcauagggucaaucagaaauggaacuuaugaccaugauguauacagagacgaagcauugaacaaccgguuccagaucaaagguguugagcugaagucaggauacaaagauuggauccuauggauuuccuuugccauaucauguuuuuugcuuuguauuguuuugcugggguucaucaugugggccugccaaaaaggcaacauuaggugcaacauuugcauuuga

SEQ ID NO: 32344 - RNA, 1701 nt, Artificial Sequence
  derived and/or modified CDS sequence (wt) from hemagglutinin__InfluenzaA__ABA42379
augaagacuaucauugcuuugagcuacauuuuaugucugguuuucgcucaaaaacuucccggaaaugacaacagcacggcaacgcugugccuggggcaccaugcagugccaaacggaacgcuagugaaaacaaucacgaaugaccaaauugaagugacuaaugcuacugagcugguucagaguuccucaacagguagaauaugcgacaguccucaccaaauccuugauggagaaaacugcacacuaauagaugcucuauugggagacccucauugugauggcuuccaaaauaaggaaugggaccuuuuuguugaacgcagcaaagccuacagcaacuguuacccuuaugaugugccggauuaugucucccuuaggucacuaguugccucaucaggcacgcuggaguuuaacaaugaaagcuucaauuggacuggagucgcucagaauggaacaagcucugcuugcaaaaggagaucugauaaaaguuucuuuaguagauugaauugguugcaccaauuaaaauacaaauauccagcacugaacgugacuaugccaaacaaugaaaaauuugacaaauuguacauuugggggguucaccacccggguacagacagugaccaaaucagccuauaugcucaagcaucagggagagucacagucucuaccaaaagaagccaacaaacuguaaucccgaauaucggaucuagacccuggguaaggggugucuccagcaaaauaagcaucuauuggacaauaguaaaaccgggagacauacuuuugauuaacagcacagggaaucuaauugcuccucgggguuacuucaaaauacgaagugggaaaagcucaauaaugaggucagaugcacccauuggcaaaugcaauucugaaugcaucacuccaaauggaagcauucccaaugacaaaccauuucaaaauguaaacaggaucacauaugggcccugucccagauauguuaagcaaaacacucugaaauuggcaacagggaugcggaaugugccagagaaacaaacuagaggcauauucggugcaaucgcgggcuucauagaaaaugguugggagggaaugauggacgguugguacgguuucaggcaucaaaauucugagggcacagggcaagcagcagaucuuaaaagcacucaagcagcaaucaaccaaaucaacgggaaacugaauagguuaaucgagaaaacgaacgagaaauuccaucaaauugaaaaggaauucucagaaguagaagggagaauucaggaccucgagaaauauguugaggacacuaaaauagaucucuggucguacaaugcggagcuucuuguugcccuggagaaccaacauacaauugaucuaacugacucagaaaugaacaaacuguuugaaagaacaaagaagcaacugagggaaaaugcugaggauaugggcaaugguuguuucaaaauauaccacaaaugugacaaugccugcauagggucaaucagaaauggaacuuaugaccaugauguauacagagacgaagcauugaacaaccgguuccagaucaaagguguugagcugaagucaggauacaaagauuggauccuauggauuuccuuugccauaucauguuuugugcuuuguauuguuuugcugggguucaucaugugggccugccaaaaaggcaacauuaggugcaacauuugcauuuga

SEQ ID NO: 32345 - RNA, 1701 nt, Artificial Sequence; identical to SEQ ID NO: 32092
  derived and/or modified CDS sequence (wt) from hemagglutinin__InfluenzaA__ABA42390

SEQ ID NO: 32346 - RNA, 1701 nt, Artificial Sequence
  derived and/or modified CDS sequence (wt) from hemagglutinin__InfluenzaA__ABA42401
augaagacuaucauugcuuugagcuacauuuuaugccugguuuucgcucaaaaacuucccggaaaugacaacagcacggcaacgcugugccuggggcaccaugcagugccaaacggaacgcuagugaaaacaaucacgaaugaccagauugaaguaacuaaugcuacugagcugguucagaguuccucaacaaguagaauaugcgacaguccucaccaaauccuugauggagaaaacugcacacuaauagaugcucuauugggagacccucauugugauggcuuccaaaauaaggaaugggaccuuuuuguugaacgcagcaaagccuacagcaacuguuacccuuaugaugugccggauuaugucucccuuaggucacuaguugccucaucaggcacgcuggaguuuaacaaugaaagcuucaauuggacuggagucgcucagaauggaacaagcucugcuugcaaaaggagaucugauaaaaguuucuuuaguagauugaauugguugcaccaauuaaaauacaaauauccagcacugaacgugacuaugccaaacaaugaaaaauuugacaaauuguacauuugggggguucaccacccggguacagacagugaccaaaucagccuauaugcucaaucaucagggagagucacagucucuaccaaaagaagccaacaaacuguaaucccgaauaucggaucuggacccuggguaaggggugucuccagcagaauaagcaucuauuggacaauaguaaaaccgggagacauacuuuugauuaacagcacagggaaucuaauugcuccucgggguuacuucaaaauacgaagugggaaaagcucaauaaugaggucagaugcacccauuggcaaaugcaauucuaaaugcaucacuccaaauggaagcauucccaaugacaaaccauuucaaaauguaaacaggaucacauauggggccugucccagauauguuaagcaaaacacucugaaauuggcaacagggaugcggaauguaccagagaaacaaacuagaggcauauucggugcaaucgcgggcuucauagaaaaugguugggagggaaugauggacgguugguacgguuucaggcaucaaaauucugagggcacagggcaagcagcagaucuuaaaagcacucaagcagcaaucaaccaaaucaacgggaaacugaauagguuaaucgagaaaacgaacgagaaauuccaucaaauugaaaaagaauucucagaaguagaagggagaauucaggaccucgagaaauauguugaggacacuaaaauagaucucuggucguacaaugcggagcuucuuguugcccuggagaaccaacauacaauugaucuaacugacucagaaaugaacaaacuguuugaaagaacaaagaagcaacugagggaaaaugcugaggauaugggcaaugguuguuucaaaauauaccacaaaugugacaaugccugcauagggucaaucagaaauggaacuuaugaccaugauguauacagagacgaagcauugaacaaccgguuccagaucaaagguguugagcugaagucaggauacaaagauuggauccuauggauuuccuuugccauaucauguuuuuugcuuuguauuguuuugcugggguucaucaugugggccugccaaaaaggcaacauuaggugcaacauuugcauuuga

SEQ ID NO: 32347 - RNA, 1701 nt, Artificial Sequence
  derived and/or modified CDS sequence (wt) from hemagglutinin__InfluenzaA__ABA42412
augaagacuaucauugcuuugagcuacauuuuaugucugguuuucgcucaaaaacuucccggaaaugacaacagcacggcaacgcugugccuggggcaccaugcagugccaaacggaacgcuagugaaaacaaucacgaaugaccaaauugaagugacuaaugcuacugagcugguucagaguuccucaacagguagaauaugcgacaguccucaccaaauccuugauggagaaaacugcacacuaauagaugcucuauugggagacccucauugugauggcuuccaaaauaaggaaugggaccuuuuuguugaacgcagcaaagccuacagcaacuguuacccuuaugaugugccggauuaugucucccuuaggucacuaguugccucaucaggcacgcuggaguuuaacaaugaaagcuucaauuggacuggagucgcucagaauggaacaagcucugcuugcaaaaggagaucugauaaaaguuucuuuaguagauugaauugguugcaccaauuaaaauacaaauauccagcacugaacgugacuaugccaaacaaugaaaaauuugacaaauuguacauuugggggguucaccacccggguacagacagugaccaaaucagccuauaugcucaagcaucagggagagucacagucucuaccaaaagaagccaacaaacuguaaucccgaauaucggaucuagacccuggguaaggggugucuccagcaaaauaagcaucuauuggacaauaguaaaaccgggagacauacuuuugauuaacagcacagggaaucuaauugcuccucgggguuacuucaaaauacgaagugggaaaagcucaauaaugaggucagaugcacccauuggcaaaugcaauucugaaugcaucacuccaaguggaagcauucccaaugacaaaccauuucaaaauguaaacaggaucacauaugggcccugucccagauauguuaagcaaaacacucugaaauuggcaacagggaugcggaaugugccagagaaacaaacuagaggcauauucggugcaaucgcgggcuucauagaaaaugguugggagggaaugauggacgguugguacgguuucaggcaucaaaauucugagggcacagggcaagcagcagaucuuaaaagcacucaagcagcaaucaaccaaaucaacgggaaacugaauagguuaaucgagaaaacgaacgagaaauuccaucaaauugaaaaggaauucucagaaguagaagggagaauucaggaccucgagaaauauguugaggacacuaaaauagaucucuggucguacaaugcggagcuucuuguugcccuggagaaccaacauacaauugaucuaacugacucagaaaugaacaaacuguuugaaagaacaaagaagcaacugagggaaaaugcugaggauaugggcaaugguuguuucaaaauauaccacaaaugugacaaugccugcauagggucaaucagaaauggaacuuaugaccaugauguauacagagacgaagcauugaacaaccgguuccagaucaaagguguugagcugaagucaggauacaaagauuggauccuauggauuuccuuugccauaucauguuuuuugcuuuguauuguuuugcugggguucaucaugugggccugccaaaaaggcaacauuaggugcaacauuugcauuuga

SEQ ID NO: 32348 - RNA, 1701 nt, Artificial Sequence
  derived and/or modified CDS sequence (wt) from hemagglutinin__InfluenzaA__ABA42443
augaagacuaucauugcuuugagcuacauuuuaugccugguuuucgcucaaaaacuucccggaaaugacaacagcacggcaacgcugugccuggggcaccaugcagugccaaacggaacgcuagugaaaacaaucacgaaugaccaaauugaaguaacuaaugcuacugagcugguucagaguuccucaacaaguagaauaugcgacaguccucaccaaauccuugauggagaaaacugcacacuaauagaugcucuauugggagacccucauugugauggcuuccaaaauaaggaaugggaccuuuuuguugaacgcagcaaagccuacagcaacuguuacccuuaugaugugccggauuaugucucccuuaggucacuaguugccucaucaggcacgcuggaguuuaacaaugaaagcuucaauuggacuggagucgcucagaauggaacaagcucugcuugcaaaaggagaucugauaaaaguuucuuuaguagauugaauugguugcaccaauuaaaauacaaauauccagcacugaacgugacuaugccaaacaaugaaaaauuugacaaauuguacauuugggggguucaccacccggguacagacagugaccaaaucagccuauaugcucaagcaucagggagagucacagucucuaccaaaaggagccaacaaacuguaaucccgaauaucggaucuagacccuggguaaggggugucuccagcagaauaagcaucuauuggacaauaguaaaaccgggagacauacuuuugauuaacagcacagggaaucuaauugcuccucgggguuacuucaaaauacgaagugggaaaagcucaauaaugaggucagaugcacccauuggcaaaugcaauucugaaugcaucacuccaaauggaagcauucccaaugacaaaccauuucaaaauguaaacaggaucacauauggggccugucccagauauguuaagcaaaacacucugaaauuggcaacagggaugcggaauguaccagagaaacaaacuagaggcauauucggugcaaucgcgggcuucauagaaaaugguugggagggaaugauggacgguugguacgguuucaggcaucaaaauucugagggcacagggcaagcagcagaucuuaaaagcacucaagcagcaaucaaccaaaucaacgggaaacugaauagguuaaucgagaaaacgaacgagaaauuccaucaaauugaaaaagaauucucagaaguagaagggagaauucaggaccucgagaaauauguugaggacacuaaaauagaucucuggucguacaaugcggagcuucuuguugcccuggagaaccaacauacaauugaucuaacugacucagaaaugaacaaacuguuugaaagaacaaagaagcaacugagggaaaaugcugaggauaugggcaaugguuguuucaaaauauaccacaaaugugacaaugccugcauagggucaaucagaaauggaacuuaugaccaugauguauacagagacgaagcauugaacaaccgguuccagaucaaagguguugagcugaagucaggauacaaagauuggauccuauggauuuccuuugccauaucauguuuuuugcuuuguauuguuuugcugggguucaucaugugggccugccaaaaaggcaacauuaggugcaacauuugcauuuga

SEQ ID NO: 32349 - RNA, 1701 nt, Artificial Sequence
  derived and/or modified CDS sequence (wt) from hemagglutinin__InfluenzaA__ABA42454
augaagacuaucauugcuuugagcuacauuuuaugucugguuuucgcucaaaaacuucccggaaaugacaacagcacggcaacgcugugccuggggcaccaugcagugccaaacggaacgcuagugaaaacaaucacgaaugaccaaauugaagugacuaaugcuacugagcugguucagaguuccucaacagguagaauaugcgacaguccucaccaaauccuugauggagaaaacugcacacuaauagaugcucuauugggagacccucauugugauggcuuccaaaauaaggaaugggaccuuuuuguugaacgcagcaaagccuacagcaacuguuacccuuaugaugugccggauuauguuucccuuaggucacuaguugccucaucaggcacgcuggaguuuaacaaugaaagcuucaauuggacuggagucgcucagaauggaacaagcucugcuugcaaaaggagaucugauaaaaguuucuuuaguagauugaauugguugcaccaauuaaaauacaaauauccagcacugaacgugacuaugccaaacaaugaaaaauuugacaaauuguacauuugggggguucaccacccggguacagacagugaccaaaucagccuauaugcucaagcaucagggagagucacagucucuaccaaaagaagccaacaaacuguaaucccgaauaucggaucuagacccuggguaaggggugucuccagcagaauaagcaucuauuggacaauaguaaaaccgggagacauacuuuugauuaacagcacagggaaucuaauugcuccucgggguuacuucaaaauacgaagugggaaaagcucaauaaugaggucagaugcacccauuggcaaaugcaauucugaaugcaucacuccaaauggaagcauucccaaugacaaaccauuucaaaauguaaacaggaucacauaugggcccugucccagauauguuaagcaaaacacucugaaauuggcaacagggaugcggaaugugccagagaaacaaacuagaggcauauucggugcaaucgcgggcuucauagaaaaugguugggagggaaugauggacgguugguacgguuucaggcaucaaaauucugagggcacagggcaagcagcagaucuuaaaagcacucaagcagcaaucaaccaaaucaacgggaaacugaauagguuaaucgagaaaacgaacgagaaauuccaucaaauugaaaaagaauucucagaaguagaagggagaauucaggaccucgagaaauauguugaggacacuaaaauagaucucuggucguacaaugcggagcuucuuguugcccuggagaaccaacauacaauugaucuaacugacucagaaaugaacaaacuguuugaaagaacaaagaagcaacugagggaaaaugcugaggauaugggcaaugguuguuucaaaauauaccacaaaugugacaaugccugcauagggucaaucagaaauggaacuuaugaccaugauguauacagagacgaagcauugaacaaccgguuccagaucaaagguguugagcugaagucaggauacaaagauuggauccuauggauuuccuuugccauaucauguuuuuugcuuuguauuguuuugcugggguucaucaugugggccugccaaaaaggcaacauuaggugcaacauuugcauuuga

SEQ ID NO: 32350 - RNA, 1701 nt, Artificial Sequence
  derived and/or modified CDS sequence (wt) from hemagglutinin__InfluenzaA__ABA42465
augaagacuaucauugcuuugagcuacauuuuaugccugguuuucgcucaaaaacuucccggaaaugacaacagcacggcaacgcugugccuggggcaccaugcagugccaaacggaacgcuagugaaaacaaucacgaaugaccaaauugaaguaacuaaugcuacugagcugguucagaguuccucaacaaguagaauaugcgacaguccucaccaaauccuugauggagaaaacugcacacuaauagaugcucuauugggagacccucauugugauggcuuccaaaauaaggaaugggaccuuuuuguugaacgcagcaaagccuacagcaacuguuacccuuaugaugugccggauuaugucucccuuaggucacuaguugccucaucaggcacgcuggaguuuaacaaugaaagcuucaauuggacuggagucgcucagaauggaacaagcucugcuugcaaaaggagaucugauaaaaguuucuuuaguagauugaauugguugcaccaauuaaaauacaaauauccagcacugaacgugacuaugccaaacaaugaaaaauuugacaaauuguacauuugggggguucaccacccggguacagacagugaccaaaucagucuauaugcucaagcaucagggagagucacagucucuaccaaaagaagccaacaaacuguaaucccgaauaucggaucuagacccuggggaaggggugucuccagcagaauaagcaucuauuggacaauaguaaaaccgggagacauacuuuugauuaacagcacagggaaucuaauugcuccucgggguuacuucaaaauacgaagugggaaaagcucaauaaugaggucagaugcacccauuggcaaaugcaauucugaaugcaucacuccaaauggaagcauucccaaugacaaaccauuucaaaauguaaacaggaucacauauggggccugucccagauauguuaagcaaaacacucugaaauuggcaacagggaugcggaauguaccagagaaacaaacuagaggcauauucggugcaaucgcgggcuucauagaaaaugguugggagggaaugauggacgguugguacgguuucaggcaucaaaauucugagggcacagggcaagcagcagaucuuaaaagcacucaagcagcaaucaaccaaaucaacgggaaacugaauagguuaaucgagaaaacgaacgagaaauuccaucaaauugaaaaagaauucucagaaguagaagggagaauucaggaccucgagaaauauguugaggacacuaaaauagaucucuggucguacaaugcggagcuucuuguugcccuggagaaccaacauacaauugaucuaacugacucagaaaugaacaaacuguuugaaagaacaaagaagcaacugagggaaaaugcugaggauaugggcaaugguuguuucaaaauauaccacaaaugugacaaugccugcauagggucaaucagaaauggaacuuaugaccaugauguauacagagacgaagcauugaacaaccgguuccagaucaaagguguugagcugaagucaggauacaaagauuggauccuauggauuuccuuugccauaucauguuuuuugcuuuguauuguuuugcugggguucaucaugugggccugccaaaaaggcaacauuaggugcaacauuugcauuuga

SEQ ID NO: 32351 - RNA, 1701 nt, Artificial Sequence
  derived and/or modified CDS sequence (wt) from hemagglutinin__InfluenzaA__ABA42476
augaagacuaucauugcuuugagcuacauuuuaugucugguuuucgcucaaaaacuucccggaaaugacaacagcacggcaacgcugugccuggggcaccaugcagugccaaacggaacgcuagugaaaacaaucacgaaugaccaaauugaagugacuaaugcuacugagcugguucagaguuccucaacagguagaauaugcgacaguccucaccaaauccuugauggagaaaacugcacacuaauagaugcucuauugggagacccucauugugauggcuuccaaaauaaggaaugggaccuuuuuguugaacgcagcaaagccuacagcaacuguuacccuuaugaugugccggauuaugucucccuuaggucacuaguugccucaucaggcacgcuggaguuuaacaaugaaagcuucaauuggacuggagucgcucagaauggaacaagcucugcuugcaaaaggagaucugauaaaaguuucuuuaguagauugaauugguugcaccaauuaaaauacaaauauccagcacugaacgugacuaugccaaacaaugaaaaauuugacaaauuguacauuugggggguucaccacccggguacagacagugaccaaaucagccuauaugcucaagcaucagggagagucacagucucuaccaaaagaagccaacaaacuguaaucccgaauaucggaucuagacccuggguaaggggugucuccagcagaauaagcaucuauuggacaauaguaaaaccgggagacauacuuuugauuaacagcacagggaaucuaauugcuccucgggguuacuucaaaauacgaagugggaaaagcucaauaaugaggucagaugcacccauuggcaaaugcaauucugaaugcaucacuccaaauggaagcauucccaaugacaaaccauuucaaaauguaaacaggaucacauaugggcccugucccagauauguuaagcaaaacacucugaaauuggcaacagggaugcggaaugugccagagaaacaaacuagaggcauauucggugcaaucgcgggcuucauagaaaaugguugggagggaaugauggacgguugguacgguuucaggcaucaaaauucugagggcacagggcaagcagcagaucuuaaaagcacucaagcagcaaucaaccaaaucaacgggaaacugaauagguuaaucgagaaaacgaacgagaaauuccaucaaauugaaaaggaauucucagaaguagaagggagaauucaggaccucgagaaauauguugaggacacuaaaauagaucucuggucguacaaugcggagcuucuuguugcccuggagaaccaacauacaauugaucuaacugacucagaaaugaacaaacuguuugaaagaacaaagaagcaacugagggaaaaugcugaggauaugggcaaugguuguuucaaaauauaccacaaaugugacaaugccugcauagggucaaucagaaauggaacuuaugaccaugauguauacagaaacgaagcauugaacaaccgguuccagaucaaagguguugagcugaagucaggauacaaagauuggauccuauggauuuccuuugccauaucauguuuuuugcuuuguauuguuuugcugggguucaucaugugggccugccaaaaaggcaacauuaggugcaacauuugcauuuga

SEQ ID NO: 32352 - RNA, 1701 nt, Artificial Sequence
  derived and/or modified CDS sequence (wt) from hemagglutinin__InfluenzaA__ABA42498
augaagacuaucauugcuuugagcuacauuuuaugccugguuuucgcucaaaaacuucccggaaaugacaacagcacggcaacgcugugccuggggcaccaugcagugccaaacggaacgcuagugaaaacaaucacgaaugaccaaauugaaguaacuaaugcuacugagcugguucagaguuccucaacaaguagaauaugcgacaguccucaccaaauccuugauggagaaaacugcacacuaauagaugcucuauugggagacccucauugugauggcuuccaaaauaaggaaugggaccuuuuuguugaacgcagcaaagccuacagcaacuguuacccuuaugaugugccggauuaugucucccuuaggucacuaguugccucaucaggcacgcuggaguuuaacaaugaaagcuucaauuggacuggagucgcucagaauggaacaagcucugcuugcaaaaggagaucugauaaaaguuucuuuaguagauugaauugguugcaccaauuaaaauacaaauauccagcacugaacgugacuaugccaaacaaugaaaaauuugacaaauuguacauuugggggguucaccacccggguacagacagugaccaaaucagccuauaugcucaagcaucagggagagucacagucucuaccaaaagaagccaacaaacuguaaucccgaauaucggaucuagacccuggguaaggggugucuccagcauaauaagcaucuauuggacaauaguaaaaccgggagacauacuuuugauuaacagcacagggaaucuaauugcuccucgggguuacuucaaaauacgaagugggaaaagcucaauaaugaggucagaugcacccauuggcaaaugcaauucugaaugcaucacuccaaauggaagcauucccaaugacaaaccauuucaaaauguaaacaggaucacauauggggccugucccagauauguuaagcaaaacacucugaaauuggcaacagggaugcggaauguaccagagaaacaaacuagaggcauauucggugcaaucgcgggcuucauagaaaaugguugggagggaaugauggacgguugguacgguuucaggcaucaaaauucugagggcacagggcaagcagcagaucuuaaaagcacucaagcagcaaucaaccaaaucaacgggaaacugaauagguuaaucgagaaaacgaacgagaaauuccaucaaauugaaaaagaauucucagaaguagaagggagaauucaggaccucgagaaauauguugaggacacuaaaauagaucucuggucguacaaugcggagcuucuuguugcccuggagaaccaacauacaauugaucuaacugacucagaaaugaacaaacuguuugaaagaacaaagaagcaacugagggaaaaugcugaggauaugggcaaugguuguuucaaaauauaccacaaaugugacaaugccugcauagggucaaucagaaauggaacuuaugaccaugauguauacagagacgaagcauugaacaaccgguuccagaucaaagguguugagcugaagucaggauacaaagauuggauccuauggauuuccuuugccauaucauguuuuuugcuuuguauuguuuugcugggguucaucaugugggccugccaaaaaggcaacauuaggugcaacauuugcauuuga

SEQ ID NO: 32353 - RNA, 1701 nt, Artificial Sequence
  derived and/or modified CDS sequence (wt) from hemagglutinin__InfluenzaA__ABA42509
augaagacuaucauugcuuugagcuacauuuuaugucugguuuucgcucaaaaacuucccguaaaugacaacagcacggcaacgcugugccugggacaccaugcagugccaaacggaacgcuagugaaaacaaucacgaaugaccacauugaagugacuaaugcuacugagcugguucagaguuccucaacagguagaauaugcgacaguccucaccaaauccuugauggagaaaacugcacacuaauagaugcucuauugggagacccucauugugauggcuuccaaaauaaggaaugggaccuuuuuguugaacgcagcacagccuacagcaacuguuacccuuaugaugugccggauuaugccucccuuaggucacuaguugccucauccggcacacuggaguuuaacaaugaaagcuucaauuggacuggagucgcucagaauggaacaagcucugcuugcaaaaggagaucuauuaaaaguuucuuuaguagauugaauugguugcaccaauuaaaauacaaauauccagcacugaacgugacuaugccaaacaaugaaaaauuugacaaauuguacauuugggggguucaccacccgaguacggacagugaccaaaucagucuauaugcucaagcaucagggagagucacagucucuaccaaaagaagccaacaaacuguaaucccgaauaucggaucuagacccuggguaaggggugucuccagcagaauaagcaucuauuggacaauaguaaaaccgggagacauacuuuugauuaacagcacagggaaucuaauugcuccucgggguuacuucaaaauacgaagugggaaaagcucaauaaugaggucaaaugcacccauuggcaaaugcaauucugaaugcaucacuccaaauggaagcauucccaaugacaaaccauuucaaaauguaaacaggaucacauauggggccugucccagauauguuaagcaaaacacucugaaauuggcaacagggaugcggaauguaccagagaaacaaacuagaggcauauucggcgcaaucgcggguuucauagaaaaugguugggaaggaaugguggacgguugguacgguuucaggcaucaaaauucugagggcacaggacaagcagcagaucuuaaaagcacucaagcagcaaucaaccaaaucaacgggaaacugaauagguuaaucgagaaaacaaacgagaaauuccaucaaauugaaaaagaauucucagaaguagaagggagaauucaggaccucgagaaauauguugaggacacuaaaauagaucucuggucguacaacgcggagcuucuuguugcccuggagaaccaacauacaauugaucuaacugacucagaaaugaacaaacuguuugaaagaacaaggaagcaacugagggaaaaugcugaggauaugggcaaugguuguuucaaaauauaccacaaaugugacaaugccugcauagggucaaucagaaauggaacuuaugaccaugauguauacagagacgaagcauuaaacaaccgguuccagaucaaagguguugagcugaagucaggauacaaagauuggauccuauggauuuccuuugccauaucauguuuuuugcuuuguguuguuuugcugggguucaucaugugggccugccaaaaaggcaacauuaggugcaacauuugcauuuga

SEQ ID NO: 32354 - RNA, 1701 nt, Artificial Sequence
  derived and/or modified CDS sequence (wt) from hemagglutinin__InfluenzaA__ABA42520
augaagacuaucauugcuuugagcuacauuuuaugucugguuuucgcucaaaaacuucccguaaaugacaacagcacggcaacgcugugccugggacaccaugcagugccaaacggaacgcuagugaaaacaaucacgaaugacuacauugaagugacuaaugcuacugagcugguucagaguuccucaacagguagaauaugugacaguccucaccaaauccuugauggagaaaacugcacacuaauagaugcucuauugggagacccucauugugauggcuuccaaaauaaggaaugggaccuuuuuguugaacgcagcacagccuacagcaacuguuacccuuaugaugugccggauuaugccucccuuaggucacuaguugccucauccggcacacuggaguuuaacaaugaaagcuucaauuggacuggagucgcucagaauggaacaagcucugcuugcaaaaggagaucuauuaaaaguuucuuuaguagauugaauugguugcaccaauuaaaauacaaauauccagcacugaacgugacuaugccaaacaaugaaaaauuugacaaauuguacauuugggggguucaccacccgaguacggacagugaccaaaucagccuauaugcucaagcaucagggagagucacagucucuaccaaaagaagccaacaaacuguaaucccgaauaucggaucuagacccuggguaaggggugucuccagcauaauaagcaucuauuggacaauaguaaaaccgggagacauacuuuugauuaacagcacagggaaucuaauugcuccucgggguuacuuuaaaauacgaagugggaaaagcucaauaaugaggucaaaugcacccauuggcaaaugcaauucugaaugcaucacuccaaauggaagcauucccaaugacaaaccauuucaaaauguaaacaggaucacauauggggccugucccagauauguuaagcaaaacacucugaaauuggcaacagggaugcggaauguaccagagaaacaaacuagaggcauauucggcgcaaucgcggguuucauagaaaaugguugggagggaaugguggacgguugguacgguuucaggcaucaaaauucugagggcacaggacaagcagcagaucuuaaaagcacucaagcagcaaucaaccaaaucaacgggaaacugaauagguuaaucgagaaaacaaacgagaaauuccaucaaauugaaaaagaauucucagaaguagaagggagaauucaggaccucgagaaauauguugaggacacuaaaauagaucucuggucguacaacgcggagcuucuuguugcccuggagaaccaacauacaauugaucuaacugacucagaaaugaacaaacuguuugaaagaacaaggaagcaacugagggaaaaugcugaggauaugggcaaugguuguuucaaaauauaccacaaaugugacaaugccugcauagggucaaucagaaauggaacuuaugaccaugauguauacagagacgaagcauuaaacaaccgguuccagaucaaagguguugagcugaagucaggauacaaagauuggauccuauggauuuccuuugccauaucauguuuuuugcuuuguguuguuuugcugggguucaucaugugggccugccaaaaaggcaacauuaggugcaacauuugcauuuga

SEQ ID NO: 32355 - RNA, 1701 nt, Artificial Sequence
  derived and/or modified CDS sequence (wt) from hemagglutinin__InfluenzaA__ABA42531
augaagacuaucauugcuuugagcuacauuuuaugucugguuuucgcucaaaaacuucccguaaaugacaacagcacggcaacgcugugccugggacaccaugcagugccaaacggaacgcuagugaaaacaaucacgaaugaccacauugaggugacuaaugcuacugagcugguucagaguuccucaacagguagaauaugcgacaguccucaccaaauccuugauggagaaaacugcacacuaauagaugcucuauugggagacccucacugugauggcuuccaaaauaaggaaugggaccuuuuuguugaacgcagcacagccuacagcaacuguuaccuuuaugaugugccggauuaugccucccuuaggucacuaguugccucauccggcacacuggaguuuaacaaugaaagcuucaauuggacuggagucgcucagaauggaacaagcucugcuugcaaaaggagaucuauuaaaaguuucuuuaguagauugaauugguugcaccaauuaaaauacaaauauccagcacugaacgugacuaugccaaacaaugaaaaauuugacaaauuguacauuugggggguucaccacccgaguacggacagugaccaaaucagccuauaugcucaagcaucagggagagucacagucucuaccaaaagaagccaacaaacuguaaucccgaauaucggaucuagacccuggguaaggggugucuccagcagaauaagcaucuauuggacaauaguaaaaccgggagacauacuuuugauuaacagcacagggaaucuaauugcuccucgggguuacuuuaaaauacgaagugggaaaagcucaauaaugaggucaaaugcacccauuggcaaaugcaauucugaaugcaucacuccaaauggaagcauucccaaugacaaaccauuucaaaauguaaacaggaucacauauggggccugucccagauauguuaagcaaaacacucugaaauuggcaacagggaugcggaauguaccagagaaacaaacuagaggcauauucggcgcaaucgcggguuucauagaaaaugguugggagggaaugguggacgguugguacgguuucaggcaucaaaauucugagggcacaggacaagcagcagaucuuaaaagcacucaagcagcaaucaaccaaaucaacgggaaacugaauagguuaaucgagaaaacaaacgagaaauuccaucaaauugaaaaagaauucucagaaguagaagggagaauucaggaccucgagaaauauguugaggacacuaaaauagaucucuggucguacaacgcggagcuucuuguugcccuggagaaccaacauacaauugaucuaacugacucagaaaugaacaaacuguuugaaagaacaaggaagcaacugagggaaaaugcugaggauaugggcaaugguuguuucaaaauauaccacaaaugugacaaugccugcauagggucaaucagaaauggaacuuaugaccaugauguauacagagacgaagcauuaaacaaccgguuccagaucaaagguguugagcugaagucaggauacaaagauuggauccuauggauuuccuuugccauaucauguuuuuugcuuuguguuguuuugcugggguucaucaugugggccugccaaaaaggcaacauuaggugcaacauuugcauuuga

SEQ ID NO: 32356 - RNA, 1701 nt, Artificial Sequence
  derived and/or modified CDS sequence (wt) from hemagglutinin__InfluenzaA__ABA42542
augaagacuaucauugcuuugagcuacauuuuaugucugguuuucgcucaaaaacuucccguaaaugacaacagcacggcaacgcugugccugggacaccaugcagugccaaacggaacgcuagugaaaacaaucacgaaugaccacauugaagugacuaaugcuacugagcugguucagaguuccucaacagguagaauaugcgacaguccucaccaaauccuugauggagaaaacugcacacuaauagaugcucuauugggagacccucauugugauggcuuccaaaauaaggaaugggaccuuuuuguugaacgcagcacagccuacagcaacuguuacccuuaugaugugccggauuaugccucccuuaggucacuaguugccucauccggcacacuggaguuuaacaaugaaagcuucaauuggacuggagucgcucagaauggaacaagcucugcuugcaaaaggagaucuauuaaaaguuucuuuaguagauugaauugguugcaccaauuaaaauacaaauauccagcacugaacgugacuaugccaaacaaugaaaaauuugacaaauuguacauuugggggguucaccacccgaguacggacagugaccaaaucagccuauaugcucaagcaucagggagagucacagucucuaccaaaagaagccaacaaacuguaaucccgaauaucggaucuagacccuggguaaggggugucuccagcagaauaagcaucuauuggacaauaguaaaaccgggagacauacuuuugauuaacagcacagggaaccuaauugcuccucgggguuacuucaaaauacgaagugggaaaagcucaauaaugaggucaaaugcacccauuggcaaaugcaauucugaaugcaucacuccaaauggaagcauucccaaugacaaaccauuucaaaauguaaacaggaucacauauggggccugucccagauauguuaagcaaaacacucugaaauuggcaacagggaugcggaauguaccagagaaacaaacuagaggcauauucggcgcaaucgcggguuucauagaaaaugguugggaaggaaugguggacgguugguacgguuucaggcaucaaaauucugagggcacaggacaagcagcagaucuuaaaagcacucaagcagcaaucaaccaaaucaacgggaaacugaauagguuaaucgagaaaacaaacgagaaauuccaucaaauugaaaaagaauucucagaaguagaagggagaauucaggaccucgagaaauauguugaggacacuaaaauagaucucuggucguacaacgcggagcuucuuguugcccuggagaaccaacauacaauugaucuaacugacucagaaaugaacaaacuguuugaaagaacaaggaagcaacugagggaaaaugcugaggauaugggcaaugguuguuucaaaauauaccacaaaugugacaaugccugcauagggucaaucagaaauggaacuuaugaccaugauguauacagagacgaagcauuaaacaaccgguuccagaucaaagguguugagcugaagucaggauacaaagauuggauccuauggauuuccuuugccauaucauguuuuuugcuuuguguuguuuugcugggguucaucaugugggccugccaaaaaggcaacauuaggugcaacauuugcauuuga

SEQ ID NO: 32357 - RNA, 1701 nt, Artificial Sequence
  derived and/or modified CDS sequence (wt) from hemagglutinin__InfluenzaA__ABA42553
augaagacuaucauugcuuugagcuacauuuuaugucugguuuucgcucaaaaacuucccguaaaugacaacagcacggcaacgcugugccugggacaccaugcagugccaaacggaacgcuagugaaaacaaucacgaaugaccacauugaagugacuaaugcuacugagcugguucagaguuccucaacagguagaauaugcgacaguccucaccaaauccuugauggagaaaacugcacacuaauagaugcucuauugggagacccucauugugauggcuuccaaaauaaggaaugggaccuuuuuguugaacgcagcacagcccacagcaacuguuacccuuaugaugugccggauuaugccucccuuaggucacuaguugccucauccggcacacuggaguuuaacaaugaaagcuucaauuggacuggagucgcucagaauggaacaagcucugcuugcaaaaggagaucuauuaaaaguuucuuuaguagauugaauugguugcaccaauuaaaauacaaauauccagcacugaacgugacuaugccaaacaaugaaaaauuugacaaauuguacauuugggggguucaccacccgaguacggacagugaccaaaucagccuauaugcucaagcaucagggagagucacagucucuaccaaaagaagccaacaaacuguaaucccgaauaucggaucuagacccuggguaaggggugucuccagcagaauaagcaucuauuggacaauaguaaaaccgggagacauacuuuugauuaacagcacagggaaucuaauugcuccucgggguuacuuuaaaauacgaagugggaaaagcucaauaaugaggucaaaugcacccauuggcaaaugcaauucugaaugcaucacuccaaauggaagcauucccaaugacaaaccauuucaaaauguaaacaggaucacauauggggccugucccagauauguuaagcaaaacacucugaaauuggcaacagggaugcggaauguaccagagaaacaaacuagaggcauauucggcgcaaucgcggguuucauagaaaaugguugggagggaaugguggacgguugguacgguuucaggcaucaaaauucugagggcacaggacaagcagcagaucuuaaaagcacucaagcagcaaucaaccaaaucaacgggaaacugaauagguuaaucgagaaaacaaacgagaaauuccaucaaauugaaaaagaauucucagaaguagaagggagaauucaggaccucgagaaauauguugaggacacuaaaauagaucucuggucguacaacgcggagcuucuuguugcccuggagaaccaacauacaauugaucuaacugacucagaaaugaacaaacuguuugaaagaacaaggaagcaacugagggaaaaugcugaggauaugggcaaugguuguuucaaaauauaccacaaaugugacaaugccugcauagggucaaucagaaauggaacuuaugaccaugauguauacagagacgaagcauuaaacaaccgguuccagaucaaaggcguugagcugaagucaggauacaaagauuggauccuauggauuuccuuugccauaucauguuuuuugcuuuguguuguuuugcugggguucaucaugugggccugccaaaaaggcaacauuaggugcaacauuugcauuuga

SEQ ID NO: 32358 - RNA, 1701 nt, Artificial Sequence
  derived and/or modified CDS sequence (wt) from hemagglutinin__InfluenzaA__ABA42564
augaagacuaucauugcuuugagcuacauuuuaugucugguuuucgcucaaaaacuucccguaaaugacaacagcacggcaacgcugugccugggacaccaugcagugccaaacggaacgcuagugaaaacaaucacgaaugaccacauugaagugacuaaugcuacugagcugguucagaguuccucaacagguagaauaugcgacaguccucaccaaauccuugauggagaaaacugcacacuaauagaugcucuauugggagacccucauugugauggcuuccagaauaaggaaugggaccuuuuuguugaacgcagcacagccuacagcaacuguuacccuuaugaugugccggauuaugccucccuuaggucacuaguugccucauccggcacacuggaguuuaacaaugaaagcuucaauuggacuggagucgcucagaauggaacaagcucugcuugcaaaaggagaucuauuaaaaguuucuuuaguagauugaauugguugcaccaauuaaaauacaaauauccagcacugaacgugacuaugccaaacaaugaaaaauuugacaaauuguacauuugggggguucaccacccgaguacggacagugaccaaaucagccuauaugcucaagcaucagggagagucacagucucuaccaaaagaagccaacaaacuguaaucccgaauaucggaucuagacccuggguaaggggugucuccagcagaauaagcaucuauuggacaauaguaaaaccgggagacauacuuuugauuaacagcacagggaaucuaauugcuccucgggguuacuuuaaaauacgaagugggaaaagcucaauaaugaggucaaaugcacccauuggcaaaugcaauucugaaugcaucacuccaaauggaagcauucccaaugacaaaccauuucaaaauguaaacaggaucacauauggggccugucccagauauguuaagcaaaacacucugaaauuggcaacagggaugcggaauguaccagagaaacaaacuagaggcauauucggcgcaaucgcggguuucauagaaaaugguugggagggaaugguggacgguugguacgguuucaggcaucaaaauucugagggcacaggacaagcagcagaucuuaaaagcacucaagcagcaaucaaccaaaucaacgggaaacugaauagguuaaucgagaaaacaaacgagaaauuccaucaaauugaaaaagaauucucagaaguagaagggagaauucaggaccucgagaaauauguugaggacacuaaaauagaucucuggucguacaacgcggagcuucuuguugcccuggagaaccaacauacaauugaucuaacugacucagaaaugaacaaacuguuugaaagaacaaggaagcaacugagggaaaaugcugaggauaugggcaaugguuguuucaaaauauaccacaaaugugacaaugccugcauagggucaaucagaaauggaacuuaugaccaugauguauacagagacgaagcauuaaacaaccgguuccagaucaaagguguugagcugaagucaggauacaaagauuggauccuauggauuuccuuugccauaucauguuuuuugcuuuguguuguuuugcugggguucaucaugugggccugccaaaaaggcaacauuaggugcaacauuugcauuuga

SEQ ID NO: 32359 - RNA, 1701 nt, Artificial Sequence
  derived and/or modified CDS sequence (wt) from hemagglutinin__InfluenzaA__ABA42928
augaagacuaucauugcuuugagcuacauucuaugucugguuuucgcucaaaaacuucccguaaaugacaacagcacggcaacgcugugccugggacaccaugcagugccaaacggaacgcuagugaaaacaaucacgaaugaccacauugaagugacuaaugcuacugagcugguucagaguuccucaacagguagaauaugcgacaguccucaccaaauccuugauggagaaaacugcacacuaauagaugcucuauugggagacccucauugugauggcuuccagaauaaggaaugggaccuuuuuguugaacgcagcacagccuacagcaacuguuacccuuaugaugugccggauuaugccucccuuaggucacuaguugccucauccggcacacuggaguuuaacaaugaaagcuucaauuggacuggagucgcucagaauggaacaagcucugcuugcaaaaggagaucuauuaaaaguuucuuuaguagauugaauugguugcaccaauuaaaauacaaauauccagcacugaacgugacuaugccaaacaaugaaaaauuugacaaauuguacauuugggggguucaccacccgaguacggacagugaccaaaucagccuauaugcucaagcaucagggagagucacagucucuaccaaaagaagccaacaaacuguaaucccgaauaucggaucuagacccuggguaaggggugucuccagcaaaauaagcaucuauuggacaauaguaaaaccgggagacauacuuuugauuaacagcacagggaaucuaauugcuccucgggguuacuuuaaaauacgaagugggaaaagcucaauaaugaggucaaaugcacccauuggcaaaugcaauucugaaugcaucacuccaaauggaagcauucccaaugacaaaccauuucaaaauguaaacaggaucacauauggggccugucccagauauguuaagcaaaacacucugaaauuggcaacagggaugcggaauguaccagagaaacaaacuagaggcauauucggcgcaaucgcggguuucauagaaaaugguugggagggaauggugaacgguugguacgguuucaggcaucaaaauucugagggcacaggacaagcagcagaucuuaaaagcacucaagcagcaaucaaccaaaucaacgggaaacugaauagguuaaucgagaaaacaaacgagaaauuccaucaaauugaaaaagaauucucagaaguagaagggagaauucaggaccucgagaaauauguugaggacacuaaaauagaucucuggucguacaacgcggagcuucuuguugcccuggagaaccaacauacaauugaucuaacugacucagaaaugaacaaacuguuugaaagaacaaggaagcaacugagggaaaaugcugaggauaugggcaaugguuguuucaaaauauaccacaaaugugacaaugccugcauagggucaaucagaaauggaacuuaugaccaugauguauacagagacgaagcauuaaacaaccgguuccagaucaaagguguugagcugaagucaggauacaaagauuggauccuauggauuuccuuugccauaucauguuuuuugcuuuguguuguuuugcugggguucaucaugugggccugccaaaaaggcaacauuaggugcaacauuugcauuuga

SEQ ID NO: 32360 - RNA, 1701 nt, Artificial Sequence; identical to SEQ ID NO: 32358
  derived and/or modified CDS sequence (wt) from hemagglutinin__InfluenzaA__ABA42939

SEQ ID NO: 32361 - RNA, 1701 nt, Artificial Sequence
  derived and/or modified CDS sequence (wt) from hemagglutinin__InfluenzaA__ABA42978
augaagacuaucauugcuuugagcuacauuuuaugucugguuuucgcucaaaaacuucccguaaaugacaacagcacggcaacgcugugccugggacaccaugcagugccaaacggaacgcuagugaaaacaaucacgaaugaccacauugaagugacuaaugcuacugagcugguucagaguuccucaacagguagaauaugcgacaguccucaccaaauccuugauggagaaaacugcacacuaauagaugcucuauugggagacccucauugugauggcuuccaaaauaaggaaugggaccuuuuuguugaacgcagcacagccuacagcaacuguuacccuuaugaugugccggauuaugccucccuuaggucacuaguugccucauccggcacacuggaguuuaacaaugaaagcuucaauuggacuggagucgcucagaauggaacaagcucugcuugcaaaaggagaucuauuaaaaguuucuuuaguagauugaauugguugcaccaauuaaaauacaaauauccagcacugaacgugacuauuccaaacaaugaaaaauuugacaaauuguacauuugggggguucaccacccgaguacggacagugaccaaaucagccuauaugcucaagcaucagggagagucacagucucuaccaaaagaagccaacaaacuguaaucccgaauaucggaucuagacccuggguaaggggugucuccagcagaauaagcaucuauuggacaauaguaaaaccgggagacauacuuuugauuaacagcacagggaaucuaauugcuccucgggguuacuuuaaaauacgaagugggaaaagcucaauaaugaggucaaaugcacccauuggcaaaugcaauucugaaugcaucacuccaaauggaagcauucccaaugacaaaccauuucaaaauguaaacaggaucacauauggggccugucccagauauguuaagcaaaacacucugaaauuggcaacagggaugcggaauguaccagagaaacaaacuagaggcauauucggcgcaaucgcggguuucauagaaaaugguugggagggaaugguggacgguugguacgguuucaggcaucaaaauucugagggcacaggacaagcagcagaucuuaaaagcacucaagcagcaaucaaccaaaucaacgggaaacugaauagguuaaucgagaaaacaaacgagaaauuccaucaaauugaaaaagaauucucagaaguagaagggagaauucaggaccucgagaaauauguugaggacacuaaaauagaucucuggucguacaacgcggagcuucuuguugcccuggagaaccaacauacaauugaucuaacugacucagaaaugaacaaacuguuugaaagaacaaggaagcaacugagggaaaaugcugaggauaugggcaaugguuguuucaaaauauaccacaaaugugacaaugccugcauagggucaaucagaaauggaacuuaugaccaugauguauacagagacgaagcauuaaacaaccgguuccagaucaaagguguugagcugaagucaggauacaaagauuggauccuauggauuuccuuugccauaucauguuuuuugcuuuguguuguuuugcugggguucaucaugugggccugccaaaaaggcaacauuaggugcaacauuugcauuuga

SEQ ID NO: 32362 - RNA, 1701 nt, Artificial Sequence
  derived and/or modified CDS sequence (wt) from hemagglutinin__InfluenzaA__ABA43167
augaagacuaucauugcuuugagcuacauucuaugucugguuuucgcucaaaaacuucccggaaaugacaacagcacggcaacgcugugccuugggcaccaugcaguaccaaacggaacgauagugaaaacaaucacgaaugaccaaauugaaguuacuaaugcuacugagcugguucagaguuccucaacagguggaauaugcgacaguccucaucagauccuugauggagaaaacugcacacuaauagaugcucuauugggagacccucagugugauggcuuccaaaauaagaaaugggaccuuuuuguugaacgcagcaaagccuacagcaacuguuacccuuaugaugugccggauuaugccucccuuaggucacuaguugccucauccggcacacuggaguuuaacaaugaaagcuucaauuggacuggagucacucaaaauggaacaagcucugcuugcaaaaggagaucuaauaacaguuucuuuaguagguugaauugguugacccacuuaaaauucaaauacccagcauugaacgugacuaugccaaacaaugaaaaauuugacaaauuguacauuugggggguucaccacccggguacggacaaugaccaaaucagccuauaugcucaagcaucaggaagaaucacagucucuaccaaaagaagccaacaaacuguaaucccgaauaucggaucuagacccaggguaagggauauccccagcagaauaagcaucuauuggacaauaguaaaaccgggagacauacuuuugauuaacagcacagggaaucuaauugcuccucgggguuacuucaaaauacgaagugggaaaagcucaauaaugagaucagaugcacccauuggcaaaugcaauucugaaugcaucacuccaaauggaagcauucccaaugacaaaccauuucaaaauguaaacaggaucacauauggggccugucccagauauguuaagcaaaacacucugaaauuggcaacagggaugcgaaauguaccagagaaacaaacuagaggcauauuuggugcaaucgcggguuucauagaaaaugguugggagggaaugguggaugguugguacgguuucaggcaucaaaauucugagggaauaggacaagcagcagaucucaaaagcacucaagcagcaaucaaccaaaucaaugggaagcugaauagguugaucgggaaaaccaacgagaaauuccaucagauugaaaaagaauucucagaaguagaagggagaauucaggaccucgagaaauauguugaggacacuaaaauagaucucuggucauacaacgcggagcuucuuguugcccuggagaaccaacauacaauugaucuaacugacucagaaaugaacaaacuguuugaaagaacaaagaagcaacugagggaaaaugcugaggauaugggcaaugguuguuucaaaauauaccacaaaugugacaaugccugcauagggucaaucagaaauggaacuuaugaccaugauguauacagagaugaagcauuaaacaaccgguuccagaucaaagguguugagcugaagucaggauacaaagauuggauccuauggauuuccuuugccauaucauguuuuuugcuuuguguugcuuuguugggguucaucaugugggccugccaaaaaggcaacauuaggugcaacauuugcauuuga

SEQ ID NO: 32363 - RNA, 1701 nt, Artificial Sequence
  derived and/or modified CDS sequence (wt) from hemagglutinin__InfluenzaA__ABA43178
augaagacuaucauugcuuugagcuacauucuaugucugguuuucgcccaaaaacuucccggaaaugacaacagcacggcaacgcugugccuugggcaccaugcaguaccaaacggaacgauagugaaaacaaucacgaaugaccaaauugaaguuacuaaugcuacugagcugguucagaguuccucaacagguggcauaugcgacaguccucaucagauccuugauggagaaaacugcacacuaauagaugcucuauugggagacccucagugugauggcuuccaaaauaagaaaugggaccuuuuuguugaacgcagcaaagccuacagcaacuguuacccuuaugaugugccggauuaugccucccuuaggucacuaguugccucauccggcacacuggaguuuaacaaugaaagcuucaauuggacuggagucacucaaaauggaacaagcucugcuugcaaaaggagaucuaauaacaguuucuuuaguagauugaauugguugacccacuuaaaauucaaauacccagcauugaacgugacuaugccaaacaaugaaaaauuugacaaauuguacauuugggggguucaccacccggguacggacaaugaccaaaucagccuauaugcucaagcuucaggaagaaucacagucucuaccaaaagaagccaacaaacuguaaucccgaauaucggaucuagacccaggguaagggauauccccagcagaauaagcaucuauuggacaauaguaaaaccgggagacauacuuuugauuaacagcacagggaaucuaauugcuccucgggguuacuucaaaauacgaagugggaaaagcucaauaaugagaucagaugcacccauuggcaaaugcaauucugaaugcaucacuccaaauggaagcauucccaaugacaaaccauuucaaaauguaaacaggaucacauauggggccugucccagauauguuaagcaaaacacucugaaauuggcaacagggaugcgaaauguaccagagaaacaaacuagaggcauauuuggcgcaaucgcggguuucauagaaaaugguugggagggaaugguggaugguugguacgguuucaggcaucaaaauucugagggaauaggacaagcagcagaucucaaaagcacucaagcagcaaucaaccaaaucaaugggaagcugaauagauugaucgggaaaaccaacgagaaauuccaucagauugaaaaagaauucucagaaguagaagggagaauucaggaccucgagaaauauguugaggacacuaaaauagaucucuggucauacaacgcggagcuucuuguugcccuggagaaccaacauacaauugaucuaacugacucagaaaugaacaaacuguuugaaagaacaaagaagcaacugagggaaaaugcugaggauaugggcaaugguuguuucaaaauauaccacaaaugugacaaugccugcauagggucaaucagaaauggaacuuaugaccaugauguauacagagaugaagcauuaaacaaccgguuccagaucaaagguguugagcugaagucaggauacaaagauuggauccuauggauuuccuuugccauaucauguuuuuugcuuuguauugcuuuguugggguucaucaugugggccugccaaaaaggcaacauuaggugcaacauuugcauuuga

SEQ ID NO: 32364 - RNA, 1698 nt, Artificial Sequence
  derived and/or modified CDS sequence (wt) from hemagglutinin__InfluenzaA__ABA43189
augaaagcaaaacuacugguccuguuauguacauuuacagcuacauacgcagacacaauauguguaggcuaccaugccaacaacucaaccgacacuguugacacaguacuugagaagaaugugacagugacacacucugucaaccuacuugaggacagucacaauggaaaacuaugucuacuaaaaggaauagccccacuacaauuggguaauugcagcguugccggauggaucuuaggaaacccagaaugcgaauuacugauuuccaaggaaucaugguccuacauuguagaaacaccaaaucccgagaauggaacauguuacccaggguauuucgccgacuaugaggaacugagggagcaauugaguucaguaucuucauuugagagauucgaaauauuccccaaagggagcucauggcccaaccacaccguaaccggaguaucagcaucaugcucccauaaugggaaaagcaguuuuuacagaaauuugcuauggcugacggggaagaaugguuuguacccaaaccugagcaugucauauguaaacaacaaagagaaagaaguccuugugcuaugggguguucaucacccaccuaacauaggggaccaaagggcccucuaccauacagaaaaugcuuaugucucuguagugucuucacauuauagcagaagauucaccccagaaauagccaaaagacccaaaguaagagaucaggaaggaagaaucaacuacuacuggacucugcuggaacccggggacacaauaauauuugaggcaaauggaaaucuaauagcgccaugguaugcuuucgcacugaguagaggcuuuggaucaggaaucaucaccucaaaugcaccaauggaugaaugugaugcgaagugucaaacaccucagggagcuauaaacaguagucuuccuuuccagaauguacacccaguuacaauaggagaguguccaaaguaugucaggagugcaaaauuaaggaugguuacaggacuaaggaacaucccauccauucaauccagagguuuguuuggagccauugccgguuucauugaagggggguggacuggaaugguagaugggugguaugguuaucaucaucagaaugagcaaggaucuggcuaugcugcagaucaaaaaagcacacaaaaugccauuaacgggauuacaaacaaggugaauucuguaauugagaaaaugaacacucaauucacagcugugggcaaagaauucaacaaauuagaaagaaggauggaaaacuuaaauaaaaaaguugaugauggguuucuagacauuuggacauauaaugcagaauuguugguucuacuggaaaaugaaaggacuuuggauuuccaugacuccaaugugaagaaucuguaugagaaaguaaaaagccaauuaaagaauaaugccaaagaaauaggaaacggguguuuugaauucuaucacaaguguaacaaugaaugcauggaaagugugaaaaauggaacuuaugacuauccaaaauauuccgaagaaucaaaguuaaacagggagaaaauugauggaguaaaauuggaaucaaugggagucuaucagauucuggcgaucuacucaacugucgccaguucccugguucuuuuggucucccugggggcaaucagcuucuggauguguuccaaugggucuuugcaguguagaauaugcaucuga

SEQ ID NO: 32365 - RNA, 1701 nt, Artificial Sequence
  derived and/or modified CDS sequence (wt) from hemagglutinin__InfluenzaA__ABA43200
augaagacuaucauugcuuugagcuacauucuaugucugguuuucgcucaaaaacuucccggaaaugacaacagcacggcaacgcugugccuugggcaccaugcaguaccaaacggaacgauagugaaaacaaucacgaaugaccaaauugaaguuacuaaugcuacugagcugguucagaguuccucaacagguggaauaugcgacaguccucaucagauccuugauggagaaaacugcacacuaauagaugcucuauugggagacccucagugugauggcuuccaaaauaagaaaugggaccuuuuuguugaacgcagcaaagccuacagcaacuguuacccuuaugaugugccggauuaugccucccuuaggucacuaguugccucauccggcacacuggaguuuaacaaugaaagcuucaauuggacuggagucacucaaaauggaacaagcucugcuugcaaaaggagaucuaauaacaguuucuuuaguagauugaauugguugacccacuuaaaauucaaauacccagcauugaacgugacuaugccaaacaaugaaaaauuugacaaauuguacauuugggggguucaccacccggguacggacaaugaccaaauuagccuauaugcucaagcuucaggaagaaucacagucucuaccaaaagaagccaacaaacuguaaucccgaauaucggaucuagacccaggguaagggauauccccagcagaauaagcaucuauuggacaauaguaaaaccgggagacauacuuuugauuaacagcacagggaaucuaauugcuccucgggguuacuucaaaauacgaagugggaaaagcucaauaaugagaucagaugcacccauuggcaaaugcaauucugaaugcaucacuccaaauggaagcauucccaaugacaaaccauuucaaaauguaaacaggaucacauauggggccugucccagauauguuaagcaaaacacucugaaauuggcaacagggaugcgaaauguaccagagaaacaaacuagaggcauauuuggcgcaaucgcggguuucauagaaaaugguugggagggaaugguggaugguugguacgguuucaggcaucaaaauucugagggaauaggacaagcagcagaucucaaaagcacucaagcagcaaucaaccaaaucaaugggaagcugaauagguugaucgggaaaaccaacgagaaauuccaucagauugaaaaagaauucucagaaguagaagggagaauucaggaccucgagaaauauguugaggacacuaaaauagaucucuggucauacaacgcggagcuucuuguuguccuggagaaccaacauacaauugaucuaacugacucagaaaugaacaaacuguuugaaagaacaaagaagcaacugagggaaaaugcugaggauaugggcaaugguuguuucaaaauauaccacaaaugugacaaugccugcauagggucaaucagaaauggaacuuaugaccaugauguauacagagaugaagcauuaaacaaccgguuccagaucaaagguguugagcugaagucaggauacaaagauuggauccuauggauuuccuuugccauaucauguuuuuugcuuuguguuguuuuguugggguucaucaugugggccugccaaaaaggcaacauuaggugcaacauuugcauuuga

SEQ ID NO: 32366 - RNA, 1701 nt, Artificial Sequence
  derived and/or modified CDS sequence (wt) from hemagglutinin__InfluenzaA__ABA43336
augaagacuaucauugcuuugagcuacauuuucugucugguuuucgcccaaaaacuucccggaaaugacaacagcacagcaacgcugugccugggacaucaugcagugccaaacggaacgcuagugaaaacaaucacgaaugaucaaauugaagugacuaaugcuacugaguugguucagaauuccucaacagguagaauaugcgacaguccucaccgaauccuugauggaaaaaacugcacacugauagaugcucuauugggagacccucauugugauggcuuccaaaauaaggaaugggaccuuuuuguugaacgcagcaaagcuuacagcaacuguuacccuuaugaugugccggauuaugccucccuuaggucacuaguugccucaucaggcacccuggaguuuaucaaugaagacuucaauuggacuggagucgcucagagugggggaagcuaugcuugcaaaaggggaucaguuaacaguuucuucaguagauugaauugguugcacgaaucagaauacaaauauccagcgcugaacgugacuaugccaaacaauggcaaauuugacaaauuguacguuugggggguucaccacccgaucacggacagagaacaaaccaaacuauauguucgagcaucagggagagucacagucucuaccaaaagaagccagcaaacuguaaucccgaauaucgggucuagacccuggguaaggggucuguccaguagaauaagcaucuauuggacaauaguaaaaccgggagacauacuguugauuaauagcaccgggaaccuaauugcuccucgggguuacuucaaaauacgaacuggaaaaagcucaauaaugaggucagaugcacccauuggcaccugcaguucugaaugcaucaccccaaauggaagcauucccaaugacaaacccuuucaaaauguaaacaggaucacauauggggcaugucccagauauguuaagcaaaacacucugaaauuggcaacagggaugcggaauguaccagaaaaacaaacuaggggcauauucggcgcaaucgcagguuucauagaaaaugguugggagggaaugguagacgguugguacgguuucaggcaucaaaauucugagggcacaggacaagcagcagaucuuaaaagcacucaagcagcaaucgaccaaaucaacgggaaacugaauagguuaaucgagaaaacgaacgagaaauuccaucaaaucgaaaaggaauucucagaaguagaagggagaauucaggaccucgagaaauauguugaagacacuaaaauagaucucuggucuuacaacgcggagcuucuugucgcccuggagaaccaacauacaauugaucugacugacucagaaaugaacaaacuguuugaaaaaacaagaaagcaacugagggaaaaugcugaggacaugggcaaugguugcuucaagauauaccacaaaugugacaaugccugcauagggucaaucagaaauggaacuuaugaccaugauguauacagagacgaagcauuaaacaaccgguuccagaucaaaggaguugagcugaagucaggauacaaagacuggauccuauggauuuccuuugccauaucaugcuuuuugcuuuguguuguuuugcugggguucaucaugugggccugccaaaaaggcaacauuaggugcaacauuugcauuuga

SEQ ID NO: 32367 - RNA, 1707 nt, Artificial Sequence
  derived and/or modified CDS sequence (wt) from hemagglutinin__InfluenzaA__ABA54915
auggagaaaguagugcuucuucuugcaacagccagucuuguuaaaagugaucagauuugcauugguuaccaugcaaacaacucgacagagcagguugacacaauaauggaaaagaacguuacuguuacacaugcccaagacauacuggaaaagacacacaacgggaaacucugcgaucuagauggagugaagccucuaauuuugagagauuguaguguagcuggauggcuccucggaaauccuaugugugacgaauucaucaaugugccggaauggucuuacauaguggagaaggccaguccagccaaugaccucuguuacccaggggauuucaacgacuaugaagaacugaaacaccuauugagcagaauaaaccacuuugagaaaauucagaucauccccaaaaguucuugguccaaucaugaagccucaucaggggugagcgcagcauguccauaccaugggaagcccuccuuuuucagaaaugugguauggcuuaucaaaaagaacagugcauacccaacaauaaagaggagcuacaauaauaccaaccaagaagaucuuuugguacugugggggauucaccauccuaaugaugcggcagagcagacaaagcucuaucaaaacccaaccaccuauauuuccguuggaacaucaacacuaaaccagagauuggucccaaaaauagcuacuagauccaaaguaaacggacaaaguggaagaauggaguucuucuggacaauuuuaaagccgaaugaugccauaaauuucgagaguaauggaaauuucauugcuccagaauaugcauacaaaauugucaagaaaggggacucagcaauuaugaaaagugaauuggaauaugguaacugcaacaccaagugucaaacuccaaugggggcgauaaacucuaguaugccauuccacaacauacacccccucacaaucggggaaugccccaaauaugugaaaucaaacagauuaguccuugcgacuggacucagaaauaccccucaaagagagagaagaagaaaaaagagaggacuauuuggagcuauagcagguuuuauagagggaggauggcaaggaaugguagaugguugguauggauaccaccauagcaaugagcaggggaguggauacgcugcagacaaagaauccacucaaaaggcaauagauggagucaccaauaaggucaacucgaucauugacaaaaugaacacucaguuugaggccguuggaagggaauuuaauaauuuagaaaggaggauagaaaauuuaaacaagaagauggaagacggauuccuagaugucuggacuuauaaugcugaacuucugguucucauggaaaaugagagaacucuagacuuucaugacucaaaugucaagaaccuuuacaacaagguccgacuacagcuuagggauaaugcaaaggagcuggguaaugguuguuucgaguucuaucacaaaugugauaaugaauguauggaaaguguaaaaaacgggacguaugacuacccgcaguauucagaagaagcaagacuaaacagagaggaaauaaguggaguaaaauuggaaucaaugggaacuuaccaaauacugucaauuuauucaacaguggcgaguucccuagcacuggcaaucaugguagcuggucuaucuuuauggaugugcuccaaugggucguuacaaugcagaauuugcauuuaa

SEQ ID NO: 32368 - RNA, 1698 nt, Artificial Sequence
  derived and/or modified CDS sequence (wt) from hemagglutinin__InfluenzaA__ABA87080
augaaaguaaaacuacugguccuguuauguacauuuacagcuacauaugcagacacaauauguauaggcuaccaugccaacaacucaaccgacacuguugacacaguacuugagaagaaugugacagugacacacucugucaaccuacuugaggacagucacaauggaaaacuaugucuacuaaaaggaauagccccacuacaauuggguaauugcagcguugccggauggaucuuaggaaacccagaaugcgaauuacugauuuccaaggaaucaugguccuacauuauagaaacaccaaauccugagaauggaacauguuacccaggguauuucgccgacuaugaggaacugagggagcaauugaguucaguaucuucauuugagagguucgaaauauuccccaaagaaagcucauggcccaaccacaccguaaccggaguaucagcaucaugcucccauaaugggaaaagcaguuuuuacagaaauuugcuauggcugacggggaagaaugguuuguacccaaaccugagcaaguccuaugcaaacaacaaagagaaagaaguccuuguacuaugggguguucaucacccgccuaacaugggggaccaaagggcccucuaucauacagaaaaugcuuaugucucuguagugucuucacauuauagcagaagauucaccccagaaauagccaaaagacccaaaguaagagaucaggaaggaagaaucaacuacuacuggacucugcuggaacccggggauacaauaauauuugaggcaaauggaaaucuaauagcgccaagguaugcuuucgcacugaguagaggcuuuggaucaggaaucaucaccucaaaugcaccaauggaugaaugugaugcgaagugucaaacaccucagggagcuauaaacagcagucuuccuuuccagaauguacacccagucacaauaggagaguguccaaaguaugucaggagugcaaaauuaaggaugguuacaggacuaaggaacaucccauccauucaauccagagguuuguuuggagccauugccgguuucauugaagggggguggacuggaaugguagaugguugguaugguuaucaucaucagaaugagcaaggaucuggcuaugcugcagaucaaaaaagcacacaaaaugccauuaacgggauuacaaacaaggugaauucuguaauugagaaaaugaacacucaauucacagcugugggcaaagaauucaacaaauuggaaagaaggauggaaaacuugaauaaaaaaguugaugauggguuucuagacauuuggacauauaaugcagaauuguugguucuacuggaaaaugaaaggacuuuggauuuccaugacuccaaugugaagaaucuguaugagaaaguaaaaagccaauuaaagaauaaugccaaagaaauaggaaacggguguuuugaauucuaucacaaguguaacgaugaaugcauggagagugugaaaaauggaacuuaugacuauccaaaauauuccgaagaaucaaaguuaaacagggagaaaauugauggagugaaauuggaaucaaugggagucuaucagauucuggcgaucuacucaacagucgccaguucccugguucuuuuggucucccugggggcaaucagcuucuggauguguuccaaugggucuuugcaguguagaauaugcaucuaa

SEQ ID NO: 32369 - RNA, 1698 nt, Artificial Sequence
  derived and/or modified CDS sequence (wt) from hemagglutinin__InfluenzaA__ABA87091
augaaagcaaaacuacugguccuguuauguacauuuacagcuacauacgcagacacaauauguauaggcuaccaugccaacaacucaaccgacacuguugacacaguacuugagaagaaugugacagugacacacucugucaaccuacuugaggacagucacaauggaaaacuaugucuacuaaaaggaauagccccacuacaauuggguaauugcagcguugccggauggaucuuaggaaacccagaaugcgaauuacugauuuccaaggaaucaugguccuacauuguagaaacaccaaaucccgagaauggaacauguuacccaggguauuucgccgacuaugaggaacugagggagcaauugaguucaguaucuucauuugagagauucgaaauauuccccaaaggaagcucauggcccaaccacaccguaaccggaguaucagcaucaugcucccauaaugggaaaagcaguuuuuacagaaauuugcuauggcugacggggaagaaugguuuguacccaaaccugagcauguccuauguaaacaacaaagagaaagaaguccuugugcuaugggguguucaucacccaccuaacauaggggaccaaagggcccucuaccauacagagaaugcuuaugucucuguagugucuucacauuauagcagaagauucaccccagaaauagccaaaagacccaaaguaagagaucaggaaggaagaaucaacuacuacuggacucugcuggaacccggggacacaauaauauuugaggcaaauggaaaucuaauagcgccaugguaugcuuucgcacugaguagaggcuuuggaucaggaaucaucaccucaaaugcaccaauggaugaaugugaugcgaagugucaaacaccucagggagcuauaaacaguagucuuccuuuccagaauguacacccaguuacaauaggagaguguccaaaguaugucaggagugcaaaauuaaggaugguuacaggacuaaggaacaucccauccauucaauccagagguuuguuuggagccauugccgguuucauugaagggggguggacuggaaugguagaugggugguaugguuaucaucaucagaaugagcaaggaucuggcuaugcugcagaucaaaaaagcacacaaaaugccauuaacgggauuacaaacaaggugaauucuguaauugagaaaaugaacacucaauucacagcugugggcaaagaauucaacaaauuagaaagaaggauggaaaacuuaaauaaaaaaguugaugauggguuucuagacauuuggacauauaaugcagaauuguugguucuacuggaaaaugaaaggacuuuggauuuccaugacuccaaugugaagaaucuguaugagaaaguaaaaagccaauuaaagaauaaugccaaagaaauaggaaacggguguuuugaauucuaucacaaguguaacaaugaaugcauggaaagugugaaaaauggaacuuaugacuauccaaaauauuccgaagaaucaaaguuaaacagggagaaaauugauggaguaaaauuggaaucaaugggagucuaucagauucuggcgaucuacucaacugucgccaguucccugguucuuuuggucucccugggggcaaucagcuucuggauguguuccaaugggucuuugcaguguagaauaugcaucuga

SEQ ID NO: 32370 - RNA, 1698 nt, Artificial Sequence
  derived and/or modified CDS sequence (wt) from hemagglutinin__InfluenzaA__ABA87231
augaaagcaaaacuacugguccuguuauguacauuuacagcuacauacgcagacacaauauguauaggcuaccaugccaacaacucaaccgacacuguugacacaguacuugagaagaaugugacagugacacacucugucaaccuacuugaggacagucacaauggaaaacuaugucuacuaaaaggaauagccccacuacaauuggguaauugcagcguugccggauggaucuuaggaaaccccgaaugcgaauuacugauuuccaaggaaucaugguccuacauuguagaaacaccaaaucccgagaauggaacauguuacccaggguauuucgccgacuaugaggaauugagggagcaauugaguucaguaucuucauuugagagauucgaaauauuccccaaaggaagcucauggcccaaccacaccguaaccggaguaucagcaucaugcucccauaaugggaaaagcaguuuuuacagaaauuugcuauggcugacggggaagaaugguuuguacccaaaccugagcauguccuauguaaacaacaaagagaaagaaguccuugugcuaugggguguucaucacccaccuaacauaggggaccaaagggcccucuaccauacagagaaugcuuaugucucuguagugucuucacauuauagcagaagauucaccccagaaauagccaaaagacccaaaguaagagaucaggaaggaagaaucaacuacuacuggacucugcuggaacccggggacacaauaauauuugaggcaaauggaaaucuaauagcgccaugguaugcuuucgcacugaguagaggcuuuggaucaggaaucaucaccucaaaugcaccaauggaugaaugugaugcgaagugucaaacaccucagggagcuauaaacaguagucuuccuuuccagaauguacacccaguuacaauaggagaguguccaaaguaugucaggagugcaaaauuaaggaugguuacaggacuaaggaacaucccauccauucaauccagagguuuguuuggagccauugccgguuucauugaagggggguggacuggaaugguagaugggugguaugguuaucaucaucagaaugagcaaggaucuggcuaugcugcagaucaaaaaagcacacaaaaugccauuaacgggauuacaaacaaggugaauucuguaauugagaaaaugaacacucaauucacagcugugggcaaagaauucaacaaauuagaaagaaggauggaaaacuuaaauaaaaaaguugaugauggguuucuagacauuuggacauauaaugcagaauuguugguucuacuggaaaaugaaaggacuuuggauuuccaugacuccaaugugaagaaucuguaugagaaaguaaaaagccaauuaaagaauaaugccaaagaaauaggaaacggguguuuugaauucuaucacaaguguaacaaugaaugcauggaaagugugaaaaauggaacuuaugacuauccaaaauauuccgaagaaucaaaguuaaacagggagaaaauugauggaguaaaauuggaaucaaugggagucuaucagauucuggcgaucuacucaacugucgccaguucccugguucuuuuggucucccugggggcaaucagcuucuggauguguuccaaugggucuuugcaguguagaauaugcaucuga

SEQ ID NO: 32371 - RNA, 1701 nt, Artificial Sequence
  derived and/or modified CDS sequence (wt) from hemagglutinin__InfluenzaA__ABA87242
augaagacuaucauugcuuugagcuacauucuaugucugguuuucgcucaaaaacuucccggaaaugacaacagcacggcaacgcugugccuugggcaccaugcaguaccaaacggaacgauagugaaaacaaucacgaaugaccaaauugaaguuacuaaugcuacugagcugguucagaguuccucaacagguggaauaugcgacaguccucaucagauccuugauggagaaaacugcacacuaauagaugcucuauugggagacccucagugugauggcuuccaaaauaagaaaugggaccuuuuuauugaacgcagcaaagccuacagcaacuguuacccuuaugaugugccggauuaugccucccuuaggucacuaguugccucauccggcacacuggaauuuaacaaugaaagcuucaauuggacuggagucacucaaaauggaacaagcucugcuugcaaaaggagaucuaauaacaguuucuuuaguagauugaauugguugacccacuuaaaauucaaauacccagcauugaacgugacuaugccaaacaaugaaaaauuugacaaauuguacauuuggggaguucaccacccggguacggacaaugaccaaaucagccuauaugcucaagcuucaggaagaaucacagucucuaccaaaagaagccaacaaacuguaaucccgaauaucggaucuagacccaggguaagggauauccccagcagaauaagcaucuauuggacaauaguaaaaccgggagacauacuuuugauuaacagcacagggaaucuaauugcuccucgggguuacuucaaaauacgaagugggaaaagcucaauaaugagaucagaugcacccauuggcaaaugcaauucugaaugcaucacuccaaauggaagcauucccaaugacaaaccauuucaaaauguaaacaggaucacauauggggccugucccagauauguuaagcaaaacacucugaaauuggcaacagggaugcgaaauguaccagagaaacaaacuagaggcauauuuggcgcaaucgcggguuucauagaaaaugguugggagggaaugguggaugguugguacgguuucaggcaucaaaauucugagggaauaggacaagcagcagaucucaaaagcacucaagcagcaaucaaccaaaucaaugggaagcugaauagguugaucgggaaaaccaacgagaaauuccaucagauugaaaaagaauucucagaaguagaagggagaauucaggaccucgagaaauauguugaggacacuaaaauagaucucuggucauacaacgcggagcuucuuguugcccuggagaaccaacauacaauugaucuaacugacucagaaaugaacaaacuguuugaaagaacaaagaagcaacugagggaaaaugcugaggauaugggcaaugguuguuucaaaauauaccacaaaugugacaaugccugcauagggucaaucagaaauggaacuuaugaccaugauguauacagagaugaggcauugaacaaccgguuccagaucaaagguguugagcugaagucaggauacaaagauuggauccuauggauuuccuuugccauaucauguuuuuugcuuuguguugcuuuguugggguucaucaugugggccugccaaaaaggcaacauuaggugcaacauuugcauuuga

SEQ ID NO: 32372 - RNA, 1701 nt, Artificial Sequence; identical to SEQ ID NO: 32291
  derived and/or modified CDS sequence (wt) from hemagglutinin__InfluenzaA__ABA87253

SEQ ID NO: 32373 - RNA, 1698 nt, Artificial Sequence
  derived and/or modified CDS sequence (wt) from hemagglutinin__InfluenzaA__ABB02781
augaaaguaaaacuacugauccuguuauguacauuuacagcuacauaugcagacacaauauguauaggcuaccaugccaacaacucaaccgacacuguugacacaguacuugagaagaaugugacagugacacacucugucaaccuacuugaggacagucacaauggaaaacugugccuacuaaaaggaauagccccccuacaauuggguaauugcagcguugccggauggaucuuaggaaacccagaaugcgaauuacugauuuccaaggaaucaugguccuacauuguagaaacaccaaauccugagaauggagcauguuacccaggguauuucgccgacuaugaggagcuaagggagcaauugaguucaguaucuucauuugagagauucgaaauauuccccaaagaaagcucauggcccaaccacaccguaaccggaguaucagcaucaugcucccauaaugggaaaagcaguuuuuacagaaauuugcuauggcugacggggaagaaugguuuguacccaaaccugagcaaguccuaugcaaacaacaaagagaaagaaguccuuauacuaugggguguucaucacccgccuaacauaggggaccaaaggacccucuaucacacagaaaaugcuuaugucucuguagugucuucacauuauagcagaagauucaccccagaaauaaccaaaaggcccaaaguaagagaucaggaaggaagaaucaacuacuacuggacucugcuggaacccggggauacaauaauauuugaggcaaauggaaaucuaauagcgccaugguaugcuuucgcacugaguagaggcuuuggaucaggaaucaucaccucaaaugcaccaauggaugaaugugaugcgaagugucaaacaccucagggagcuauaaacagcagucuuccuuuccagaauguacacccagucacaauaggagaguguccaaaguaugucaggagugcaaaauuaaggaugguuacaggacuaaggaacaucccauccauucaauccagagguuuguuuggagccauugccgguuucauugaagggggguggacuggaaugguagaugggugguaugguuaucaucaucagaaugagcaaggaucuggcuaugcugcagaucaaaaaagcacacaaaaugccauuaacgggauuacaaacaaggugaauucuguaauugagaaaaugaacacucaauucacagcugugggcaaagaauucaacaaauuggaaagaaggauggaaaacuuaaauaaaaagguugaugauggguuucuagacauuuggacauauaaugcagaauuguugguucuacuggaaaaugaaaggacuuuggauuuccacgacuccaaugugaagaaucuguacgagaaaguaaaaagccaauuaaagaauaaugccaaagaaauaggaaauggguguuuugaauucuaucacaaguguaacaaugaaugcauggagagugugaaaaauggaacuuaugacuauccaaaauauuccgaagaaucaaaguuaaacagggaaaaaauugauggagugaaauuggacucaaugggggucuaucagauucuggcgaucuacucaacugucgccaguucccugguucuuuuggucucccugggggcaaucagcuucuggauguguuccaaugggucuuugcaguguagaguaugcaucuga

SEQ ID NO: 32374 - RNA, 1698 nt, Artificial Sequence; identical to SEQ ID NO: 32313
  derived and/or modified CDS sequence (wt) from hemagglutinin__InfluenzaA__ABB02792

SEQ ID NO: 32375 - RNA, 1698 nt, Artificial Sequence
  derived and/or modified CDS sequence (wt) from hemagglutinin__InfluenzaA__ABB02803
augaaaguaaaacuacugguucuguuauguacauuuacagcuacauaugcagacacaauauguauaggcuaccaugccaacaacucaaccgauacuguugacacaguacuugagaagaaugugacagugacacacucugucaaccuacuugaggacagucacaauggaaaacuaugucuacuaaaaggaauagccccacuacaauuggguaauugcagcguugccggauggaucuuaggaaacccagaaugcgaauuacugauuuccaaggaaucaugguccuacauuguagaaacaccaaauccugagaauggaacauguuacccaggguauuucgccgacuaugaggaacugagggagcaauugaguucaguaucuucauuugagagguucgaaauauuccccaaagagagcucauggcccaaccacaccguaaccggaguaucagcaucaugcucccauaacgggaaaagcaguuuuuacagaaauuugcuauggcugacggggaagaaugguuuguacccaaaccugagcaaguccuaugcaaacaacaaagagaaagaaguccuuguacuaugggguguucaucacccgccuaacauaggggaccaaagggcccucuaucauacagaaaaugcuuaugucucuguagugucuucacauuauagcagaagauucaccccagaaauagccaaaagacccaaggugagagaucaggaaggaagaaucaacuacuacuggacucugcuggaacccggggauacaauaauauuugaggcaaauggaaaucuaauagcgccaagguaugcuuucgcacugaguagaggcuuuggaucaggaaucaucaccucaaaugcaccaauggaugaaugugaugcgaagugucaaacaccucagggagcuauaaacagcagucucccuuuccagaauguacacccagucacaauaggagaguguccaaaguaugucaggagugcaaaauuaaggaugguuacaggacuaaggaacaucccauccauucaauccagagguuuguuuggagccauugccgguuucauugaagggggguggacuggaaugguagaugguugguaugguuaucaucaucagaaugagcaaggaucuggguaugcugcagaucaaaaaagcacacaaaaugccauuaacgggauuacaaacaaggugaauucuguaauugagaaaaugaacacucaauucacagcugugggcaaagaauucaacaaauuggaaagaaggauggaaaacuuaaauaaaaaaguugaugauggguuucuagacauuuggacauauaaugcagaauuguugguucuacuggaaaaugaaaggacuuuggauuuccaugacuccaacgugaagaaucuguaugagaaaguaaaaagccaauuaaagaauaaugccaaagaaauaggaaacggguguuuugaauucuaucacaaguguaacgaugaaugcauggagagugugaaaaauggaacuuaugacuauccaaaauauuccgaagaaucaaaguuaaacagggagaaaauugauggagugaaauuggaaucaaugggagucuaucagauucuggcgaucuacucaacagucgccaguucccugguucuuuuggucucccugggggcaaucagcuucuggauguguuccaaugggucuuugcaguguagaauaugcaucuaa

SEQ ID NO: 32376 - RNA, 1698 nt, Artificial Sequence
  derived and/or modified CDS sequence (wt) from hemagglutinin__InfluenzaA__ABB02814
augaaagcaaaacuacugguccuguuauguacauuuacagcuacauacgcagacacaauauguauaggcuaccaugccaacaacucaacagacacuguugacacaguacuugagaagaaugugacagugacacacucugucaaccuacuugaggacagucacaauggaaaacuaugucuacuaaaaggaauagccccacuacaauuggguaauugcagcguugccggauggaucuuaggaaacccagaaugcgaauuacugauuuccaaggaaucaugguccuacauuguagaaacaccaaaucccgagaauggaacauguuacccaggguauuucgccgacuaugaggaacugagggagcaauugaguucaguaucuucauuugagagauucgaaauauuccccaaaggaagcucauggcccaaccacaccguaaccggaguaucagcaucaugcucccauaaugggaaaagcaguuuuuacagaaauuugcuauggcugacggggaagaaugguuuguacccaaaccugagcauguccuauguaaacaacaaagagaaagaaguccuugugcuaugggguguucaucacccaccuaacauaggggaccaaagggcccucuaccauacagaaaaugcuuaugucucuguagugucuucacauuauagcagaagauucaccccagaaauagccaaaagacccaaaguaagagaucaggaaggaagaaucaacuacuacuggacucugcuggaacccggggacacaauaauauuugaggcaaauggaaaucuaauagcgccaugguaugcuuucgcacugaguagaggcuuuggaucaggaaucaucaccucaaaugcaccaauggaugaaugugaugcgaagugucaaacaccucagggagcuauaaacaguagucuuccuuuccagaauguacacccaguuacaauaggagaguguccaaaguaugucaggagugcaaaauuaaggaugguuacaggacuaaggaacaucccauccauucaauccagagguuuguuuggagccauugccgguuucauugaagggggguggacuggaaugguagaugggugguaugguuaucaucaucagaaugagcaaggaucuggcuaugcugcagaucaaaaaagcacacaaaaugccauuaacgggauuacaaacaaggugaauucuguaauugagaaaaugaacacucaauucacagcugugggcaaagaauucaacaaauuagaaagaaggauggaaaacuuaaauaaaaaaguugaugauggguuucuagacauuuggacauauaaugcagaauuguugguucuacuggaaaaugaaaggacuuuggauuuccaugacuccaaugugaagaaucuguaugagaaaguaaaaagccaauuaaagaauaaugccaaagaaauaggaaacggguguuuugaauucuaucacaagugugacaaugaaugcauggaaagugugaaaaauggaacuuaugacuauccaaaauauuccgaagaaucaaaguuaaacagggagaaaauugauggaguaaaauuggaaucaaugggagucuaucagauucuggcgaucuacucaacugucgccaguucccugguucuuuuggucucccugggggcaaucagcuucuggauguguuccaaugggucuuugcaguguagaauaugcaucuga

SEQ ID NO: 32377 - RNA, 1698 nt, Artificial Sequence
  derived and/or modified CDS sequence (wt) from hemagglutinin__InfluenzaA__ABB02825
augaaagcaaaacuacugguccuguuauguacauuuacagcuacauacgcagacacaauauguauaggcuaccaugccaacaacucaacagacacuguugacacaguacuugagaagaaugugacagugacacacucugucaaccuacuugaggacagucacaauggaaaacuaugucuacuaaaaggaauagccccacuacaauuggguaauugcagcguugccggauggaucuuaggaaacccagaaugcgaauuacugauuuccaaggaaucaugguccuacauuguagaaacaccaaaucccgagaauggaacauguuacccaggguauuucgccgacuaugaggaacugagggagcaauugaguucaguaucuucauuugagagauucgaaauauuccccaaaggaagcucauggcccaaccacaccguaaccggaguaucagcaucaugcucccauaaugggaaaagcaguuuuuacagaaauuugcuauggcugacggggaagaaugguuuguacccaaaccugagcauguccuauguaaacaacaaagagaaagaaguccuugugcuaugggguguucaucacccaccuaacauaggggaccaaagggcccucuaccauacagaaaaugcuuaugucucuguagugucuucacauuauagcagaagauucaccccagaaauagccaaaagacccaaaguaagagaucaggaaggaagaaucaacuacuacuggacucugcuggaacccggggacacaauaauauuugaggcaaauggaaaucuaauagcgccaugguaugcuuucgcacugaguagaggcuuuggaucaggaaucaucaccucaaaugcaccaauggaugaaugcgaugcgaagugucaaacaccucagggagcuauaaacaguagucuuccuuuccagaauguacacccaguuacaauaggagaguguccaaaguaugucaggagugcaaaauuaaggaugguuacaggacuaaggaacaucccauccauucaauccagagguuuguuuggagccauugccgguuucauugaagggggguggacuggaaugguagaugggugguaugguuaucaucaucagaaugagcaaggaucuggcuaugcugcagaucaaaaaagcacacaaaaugccauuaacgggauuacaaacaaggugaauucuguaauugagaaaaugaacacucaauucacagcugugggcaaagaauucaacaaauuagaaagaaggauggaaaacuuaaauaaaaaaguugaugauggguuucuagacauuuggacauauaaugcagaauuguugguucuacuggaaaaugaaaggacuuuggauuuccaugacuccaaugugaagaaucuguaugagaaaguaaaaagccaauuaaagaauaaugccaaagaaauaggaaacggguguuuugaauucuaucacaagugugacaaugaaugcauggaaagugugaaaaauggaacuuaugacuauccaaaauauuccgaagaaucaaaguuaaacagggagagaauugauggaguaaaauuggaaucaaugggagucuaucagauucuggcgaucuacucaacugucgccaguucccugguucuuuuggucucccugggggcaaucagcuucuggauguguuccaaugggucuuugcaguguagaauaugcaucuga

SEQ ID NO: 32378 - RNA, 1701 nt, Artificial Sequence
  derived and/or modified CDS sequence (wt) from hemagglutinin__InfluenzaA__ABB02836
augaagacuaucauugcuuugagcuacauucuaugucugguuuucgcucaaaaacuucccggaaaugacaacagcacggcaacgcugugccuugggcaccaugcaguaccaaacggaacgauagugaaaacaaucacgaaugaccaaauugaaguuacuaaugcuacugagcugguucagaguuccucaacagguggaauaugcgacaguccucaucagauccuugauggagaaaacugcacacuaauagaugcucuauugggagacccucagugugauggcuuccaaaauaagaaaugggaccuuuuuguugaacgcagcaaagccuacagcaacuguuacccuuaugaugugccggauuaugccucccuuaggucacuaguugccucauccggcacacuggaguuuaacaaugaaagcuucaauuggacuggagucacucaaaauggaacaagcucugcuugcaaaaggagaucuaauaacaguuucuuuaguagauugaauugguugacccacuuaaaauucaaauacccagcauugaacgugacuaugccaaacaaugaaaaauuugacaaauuguacauuugggggguucaccacccggguacggacaaugaccaaaucagccuauaugcucaagcaucaggaagaaucacagucucuaccaaaagaaaccaacaaacuguaaucccgaacaucggaucuagacccaggguaagggauauccccagcagaauaagcaucuauuggacaauaguaaaaccgggagacauacuuuugauuaacagcacagggaaucuaauugcuccucgggguuacuucaaaauacgaagugggaaaagcucaauaaugagaucagaugcacccauuggcaaaugcaagucugaaugcaucacuccaaauggaagcauucccaaugacaaaccauuucaaaauguaaacaggaucacauauggggccugucccagauauguuaagcaaaacacucugaaauuggcaacagggaugcgaaauguaccagagaaacaaacuagaggcauauuuggcgcaaucgcggguuucauagaaaaugguugggagggaaugguggaugguugguacgguuucaggcaucaaaauucugagggaauaggacaagcagcagaucucaaaagcacucaagcagcaaucaaccaaaucaaugggaagcugaauagguugaucgggaaaaccaacgagaaauuccaucagauugaaaaagaauucucagaaguagaagggagaauucaggaccucgagaaauaugucgaggacacuaaaauagaucucuggucauacaacgcggagcuucuuguugcccuggagaaccaacauacaauugaucuaacugacucagaaaugaacaaacuguuugaaagaacaaagaagcaacugagggaaaaugcugaggauaugggcaaugguuguuucaaaauauaccacaaaugugacaaugccugcauagggucaaucagaaauggaacuuaugaccaugauguauacagagaugaggcauuaaacaaccgguuccagaucaaagguguugagcugaagucaggauacaaagauuggauccuauggauuuccuuugccauaucauguuuuuugcuuuguguugcuuuguugggguucaucaugugggccugccaaaaaggcaacauuaggugcaacauuugcauuuga

SEQ ID NO: 32379 - RNA, 1701 nt, Artificial Sequence
  derived and/or modified CDS sequence (wt) from hemagglutinin__InfluenzaA__ABB02847
augaagacuaucauugcuuugagcuacauucuaugucugguuuucgcucaaaaacuucccggaaaugacaacagcacggcaacgcugugccuugggcaccaugcaguaccaaacggaacgauagugaaaacaaucacgaaugaccaaauugaaguuacuaaugcuacugagcugguucagaguuccucaacagguggaauaugcgacaguccucaucagauccuugauggagaaaacugcacacuaauagaugcucuauugggagacccucagugugauggcuuccaaaauaagaaaugggaccuuuuuguugaacgcagcaaagccuacagcaacuguuacccuuaugaugugccggauuaugccucccuuaggucacuaguugccucauccggcacacuggaguuuaacaaugaaagcuucaauuggauuggagucacucaaaauggaacaagcucugcuugcaaaaggagaucuaauaacaguuucuuuaguagauugaauugguugacccacuuaaaauucaaauacccagcauugaacgugacuaugccaaacaaugaaaaauuugacaaauuguacauuugggggguucaccacccggguacggacaaugaccaaauuagccuauaugcucaagcuucaggaagaaucacagucucuaccaaaagaagccaacaaacuguaaucccgaauaucggaucuagacccaggguaagggauauccccagcagaauaagcaucuauuggacaauaguaaaaccgggagacauacuuuugauuaacagcacagggaaucuaauugcuccucgggguuacuucaaaauacgaagugggaaaagcucaauaaugagaucagaugcacccauuggcaaaugcaauucugaaugcaucacuccaaauggaagcauucccaaugacaaaccauuucaaaauguaaacaggaucacauauggggccugucccagauauguuaagcaaaacacucugaaauuggcaacagggaugcgaaauguaccagagaaacaaacuagaggcauauuuggcgcaaucgcggguuucauagaaaaugguugggagggaaugguggaugguugguacgguuucaggcaucaaaauucugagggaauaggacaagcagcagaucucaaaagcacucaagcagcaaucaaccaaaucaaugggaagcugaauagguugaucgggaaaaccaacgagaaauuccaucagauugaaaaagaauucucagaaguagaagggagaauucaggaccucgagaaauauguugaggacacuaaaauagaucucuggucauacaacgcggagcuucuuguugcccuggagaaccaacauacaauugaucuaacugacucagaaaugaacaaacuguuugaaagaacaaagaagcaacugagggaaaaugcugaggauaugggcaaugguuguuucaaaauauaccacaaaugugacaaugccugcauagggucaaucagaaauggaacuuaugaccaugauguauacagagaugaagcauuaaacaaccgguuccagaucaaagguguugagcugaagucaggauacaaagauuggauccuauggauuuccuuugccauaucauguuuuuugcuuuguguuguuuuguugggguucaucaugugggccugccaaaaaggcaacauuaggugcaacauuugcauuuga

SEQ ID NO: 32380 - RNA, 1701 nt, Artificial Sequence
  derived and/or modified CDS sequence (wt) from hemagglutinin__InfluenzaA__ABB02858
augaagacuaucauugcuuugagcuacauuuuaugccugguuuucgcucaaaaacuucccggaaaugacaacagcacggcaacgcugugccuggggcaccaugcagugccaaacggaacgcuagugaaaacaaucacgaaugaccaaauugaaguaacuaaugcuacugagcugguucagaguuccucaacaaguagaauaugcgacaguccucaccaaauccuugauggagaaaacugcacacuaauagaugcucuauugggagacccucauugugauggcuuccaaaauaaggaaugggaccuuuuuguugaacgcagcaaagccuacagcaacuguuacccuuaugaugugccggauuaugucucccuuaggucacuaguugccucaucaggcacgcuggaguuuaacaaugaaagcuucaauuggacuggagucgcucagaauggaacaagcucugcuugcaaaaggagaucugauaaaaguuucuuuaguagauugaauugguugcaccaauuaaaauacaaauauccagcacugaacgugacuaugccaaacaaugaaaaauuugacaaauuguacauuugggggguucaccacccggguacagacagugaccaaaucagccuauaugcucaagcaucagggagagucacagucucuaccaaaagaagccaacaaacuguaaucccgaauaucggaucuagacccuggguaaggggugucuccagcagaauaagcaucuauuggacaauaguaaaaccgggagacauacuuuugauuaacagcacagggaaucuaauugcuccucgggguuacuucaaaauacgaagugggaaaagcucaauaaugaggucagaugcacccauuggcaaaugcaauucugaaugcaucacuccaaauggaagcauucccaaugacaaaccauuucaaaauguaaacaggaucacauauggggccugucccagauauguuaagcaaaacacucugaaauuggcaacagggaugcggaauguaccagagaaacaaacuagaggcauauucggugcaaucgcgggcuucauagaaaaugguugggagggaaugauggacgguugguacgguuucaggcaucaaaauucugagggcacagggcaagcagcagaucuuaaaagcacucaagcagcaaucaaccaaaucaacgggaaacugaauagguuaaucgagaaaacgaacgagaaauuccaucaaauugaaaaagaauucucagaaguagaagggagaauucaggaccucgagaaauauguugaggacacuaaaauagaucucuggucguacaaugcggagcuucuuguugcccuggagaaccaacauacaauugaucuaacugacucagaaaugaacaaacuguuugaaagaacaaagaagcaacugagggaaaaugcugaggauaugggcaaugguuguuucaaaauauaccacaaaugugacaaugccugcauagggucaaucagaaauggaacuuaugaccaugauguauacagagacgaagcauugaacaaccgguuccagaucaaagguguugagcugaagucaggguacaaagauuggauccuauggauuuccuuugccauaucauguuuuuugcuuuguauuguuuugcugggguucaucaugugggccugccaaaaaggcaacauuaggugcaacauuugcauuuga

SEQ ID NO: 32381 - RNA, 1701 nt, Artificial Sequence
  derived and/or modified CDS sequence (wt) from hemagglutinin__InfluenzaA__ABB02869
augaagacuaucauugcuuugagcuacauuuuaugucugguuuucgcucaaaaacuucccguaaaugacaacagcacggcaacgcugugccugggacaccaugcagugccaaacggaacgcuagugaaaacaaucacgaaugaccacauugaagugacuaaugcuacugagcugguucagaguuccucaacagguagaauaugcgacaguccucaccaaauccuugauggagaaaacugcacacuaauagaugcucuauugggagacccucauugugauggcuuccaaaauaaggaaugggaccuuuuuguugaacgcagcacagccuacagcaacuguuacccuuaugaugugccggauuaugccucccuuaggucacuaguugccucauccggcacacuggaguuuaacaaugaaagcuucaauuggacuggagucgcucagaauggaacaagcucugcuugcaaaaggagaucuauuaaaaguuucuuuaguagauugaauugguugcaccaauuaaaauacaaauauccagcacugaacgugacuaugccaaacaaugaaaaauuugacaaauuguacauuugggggguucaccacccgaguacggacagugaccaaaucagccuauaugcucaagcaucagggagagucacagucucuaccaaaagaagccaacaaacuguaaucccgaauaucggaucuagacccuggguaaggggugucuccagcagaauaagcaucuauuggacaauaguaaaaccgggagacauacuuuugauuaacagcacagggaaucuaauugcuccucgggguuacuucaaaauacgaagugggaaaagcucaauaaugaggucaaaugcacccauuggcaaaugcaauucugaaugcaucacuccaaauggaagcauucccaaugacaaaccauuucaaaauguaaacaggaucacauauggggccugucccagauauguuaagcaaaacacucugaaauuggcaacagggaugcggaauguaccagagaaacaaacuagaggcauauucggcgcaaucgcggguuucguagaaaaugguugggaaggaaugguggacgguugguacgguuucaggcaucaaaauucugagggcacaggacaagcagcagaucuuaaaagcacucaagcagcaaucaaccaaaucaacgggaaacugaauagguuaaucgagaaaacaaacgagaaauuccaucaaauugaaaaagaauucucagaaguagaagggagaauucaggaccucgagaaauauguugaggacacuaaaauagaucucuggucguacaacgcggagcuucuuguugcccuggagaaccaacauacaauugaucuaacugacucagaaaugaacaaacuguuugaaagaacaaggaagcaacugagggaaaaugcugaggauaugggcaaugguuguuucaaaauauaccacaaaugugacaaugccugcauagggucaaucagaaauggaacuuaugaccaugauguauacagagacgaagcauuaaacaaccgguuccagaucaaagguguugagcugaagucaggauacaaagauuggauccuauggauuuccuuugccauaucauguuuuuugcuuuguguuguuuugcugggguucaucaugugggccugccaaaaaggcaacauuaggugcaacauuugcauuuga

SEQ ID NO: 32382 - RNA, 1701 nt, Artificial Sequence
  derived and/or modified CDS sequence (wt) from hemagglutinin__InfluenzaA__ABB02880
augaagacuaucauugcuuugagcuacauuuuaugucugguuuucgcucaaaaacuucccguaaaugacaacagcacggcaacgcugugccugggacaccaugcagugccaaacggaacgcuagugaaaacaaucacgaaugaccacauugaagugacuaaugcuacugagcugguucagaguuccucaacagguagaauaugcgacaguccucaccaaauccuugauggagaaaacugcacacuaauagaugcucuauugggagacccucauugugauggcuuccaaaauaaggaaugggaccuuuuuguugaacgcagcacagccuacagcaacuguuacccuuaugaugugccggauuaugccucccuuaggucacuaguugccucauccggcacacuggaguuuaacaaugaaagcuucaauuggacuggagucgcucagaauggaacaagcucugcuugcaaaaggagaucuauuaaaaguuucuuuaguagauugaauugguugcaccaauuaaaauacaaauauccagcacugaacgugacuaugccaaacaaugaaaaauuugacaaauuguacauuugggggguucaccacccgaguacggacagugaccaaaucagccuauaugcucaagcaucagggagagucacagucucuaccaaaagaagccaacaaacuguaaucccgaauaucggaucuagacccuggguaaggggugucuccagcagaauaagcaucuauuggacaauaguaaaaccgggagacauacuuuugauuaacagcacagggaaucuaauugcuccucgggguuacuucaaaauacgaagugggaaaagcucaauaaugaggucaaaugcacccauuggcaaaugcaauucugaaugcaucacuccaaauggaagcauucccaaugacaaaccauuucaaaauguaaacaggaucacauauggggccugucccagauauguuaagcaaaacacucugaaauuggcaacagggaugcggaauguaccagagaaacaaacuagaggcauauucggcgcaaucgcggguuucauagaaaaugguugggaaggaaugguggacgguugguacgguuucaggcaucaaaauucugagggcacaggacaagcagcagaucuuaaaagcacucaagcagcaaucaaccaaaucaacaggaaacugaauagguuaaucgagaaaacaaacgagaaauuccaucaaauugaaaaagaauucucagaaguagaagggagaauucaggaccucgagaaauauguugaggacacuaaaauagaucucuggucguacaacgcggagcuucuuguugcccuggagaaccaacauacaauugaucuaacugacucagaaaugaacaaacuguuugaaagaacaaggaagcaacugagggaaaaugcugaggauaugggcaaugguuguuucaaaauauaccacaaaugugacaaugccugcauagggucaaucagaaauggaacuuaugaccaugauguauacagagacgaagcauuaaacaaccgguuccagaucaaagguguugagcugaagucaggauacaaagauuggauccuauggauuuccuuugccauaucauguuuuuugcuuuguguuguuuugcugggguucaucaugugggccugccaaaaaggcaacauuaggugcaacauuugcauuuga

SEQ ID NO: 32383 - RNA, 1701 nt, Artificial Sequence
  derived and/or modified CDS sequence (wt) from hemagglutinin__InfluenzaA__ABB02891
augaagacuaucauugcuuugagcuacauuuuaugucugguuuucgcucaaaaacuucccguaaaugacaacagcacggcaacgcugugccugggacaccaugcagugccaaacggaacgcuagugaaaacaaucacgaaugaccacauugaagugacuaaugcuacugagcugguucagaguuccucaacagguagaauaugcgacaguccucaccaaauccuugauggagaaaacugcacacuaauagaugcucuauugggagacccucauugugauggcuuccaaaauaaggaaugggaccuuuuuguugaacgcagcacagccuacagcaacuguuacccuuaugaugugccggauuaugccucccuuaggucacuaguugccucauccggcacacuggaguuuaacaaugaaagcuucaauuggacuggagucgcucagaauggaacaagcucugcuugcaaaaggagaucuauuaaaaguuucuuuaguagauugaauugguugcaccaauuaaaauacaaauauccagcacugaacgugacuaugccaaacaaugaaaaauuugacaaauuguacauuugggggguucaccacccgaguacggacagugaccaaaucagccuauaugcucaagcaucagggagagucacagucucuaccaaaagaagccaacaaacuguaaucccgaauaucggaucuagacccuggguaaggggugucuccagcauaauaagcaucuauuggacaauaguaaaaccgggagacauacuuuugauuaacagcacagggaaucuaauugcuccucgggguuacuuuaaaauacgaagugggaaaagcucaauaaugaggucaaaugcacccauuggcgaaugcaauucugaaugcaucacuccaaauggaagcauucccaaugacaaaccauuucaaaauguaaacaggaucacauauggggccugucccagauauguuaagcaaaacacucugaaauuggcaacagggaugcggaauguaccagagaaacaaacuagaggcauauucggcgcaaucgcggguuucauagaaaaugguugggagggaaugguggacgguugguacgguuucaggcaucaaaauucugagggcacaggacaagcagcagaucuuaaaagcacucaagcagcaaucaaccaaaucaacgggaaacugaauagguuaaucgagaaaacaaacgagaaauuccaucaaauugaaaaagaauucucagaaguagaagggagaauucaggaccucgagaaauauguugaggacacuaaaauagaucucuggucguacaacgcggagcuucuuguugcccuggagaaccaacauacaauugaucuaacugacucagaaaugaacaaacuguuugaaagaacaaggaagcaacugagggaaaaugcugaggauaugggcaaugguuguuucaaaauauaccacaaaugugacaaugccugcauagggucaaucagaaauggaacuuaugaccaugauguauacagagacgaagcauuaaacaaccgguuccagaucaaagguguugagcugaagucaggauacaaagauuggauccuauggauuuccuuugccauaucauguuuuuugcuuuguguuguuuugcugggguucaucaugugggccugccaaaaaggcaacauuaggugcaacauuugcauuuga

SEQ ID NO: 32384 - RNA, 1701 nt, Artificial Sequence
  derived and/or modified CDS sequence (wt) from hemagglutinin__InfluenzaA__ABB02902
augaagacuaucauugcuuugagcuacauuuuaugucugguuuucgcucaaaaacuucccguaaaugacaacagcacggcaacgcugugccugggacaccaugcagugccaaacggaacgcuagugaaaacaaucacgaaugaccacauugaagugacuaaugcuacugagcugguucagaguuccucaacagguagaauaugcgacaguccucaccaaauccuugauggagaaaacugcacacuaauagaugcucuauugggagacccucauugugauggcuuccaaaauaaggaaugggaccuuuuuguugaacgcagcacagccuacagcaacuguuacccuuaugaugugccggauuaugccucccuuaggucacuaguugccucauccggcacacuggaguuuaacaaugaaagcuucaauuggacuggagucgcucagaauggaacaagcucugcuugcaaaaggagaucuauuaaaaguuucuuuaguagauugaauugguugcaccaauuaaaauacaaauauccagcacugaacgugacuaugccaaacaaugaaaaauuugacaaauuguacauuugggggguucaccacccgaguacggacagugaccaaaucagccuauaugcucaagcaucagggagagucacagucucuaccaaaagaagccaacaaacuguaaucccgaauaucggaucuagacccuggguaaggggugucuccagcagaauaagcaucuauuggacaauaguaaaaccgggagacauacuuuugauuaacagcacagggaaucuaauugcuccucgggguuacuuuaaaauacgaagugggaaaagcucaauaaugaggucaaaugcacccauuggcaaaugcaauucugaaugcaucacuccaaauggaagcauucccaaugacaaaccauuucaaaauguaaacaggaucacauauggggccugucccagauauguuaagcaaaacacucugaaauuggcaacagggaugcggaauguaccagagaaacaaacuagaggcauauucggcgcaaucgcggguuucauagaaaaugguugggagggaaugauggacgguugguacgguuucaggcaucaaaauucugagggcacaggacaagcagcagaucuuaaaagcacucaagcagcaaucaaccaaaucaacgggaaacugaauagguuaaucgagaaaacaaacgagaaauuccaucaaauugaaaaagaauucucagaaguagaagggagaauucaggaccucgagaaauauguugaggacacuaaaauagaucucuggucguacaacgcggagcuucuuguugcccuggagaaccaacauacaauugaucuaacugacucagaaaugaacaaacuguuugaaagaacaaggaagcaacugagggaaaaugcugaggauaugggcaaugguuguuucaaaauauaccacaaaugugacaaugccugcauagggucaaucagaaauggaacuuaugaccaugauguauacagagacgaagcauuaaacaaccgguuccagaucaaagguguugagcugaagucaggauacaaagauuggauccuauggauuuccuuugccauaucauguuuuuugcuuuguguuguuuugcugggguucaucaugugggccugccaaaaaggcaacauuaggugcaacauuugcauuuga

SEQ ID NO: 32385 - RNA, 1698 nt, Artificial Sequence
  derived and/or modified CDS sequence (wt) from hemagglutinin__InfluenzaA__ABB02913
augaaagcaaaacuacugguccuguuauguacauuuacagcuacauacgcagacacaauauguauaggcuaccaugccaacaacucaaccgacacuguugacacaguacuugagaagaaugugacagugacacacucugucaaccuacuugaggacagucacaauggaaaacuaugucuacuaaaaggaauagccccacuacaauuggguaauugcagcguugccggauggaucuuaggaaacccagaaugcgaauuacugauuuccaaggaaucaugguccuacauuguagaaacaccaaauccugagaauggaacauguuacccaggguauuucgccgacuaugaggaacugagggagcaauugaguucaguaucuucauuugagagauucgaaauauuccccaaaggaagcucauggcccaaccacaccguaaccggaguaucagcaucaugcucccauaaugggaaaagcaguuuuuacagaaauuugcuauggcugacggggaagaaugguuuguacccaaaucugagcauguccuauguaaacaacaaagagaaagaaguccuugugcuaugggguguucaucgcccaccuaacauaggggaccaaagggcccucuaccauacagaaaaugcuuaugucucuguagugucuucacauuauagcagaagauucaccccagaaauagccaaaagacccaaaguaagagaucaggaaggaagaaucaacuacuacuggacucugcuggaacccggggacacaauaauauuugaggcaaauggaaaucuaauagcgccaugguaugcuuucgcacugaguagaggcuuuggaucaggaaucaucaccucaaaugcaccaauggaugaaugugaugcgaagugucaaacaccucagggagcuauaaacaguagucuuccuuuccagaauguacacccaguuacaauaggagaguguccaaaguaugucaggagugcaaaauuaaggaugguuacaggacuaaggaacaucccauccauucaauccagagguuuguuuggagccauugccgguuucauugaagggggguggacuggaaugguagaugggugguaugguuaucaucaucagaaugagcaaggaucuggcuaugcugcagaucaaaaaagcacacaaaaugccauuaacaggauuacaaacaaggugaauucuguaauugagaaaaugaacacucaauucacagcugugggcaaagaauucaacaaauuagaaagaaggauggaaaacuuaaauaaaaagguugaugauggguuucuagacauuuggacauauaaugcagaauuguugguucuacuggaaaaugaaaggacuuuggauuuccaugacuccaaugugaagaaucuguaugagaaaguaaaaagccaauuaaagaauaaugccaaagaaauaggaaacggguguuuugaauucuaucacaaguguaacaaugaaugcauggaaagugugaaaaauggaacuuaugacuauccgaaauauuccgaagaaucaaaguuaaacagggagaaaauugauggaguaaaauuggaaucaaugggagucuaucagauucuggcgaucuacucaacugucgcuaguucccugguucuuuuggucucccugggggcaaucagcuucuggauguguuccaaugggucuuugcaguguagaauaugcaucuga

SEQ ID NO: 32386 - RNA, 1698 nt, Artificial Sequence
  derived and/or modified CDS sequence (wt) from hemagglutinin__InfluenzaA__ABB02924
augaaaguaaaacuacugguccuguuauguacauuuacagcuacauaugcagacacaauauguauaggcuaccaugccaacaacucaaccgacacuguugacacaguacuugagaagaaugugacagugacacacucugucaaccuacuugaggacagucacaauggaaaacuaugucuacuaaaaggaauagccccacuacaauuggguaauugcagcguugccggauggaucuuaggaaacccagaaugcgaauuacugauuuccaaggaaucaugguccuacauuguagaaacaccaaauccugagaauggaacauguuacccaggguauuucgccgacuaugaggaacugagggagcaauugaguucaguaucuucauuugagagguucgaaauauuccccaaagaaagcucauggcccaaccacaccguaaccggaguaucagcaucaugcucccauaaugggaaaagcaguuuuuacagaaauuugcuauggcugacggggaagaaugguuuguacccaaaccugagcaaguccuaugcaaacaacaaagagaaagaaguccuuguacuaugggguguucaucacccgccuaacauaggggaccaaagggcccucuaucauacagaaaaugcuuaugucucuguagugucuucacauuauagcagaagauucaccccagaaauagccaaaagacccaaaguaagagaucaggaaggaagaaucaacuacuacuggacucugcuggaacccggggauacaauaauauuugaggcaaauggaaaucuaauagcgccaagguaugcuuucgcacugaguagaggcuuuggaucaggaaucaucaccucaaaugcaccaauggaugaaugugaugcgaagugucaaacaccucagggagcuauaaacagcagucuuccuuuccagaauguacacccagucacaauaggagaguguccaaaguaugucaggagugcaaaauuaaggaugguuacaggacuaaggaacaucccauccauucaauccagagguuuguuuggagccauugccgguuucauugaagggggguggacuggaaugguagaugguugguaugguuaucaucaucagaaugagcaaggaucuggcuaugcugcagaucaaaaaagcacacaaaaugccauuaacgggauuacaaacaaggugaaugcuguaauugagaaaaugaacacucaauucacagcugugggcaaagaauucaacaaauuggaaagaaggauggaaaacuuaaauaaaaaaguugaugauggguuucuagacauuuggacauauaaugcagaauuguugguucuacuggaaaaugaaaggacuuuggauuuccaugacuccaaugugaagaaucuguaugagaaaguaaaaagccaauuaaagaauaaugccaaagaaauaggaaacggguguuuugaauucuaucacaaguguaacgaugaaugcauggagagugugaaaaauggaacuuaugacuauccaaaauauuccgaagaaucaaaguuaaacagggagaaaauugauggagugaaauuggaaucaaugggagucuaucagauucuggcgaucuacucaacagucgccaguucccugguucuuuuggucucccugggggcaaucagcuucuggauguguuccaaugggucuuugcaguguagaauaugcaucuga

SEQ ID NO: 32387 - RNA, 1698 nt, Artificial Sequence
  derived and/or modified CDS sequence (wt) from hemagglutinin__InfluenzaA__ABB02936
augaaagcaaaacuacugguccuguuauguacauuuacagcuacauacgcagacacaauauguauaggcuaccaugccaacaacucaaccgacacuguugacacaguacuugagaagaaugugacagugacacacucugucaaccuacuugaggacagucacaauggaaaacuaugucuacuaaaaggaauagccccacuacaauuggguaauugcagcguugccggauggaucuuaggaaacccagaaugcgaauuacugauuuccaaggaaucaugguccuacauuguagaaacaccaaaucccgagaauggaacauguuacccagggcauuucgccgacuaugaggaacugagggagcaauugaguucaguaucuucauuugagagauucgaaauauuccccaaagggagcucauggcccaaccacaccguaaccggaguaucagcaucaugcucccauaaugggaaaagcaguuuuuacagaaauuugcuauggcugacggggaagaaugguuuguacccaaaccugagcauguccuauguaaacaacaaagagaaagaaguccuugugcuaugggguguucaucacccaccuaacauaggggaccaaagggcccucuaccauacagaaaaugcuuaugucucuguagugucuucacauuauagcagaagauucaccccagaaauagccaaaagacccaaaguaagagaucaggaaggaagaaucaacuacuacuggacucugcuggaacccggggacacaauaauauuugaggcaaauggaaaucuaauagcgccaugguaugcuuucgcacugaguagaggcuuuggaucaggaaucaucaccucaaaugcaccaauggaugaaugugaugcgaagugucaaacaccucagggagcuauaaacaguagucuuccuuuccagaauguacacccaguuacaauaggagaguguccaaaguaugucaggagugcaaaauuaaggaugguuacaggacuaaggaacaucccauccauucaauccagagguuuguuuggagccauugccgguuucauugaagggggguggacuggaaugguagaugggugguaugguuaucaucaucagaaugagcaaggaucuggcuaugcugcagaucaaaaaagcacacaaaaugccauuaacgggauuacaaacaaggugaauucuguaauugagaaaaugaacacucaauucacagcugugggcaaagaauucaacaaauuagaaagaaggauggaaaacuuaaauaaaaaaguugaugauggguuucuagacauuuggacauauaaugcagaauuguugguucuacuggaaaaugaaaggacuuuggauuuccaugacuccaaugugaagaaucuguaugagaaaguaaaaagccaauuaaagaauaaugccaaagaaauaggaaacggguguuuugaauucuaucacaaguguaacaaugaaugcauggaaagugugaaaaauggaacuuaugacuauccaaaauauuccgaagaaucaaaguuaaacagggagaaaauugauggaguaaaauuggaaucaaugggagucuaucagauucuggcgaucuacucaacugucgccaguucccugguucuuuuggucucccugggggcaaucagcuucuggauguguuccaaugggucuuugcaguguagaauaugcaucuga

SEQ ID NO: 32388 - RNA, 1701 nt, Artificial Sequence
  derived and/or modified CDS sequence (wt) from hemagglutinin__InfluenzaA__ABB02947
augaagacuaucauugcuuugagcuacauuuuaugucugguuuucgcucaaaaaauucccggaaaugacaacagcacggcaacgcugugccugggacaccaugcagugccaaacggaacgcuagugaaaacaaucacgaaugaccaaauugaagugacuaaugcuacugagcugguucagaguuccucaacagguagaauaugcgacaguccucaccgaauccuugauggagaaaacugcacacugauagaugcucuauugggagacccucauugugauggcuuccaaaauaaggaaugggaccuuuuuguugaacgcagcaaagccuacagcaacuguuacccuuaugaugugcaggauuaugccucccuuaggucacuaguugccucauccggcacccuggaguuuaacaaugaaagcuucaauuggacuggagucgcucagaauggaacaagcuaugcuugcaaaaggagaucuauuaaaaguuucuuuaguagauugaauugguugcaccaauuaaaauacaaauauccagcacugaacgugacuaugccaaacaaugacaaauuugacaaauuguacauuugggggguucaccacccgaguacggacagugaccaaaccagccuauaugcucaagcaucagggagagucacagucucuaccaaaagaagccaacaaacuguaaucccgaauaucggaucuagacccuggguaaggggugucuccagcagaauaagcaucuauuggacaauaguaaaaccgggagacauacuuuugauuaacagcacagggaaucuaauugcuccucgggguuacuucaaaauacgaagugggaaaagcucaauaaugaggucagaugcacccauuggcaaaugcaauucagaaugcaucacuccaaauggaagcauucccaaugacaaaccauuucaaaauguaaacaggaucacauauggggccugucccagauauguuaagcaaaacacucugaaauuggcaacagggaugcggaauguaccagagaaacaaacuagaggcauauucggcgcaaucgcagguuucauagaaaaugguugggagggaaugguggacgguugguacgguuucaggcaucaaaauucugagggcacaggacaagcagcagaucuuaaaagcacucaagcagcaaucaaccaaaucaacgggaaacugaauagguuaaucgagaaaacgaacgagaaauuccaucaaauugaaaaagaauucucagaaguagaagggagaauucaggaccucgagaaauauguugaggacacuaaaauagaucucuggucguacaacgcggagcuucuuguugcccuggagaaccaacauacaauugaucuaacugacucagaaaugaacaaacuguuugaaagaacaaggaagcaacugagggaaaaugcugaggauaugggcaaugguuguuucaaaauauaccacaaaugugacaaugccugcauagggucaaucagaaauggaacuuaugaccaugauguauacagagacgaagcauuaaacaaccgguuccagaucaaagguguugagcugaagucaggauacaaagauuggauccuauggauuuccuuugccauaucauguuuuuugcuuuguguuguuuugcugggguucaucaugugggccugccaaaaaggcaacauuaggugcaacauuugcauuuga

SEQ ID NO: 32389 - RNA, 1701 nt, Artificial Sequence; identical to SEQ ID NO: 32202
  derived and/or modified CDS sequence (wt) from hemagglutinin__InfluenzaA__ABB02958

SEQ ID NO: 32390 - RNA, 1701 nt, Artificial Sequence; identical to SEQ ID NO: 32202
  derived and/or modified CDS sequence (wt) from hemagglutinin__InfluenzaA__ABB02969

SEQ ID NO: 32391 - RNA, 1701 nt, Artificial Sequence
  derived and/or modified CDS sequence (wt) from hemagglutinin__InfluenzaA__ABB02980
augaagacuaucauugcuuugagcuacauuuuaugucugguuuucgcucaaaaacuucccggaaaugacaacagcacggcaacgcugugccuggggcaccaugcagugccaaacggaacgcuagugaaaacaaucacgaaugaccaaauugaagugacuaaugcuacugagcugguucagaguuccucaacagguagaauaugcgacaguccucaccaaauccuugauggagaaaacugcacacuaauagaugcucuauugggagacccucauugugauggcuuccaaaauaaggaaugggaccuuuuuguugaacgcagcaaagccuacagcaacuguuacccuuaugaugugccggauuaugccucccuuaggucacuaguugccucauccggcacacuggaguuuaacaaugaaagcuucaauuggacuggagucgcucagaauggaacaagcucugcuugcaaaaggagaucuaauaaaaguuucuuuaguagauugaauugguugcaccaauuaaaauacaaauauccagcacugaacgugacuaugccaaacaaugaaaaauuugacaaauuguacauuugggggguucaccacccgaguacggacagugaccaaaucagccuauaugcucaagcaucagggagagucacagucucuaccaaaagaagccaacaaacuguaaucccgaauaucggaucuagacccuggguaaggggugucuccagcauaauaagcaucuauuggacaauaguaaaaccgggagacauacuuuugauuaacagcacagggaaucuaauugcuccucgggguuacuucaaaauacgaagugggaaaagcucaauaaugaggucagaugcacccauuggcaaaugcaauucugaaugcaucacuccaaauggaagcauucccaaugacaaaccauuucaaaauguaaacaggaucacauauggggccugucccagauauguuaagcaaaacacucugaaauuggcaacagggaugcggaauguaccagagaaacaaacuagaggcauauucggcgcaaucgcggguuucauagaaaaugguugggagggaaugguggacgguugguacgguuucaggcaucaaaauucugaggguacaggacaagcagcagaucuuaaaagcacucaagcagcaaucaaccaaaucaacgggaaacugaauagguuaaucgagaaaacgaacgagaaauuccaucaaauugaaaaagaauucucagaaguagaagggagaauucaggaccucgagaaauauguugaggacacuaaaauagaucucuggucguacaacgcggagcuucuuguugcccuggagaaccaacauacaauugaucuaacugacucagaaaugaacaaacuguuugaaagaacaaagaagcaacugagggaaaaugcugaggauaugggcaaugguuguuucaaaauauaccacaaaugugacaaugccugcauagggucaaucagaaauggaacuuaugaccaugauguauacagagacgaagcauuaaacaaccgguuccagaucaaagguguugagcugaagucaggauacaaagauuggauccuauggauuuccuuugccauaucauguuuuuugcuuuguguuguuuugcugggguucaucaugugggccugccaaaaaggcaacauuaggugcaacauuugcauuuga

SEQ ID NO: 32392 - RNA, 1701 nt, Artificial Sequence
  derived and/or modified CDS sequence (wt) from hemagglutinin__InfluenzaA__ABB02991
augaagacuaucauugcuuugagcuacauuuuaugucugguuuucgcucaaaaacuucccggaaaugacaacagcacggcaacgcugugccuggggcaccaugcagugccaaacggaacgcuagugaaaacaaucacgaaugaccaaauugaagugacuaaugcuacugagcugguucagaguuccucaacagguagaauaugcgacaauccucaccaaauccuugauggagaaaacugcacacuaauagaugcucuauugggagacccucauugugauggcuuccaaaauaaggaaugggaccuuuuuguugaacgcagcaaagccuacagcaacuguuacccuuaugaugugccggauuaugccucccuuaggucacuaguugccucauccggcacacuggaguuuaacaaugaaagcuucaauuggacuggagucgcucagaauggaacaagcucugcuugcaaaaggagaucuaauaaaaguuucuuuaguagauugaauugguugcaccaauuaaaauacaaauauccagcacugaacgugacuaugccaaacaaugaaaaauuugacaaauuguacauuugggggguucaccacccgaguacggacagugaccaaaucagccuauaugcucaagcaucagggagagucacagucucuaccaaaagaagccaacaaacuguaaucccgaauaucggaucuagacccuggguaaggggugucuccagcauaauaagcaucuauuggacaauaguaaaaccgggagacauacuuuugauuaacagcacagggaaucuaauugcuccucgggguuacuucaaaauacgaagugggaaaagcucaauaaugaggucagaugcacccauuggcaaaugcaauucugaaugcaucacuccaaauggaagcauucccaaugacaaaccauuucaaaauguaaacaggaucacauauggggccugucccagauauguuaagcaaaacacucugaaauuggcaacagggaugcggaauguaccagagaaacaaacuagaggcauauucggcgcaaucgcggguuucauagaaaaugguugggagggaaugguggacgguugguacgguuucaggcaucaaaauucugagggcacaggacaagcagcagaucuuaaaagcacucaagcagcaaucaaccaaaucaacgggaaacugaauagguuaaucgagaaaacgaacgagaaauuccaucaaauugaaaaagaauucucagaaguagaagggagaauucaggaccucgagaaauauguugaggacacuaaaauagaucucuggucguacaacgcggagcuucuuguugcccuggagaaccaacauacaauugaucuaacugacucagaaaugaacaaacuguuugaaagaacaaagaagcaacugagggaaaaugcugaggauaugggcaaugguuguuucaaaauauaccacaaaugugacaaugccugcauagggucaaucagaaauggaacuuaugaccaugauguauacagagacgaagcauuaaacaaccgguuccagaucaaagguguugagcugaagucaggauacaaagauuggauccuauggauuuccuuugccauaucauguuuuuugcuuuguguuguuuugcugggguucaucaugugggccugccaaaaaggcaacauuaggugcaacauuugcauuuga

SEQ ID NO: 32393 - RNA, 1701 nt, Artificial Sequence
  derived and/or modified CDS sequence (wt) from hemagglutinin__InfluenzaA__ABB03002
augaagacuaucauugcuuugagcuacauuuuaugucugguuuucgcucaaaaacuucccggaaaugacaacagcacggcaacgcugugccuggggcaccaugcagugccaaacggaacgcuagugaaaacaaucacgaaugaccaaauugaagugacuaaugcuacugagcugguucagaguuccucaacagguagaauaugcaacaguccucaccaaauccuugauggagaaaacugcacacuaauagaugcucuauugggagacccucauugugauggcuuccaaaauaaggaaugggaccuuuuuguugaacgcagcaaagccuacagcaacuguuacccuuaugaugugccggauuaugccucccuuaggucacuaguugccucauccggcacacuggaguucaacaaugaaagcuucaauuggacuggagucgcucagaauggaacaagcucugcuugcaaaaggagaucuaauaaaaguuucuuuaguagauugaauugguugcaccaauuaaaauacaaauauccagcacugaacgugacuaugccaaacaaugaaaaauuugacaaauuguacauuugggggguucaccacccgaguacggacagugaccaaaucagccuauaugcucaagcaucagggagagucacagucucuaccaaaagaagccaacaaacuguaaucccgaauaucggaucuggacccuggguaaggggugucuccagcagaauaagcaucuauuggacaauaguaaaaccgggagacauacuuuugauuaacagcacagggaaucuaauugcuccucgggguuacuucaaaauacgaagugggaaaagcucaauaaugaggucagaugcacccauuggcaaaugcaauucugaaugcaucacuccaaauggaagcauucccaaugacaaaccauuucaaaauguaaacaggaucacauauggggccugucccagauauguuaagcaaaacacucugaaauuggcaacagggaugcggaauguaccagagaaacaaacuagaggcauauucggcgcaaucgcggguuucauagaaaaugguugggagggaaugguggacgguugguacgguuucaggcaucaaaauucugagggcacaggacaagcagcagaucuuaaaagcacucaagcagcaaucaaccaaaucaacgggaaacugaauagguuaaucgagaaaacgaacgagaaauuccaucaaauugaaaaagaauucucagaaguagaagggagaauucaggaccucgagaaauauguugaggacacuaaaauagaucucuggucguacaacgcggagcuucuuguugcccuggagaaccaacauacaauugaucuaacugacucagaaaugaacaaacuguuugaaagaacaaagaagcaacugagggaaaaugcugaggauaugggcaaugguuguuucaaaauauaccacaaaugugacaaugccugcauagggucaaucagaaauggaacuuaugaccaugauguauacagagacgaagcauuaaacaaccgguuccagaucaaagguguugagcugaagucaggauacaaagauuggauccuauggauuuccuuugccauaucauguuuuuugcuuuguguuguuuugcugggguucaucaugugggccugccaaaaaggcaacauuaggugcaacauuugcauuuga

SEQ ID NO: 32394 - RNA, 1701 nt, Artificial Sequence
  derived and/or modified CDS sequence (wt) from hemagglutinin__InfluenzaA__ABB03013
augaagacuaucauugcuuugagcuacauuuuaugccugguuuucgcucaaaaacuucccggaaaugacaacagcacggcaacgcugugccugggacaccaugcagugccaaacggaacgcuagugaaaacaaucacgagugaccaaauugaagugacuaaugcuacugagcugguucagaguuccucaacagguagaauaugcgacaguccucaccgaauccuugauggagaaaacugcacacugauagaugcucuauugggagacccucauugugauggcuuccaaaauaaggaaugggaccuuuuuguugaacgcagcaaagccuacagcaacuguuacccuuaugaugugccggauuaugccucccuuaggucacuaguugccucauccggcacccuggaguuuaacaaugaaagcuucaauuggacuggagucgcucagaauggaacaagcuuugcuugcaaaaggagaucuauuaaaaguuucuuuaguagauugaauugguugcaccaauuaaaauacaaauauccagcacugaacgugacuaugccaaacaaugacaaauuugacaaauuguacauuugggggguucaccacccggguacggacagugaccaaaccagccuauaugcucaagcaucagggagagucacagucucuaccaaaagaagccaacaaacuguaaucccgaauaucggaucuggacccuggguaagggguguuuccagcagaauaagcaucuauuggacaauagugaaaccgggagacauacuucugaucaacagcacagggaaucuaauugcuccucgggguuacuucaaaauacgaagugggaaaagcucaauaaugaggucagaugcacccauuggcaaaugcaauucugaaugcaucacuccaaauggaagcauucccaaugacaaaccauuucaaaauguaaacaggaucacauauggggccugucccagauauguuaagcaaaacacucugaaauuggcaacagggaugcggaauguaccagagaaacaaacuagaggcauauucggcgcaaucgcagguuucauagaaaaugguugggagggaaugguagacgguugguacgguuucaggcaucaaaauucugagggcacaggacaagcagcagaucuuaaaagcacucaagcagcaaucaaccaaaucaacgggaaacugaauagguuaaucgagaaaacgaacgagaaauuccaucaaauugaaaaagaauucacagaaguagaagggagaauucaggaccucgagaaauauguugaggacacuaaaauagaucucuggucguacaacgcggagcuucuuguugcccuggagaaccaacauacaauugaucuaacugacucagaaaugaacaaacuguuugaaagaacaaggaagcaacugagggaaaaugcugaggauaugggcaaugguuguuucaaaauauaccacaaaugugacaaugccugcauagggucaaucagaaauggaacuuaugaccaugauguauacagagacgaagcauuaaacaaccgguuccagaucaaagguguugagcugaagucaggauacaaagauuggauccuauggauuuccuuugccacaucauguuuuuugcuuuguguuguuuugcugggguucaucaugugggccugccaaaaaggcaacauuaggugcaacauuugcauuuga

SEQ ID NO: 32395 - RNA, 1701 nt, Artificial Sequence
  derived and/or modified CDS sequence (wt) from hemagglutinin__InfluenzaA__ABB03024
augaagacuaucauugcuuugagcuacauuuuaugucugguuuucgcucaaaaacuucccggaaaugacaacagcacggcaacgcugugccuggggcaccaugcagugccaaacggaacgcuagugaaaacaaucacgaaugaccaaauugaagugacuaaugcuacugagcugguucagaguuccucaacagguagaauaugcgacaguccucaccaaauccuugauggagaaaacugcacacuaauagaugcucuauugggagacccucauugugauggcuuccaaaauaaggaaugggaccuuuuuguugaacgcagcaaagccuacagcaacuguuacccuuaugaugugccggauuaugccucccuuaggucacuaguugccucauccggcacacuggaguucaacaaugaaagcuucaauuggacuggagucgcucagaauggaacaagcucugcuugcaaaaggagaucuaauaaaaguuucuuuaguagauugaauugguugcaccaauuaaaauacaaauauccagcacugaacgugacuaugccaaacaaugaaaaauuugacaaauuguacauuugggggguucaccacccgaguacggacagugaccaaaucagccuauaugcucaagcaucagggagagucacagucucuaccaaaagaagccaacaaacuguaaucccgaauaucggaucuagacccuggauaaggggugucuccagcagaauaagcaucuauuggacaauaguaaaaccgggagacauacuuuugauuaacagcacagggaaucuaauugcuccucgggguuacuucaaaauacgaagugggaaaagcucaauaaugaggucagaugcacccauuggcaaaugcaauucugaaugcaucacuccaaauggaagcauucccaaugacaaaccauuucaaaauguaaacaggaucacauauggggccugucccagauauguuaagcaaaacacucugaaauuggcaacagggaugcggaauguaccagagaaacaaacuagaggcauauucggcgcaaucgcggguuucauagaaaaugguugggagggaaugguggacgguugguacgguuucaggcaucaaaauucugagggcacaggacaagcagcagaucuuaaaagcacucaagcagcaaucaaccaaauuaacgggaaacugaauagguuaaucgagaaaacgaacgagaaauuccaucaaauugaaaaagaauucucagaaguagaagggagaauucaggaccucgagaaauauguugaggacacuaaaauagaucucuggucguacaacgcggagcuucuuguugcccuggagaaccaacauacaauugaucuaacugacucagaaaugaacaaacuguuugaaagaacaaagaagcaacugagggaaaaugcugaggauaugggcaaugguuguuucaaaauauaccacaaaugugacaaugccugcauagggucaaucagaaauggaacuuaugaccaugauguauacagagacgaagcauuaaacaaccgguuccagaucaaagguguugagcugaagucaggauacaaagauuggauccuauggauuuccuuugccauaucauguuuuuugcuuuguguuguuuugcugggguucaucaugugggccugccaaaaaggcaacauuaggugcaacauuugcauuuga

SEQ ID NO: 32396 - RNA, 1701 nt, Artificial Sequence
  derived and/or modified CDS sequence (wt) from hemagglutinin__InfluenzaA__ABB03035
augaagacuaucauugcuuugagcuacauuuuaugccugguuuucgcucaaaaacuucccggaaaugacaacagcacggcaacgcugugccugggacaccaugcagugccaaacggaacgcuagugaaaacaaucacgagugaccaaauugaagugacuaaugcuacugagcugguucagaguuccucaacagguagaauaugcgacaguccucaccgaauccuugauggagaaaacugcacacugauagaugcucuauugggagacccucauugugauggcuuccaaaauaaggaaugggaccuuuuuguugaacgcagcaaagccuacagcaacuguuacccuuaugaugugccggauuaugccucccuuaggucacuaguugccucauccggcacccuggaguuuaacaaugaaagcuucaauuggacuggagucgcucagaauggaacaagcuuugcuugcaaaaggagaucuauuaaaaguuucuuuaguagauugaauugguugcaccaauuaaaauacaaauauccagcacugaacguggcuaugccaaacaaugacaaauuugacaaauuguacauuugggggguucaccacccggguacggacagugaccaaaccagccuauaugcucaagcaucagggagagucacagucucuaccaaaagaagccaacaaacuguaaucccgaauaucggaucuagacccuggguaagggguguuuccagcagaauaagcaucuauuggacaauagugaaaccgggagacauacuucugaucaacagcacagggaaucuaauugcuccucgggguuacuucaaaauacgaagugggaaaagcucaauaaugaggucagaugcacccauuggcaaaugcaauucugaaugcaucacuccaaauggaagcauucccaaugacaaaccauuucaaaauguaaacaggaucacauauggggccugucccagauauguuaagcaaaacacucugaaauuggcaacagggaugcggaauguaccagagaaacaaacuagaggcauauucggcgcaaucgcagguuucauagaaaaugguugggagggaaugguagacgguugguacgguuucaggcaucaaaauucugagggcacaggacaagcagcagaucuuaaaagcacucaagcagcaaucaaccaaaucaacgggaaacugaauagguuaaucgagaaaacgaacgagaaauuccaucaaauugaaaaagaauucacagaaguagaagggagaauucaggaccucgagaaauauguugaggacacuaaaauagaucucuggucguacaacgcggagcuucuuguugcccuggagaaccaacauacaauugaucuaacugacucagaaaugaacaaacuguuugaaagaacaaggaagcaacugagggaaaaugcugaggauaugggcaaugguuguuucaaaauauaccacaaaugugacaaugccugcauagggucaaucagaaauggaacuuaugaccaugauguauacagagacgaagcauuaaacaaccgguuccagaucaaagguguugagcugaagucaggauacaaagauuggauccuauggauuuccuuugccacaucauguuuuuugcuuuguguuguuuugcugggguucaucaugugggccugccaaaagggcaacauuaggugcaacauuugcauuuga

SEQ ID NO: 32397 - RNA, 1701 nt, Artificial Sequence
  derived and/or modified CDS sequence (wt) from hemagglutinin__InfluenzaA__ABB03046
augaagacuaucauugcuuugagcuacauuuuaugucugguuuucgcucaaaaacuucccggaaaugacaacagcacggcaacgcugugccuggggcaccaugcagugccaaacggaacgcuagugaaaacaaucacgaaugaccaaauugaagugacuaaugcuacugagcugguucagaguuccucaacagguagaauaugcgacaguccucaccaaauccuugauggagaaaacugcacacuaauagaugcucuauugggagacccucauugugauggcuuccaaaauaaggaaugggaccuuuuuguugaacgcagcaaagccuacagcaacuguuacccuuaugaugugccggauuaugccucccuuaggucacuaguugccucauccggcacacuggaguuuaacaaugaaagcuucaauuggacuggagucgcucagaauggaacaagcucugcuugcaaaaggagaucuaauaaaaguuucuuuaguagauugaauugguugcaccaauuaaaauacaaauauccagcacugaacgugacuaugccaaacaaugaaaaauuugacaaauuguacauuugggggguucaccacccgaguacggacagugaccaaaucagccuauaugcucaagcaucagggagagucacagucucuaccaaaagaagccaacaaacuguaaucccgaauaucggaucuagacccuggguaaggggugucuccagcggaauaagcaucuauuggacaauaguaaaaccgggagacauacuuuugauuaacagcacagggaaucuaauugcuccucgggguuacuucaaaauacgaagugggaaaagcucaauaaugaggucagaugcacccauuggcaaaugcaauucugaaugcaucacuccaaauggaagcauucccaaugacaaaccauuucaaaauguaaacaggaucacauauggggccugucccagauauguuaagcaaaacacucugaaauuggcaacagggaugcggaauguaccagagaaacaaacuagaggcauauucggcgcaaucgcggguuucauagaaaaugguugggagggaaugguggacgguugguacgguuucaggcaucaaaauucugagggcacaggacaagcagcagaucuuaaaagcacucaagcagcaaucaaccaaaucaacgggaaacugaauagguuaaucgagaaaacgaacgagaaauuccaucaaauugaaaaagaauucucagaaguagaagggagaauucaggaccucgagaaauauguugaggacacuaaaauagaucucuggucguacaacgcggagcuucuuguugcccuggagaaccaacauacaauugaucuaacugacucagaaaugaacaaacuguuugaaagaacaaagaagcaacugagggaaaaugcugaggauaugggcaaugguuguuucaaaauauaccacaaaugugacaaugccugcauagggucaaucagaaauggaacuuaugaccaugauguauacagagacgaagcauuaaacaaccgguuccagaucaaagguguugagcugaagucaggauacaaagauuggauccuauggauuuccuuugccauaucauguuuuuugcuuuguguugcuuugcugggguucaucaugugggccugccaaaaaggcaacauuaggugcaacauuugcauuuga

SEQ ID NO: 32398 - RNA, 1701 nt, Artificial Sequence
  derived and/or modified CDS sequence (wt) from hemagglutinin__InfluenzaA__ABB03057
augaagacuaucauugcuuugagcuacauucuaugucugguuuucgcucaagaacuucccggaaaugacaacagcacggcaacgcugugccuugggcaccaugcaguaccaaacggaacgauagugaaaacaaucacgaaugaccaaauugaaguuacuaaugcuacugagcugguucagaguuccucaacagguggaauaugcgacaguccucaucagauccuugauggagaaaacugcacacuaauagaugcucuauugggagacccucagugugauggcuuccaaaauaagaaaugggaccuuuuuguugaacgcagcaaagccuacagcaacuguuacccuuaugaugugccggauuaugccucccuuaggucacuaguugccucauccggcacacuggaguuuaacaaugaaagcuucaauuggacaggagucacucaaaauggaacaagcucugcuugcaaaaggagaucuaauaacaguuucuuuaguagauugaauugguugacccacuuaaaauucaaauacccagcauugaacgugacuaugccaaacaaugaaaaauuugacaaauuguacauuugggggguucaccacccggguacggacaaugaccaaaccagccuauaugcucaagcaucaggaagaaucacagucucuaccaaaagaagccaacaaacuguaaucccgaauaucggaucuagacccaggguaagggauauccccagcagaauaagcaucuauuggacaauaguaaaaccgggagacauacuuuugauuaacagcacagggaaucuaauugcuccucgggguuacuucaaaauacgaagugggaaaagcucaauaaugagaucagaugcacccauuggcaaaugcaauucugaaugcaucacuccaaauggaagcauucccaaugacaaaccauuucaaaauguaaacaggaucacauauggggccugucccagauauguuaagcaaaacacucugaaauuggcaacagggaugcgaaauguaccagagaaacaaacuagaggcauauuuggcgcaaucgcggguuucauagaaaaugguugggagggaaugguggaugguugguacgguuuuaggcaucaaaauucugagggaauaggacaagcagcagaucucaaaagcacucaagcagcaaucaaccaaaucaaugggaagcugaauagguugaucggaaaaaccaacgaaaaauuccaucagauugaaaaagaauucucagaaguagaagggagaauucaggaccucgagaaauauguugaggacacuaaaauagaucucuggucauacaacgcggagcuucuuguugcccuggagaaccaacauacaauugaucuaacugacucagaaaugaacaaacuguucgaaagaacaaagaagcaacugagggaaaaugcugaggauaugggcaaugguuguuucaaaauauaccacaaaugugacaaugccugcauagggucaaucagaaauggaacuuaugaccaugauguauacagagaugaagcauuaaacaaccgguuccagaucaaagguguugagcugaaguuaggauacaaagauuggauccuauggauuuccuuugccauaucauguuuuuugcuuuguguugcuuuguugggguucaucaugugggccugccaaaaaggcaacauuaggugcaacauuugcauuuga

SEQ ID NO: 32399 - RNA, 1701 nt, Artificial Sequence
  derived and/or modified CDS sequence (wt) from hemagglutinin__InfluenzaA__ABB03068
augaagacuaucauugcuuugagcuacauucuaugucugguuuucgcucaagaacuucccggaaaugacaacagcacggcaacgcugugccuugggcaccaugcaguaccaaacggaacgauagugaaaacaaucacaaaugaccaaauugaaguuacuaaugcuacugagcugguucagaguuccucaacagguggaauaugcgacaguccucaucagauccuugauggagaaaacugcacacuaauagaugcucuauugggagacccucagugugauggcuuccaaaauaagaaaugggaccuuuuuguugaacgcagcaaagccuacagcaacuguuacccuuaugaugugccggauuaugccucccuuaggucacuaguugccucauccggcacacuggaguuuaacaaugaaagcuucaauuggacuggagucacucaaaauggaacaagcucugcuugcaaaaggagaucuaauaacaguuucuuuaguagauugaauugguugacccacuuaaaauucaaauacccagcauugaacgugacuaugccaaacaaugaaaaauuugacaaauuguacauuugggggguucaccacccggguacggacaaugaccaaaccagccuauaugcucaagcaucaggaagaaucacagucucuaccaaaagaagccaacaaacuguaaucccgaauaucggaucuagacccaggguaagggauauccccagcagaauaagcaucuauuggacaauaguaaaaccgggagacauacuuuugauuaacagcacagggaaucuaauugcuccucgggguuacuucaaaauacgaagugggaaaagcucaauaaugagaucagaugcacccauuggcaaaugcaauucugaaugcaucacuccaaauggaagcauucccaaugacaaaccauuucaaaauguaaacaggaucacauauggggccugucccagauauguuaagcaaaacacucugaaauuggcaacagggaugcgaaauguaccagagaaacaaacuagaggcauauuuggcgcaaucgcggguuucauagaaaaugguugggagggaaugguggaugguugguacgguuuuagacaucaaaauucugagggaauaggacaagcagcagaucucaaaagcacucaagcagcaaucaaccaaaucaaugggaagcugaauagguugaucggaaaaaccaacgagaaauuccaucagauugaaaaagaauucucagaaguagaagggagaauucaggaccucgagaaauauguugaggacacuaaaauagaucucuggucauacaacgcggagcuucuuguugcccuggagaaccaacauacaauugaucuaacugacucagaaaugaacaaacuguucgaaagaacaaagaagcaacugagggaaaaugcugaggauaugggcaaugguugcuucaaaauauaccacaaaugugacaaugccugcauagggucaaucagaaauggaacuuaugaccaugauguauacagagaugaagcauuaaacaaccgguuccagaucaaagguguugagcugaagucaggauacaaagauuggauccuauggauuuccuuugccauaucauguuuuuugcuuuguguugcuuuguugggguucaucaugugggccugccaaaaaggcaacauuaggugcaacauuugcauuuga

SEQ ID NO: 32400 - RNA, 1701 nt, Artificial Sequence
  derived and/or modified CDS sequence (wt) from hemagglutinin__InfluenzaA__ABB03079
augaagacuaucauugcuuugagcuacauucuaugucugguuuucgcucaaaaacuucccggaaaugacaacagcacggcaacgcugugccuugggcaccaugcaguaccaaacggaacgauagugaaaacaaucacgaaugaccaaauugaaguuacuaaugcuacugagcugguucagaguuccucaacagguggaauaugcgacaguccucaucagauccuugauggagaaaacugcacacuaauagaugcucuauugggagacccucagugugauggcuuccaaaauaagaaaugggaccuuuuuguugaacgcagcaaagccuacagcaacuguuacccuuaugaugugccggauuaugccucccuuaggucacuaguugccucauccggcacacuggaguuuaacaaugaaagcuucaauuggacuggagucacucaaaauggaacaagcucugcuugcaaaaggagaucuaauaacaguuucuuuaguagauugaauugguugacccacuuaaaauucaaauacccagcauugaacgugacuaugccaaacaaugaaaaauuugacaaauuguacauuugggggguucaccacccggguacggacaaugaccaaaucagccuauaugcucaagcaucaggaagaaucacagucucuaccaaaagaagccaacaaacuguaaucccgaauaucggaucuagacccaggguaagggauauccccagcagaauaagcaucuauuggacaauaguaaaaccgggagacauacuuuugauuaacagcacagggaaucuaauugcuccucgggguuacuucaaaauacgaagugggaaaagcucaauaaugagaucagaugcacccauuggcaaaugcaauucugaaugcaucacuccaaauggaagcauucccaaugacaaaccauuucaaaauguaaacaggaucacauauggggccugucccagauauguuaagcaaaacacucugaaauuggcaacagggaugcgaaauguaccagagaaacaaacuagaggcauauuuggcgcaauugcggguuucauagaaaaugguugggagggaaugguugaugguugguacgguuucaggcaucaaaauucugagggaauaggacaagcagcagaucucaaaagcacucaagcagcaaucaaccaaaucaaugggaagcugaauagguugaucggaaaaaccaacgagaaauuccaucagauugaaaaagaauucucagaaguagaagggagaauucaggaccucgagaaauauguugaggacacuaaaauagaucucuggucauacaacgcggagcuucuuguugcccuggagaaccaacauacaauugaucuaacugacucagaaaugaacaaacuguuugaaagaacaaagaagcaacugagggaaaaugcugaggauaugggcaaugguuguuucaaaauauaccacaaaugugacaaugccugcauagggucaaucagaaauggaacuuaugaccaugauguauacagagaugaagcauuaaacaaccgguuccagaucaaagguguugagcugaagucaggauacaaagauuggauccuauggauuuccuuugccauaucauguuuuuugcuuuguguugcuuuguugggguucaucaugugggccugccaaaaaggcaacauuaggugcaacauuugcauuuga

SEQ ID NO: 32401 - RNA, 1701 nt, Artificial Sequence
  derived and/or modified CDS sequence (wt) from hemagglutinin__InfluenzaA__ABB03090
augaagacuaucauugcuuugagcuacauucuaugucugguuuucgcucaaaaacuucccggaaaugacaacagcacggcaacgcugugccuugggcaccaugcaguaccaaacggaacgauagugaaaacaaucacgaaugaccaaauugaaguuacuaaugcuacugagcugguucagaguuccucaacagguggaauaugcgacaguccucaucagauccuugauggagaaaacugcacacuaauagaugcucuauugggagacccucagugugauggcuuccaaaauaagaaaugggaccuuuuuguugaacgcagcaaagccuacagcaacuguuacccuuaugaugugccggauuaugccucccuuaggucacuaguugccucauccggcacacuggaguuuaacaaugaaagcuucaauuggacuggagucacucaaaauggaacaagcucugcuugcaaaaggagaucuaauaacaguuucuuuaguagauugaauugguugacccacuuaaaauucaaauacccagcauugaacgugaccaugccaaacaaugaaaaauuugacaaauuguacauuugggggguucaccacccggguacggacaaugaccaaaucagccuauaugcucaagcaucaggaagaaucacagucucuaccaaaagaagccaacaaacuguaaucccgaauaucggaucuagacccaggguaagggauauccccagcagaauaagcaucuauuggacaauaguaaaaccgggagacauacuuuugauuaacagcacagggaaucuaauugcuccucgggguuacuucaaaauacgaagugggaaaagcucaauaaugagaucagaugcacccauuggcaaaugcaauucugaaugcaucacuccaaauggaagcauucccaaugacaaaccauuucaaaauguaaacaggaucacauauggggccugucccagauauguuaagcaaaacacucugaaauuggcaacagggaugcgaaauguaccagagaaacaaacuagaggcauauuuggcgcaaucgcggguuucauagaaaaugguugggagggaaugguggaugguugguacgguuucaggcaucaaaauucugagggaauagggcaagcagcagaucucaaaagcacucaagcagcaauaaaccaaaucaaugggaagcugaauagguugaucggaaaaaccaacgagaaauuccaucagauugaaaaagaauucucagaaguagaagggagaauucaggaccucgagaaauauguugaggacacuaaaauagaucucuggucauacaacgcggagcuucuuguugcccuggagaaccaacauacaauugaucuaacugacucagaaaugaacaaacuguuugaaagaacaaagaagcaacugagggaaaaugcugaggauaugggcaaugguuguuucaaaauauaccacaaaugugacaaugccugcauagggucaaucagaaauggaacuuaugaccaugauguauacagagaugaagcauuaaacaaccgguuccagaucaaagguguugagcugaagucaggauacaaagauuggauccuauggauuuccuuugccauaucauguuuuuugcuuuguguugcuuuguugggguucaucaugugggccugccaaaaaggcaacauuaggugcaacauuugcauuuga

SEQ ID NO: 32402 - RNA, 1698 nt, Artificial Sequence
  derived and/or modified CDS sequence (wt) from hemagglutinin__InfluenzaA__ABB03101
augaaaguaaaacuacugauccuguuauguacauuuacagcuacauaugcagacacaauauguauaggcuaccaugccaacaacucaaccgacacuguugacacaguacuugagaagaaugugacagugacacacucugucaaccuacuugaggacagucacaauggaaaacugugccuacuaaaaggaauagccccccuacaauuggguaauugcagcguugccggauggaucuuaggaaacccagaaugcgaauuacugauuuccaaggaaucaugguccuacauuguagaaacaccaaauccugagaauggagcauguuacccaggguauuucgccgacuaugaggagcuaagggagcaauugaguucaguaucuucauuugagagauucgaaauauuccccaaaaaaagcucauggcccaaccacaccguaaccggaguaucagcaucaugcucccauaaugggaaaagcaguuuuuacagaaauuugcuauggcugacggggaagaaugguuuguacccaaaccugagcaaguccuaugcaaacaacaaagagaaagaaguccuuauacuaugggguguucaucacccgccuaacauaggggaccaaaggacccucuaucacacagaaaaugcuuaugucucuguagugucuucacauuauagcagaagauucaccccagaaauaaccaaaaggcccaaaguaagagaucaggaaggaagaaucaacuacuacuggacucugcuggaacccggggauacaauaauauuugagacaaauggaaaucuaauagcgccaugguaugcuuucgcacugaguagaggcuuuggaucaggaaucaucaccucaaaugcaccaauggaugaaugugaugcgaagugucaaacaccucagggagcuauaaacagcagucuuccuuuccagaauguacacccagucacaauaggagaguguccaaaguaugucaggagugcaaaauuaaggaugguuacaggacuaaggaacaucccauccauucaauccagagguuuguuuggagccauugccgguuucauugaagggggguggacuggaaugguagaugggugguaugguuaucaucaucagaaugagcaaggaucuggcuaugcugcagaucaaaaaagcacacaaaaugccauuaacgggauuacaaacaaggugaauucuguaauugagaaaaugaacacucaauucacagcugugggcaaagaauucaacaaauuggaaagaaggauggaaaacuuaaauaaaaagguugaugauggguuucuagacauuuggacauauaaugcagaauuguugguucuacuggaaaaugaaaggacuuuggauuuccacgacuccaaugugaagaaucuguacgagaaaguaaaaagccaauuaaagaauaaugccaaagaaauaggaaauggguguuuugaauucuaucacaaguguaacaaugaaugcauggagagugugaaaaauggaacuuaugacuauccaaaauauuccgaagaaucaaaguuaaacagggaaaaaauugauggagugaaauuggacucaaugggggucuaucagauucuggcgaucuacucaacugucgccaguucccugguucuuuuggucucccugggggcaaucagcuucuggauguguuccaaugggucuuugcaguguagaauaugcaucuga

SEQ ID NO: 32403 - RNA, 1701 nt, Artificial Sequence
  derived and/or modified CDS sequence (wt) from hemagglutinin__InfluenzaA__ABB03112
augaagacuaucauugcuuugagcuacauucuaugucugguuuucgcucaaaagcuucccggaaaugacaacagcacggcaacgcugugccuugggcaccaugcaguaccaaacggaacgauagugaaaacaaucacgaaugaccaaauugaaguuacuaaugcuacugagcugguucagaguuccucaacagguggaauaugcgacaguccucaucagauccuugauggagaaaacugcacacuaauagaugcucuauugggagacccucagugugauggcuuccaaaauaagaaaugggaccuuuuuguugaacgcagcaaagccuacagcaacuguuacccuuaugaugugccggauuaugccucccuuaggucacuaguugccucauccggcacacuggaguuuaacaaugaaagcuucaauuggacuggagucacucagaauggaacaagcucugcuugcaaaaggagaucuaauaaaaguuucuuuaguagauugaauugguugacccacuuaaaauacaaauacccagcauugaacgugacuaugccaaacaaugaaaaauuugacaaauuguacauuugggggguucaccacccggguacggacagugaccaaaucagccuauaugcucaagcaucaggaagaaucacagucucuaccaaaagaagccaacaaacuguaaucccgaauaucggaucuagacccaggguaagggaugucuccagcagaauaagcaucuauuggacaauaguaaaaccgggagacauacuuuugauuaacagcacagggaaucuaauugcuccucgggguuacuucaaaauacgaagugggaaaagcucaauaaugagaucagaugcacccauuggcaaaugcaauucugaaugcaucacuccaaauggaagcauucccaaugacaaaccauuucaaaauguaaacaagaucacauauggggccugucccagauauguuaagcaaaacacucugaaauuggcaacagggaugcgaaauguaccagagaaacaaacuagaggcauauuuggcgcaaucgcggguuucauagaaaaugguugggagggaaugguggacgguugguacgguuucaggcaucaaaauucugagggcacaggacaagcagcagaucucaaaagcacucaagcagcaaucaaccaaaucaaugggaaacugaauagguuaaucgggaaaacaaacgagaaauuccaucagauugaaaaagaauucucagaaguagaagggagaauucaggaccucgagaaauauguugaggacacuaaaauagaucucuggucauacaacgcggagcuucuuguugcccuggagaaccaacauacaauugaucuaacugacucagaaaugaacaaacuguuugaaagaacaaagaagcaacugagggaaaaugcugaggauaugggcaaugguuguuucaaaauauaccacaaaugugacaauaccugcauagagucaaucagaaauggaacuuaugaccaugauguauacagagaugaagcauuaaacaaccgguuccagaucaaagguguugagcugaagucaggauacaaagauuggauucuauggauuuccuuugccauaucauguuuuuugcuuuguguugcuuuguugggguucaucaugugggccugccaaaaaggcaacauuaggugcaacauuugcauuuga

SEQ ID NO: 32404 - RNA, 1698 nt, Artificial Sequence
  derived and/or modified CDS sequence (wt) from hemagglutinin__InfluenzaA__ABB03123
augaaaguaaaacuacugguucuguuauguacauuuacagcuacauaugcagacacaauauguauaggguaccaugccaacaacucaaccgacacuguugacacaguacuugagaagaaugugacagugacacacuuugucaaccuacuugaggacagucacaauggaaaacuaugucuacuaaaaggaauagccccacuacaauuggguaauugcagcguugccggauggaucuuaggaaacccagaaugcgaauuacugauuuccaaggaaucaugguccuacauuguagaaacaccaaauccugagaauggaacauguuacccaggguauuucgccgacuaugaggaacugagggagcaauugaguucaguaucuucauuugagagguucgaaauauuccccaaagagagcucauggcccaaccacaccguaaccggaguaucagcaucaugcucccauaacgggaaaagcaguuuuuacagaaauuugcuauggcugacggggaagaaugguuuguacccaaaccugagcaaguccuaugcaaacaacaaagagaaagaaguccuuguacuaugggguguucaucacccgccuaacauaggggaccaaagggcccucuaucauacagaaaaugcuuaugucucuguagugucuucacauuauagcagaagauucaccccagaaauagccaaaagacccaaggugagagaucaggaaggaagaaucaacuacuacuggacucugcuggaacccggggauacaauaauauuugaggcaaauggaaaucuaauagcgccaagguaugcuuucgcacugaguagaggcuuuggaucaggaaucaucaccucaaaugcaccaauggaugaaugugaugcgaagugucaaacaccucagggagcuauaaacagcagucuuccuuuccagaauguacacccagucacaauaggagaguguccaaaguaugucaggagugcaaaauuaaggaugguuacaggacuaaggaacaucccauccauucaauccagagguuuguuuggagccauugccgguuucauugaagggggguggacuggaaugguagaugguugguaugguuaucaucaucagaaugagcaaggaucuggguaugcugcagaucaaaaaagcacacaaaaugccauuaacgggauuacaaacaaggugaauucuguaauugagaaaaugaacacucaauucacagcugugggcaaagaauucaacaaauuggaaagaaggauggaaaacuuaaauaaaaaaguugaugauggguuucuagacauuuggacauauaaugcagaauuguugguucuacuggaaaaugaaaggacuuuggauuuccaugacuccaacgugaagaaucuguaugagaaaguaaaaagccaauuaaagaauaaugccaaagaaauaggaaacggguguuuugaauucuaucacaaguguaacgaugaaugcauggagagugugaaaaauggaacuuaugacuauccaaaauauuccgaagaaucaaaguuaaacagagagaaaauugauggagugaaauuggaaucaaugggagucuaucagauucuggcgaucuacucaacagucgccaguucccugguucuuuuggucucccugggggcaaucagcuucuggauguguuccaaugggucuuugcaguguagaauaugcaucuaa

SEQ ID NO: 32405 - RNA, 1698 nt, Artificial Sequence
  derived and/or modified CDS sequence (wt) from hemagglutinin__InfluenzaA__ABB03134
augaaaguaaaacuacugauccuguuauguacauuuacagcuacauaugcagacacaauauguauaggcuaccaugccaacaacucaaccgacacuguugacacaguacuugagaagaaugugacagugacacacucugucaaccuacuugaggacagucacaauggaaaacuaugucuacuaaaaggaauagccccccuacaauuggguaauugcagcguugccggauggaucuuaggaaacccagaaugcgaauuacugauuuccaaggaaucaugguccuacauuguagaaacaccaaauccugagaauggaacauguuacccaggguauuucgccgacuaugaggagcuaagggagcaauugaguucaguaucuucauuugagagauucgaaauauuccccaaagaaagcucauggcccaaccacaccguaaccggaguaucagcaucaugcucccauaaugggaaaagcaguuuuuacagaaauuugcuauggcugacggagaagaaugguuuguacccaacccugagcaaguccuaugcaaacaacaaagagaaagaaguccuuauacuaugggguguucaucacccgccuaacauaggggaccaaaggacccucuaucauacagaaaaugcuuaugucucuguagugucuucacauuauagcagaagauucaccccagaaauaaccaaaaggcccaaaguaagagaucaggaaggaagaaucaacuacuacuggacucugcuggaacccggggauacaauaauauuugaggcaaauggaaaucuaauagcgccaugguaugcuuucgcacugaguagaggcuuuggaucaggaaucaucaccucaaaugcaccaauggaugaaugugaugcgaagugucaaacaccucagggagcuauaaacagcagucuuccuuuccagaauguacacccagucacaauaggagaguguccaaaguaugucaggagugcaaaauuaaggaugguuacaggacuaaggaacaucccauccauucaauccagagguuuguuuggagccauugccgguuucauugaagggggguggacuggaaugguagacgggugguaugguuaucaucaucagaaugagcaaggaucuggcuaugcugcagaucaaaaaagcacacaaaacgccauuaacgggauuacaaacaaggugaauucuguaauugagaaaaugaacacucaauucacagcugugggcaaagaauucaacaaauuggaaagaaggauggaaaacuuaaauaaaaaaguugaugauggguuucuagacauuuggacauauaaugcagaauuguugguucuacuggaaaaugaaaggacuuuggauuuccacgacuccaaugugaagaaucuguaugagaaaguaaaaagccaauuaaagaauaaugccaaagaaauaggaaauggguguuuugaauucuaucacaaguguaacaaugaaugcauggagagugugaaaaauggaacuuaugacuauccaaaauauuccgaagaaucaaaguuaaacagggaaaaaaucgauggagugaaauuggaaucaaugggagucuaucagauucuggcgaucuacucaacugucgccaguucccugguucuuuuggucucccugggggcaaucagcuucuggauguguuccaaugggucuuugcaguguagaauaugcaucuga

SEQ ID NO: 32406 - RNA, 1698 nt, Artificial Sequence
  derived and/or modified CDS sequence (wt) from hemagglutinin__InfluenzaA__ABB03145
augaaagugaaacuacugguucuguuauguacauuuacagcuacauaugcagacacaauauguauaggcuaccaugccaacaacucaaccgacacuguugacacaguacuugagaagaaugugacagugacacacucugucaaccuacuugaggacagucacaauggaaaacuaugucuacuaaaaggaauagccccacuacaauuggguaauugcagcguugccggauggaucuuaggaaacccagaaugcgaauuacugauuuccaaggaaucaugguccuacauuguagaaacaccaaauccugagaauggaacauguuacccaggguauuucgccgacuaugaggaacugagggagcaauugaguucaguaucuucauuugagagguucgaaauauuccccaaagagagcucauggcccaaccacaccguaaccggaguaucagcaucaugcucccauaacgggaaaagcaguuuuuacagaaauuugcuauggcugacggggaagaaugguuuguacccaaaccugagcaaguccuaugcaaacaacaaagagaaagaaguccuuguacuaugggguguucaccacccgccuaacauaggggaccaaagggcccucuaucauacagaaaaugcuuaugucucuguagugucuucacauuauagcagaagauucaccccagaaauagccaaaagacccaaggugagagaucaggaaggaagaaucaacuacuacuggacucugcuggaacccggggauacaauaauauuugaggcaaauggaaaucuaauagcgccaagguaugcuuucgcacugaguagaggcuuuggaucaggaaucaucaccucaaaugcaccaauggaugaaugugaugcgaagugucaaacaccucagggagcuauaaacagcagucuuccuuuccagaauguacacccagucacaauaggagaguguccaaaguaugucaggagugcaaaauuaaggaugguuacaggacuaaggaacaucccauccauucaauccagagguuuguuuggagccauugccgguuucauugaagggggguggacuggaaugguggaugguugguaugguuaucaucaucagaaugagcaaggaucuggguaugcugcagaucaaaaaagcacacaaaaugccauuaacgggauuacaaacaaggugaauucuguaauugagaaaaugaacacucaauucacagcugugggcaaagaauucaacaaauuggaaagaaggauggaaaacuuaaauaaaaaaguugaugauggguuucuagacauuuggacauauaaugcagaauuguugguucuacuggaaaaugaaaggacuuuggauuuccaugacuccaacgugaagaaucuguaugagaaaguaaaaagccaauuaaagaauaaugccaaagaaauaggaaacggguguuuugaauucuaucacaaguguaacgaugaaugcauggagagugugaaaaauggaacuuaugacuauccaaaauauuccgaagaaucaaaguuaaacagggagaaaauugauggagugaaauuggaaucaaugggagucuaucagauucuggcgaucuacucaacagucgccaguucccugguucuuuuggucucccugggggcaaucagcuucuggauguguuccaaugggucuuugcaguguagaauaugcaucuaa

SEQ ID NO: 32407 - RNA, 1701 nt, Artificial Sequence
  derived and/or modified CDS sequence (wt) from hemagglutinin__InfluenzaA__ABB04283
augaagacuaucauugcuuugagcuacauuuucugucugguuuucgcccaaaaccuucccggaaaugacaacagcacagcaacgcugugccugggacaucaugcagugccaaacggaacgcuagugaaaacaaucacgaaugaucagauugaagugacuaaugcuacugagcugguucagaguuccucaacagguagaauaugcgacaguccucaccgaauccuugaugggaaaaacugcacacugauagaugcucuauugggagacccucauugugauggcuuucaaaaugagaaaugggaccuuuuuguugaacgcagcaaagcuuucagcaacuguuacccuuaugaugugccagauuaugccucccuuaggucacuaguugccucgucaggcacccuggaguuuaucaaugaaggcuucaauuggacuggggucacucagagugggggaagcuaugcuugcaaaaggggaucugauaaaaguuucuucaguagacugaacugguuguacgaaucagaaagcaaauauccagcgcugaacgugacuaugccaaacaauggcaauuuugacaaacuguacauuugggggguucaucacccgagcacggacaaagaacaaaccaaccuauauguucgagcaucagggagagucacagucucuaccaagagaagccagcaaacuauaaucccgaauaucgggccuagacccuggguaaggggccugucuaguagaauaaguaucuauuggacaauaguaaaaccgggagacauacuguuaauuaauaguagugggaaccuaauugcuccucgggguuauuucaaaauacgcacuggaaaaagcucaauaaugaggucagaugcaccuauuggcaccugcaguucugaaugcaucacuccaaauggaagcauucccaaugacaagcccuuccaaaacguaaacaagaucacauauggggcaugucccaaguauguuaagcaaaacacucugaaauuggcaacagggaugcggaauauaccagagaaacaaacuagaggcauauucggcgcaauagcagguuucauagaaaaugguugggagggaaugguagacggcugguacgguuucaggcaucaaaauucugagggcacaggacaagcagcagaucuuaaaagcacucaagcagcaaucgaccaaaucaaugggaaacugaauaggguaaucgagaaaacgaacgagaaauuccaucaaaucgaaaaggaauucucagaaguagaagggagaauucaggaccucgagaaauacguugaagacacuaaaauagaucucuggucuuacaacgcggagcuucuugucgcucuggagaaccaacauacaauugaucugacugacucggaaaugaacaaacuguuugaaaaaacaaggaggcaacugagggaaaaugcugaggacaugggcaaugguugcuucaaaauauaccacaaaugugacaaugcuugcauagggucaaucagaaauggaacuuaugaccaugauguauacagagacgaagcauuaaacaaccgguuucagaucaaagguguugagcugaagucaggauacaaagacuggauccuguggauuuccuuugccauaucaugcuuuuugcuuuguguuguuuugcugggguucaucaugugggccugccaaaaaggcaacauuaggugcaacauuugcauuuga

SEQ ID NO: 32408 - RNA, 1701 nt, Artificial Sequence
  derived and/or modified CDS sequence (wt) from hemagglutinin__InfluenzaA__ABB04294
augaagacuaucauugcuuugagcuacauuuucugucugguucucggccaagaccuuccagggaaugacaacagcacagcaacgcugugccugggacaucaugcggugccaaacggaacgcuagugaaaacaaucacgaaugaucagauugaagugacuaaugcuacugagcugguucagaguuccucaacggguaaaauaugcaacaauccucaucgaauccuugauggaauaaacugcacacugauagaugcucuauugggggacccucauugugauggcuuucaaaaugagaaaugggaccuuuucguugaacgcagcaaagcuuucagcaacuguuacccuuaugaugugccagauuaugccucccuuaggucacuaguugccucgucaggcacucuggaguuuaucaaugaaggcuucaauuggacuggggucacucagaaugggggaagcaaugcuugcaaaaggggaccugauagcgguuuuuucaguagacugaacugguuguacaaaucaggaagcacauauccagugcugaacgugacuaugccaaacaaugacaauuuugacaaacuauacauuugggggguucaccacccgagcacggaccaagaacaaaccaaccuauauguucaagcaucagggagagucacagucuccaccaagagaagccagcaaacuauaaucccgaauaucgggucuagacccuggguaaggggucugucuaguagaauaagcaucuauuggacaauaguuaaaccgggagacauacugguaauuaauaguaaugggaaccuaauugcuccucgggguuacuucaaaaugcgcacugggaaaagcucaauaaugaggucagaugcaccuauuggcaccugcauuucugaaugcaucacuccaaauggaagcauucccaaugacaagcccuuucaaaacguaaacaagaucacauauggggcaugucccaaguauguuaagcaaaacacucugaaguuggcaacaggaaugcggaauguaccagagaaacaaacuagaggcauauucggcgcaauagcagguuucauagaaaaugguugggagggaaugauagacgguugguacgguuucaggcaucaaaauucugagggcacaggacaagcagcagaucuuaaaagcacucaagcagccaucgaccaaaucaaugggaaacugaauaggguaaucgagaagacgaacgagaaauuccaucaaaucgaaaaggaauucucagaaguagaagggagaauucaggaccucgagaaauauguugaagacacuaaaauagaucucuggucuuacaaugcggagcuucuugucgcucuggagaaccaacauacaauugaucugacugacucggaaaugaacaaacuguuugaaaaaacaaggaggcaacugagggaaaaugcugaggacaugggcaaugguugcuucaaaauauaccacaaaugugacaaugcuugcauagggucaaucagaaaugggacuuaugaccaugauguauacagagacgaagcauuaaacaaccgguuucagaucaaagguguugaacugaagucaggauacaaagacuggauccuguggauuuccuuugccauaucaugcuuuuugcuuuguguuguuuugcugggguucaucaugugggccugccagaaaggcaacauuaggugcaacauuugcauuuga

SEQ ID NO: 32409 - RNA, 1701 nt, Artificial Sequence
  derived and/or modified CDS sequence (wt) from hemagglutinin__InfluenzaA__ABB04305
augaagacuaucauugcuuugagcuacauuuucugucugguuuucgcccaaaaacuucccgaaaaugacaacagcacagcaacgcugugcuugggacaucaugcagugccaaacggaacgcuagugaaaacaaucacgaaugaucagauugaagugacuaaugcuacugagcugguucagaguuccucaacagguagaauaugcgacaguccucaccgaauccuugaugggaaaaacugcacacugauagaugcucuauugggagacccucauugugauggcuuccaaaaugagaaaugggaccuuuuuguugaacgcagcaaagcuuucagcaacuguuacccuuaugaugugccggauuaugccucccuuaggucacuaguugccucaucaggcacccuggaguuuaucaaugaaggcuucaauuggacuggagucacucagagugggggaagcuaugcuugcaaaaggggaucuguuaacaguuucuucaguagauugaauugguuguacaaaucagaaagcaaauauccagugcugaacgugacuaugccaaauaauggcaaauuugacaaauuguacauuugggggguucaccacccgagcacggacaaagaacaaaccaaccuauauguucgagcaucagggaaagucacagucucuaccaagagaagccagcaaacuguaaucccgaauaucgggucuagacccuggguaaggggucugucuaguagaauaaguaucuauuggacaauaguaaaaccgggagacauacuguuaauuaauagcacuggaaaccuaauugcuccucgggguuacuucaaaauacgcacugggaaaagcucaauaaugaggucagaugcaccuauuggcaccugcaguucugaaugcaucacuccaaauggaagcauucccaaugacaaacccuuucaaaauguaaacaagaucacauauggagcaugucccagguauguuaagcaaaacacucugaaguuggcaacagggaugcggaauguaccagagaaacaaacuagaggcauauucggcgcaauagcagguuucauagaaaaugguugggagggaaugguagacgguugguacgguuucaggcaucaaaauucugagggcacaggacaagcagcagaucuuaaaagcacucaagcagcaaucgaccaaaucaacgggaaacugaacagguuaaucgagaaaacgaacgagaaguuccaucaaaucgaaaaggaauucucagaaguagaagggagaauucaggaccucgagaaauauguugaagacacuaaaauagaucucuggucuuacaacgcggagcuucuugucgcccuggagaaccaacauacaauugaucugacugauucagaaaugaacaaacuguuugaaaaaacaaggaaacaacugagggaaaaugcugaggacaugggcaaugguugcuucaaaauauaccacaaaugugacaaugcuugcauagggucaaucagaaauggaacuuaugaccaugauguauacagagacgaagcauuaaacaaccgguuucagaucaaagguguugagcugaagucaggauacaaagacuggauccuauggauuuccuuugccauaucaugcuuuuugcuuuguguuguuuugcugggguucaucaugugggccugccaaaaaggcaacauuaggugcaacauuugcauuuga

SEQ ID NO: 32410 - RNA, 1701 nt, Artificial Sequence
  derived and/or modified CDS sequence (wt) from hemagglutinin__InfluenzaA__ABB04316
augaagacuaucauugcuuugagcuacauuuucugucugguuuucgcccaaaaacuucccggaaaugacaacagcacagcaacgcugugccugggacaucaugcagugccaaacggaacgcuagugaaaacaaucacgaaugaucagauugaagugacuaaugcuacugagcugguucagaguuccucaacagguagaauaugcgacaguccucaccgaauccuugaugggaaaaacugcacauugauagaugcucuauugggagacccucauugugauggcuuccaaaaugagaaaugggaccuuuuuguugaacgcagcaaagcuuacagcaacuguuacccuuaugaugugccggauuaugcuucccuuagaucacuaguugccucaucaggcacccuggaguuuaucaaugaagacuucaauuggacuggagucacucagagugggggaagcuaugcuugcaaaaggggaucuguuaaaaguuucuucaguagauugaauugguugcacgaaucagaauacaaauauccagcgcugaacgugacuaugccaaacaauggcaaauuugacaaauuguacauuugggggguucaccacccgagcacggacagagaacaaaccaaccuauauguucgagcaucagggagagucacagucucuaccaagagaagccagcaaacuguaaucccgaauaucgggucuagacccuggguaaggggccuguccaguagaauaagcaucuauuggacaauaguaaaaccgggagacauacuguugauuaauagcaccgggaaccuaauugcuccucgggguuacuucaaaauacgcacugggaaaagcucaauaaugaggucagaugcaccuauuggcaccugcaguucugaaugcaucacuccaaauggaagcauucccaaugacaaacccuuucaaaauguaaacaagaucacauauggggcaugucccagguauguuaagcaaaacacucugaaauuggcaacagggaugcggaauguaccagagaaacaaacuagaggcauauucggcgcaauagcagguuucaucgaaaaugguugggagggaaugguagacgguugguacgguuucaggcaucaaaauucugaaggcacaggacaagcagcagaucuuaaaagcacucaagcagcaaucgaccaaaucaacgggaaacugaauagguuaaucgagaaaacgaacgagaaauuccaucaaaucgaaaaggaauucucagaaguagaagggagaauucaggaccucgagaaauauguugaagacacuaaaauagaucucuggucuuacaacgcggagcuucuugucgcccuggagaaccaacauacaauugaucugacugacucagaaaugaacaaacuguuugaaaaaacaaggaagcaacugagggaaaaugcugaggacaugggcaaugguugcuucaagauauaccacaaaugugacaaugccugcauagggucaaucagaaauggaacuuaugaccaugauguauacagagacgaagcauuaaacaaccgguuccagaucaaagguguugagcugaagucaggauacaaaaacuggauccuauggauuuccuuugccauaucaugcuuuuugcuuuguguuguuuugcugggguucaucaugugggccugccaaaaaggcaacauuaggugcaacauuugcauuuga

SEQ ID NO: 32411 - RNA, 1701 nt, Artificial Sequence
  derived and/or modified CDS sequence (wt) from hemagglutinin__InfluenzaA__ABB04327
augaagacuaucauugcuuugagcuacauuuucugucugguuuucgcccaaaaacuucccggaaaugacaacagcacagcaacgcugugccugggacaucaugcagugccaaacggaacgcuagugaaaacaaucacgaaugaucagauugaagugacuaaugcuacugagcugguucagaguuccucaacagguagaauaugcgacaguccucaccgaauccuugauggaaaaaacugcacacugauagaugcucuauugggagacccucauugugauggcuuccaaaaugagaaaugggaccuuuuuguugaacgcagcaaagcuuucagcaacuguuacccuuaugaugugccggauuaugccucccuuaggucacuaguugccucaucaggcacccuggaguuuaucaaugaaggcuucaauuggacuggagucacucagagcgggggaagcuaugcuugcaaaaggggaucuguuaacaguuucuucaguagauugaauugguuguacaaaucagaauacaaauauccagcgcugaacgugacuaugccaaacaauggcaaauuugacaaauuguacauuugggggguucaccacccgagcacggaaaaagaacaaaccaaccuauauguucgagcaucagggagagucacagucucuaccaagagaagccagcaaacuguaaucccgaauaucgggucuauacccuggguaaggggucuguccaguagaauaagcaucuauuggacaauaguaaaaccgggagacauacuguugauuaauagcacugggaaccuaauugcuccucgggguuacuucaaaauacgcacugggaaaagcucaauaaugaggucagaugcaccuauuggcaccugcaguucugaaugcaucacuccaaauggaagcauucccaaugacaaacccuuucaaaauguaaacaagaucacauauggggcaugucccagguauguuaagcaaaacacucugaaauuggcaacagggaugcggaauguaccagagaaacaaacuagaggcauauucggcgcaauagcagguuucauagaaaaugguugggagggaaugguagacgguugguacgguuucaggcaucaaaauucugagggcacaggacaagcagcagaucuuaaaagcacucaagcagcaaucgaccaaaucaacgggaaacugaauagguuaaucgagaaaacgaacgagaaauuccaucaaaucgaaaaggaauucucagaaguagaagggagaauucaggaccucgagaaauauguugaagacacuaaaauagaucucuggucuuacaacgcggagcuucuugucgcccuggagaaccaacauacaauugaucugacugacucagaaaugaacaaacuguuugaaaaaacaaggaagcaacugagggaaaaugcugaggacaugggcaaugguugcuucaaaauauaccacaaaugugacaaugcuugcauagggucaaucagaaauggaacuuaugaccaugauguauacagagacgaagcauuaaacaaccgguuucagaucaaagguguugagcugaagucaggauacaaagacuggauccuauggauuuccuuugccauaucaugcuuuuugcuuuguguuguuuugcugggguucaucaugugggccugccaaaaaggcaacauuaggugcaacauuugcauuuga

SEQ ID NO: 32412 - RNA, 1701 nt, Artificial Sequence
  derived and/or modified CDS sequence (wt) from hemagglutinin__InfluenzaA__ABB04338
augaagacuaucauugcuuugagcuacauuuucugucugguucucggccaagacuuuccaggaaaugacaacagcacagcaacgcugugccugggacaucaugcggugccaaacggaacacuagugaaaacaaucacaaaugaucagauugaagugacuaaugcuacugagcugguucagaguuccucaacggggaaaauaugcaacaauccucaucgaauccuugauggaauagacugcacacugauagaugcucuauugggggacccucauugugauggcuuucaaaaugagacaugggaccuuuucguugaacgcagcaaagcuuucagcaacuguuacccuuaugaugugccagauuaugccucccuuaggucacuaguugccucgucaggcacucuggaguuuaucaaugaaggcuucacuuggacuggggucacucagaaugggggaagcaaugcuugcaaaaggggaccugauagcgguuuuuucaguagacugaacugguuguacaaaucaggaagcacauauccagugcugaacgugacuaugccaaacaaugacaauuuugacaaacuauacauuugggggguucaccacccgagcacggaccaagaacaaaccagccuauauguucaagcaucagggagagucacagucucuaccaagagaagccagcaaacuauaaucccgaauaucgggucuagacccuggguaaggggucugucuaguagaauaagcaucuauuggacaauaguuaaaccaggagacauacugguacuuaauaguaaugggaaccuaauugcuccucgggguuauuucaaaaugcgcacugggaaaagcucaauaaugaggucagaugcaccuauuggcaccugcauuucugaaugcaucacuccaaauggaagcauucccaaugacaagcccuuucaaaacguaaacaagaucacauauggggcaugucccaaguauguuaagcaaaacacccugaaguuggcaacagggaugcggaauguaccagagaaacaaacuagaggccuauucggcgcaauagcagguuucauagaaaaugguugggagggaaugauagacgguugguacgguuucaggcaucaaaauucugagggcacaggacaagcagcagaucuuaaaagcacucaagcagccaucgaccaaaucaaugggaaacugaauaggguaaucgagaagacgaacgagaaauuccaucaaaucgaaaaggaauucucagaaguagaagggagaauucaggaccucgaaaaauacguugaagacacuaaaauagaucucuggucuuacaaugcggagcuucuugucgcucuggagaaccaacauacaauugaucugacugacucggaaaugaacaaacuguuugaaaaaacaaggaggcaacugagggaaaaugcugaggacaugggcaaugguugcuucaaaauauaccacaaaugugacaaugcuugcauagggucaaucagaaaugggacuuaugaccaugauguauacagagacgaagcauuaaacaaccgguuucagaucaaagguguugaacugaagucaggauacaaagacuggauccuguggauuuccuuugccauaucaugcuuuuugcuuuguguuguuuuacugggguucaucaugugggccugccagaaaggcaacauuaggugcaacauuugcauuuga

SEQ ID NO: 32413 - RNA, 1701 nt, Artificial Sequence
  derived and/or modified CDS sequence (wt) from hemagglutinin__InfluenzaA__ABB04349
augaagacuaucauugcuuugagcuacauuuucugucugguuuucgcccaaaaacuucccggaaaugacaacagcacagcaacgcugugcuugggacaucaugcagugccaaacggaacgcuagugaaaacaaucacgaaugaucagauugaagugacuaaugcuacugagcugguucagaguuccucaacagguagaauaugcgacaguccucaccgaauccuugaugggaaaaacugcacacugauagaugcucuauugggagacccucauugugauggcuuccaaaaugagaaaugggaccuuuuuguugaacgcagcaaagcuuucagcaacuguuacccuuaugaugugccggauuaugccucccuuaggucacuaguugccucaucaggcaccuuggaguuuaucaaugaaggcuucaauuggacuggagucacucagagugggggaagcuaugcuugcaaaaggggaucuguuaacaguuucuucaguagauugaauugguuguacaaaucagaaagcaaauauccagugcugaacgugacuaugccaaauaauggcaaauuugacaaauuguacauuugggggguucaccacccgagcacggacaaagaacaaaccaaccuauauguucgagcaucagggaaagucacagucucuaccaagagaagccagcaaacuguaaucccgaauaucgggucuagacccuggguaaggggucugucuaguagaauaaguaucuauuggacaauaguaaaaccgggagacauacuguuaauuaauagcacuggaaaccuaauugcuccucgggguuacuucaaaauacgcacugggaaaagcucaauaaugaggucagaugcaccuauuggcaccugcaauucugaaugcaucacuccaaauggaagcauucccaaugacaaacccuuucaaaauguaaacaagaucacauauggagcaugucccagguauguuaagcaaaacacucugaaguuggcaacagggaugcggaauguaccagagaaacaaacuagaggcauauucggcgcaauagcagguuucauagaaaaugguugggagggaaugguagacgguugguacgguuucaggcaucaaaauucugagggcacaggacaagcagcagaucuuaaaagcacucaagcagcaaucgaccaaaucaacgggaaacugaacagguuaaucgagaaaacgaacgagaaauuccaucaaaucgaaaaggaauucucagaaguagaagggagaauucaggaccucgagaaauauguugaagacacuaaaauagaucucuggucuuacaacgcggagcuucuugucgcccuggagaaccaacauacaauugaucugacugauucagaaaugaacaaacuguuugaaaaaacaaggaaacaacugagggaaaaugcugaggacaugggcaaugguugcuucaaaauauaccacaaaugugacaaugcuugcauagggucaaucagaaauggaacuuaugaccaugauguauacagagacgaagcauuaaacaaccgguuucagaucaaagguguugagcugaagucaggauacaaagacuggauccuauggauuuccuuugccauaucaugcuuuuugcuuuguguuguuuugcugggguucaucaugugggccugccaaaaaggcaacauuaggugcaacauuugcauuuga

SEQ ID NO: 32414 - RNA, 1701 nt, Artificial Sequence
  derived and/or modified CDS sequence (wt) from hemagglutinin__InfluenzaA__ABB04360
augaagacuaucauugcuuugagcuacauuuucugucugguuuucgcccaaaaacuucccggaaaugacaacagcacagcaacgcugugccugggacaucaugcagugccaaacggaacgcuagugaaaacaaucacgaaugaucagauugaagugacuaaugcuacugagcugguucagaguuccucaacagguagaauaugcgacaguccucaccgaauccuugauggaaaaaacugcacacugauagaugcucuauugggagacccucauugugauggcuuccaaaaugagaaaugggaccuuuuuguugaacgcagcaaagcuuacagcaacuguuacccuuaugaugugccggauuaugccucccuuaggucacuaguugccucaucaggcacccuggaguuuaucaaugaagacuucaauuggacuggagucacucagagugggggaagcuaugcuugcaaaaggggaucuguuaacaguuucuucaguagauugaauugguugcacaaaucagaauacaaauauccagcgcugaacgugacuaugccaaacaauggcaaauuugacaaauuguacauuugggggguucaccacccgagcacggacagagaacaaaccaaccuauauguucgagcaucagggagagucacagucucuaccaagagaagccagcaaacuguaaucccgaauaucgggucuagacccuggguaaggggucuguccaguagaauaagcaucuauuggacaauaguaaaaccgggagacauacuguugauuaauagcaccgggaaccuaauugcuccucgggguuacuucaaaauacgcacugggaaaagcucaauaaugaggucagaugcaccuauuggcaccugcagcucugaaugcaucacuccaaauggaagcauucccaaugacaaacccuuucaaaauguaaacaagaucacauauggggcaugucccagguauguuaagcaaaacacucugaaauuggcaacagggaugcggaauguaccagagaaacaaacuagaggcauauucggcgcaauagcagguuucauagaaaaugguugggagggaaugguagacgguugguacgguuucaggcaucaaaauucugagggcacaggacaagcagcagaucuuaaaagcacucaagcagcaaucgaccaaaucaacgggaaacuaaauagguuaaucgagaaaacgaacgagaaauuccaucaaaucgaaaaggaauucucagaaguagaagggagaauucaggaccucgagaaauauguugaagacacuaaaauagaucucuggucuuacaacgcggagcuucuugucgcccuggagaaccaacauacaauugaucugacugacucagaaaugaacaaacuguuugaaaaaacaaggaagcaacugagggaaaaugcugaggacaugggcaaugguugcuucaagauauaccacaaaugugacaaugccugcauagggucaaucagaaauggaacuuaugaccaugauguauacagagacgaagcauuaaacaaccgguuccagaucaaagguguugagcugaagucaggauacaaagacuggaucuuauggauuuccuuugccauaucaugcuuuuugcuuuguguuguuuugcugggguucaucaugugggccugccaaaaaggcaacauuaggugcaacauuugcauuuga

SEQ ID NO: 32415 - RNA, 1701 nt, Artificial Sequence
  derived and/or modified CDS sequence (wt) from hemagglutinin__InfluenzaA__ABB04371
augaagaccaucauugcuuugagcuacauuuucuaucuggcucucggccaagaccuuccaggaaaugacaacagcaaagcaacgcugugccugggacaucaugcggugccaaacggaacacuagugaaaacaaucacagaugaucagacugaagugacuaaugcuacugagcuaguucagagcuccucaacggggaaaauaugcaacaauccucaucgaauccuugauggaauggacugcacacugauagaugcucuauugggggacccucauugugauguuuuucaaaaugagacaugggaccuuuucguugaacgcagcaaagcuuucagcaacuguuacccuuaugaugugccagauuaugccucccuuagaucacuaguugccucgucaggcacuauggaguuuaucacugaggguuucacuuggacugaggucacucagaaugggggaagcaaugcuugcaaaaggggaccugauagcgguuuuuucaguagacugaacugguugaccaaaucaggaagaacauauccagugcugaacgugacuaugccaaacaaugacaauuuugacaaacuauacauuugggggguucaccacccgagcacggaccaagaacaaaccaaccuguauguucaaacaucagggagagucacagucucuaccaggagaagccagcaaacuauaaucccgaauaucggauccagacccuggguaaggggucugucuaguagaauaagcaucuauuggacaauaguuaagccgggagacguacugguaauuaauaguaaugggaaccuaaucgcuccucgggguuauuucaaaaugcgcacugggaaaagcucaauaaugaggucagaugcaccuauugauaccuguauuucugaaugcaucacuccaaauggaagcauucccaaugauaaacccuuucaaaacguaaacaagaucacauauggagcaugccccaaauauguuaagcaaaacacccugaaguuggcaacaggaaugcggaauguaccagagaaacagacuagaggccuauucggcgcaauagcaggcuucauagaaaaugguugggagggaaugauagacgguugguacgguuucaggcaucaaaauucugagggcacaggacaagcagcagaucuuaaaagcacucaagcagccauugaccaaaucaaugggaaauugaacaggauaaucgagaagacgaacgagaaauuccaucaaauagaaaaggaauucucagaaguagaagggagaauucaggaccucgagaaauacguugaagacacuaaaauagaucuauggucuuacaaugcagagcuucuuguugcucuggagaaucaacauacaauugaucugacugacucggaaaugaacaaacuguuugaaaaaacaagaaggcaacugagggaaaaugcugaagacaugggcaaugguugcuucaaaauauaccacaaaugugacaacgcuugcauagagucaaucagaaaugggacuuaugaccaugauguauacagagacgaagcauuaaacaacagguuucaaaucaaagguguugaacugaagucuggauacaaagacuggauccuguggauuuccuuugccauaucaugcuuuuugcuuuguguuguuuugcugggguucaucaugugggccugccagagaggcaacauuaggugcaacauuugcauuuga

SEQ ID NO: 32416 - RNA, 1701 nt, Artificial Sequence
  derived and/or modified CDS sequence (wt) from hemagglutinin__InfluenzaA__ABB04906
augaagacuaucauugcuuugagcuacauuuuaugucugguuuucgcccaaaaacuucccggaaaugacaacagcacagcaacgcugugccuggggcaucaugcagugccaaacggaacucuagugaaaacaaucacgaaugaucaaauugaagugacuaaugcuacugagcugguucagaguuccucaacagguagaauaugcgacaguccucaccgaauccucgauggaaaaaacugcacacugauagaugcucuauugggagacccucauugugauggcuuccaaaauaaggaaugggaccuuuuuguugaacgcagcaaagcuuacagcaauuguuacccuuaugaugugccagauuaugccucccuuaggucacuaguugccucaucaggcacccuggaguuuaucaaugaagacuuuaauuggacuggagucgcucagaauggggacagcuaugcuugcaaaaggggaucuguuaaaaguuucuuuaguagauugaauugguugcacaaaucagaauacaaauauccagcgcugaacgugacuaugccaaacaaugacaaauuugacaaguuguacauuugggggguucaccacccgagcacggacagagaacaaaccagccuauauauucgagcaucagggaaagucacagucucuaccaaaagaagccaacaaacuguaaucccgaauaucggguccagacccuggguaaggggucuguccaguagaauaagcaucuauuggacaauaguaaaaccgggagacauacuuuugauuaauagcaccgggaaucuaauugcuccucgggguuacuucaaaauacggacugggaaaagcucgauaaugaggucagaugcacccauuggcaccugcaguucugaaugcaucacuccaaauggaagcauccccaaugacaaaccuuuucaaaauguaaacaggaucacauauggggcaugucccagauauguuaagcaaaacacucugaaauuggcaacagggaugcggaauguaccagagaaacaaacuagaggcauauucggcgcaauugcagguuucauagaaaaugguugggagggaaugguagacgguugguacgguuucaggcaucaaaauucugaaggcacaggacaagcagcagaucuuaaaagcacucaagcagcaaucgaccaaaucaacgggaaacugaauagguuaaucgagaaaacgaacgagaaauuccaucaaaucgaaaaggaauucucagaaguagaagggagaauucaggaccucgagaaauauguugaagacacuaaaauagaucucuggucuuacaacgcggagcuucuuguugcccuggagaaccaacauacaauugaucugacugacucagaaaugaacaaacuguuugaaaaaacaaggaagcaacugagggaaaaugcugaggacaugggcaaugguugcuucaaaauauaccacaaaugugacaaugccugcauagggucaaucagaaauggaacuuaugaccaugauguauacagagacgaagcauuaaacaaccgguuccagaucaaagguguugagcugaagucaggauacaaagauuggauccuauggauuuccuuugccauaucaugcuuuuugcuuuguguuguuuugcugggguucaucaugugggccugccaaaaaggcaacauuaggugcaacauuugcauuuga

SEQ ID NO: 32417 - RNA, 1701 nt, Artificial Sequence
  derived and/or modified CDS sequence (wt) from hemagglutinin__InfluenzaA__ABB04917
augaagacuaucauugcuuugagcuacauuuucugucugguuuucgcccaaaaacuucccggaaaugacaacagcacagcaacgcugugcuugggacaucaugcagugccaaacggaacgcuagugaaaacaaucacgaaugaucagauugaagugacuaaugcuacugagcugguucagauuuccucaacagguagaauaugcgacaguccucaccgaauccuugaugggaaaaacugcacacugauagaugcucuauugggagacccucauugugauggcuuccaaaaugagaaaugggaccuuuuuguugaacgcagcaaagcuuucagcaacuguuacccuuaugaugugccggauuaugccucccuuaggucacuaguugccucaucaggcacccuggaguuuaucaaugaaggcuucaauuggacuggagucacucagagugggggaagcuauacuugcaaaaggggaucuguuaacaguuucuucaguagauugaauugguuguacgaaucagaaagcaaauauccagugcugaacgugacuaugccaaacaauggcaaauuugacaaauuguacauuugggggguucaccacccgagcacggacaaagaacaaaccaaccuauauguucgagcaucagggagagucacagucucuaccaagagaagccagcaaacuguaaucccgaauaucgggucuagacccuggguaaggggucugucuaguagaauaaguaucuauuggacaauaguaaaaccgggagacauacuguuaauuaauagcacugggaaccuaauugcuccucgggguuacuucaaaauacgcacugggaaaagcucaauaaugaggucagaugcaccuauuggcaccugcaguucugaaugcaucacuccaaauggaaguauucccaaugacaaacccuuucaaaauguaaacaagaucacauauggggcaugucccagguauguuaagcaaaacacucugaaguuggcaacagggaugcggaauguaccagagaaacaaacuagaggcauauucggcgcaauagcagguuucauagaaaaugguugggagggaaugguagacgguugguacgguuucaggcaucaaaauucugagggcacaggacaagcagcagaucuuaaaagcacucaagcagcaaucgaccaaaucaacgggaaacugaauagguuaaucgagaaaacgaacgagaaauuccaucaaaucgaaaaggaauucucagaaguagaagggagaauucaggaccucgagaaauauguugaagacacuaaaauagaucucuggucuuacaacgcggagcuucuugucgcccuggagaaccaacauacaauugaucugacugauucagaaaugaacaaacuguuugaaaaaacaaggaagcaacugagggaaaaugcugaggacaugggcaaugguugcuucaaaauauaccacaaaugugacaaugcuugcauagggucaaucagaaauggaacuuaugaccaugauguauacagagacgaagcauuaaacaaccgguuucagaucaaagguguugagcugaagucaggauacaaagacuggauccuauggauuuccuuugccauaucaugcuuuuugcuuuguguuguuuugcugggguucaucaugugggccugccaaaaaggcaacauuaggugcaacauuugcauuuga

SEQ ID NO: 32418 - RNA, 1701 nt, Artificial Sequence
  derived and/or modified CDS sequence (wt) from hemagglutinin__InfluenzaA__ABB04928
augaagacuaucauugcuuugagcuacauuuucugucugguuuucgcccaagaccuuccaggaaaugacaacagcacagcaacgcugugccugggacaucaugcggugccaaacggaacgcuagugaaaacaaucacgaaugaucagauugaagugacuaaugcuacugagcugguucagaguuccucaacggguaaaauaugcaacaauccucaucgaauccuugauggaauaaacugcacacugauagaugcucuauugggggacccucauugugauggcuuucaaaaugagaaaugggaccuuuucguugaacgcagcaaagcuuucagcaacuguuacccuuaugaugugccagauuaugccucccuuaggucacuaguugccucgucaggcacucuggaguuuaucaaugaaggcuucaauuggauuggggucacucagaaugggggaagcaaugcuugcaaaaggggaacugauagcgguuuuuucaguagacugaacugguuguacaaaucaggaagcacauauccagugcagaacgugaccaugccaaacaaugacaauucugacaaacuauacauuugggggguucaccacccgagcacggacaaagaacaaaccgaucuauauguucaagcaucagggaaagucacagucuccaccaagagaagccagcaaacuauaaucccgaaugucgggucuagacccuggguaaggggucugucuaguagaauaagcaucuauuggacaauaguuaaaccgggagacauacugguaauuaauaguaaugggaaccuaauugcuccucgggguuacuucaaaaugcgcacugggaaaagcucaauaaugaggucagaugcaccuauuggcaccugcagcucugaaugcaucacuccaaauggaagcauucccaaugacaagcccuuucaaaacguaaacaagaucacauauggggcaugucccaaguauguuaagcaaaacacucugaaguuggcaacagggaugcggaauguaccagagaaacagacuagaggcauauucggcgcaauagcagguuucauagaaaaugguugggagggaaugauagacgguugguacgguuucaggcaucaaaauucugagggcacaggacaagcagcagaucuuaaaagcacucaagcagccaucgaccaaaucaaugggaaacugaauaggguaaucgagaagacgaacgagaaauuccaucaaaucgaaaaggaauucucagaaguagaagggagaauucaggaccucgagaaauacguugaagacacuaaaauagaucucuggucuuacaaugcagagcuucuugucgcucuggagaaccaacauacaauugaucugacugacucggaaaugaacaaacuguuugaaaaaacaaggaggcaacugagggaaaaugcugaggacaugggcaaugguugcuucaaaauauaccacaaaugugacaaugcuugcauagggucaaucagaaaugggacuuaugaccaugauguauacagagacgaagcauuaaacaaccgguuucagaucaaagguguugaacugaagucaggauacaaagacuggauccuguggauuuccuuugccauaucaugcuuuuugcuuuguguuguuuugcugggguucaucaugugggccugccagaaaggcaacauuaggugcaacauuugcauuuga
